United States Patent Application Publication US 2005/0108791 A1 - sequence listing, part 3

SEQ ID NO: 8439 - protein, 604 aa, Dictyostelium discoideum
MIKRDIFSEEEEQIYQDLWKTAKTKFNNLFQSGSLLKNYAHVLEMLLRLRQVCDHPYLVQKKQDNNNDDAADNNDNNSLDSDNDDKNKIQNNLNHESDWSTFLDFINSKPNHYNQFELGKCLKKILGKGIKDQECTICMETLENPSITTCGHFFCTLCIQKNLIADTKLVPTINNTNNNNNNNNTNNNNANNNNNNNNNNNNNNNNNNNNNNNNNNNLSPTGTSPTQSTTSPTFSIPSLPIPNKTNLLSSSGGAMLISPSRSQSESPRYKTNHLNQSSNCVSNTPTPLQSPHSTPHSTPPMSPRIIKPSSTNLVSLSPKSSYENVPISKILNSSGGAQNLNTIINNLNTDQEKIFLCPICKQSIKQSTIKPISFKSSSNNNINNNNNNNNNNNNNNNNNNNNNNNNNNNNNNNNNNNNNLIKKKNIFNSNNWKSSTKIDSLLDELNKVFKNEPDSKCLIFSQWTSMLDLLEYPLNLNQFQFVRLDGKIPQKQREVAIKRFKEEPNVKIFLISIKAGGLGLNLVAASHVFLMDPWWNPSTEEQAIDRVYRIGQNKNVNVIRFLIKDSIEERILNLQKSKKDLAKEALNTMKKQTRIEELKMLFDD

SEQ ID NO: 8440 - protein, 344 aa, Dictyostelium discoideum
ILQVDGSTPAQNRNDYVNDFQNDPNCRVAVLSITAAGTGLTLTAATCVIFAELSWTPGVLFQAEDRAHRYGQTSSVLVQYLIALGTVDEMIWSLVESKKTLLGRVLDDEDGQSLNAEDAGQLEHGEQSVDDFIDSLIKKVEEQDQIRKKKYDDKQRRKEEKLLKLQLKNGSGGGGGEEDDNSDLDNSDDDEDDEYDNDDEDGIDEDDISDAIYDGSNFEDEMMSSKNKPKTSKKPAALKSSKAAASTVASSKSTTVKKTKDKDTTNPTKPSPSKVTKKKATTTTTTTTTTSSPKTTPNKPPKKNQIPVDFDEEFEDLCYVDLDQFKTSNQQSDGLDDFLFQPKD

SEQ ID NO: 8441 - protein, 882 aa, Hordeum vulgare
MAATAYERRLLAAADLVLSADGKSQLPRLSSADLGVTADLKPHQLDGVHWLIRRYHLGVNVLLGDEMGLGKTLQAISLLSYLKIKSIAPRPFLVLCPLSVTDGWLSEFGKFCPTLKVIQYVGDTAHRRHIRRTMHDDVQKSSHSNDLPFDVMLTSYDIALMDQDFLSQIPWLYVVIDEAQRLKNPSSVLYNVLEERFMMPRRLLLTGTPVQNNLSELWALMHFCMPSVFGPLDEFLSTFKEAGNLLSGSEANQANRQFKILKHILRAFMLRRTKALLIESGILELPPLTELTVMVPLAPLQKKIYLSVLRKELQTLLSFTGGSSRHQSLQNIVVQLRKACSHPYLFSGIEPEPYEEGEHLVQASGKLIVLDLVLEKLHRLGHRVVLFAQMTQTLDILQDFLELRNYTYERLDGSVRAEERFAAIRNFSSQATKGVVRDDNNPSGAFVFMISTRAGGVGLNLIGADTVIFYEQDWNPQADKQALQRTHRIGQLNHVLSINLVSQRTIEEVIMRRAERKLKLSHNIFGDKDATDGKGKDFGNEANDMRSIILGLHQFDPADTAAETINEETLAKLKSMSENVIKMRTHEPAEKDDRAFEINPDLTDGSGAMITRACDSISIDPGVDEAAYLSWVERFKEASHSIEDVPVELERQRPAPEDKLLKREANKKKAEEKRLARWKDLGYQTLGVKVPDNIPNQNISDSGSVQLVYGDCTDPSKVCAAKPAIIFSCVDNSGTWGHGGMFDALTSLSTYIPDAYHRASEVDDLHMGDLHLIELDEADCSRSLDAPLWVALAVVQSYNPKRKIPRSEISMSDLELCLSKAASSAAQRSASIHMPRIGQRSGSQRSEWYTIERLLRKYASLHGIDIFVYYFRRPSRQQPDSD

SEQ ID NO: 8442 - protein, 1122 aa, Oryza sativa
MAKPVKYDEEEEEVSSSGEEEEEQSDGAGSGSGEEEDEEEEEAPAAAAGEAAGGEEEEVDEEEIEAVTTGAGADEEEEESGAAAAAPGEGDEESQSTEDDEAVVGEDDDADEAEGGAVVGKREKARLKEMQKLKKQKIQEILDTQNAAVDADMNNKGKGRLKYLLQQTEIFAHFAKGNQSKEKKPRGRGRHASKMTEEEEDEEYLKEEEDALAGSGGTRLLSQPSCIKGKMRDYQLAGLNWLIRLYENGINGILADEMGLGKTLQTISLLGYLHEFRGITGPHMVVAPKSTLGNWIKEIQRFCPILRAVKFLGNPEERNHIRENLLQPGKFDVCVTSFEMAIKEKTTLKRFSWRYIIIDEAHRIKNENSLLSKTMRIYNTNYRLLITGTPLQNNLHELWSLLNFLLPEIFSSAETFDEWFQISGENDQQEVVQQLHKVLRPFLLRRLKSDVEKGLPPKKETILKVGMSQMQKQYYRALLQKDLEVINAGGERKRLLNIAMQLRKCCNHPYLFQGAEPGPPYTTGEHLVENAGKMVLLDKLLPKLKDRDSRVLIFSQMTRLLDILEDYLMYRGYQYCRIDGNTGGEDRDASIEAFNKPGSEKFVFLLSTRAGGLGINLATADVVVLYDSDWNPQADLQAQDRAHRIGQKKEVQVFRFCTEYTIEEKVIERAYKKLALDALVIQQGRLAEQKTVNKDDLLQMVRFGAEMVFSSKDSTITDEDIDRIIAKGEETTAELDAKMKKFTEDAIKFKMDDTAELYDFDDDKFGSLLNSIYILDFLKEENKLDFKKLVSDNWIEPPRRERKRNYSESEYFKQALRQGAPAKPREPRIPRMPHLHDFQFFNNQRLNELYEKEVRYLMQANQKKDTIDGEDEDQLEPLTAEEQEEKEQLLEEGFATWTRRDFNTFIRACEKYGRNDIRSIAAEMEGKTEEEVQRYAKVFKERYKELSDYDRIIKNIERGEARISRKDEIMRAIGKKLDRYKNPWLELKIQYGQNKGKFYNEECDRFMLCMVHKLGYGNWDELKAAFRMSPLFRFDWFVKSRTTQELARRCDTLIRLVEKENQEYDEQERQARKDKRMAKNMTPTKRSALRVSEGETTPSNSFKRRRQSLMDDYVGSGRRKRG

SEQ ID NO: 8443 - protein, 972 aa, Oryza sativa
MAKPVKYDEEEEEVSSSGEEEEEQSDGAGSGSGEEEDEEEEEAPAAAAGEAAGGEEEEVDEEEIEAAVVGKREKARLKEMQKLKKQKIQEILDTQNAAVDADMNNKGKGRLKYLLQQTEIFAHFAKGNQSKEKKPRGRGRHASKMTEEEEDEEYLKEEEDALAGSGGTRLLSQPSCIKGKMRDYQLAGLNWLIRLYENGINGILADEMGLGKTLQTISLLGYLHEFRGITGPHMVVAPKSTLGNWIKEIQRFCPILRAVKFLGNPEERNHIRENLLQPGKFDVCVTSFEMAIKEKTTLKRFSWRYIIIDEAHRIKNENSLLSKTMRIYNTNYRLLITGTPLQNNLHELWSLLNFLLPEIFSSAETFDEWFQISGENDQQEVVQQLHKVLRPFLLRRLKSDVEKGLPPKKETILKVGMSQMQKQYYRALLQKDLEVINAGGERKRLLNIAMQLRKCCNHPYLFQGAEPGPPYTTGEHLVENAGKMVLLDKLLPKLKDRDSRVLIFSQMTRLLDILEDYLMYRGYQYCRIDGNTGGEDRDASIEAFNKPGSEKFVFLLSTRAGGLGINLATADVVVLYDSDWNPQADLQAQDRAHRIGQKKEVQVFRFCTEYTIEEKVIERAYKKLALDALVIQQGRLAEQKTVNKDDLLQMVRFGAEMVFSSKDSTITDEDIDRIIAKGEETTAELDAKMKKFTEDAIKFKMDDTAELYDFDDDKKEENKLDFKKLVSDNWIEPPRRERKRNYSESEYFKQALRQGAPAKPREPRIPRMPHLHDFQFFNNQRLNELYEKEVRYLMVISQANQKKDTIDGEDEDQLEPLTAEEQEEKEQLLEEGFATWTRRDFNTFIRACEKYGRNDIRSIAAEMEGKTEEEVQRYAKVFKERYKELSDYDRIIKNIERGEARISRKDEIMRAIGKKLDRYKNPWLELKIQYGQNKGKFYNEECDRFMLCMVHVCSIIPSRFLHTFVFKRDMSN

SEQ ID NO: 8444 - protein, 1122 aa, Oryza sativa; identical to SEQ ID NO: 8442

SEQ ID NO: 8445 - protein, 1016 aa, Oryza sativa
  unsure (1)..(1016): unsure at all Xaa locations
QEEQGEEEEGFSGDEEEQEVEEEEEVDEEEIEAVTTGAGGDDDDEEVGDDGGAEEESQSTEDDELXXLEDATGNAEIGKRERAKLREMQKLKKHKIQEILDAQNKAIDADMMTEEEEDEEYLKEEEDALDGAGGTRLVSQPSCIKGKMRDYQLAGLNWLIRLYENGINGILADEMGLGKTLQTISLLGYLHEFRGITGPHMVVAPKSTLGNWMKEIQRFCPVLRAIKFLGNPEERNHIRENLLVPGKFDVCVTSFEMAIKEKTALKRFSWRYIIIDEAHRIKNENSLLSKTMRIYNTNYRLLITGTPLQNNLHELWSLLNFLLPEIFSSAETFDDWFQISGENDQHEVVQQLHKVLRPFLLRRLKSDVEKGLPPKKETILKVGMSEMQKQYYRALLQKDLEVVNAGGERKRLLNIAMQLRKCCNHPYLFQGAEPGPPYTTGDHLIENAGKMVLLDKLLPKLKERDSRVLIFSQMTRLLDILEDYLMYKGYQYCRIDGNTGGEDRDASIEAFNKPGSEKFVFLLSTRAGGLGINLATADVVILYDSDWNPQVDLQAQDRAHRIGQKKEVQVFRFCTEYTIEEKVIERAYKKLALDALVIQQGRLAEQKAVNKDELLQMVRFGAEMVFSSKDSTITXXXXXXXXXKGEEATAQLDAKMKKFTEDAIKFKMDDTAELYDFDDDKKDENKLDFKKLVTDNWIEPTSRRERKRNYSESDYFKQALRQGAPAKPREPRIPRMPHLHDFQFFNTQRLNELYEKEVKYLVLNQQANQKKDTVGEGDDEGMEPLTVEEQEEKEQLLEEGFSTWTRRDFNTFIRACEKYGRNDIKNISSEMEGKTEEEVQRYAKVFQERYKELNDYDRVIKNIEKGEARIYRKDEIMKAIGKKLDRYKNPWLELKIQYGQNKGKLYNEECDRFMLCMVHKLGYGNWDELKAAFRMSPLFRFDWFVKSRTTQELARRCETLIRLVEKENQEYDERERLARKDKKVVQNMSPAKRSSSRSLDTPPQSSSKRRRQSYTE

SEQ ID NO: 8446 - protein, 1137 aa, Oryza sativa
MGKPGKYGDGDDDDSEEEQLSPSSSAGEEEEEEVEEEEGEEQQEEQGEEEEGFSGDEEEQEVEGEADGEQVEEEEEEESSVGEEEAEAEGEEEEEEVEEEQGAGEEEEEEVDEEEIEAVTTGAGGDDDDEEVGDDGGAEEESQSTEDDEVAAGKDGGGEDGDKLEDATGNAEIGKRERAKLREMQKLKKHKIQEILDAQNKAIDADMMTEEEEDEEYLKEEEDALDGAGGTRLVSQPSCIKGKMRDYQLAGLNWLIRLYENGINGILADEMGLGKTLQTISLLGYLHEFRGITGPHMVVAPKSTLGNWMKEIQRFCPVLRAIKFLGNPEERNHIRENLLVPGKFDVCVTSFEMAIKEKTALKRFSWRYIIIDEAHRIKNENSLLSKTMRIYNTNYRLLITGTPLQNNLHELWSLLNFLLPEIFSSAETFDDWFQISGENDQHEVVQQLHKVLRPFLLRRLKSDVEKGLPPKKETILKVGMSEMQKQYYRALLQKDLEVVNAGGERKRLLNIAMQLRKCCNHPYLFQGAEPGPPYTTGDHLIENAGKMVLLDKLLPKLKERDSRVLIFSQMTRLLDILEDYLMYKGYQYCRIDGNTGGEDRDASIEAFNKPGSEKFVFLLSTRAGGLGINLATADVVILYDSDWNPQVDLQAQDRAHRIGQKKEVQVFRFCTEYTIEEKVIERAYKKLALDALVIQQGRLAEQKAVNKDELLQMVRFGAEMVFSSKDSTITDEDIDRIIAKGEEATAQLDAKMKKFTEDAIKFKMDDTAELYDFDDDKMCCHIWSDFVIIECTLFFLKDENKLDFKKLVTDNWIEPTSRRERKRNYSESDYFKQALRQGAPAKPREPRIPRMPHLHDFQFFNTQRLNELYEKEVKYLVQANQKKDTVGEGDDEDQLEPLTVEEQEEKEQLLEEGFSTWTRRDFNTFIRACEKYGRNDIKNISSEMEGKTEEEVQRYAKVFQERYKELNDYDRVIKNIEKGEARIYRKDEIMKAIGKKLDRYKNPWLELKIQYGQNKGKLYNEECDRFMLCMVHKLGYGNWDELKAAFRMSPLFRFDWFVKSRTTQELARRCETLIRLVEKENQEYDERERLARKDKKNMSPAKRSSSRSLDTPPQSSSKRRRQSYTEANAGSGRRRRG

SEQ ID NO: 8447 - protein, 1137 aa, Oryza sativa; identical to SEQ ID NO: 8446

SEQ ID NO: 8448 - protein, 1197 aa, Oryza sativa
MEGIRRCDDNKKRRRNASYGSVHLSIMLREYGDNGTCHELKLSYWRKEEGRCQATVEISADLSSFHAAPARAATRRNRFNIRSPQSPNSATPIQFNSPPPIRLSQISRNPSRHRRRRRLERGVMGKPGKYGDGDDDDSEEEQLSPSSSAGEEEEEEVEEEEGEEQQEEQGEEEEGFSGDEEEQEVEGEADGEQVEEEEEEESSVGEEEAEAEGEEEEEEVEEEQGAGEEEEEEVDEEEIEAVTTGAGGDDDDEEVGDDGGAEEESQSTEDDEVAAGKDGGGEDGDKLEDATGNAEIGKRERAKLREMQKLKKHKIQEILDAQNKAIDADMMTEEEEDEEYLKEEEDALDGAGGTRLVSQPSCIKGKMRDYQLAGLNWLIRLYENGINGILADEMGLGKTLQTISLLGYLHEFRGITGPHMVVAPKSTLGNWMKEIQRFCPVLRAIKFLGNPEERNHIRENLLVPGKFDVCVTSFEMAIKEKTALKRFSWRYIIIDEAHRIKNENSLLSKTMRIYNTNYRLLITGTPLQNNLHELWSLLNFLLPEIFSSAETFDDWFQISGENDQHEVVQQLHKVLRPFLLRRLKSDVEKGLPPKKETILKVGMSEMQKQYYRALLQKDLEVVNAGGERKRLLNIAMQLRKCCNHPYLFQGAEPGPPYTTGDHLIENAGKMVLLDKLLPKLKERDSRVLIFSQMTRLLDILEDYLMYKGYQYCRIDGNTGGEDRDASIEAFNKPGSEKFVFLLSTRAGGLGINLATADVVILYDSDWNPQVDLQAQDRAHRIGQKKEVQVFRFCTEYTIEEKVIERAYKKLALDALVIQQGRLAEQKAAELYDFDDDKMCCHIWSDFVIIECTLFFLKDENKLDFKKLVTDNWIEPTSRRERKRNYSESDYFKQALRQGAPAKPREPRIPRMPHLHDFQFFNTQRLNELYEKEVKYLVQANQKKDTVGEGDDEDQLEPLTVEEQEEKEQLLEEGFSTWTRRDFNTFIRACEKYGRNDIKNISSEMEGKTEEEVQRYAKVFQERYKELNDYDRVIKNIEKGEARIYRKDEIMKAIGKKLDRYKNPWLELKIQYGQNKGKLYNEECDRFMLCMVHKLGYGNWDELKAAFRMSPLFRFDWFVKSRTTQELARRCETLIRLVEKENQEYDERERLARKDKKNMSPAKRSSSRSLDTPPQSSSKRRRQSYTEANAGSGRRRRG

SEQ ID NO: 8449 - protein, 714 aa, Oryza sativa
  unsure (1)..(714): unsure at all Xaa locations
TPTMSEVRSVPGMKVEASPAAAAAATVDSPTSVLEDEEKADDFVDAVPSLPIDLEAKNGDASLITDAMKEEEEKLHDARVKAEEEEVARKREEAARLAFDPTRFNKLDELLSQTQLYSEFLLEKMETIADVCIHAEEEPVEEKKNGRGRKRKATSAPNQKKAKKAVAVMLTRSHEDCSPEDCTLTEEERWEKEQARLVPLMTGGKLKSYQIKGVKWLISLWQNGLNGILADQMGLGKTIQTIGFLAHLKGKGLDGPYLIIAPLSTLSNWVNEISRFVPSMTGLIYHGDKAARAEIRRKFMPKTTGPDFPLIVTSYEMAMSDAKHLAHYKWKYVIVDEGHRLKNSKCLLLRELKRLPMDNKLLLTGTPLQNNLAELWSLLNFILPDIFSSHXEFESWFDFSAKGGEEDQEDSEEKRKVDVVSKLHAILRPFFLRRMKEDVEHMLPRKKEIIIYANMTDHQKQIQNHLVEQTFDQYLHEKFLRKPGIKAKLNNLLIQLRKNCNHPDLLESAYDSSGLYPPVEKLLEQCGKFQLLNRLLSLLLARKHKVLIFSQWTKVLDIIEYYLETKGLQVCRIDGSVKLEERRRQIAEFNDLNSSMNIFILSTRAGGLGINLTSADTCILYDSDWNPQMDLQAMDRCHRIGQTRPVHVYRLATSHSVEGRIIKKAFGKLRLEHVVIGKGQFEQDRAKPNALDVSLDYFCTLKECRHHENPLXXT

SEQ ID NO: 8450 - protein, 1187 aa, Oryza sativa; identical to SEQ ID NO: 8427

SEQ ID NO: 8451 - protein, 2034 aa, Oryza sativa
  unsure (1)..(2034): unsure at all Xaa locations
AMAQSSSRLHRLLTLLDTGSTQATRFAAARQIGEIAKSHPQELNVLLKKVSPYLRSKNWDTRVAAAHAIGAIAENVKHTSVKDLFASAEAEKHASGLSGIGDVGSTLRHADTTATSELAFGSFDINRVLEFGSPLLASGGQEYDIANDNGKNPAERLARQKQNLRRRLGLDVCEQFMDFNDVIKDEDLLAQKNYWGANMQNNGFYSFNTGQNIQHLVASMVPRYPKHSNFRSRRLSARELNMLKRKAKSNAKDHTKAVPEDDDVVPKSSGPSNGASSDQVGSHNTCSVNCTNEDNLEYSENGRWPFQQFVDQLIHDMFDPIWEVRHGTIMALREILTHQGACAGVYFPDLNSPSDLDDKNNLDSLKRAHGIDLNEDIDSGQLEPVLKRQKKEESNPEVMDIQLDKEPSNGDYSXXTEASLSTEPTVSSGEPNLAHAKVESPFQVDGSANPSKVDPYXVHHLTKHSTPCPNXVLPISXENSKFIKLMKLANYSAVKNWEFLQDCAIRFLCVLSLDRFGDYVSDQVVAPVRETCAQALGAVLKYMHPTLVCHTLNILLQMQRRQEWEVRHGSLLGIKYLVAVRQEMLKDLLNYVLHACKAGLEDPDDDVRAVAAEALIPAAASLVRLNDQMLHSIVMLLWDILLDLDDLSPSTSSVMNLLAEIYSQPEMVPKMLGTTAIGGDNEFDLNSVTLVAGEEKMGSNDNPYVLAALTPRLWPFMRHSITSVRRSAVRTLERLLEVGNTRNXXAKLWLASILGDALQVVFQNLLLESNDEIIRSSERAWKLLLQCPTEDLESAASSYFSNWVQLATTPYGTALDSAKMFLPVALPRGSRSRAAAKIKSARLEHENTRMISFGSTGENTSQEKHSEASLSVSKIIVGSDSDKSVTHTRVLTSMALGLFASKLPEGSWQVVLGPLASDLMSLSGVQRQVASMVIVSWFKDLRKSDPAAVGTLLAFLSSLKGWMLDLLACSDPSFPTKDSPLPYAELARTYRKMRNEANNLFQSIESCALLKEYTSNLNFEADMLSVDDAINFTSKLLLPSEPDFSLDSDKIVLNNIESAKQGLLSTSGYLKCVQNNLHVTVSSLVASAVVWMAGLPSKLNPVILPLMAAVKREQEEILQDKAADALAELIFSCVGRKPGPNDKLTKNLCTLTCTDASETPQAAVINSIQVIEDQNLLSIGKRFSNHKSRGQMTSGGXXSKSEGFISRRGSELAFKHLCEKFGASLFEKLPKLWDCLTEFLKPETGDDLMKEDPSIAHCSSSQVVRSVTPHLAEPLRPQLLSLLPCILGCVRHPHVAVRLAAARCITSMAKSLTANVMVIVIENVIPMLSDSSSVCARQGAGMLLSLLVQGLAVELVPYAPFLVVPLLRCMSDPDGSVRQTVTHSFAALVPLLPLAKGSLLPDGLSERLSSSAEDAQFLEQLLDNSQIDDYKLSIDLSVELRRYQQEGINWLAFLRRFKLHGILCDDMGLGKTLQASAIVAADIAESRARNDEQDPKSLIICPSTLVAHWEYEIEKYIDSSIMKPLQYIGSSQDRIILRSQFDKFNVIITSYDIIRKDIDFLENVFWNYCVLDEGHIIKNSRSKITSAVKQLKAQHRLILSGTPIQNNVLELWSLFDFLMPGFLGTEKQFQATYGKPLLAAKDPKCSAKDAEAGILAMEALHKQVMPFLLRRTKDEVLSDLPEKIIQDRYCNLSLLQLKLYDKFSNSNAKQEISTIVKENELDQSTSQPKATRHVFQALQYLLKLCSHPLLVTGESPPDYLVDLLKEIGMGTGDELHDLHHSPKLVALQEILQECGIGSEISSPDASAAIGQHRVLIFAQHKALLDIIEKDLFQSHMRSVTYLRLDGSVEPEKRFEIVKAFNSDPTIDVLLLTTHVGGLGLNLTSADTLVFMEHDWNPMKDLQVKQTNNTPLLQAMDRAHRLGQRKVVNVHRLIMRGTLEEKVMSLQRFKVSVANAVINAENASLKTMNTDQLLDLFASTPASRKSGGDQSKDSKGXXSGGKGLKSILNGLDELWDQSQYADEYDLNQFLAKLNG

SEQ ID NO: 8452 - protein, 2146 aa, Oryza sativa
  unsure (1)..(2146): unsure at all Xaa locations
MTSKMKKFIKAHARFLKAQEEVKSVHQLELCRSQARFERLGDLLASDILKRGANEEGSSVNEDLNERSPNTAATKKRSIPYSTSEEAKAVKKRRERDSDTMTRSDKYRSDVTDFDKTSKGTEATKSLYLKKKLWEDEKSKYFVNLQVKGSPVRHVLPSTGMAAHAIDDLNEAIELEDTGSTQATRFAAARQIGEIAKSHPQELNVLLKKVSPYLRSKNWDTRVAAAHAIGAIAENVKHTSVKDLFASAEAEKHASGLSGIGDVGSTLRHADTTATSELAFGSFDINRVLEFGSPLLASGGQEYDIANDNGKNPAERLARQKQNLRRRLGLDVCEQFMDFNDVIKDEDLLAQKNYWGANMQNNGFYSFNTGQNIQHLVASMVPRRLSARELNMLKRKAKSNAKDHTKAVPEDDDVVPKSSGXXSNGASSDQDTVDAITDEDNLEYSENGRWPFQQFVDQLIHDMFDPIWEVRHGTIMALREILTHQGACAGVYFPDLNSPSDLDDKNNLDSLKRAHGIDLNEDIDSGQLEPVLKRQKKEESNPEVMDIQLDKEPSNGDYSXXTEASLSTEPTVSSGEPNLAHAKVESPFQVDGSANPSKVDPYXVHHLTKHSTPCPNXVLPISXENSKFIKLMKLANYSAVKNWEFLQDCAIRFLCVLSLDRFGDYVSDQVVAPVRETCAQALGAVLKYMHPTLVCHTLNILLQMQRRQEWEVRHGSLLGIKYLVAVRQEMLKDLLNYVLHACKAGLEDPDDDVRAVAAEALIPAAASLVRLNDQMLHSIVMLLWDILLDLDDLSPSTSSVMNLLAEIYSQPEMVPKMLGTTAIGGDNEFDLNSVTLVAGEEKMGSNDNPYVLAALTPRLWPFMRHSITSVRRSAVRTLERLLEVGNTRNXXAKLWLASILGDALQVVFQNLLLESNDEIIRSSERAWKLLLQVTDVLAFRCPTEDLESAASSYFSNWVQLATTPYGTALDSAKMFLPVALPRGSRSRAAAKIKSARLEHENTRMISFGSTGENTSQEKHSEASLSVSKIIVGSDSDKSVTHTRVLTSMALGLFASKLPEGSWQVVLGPLASDLMSLSGVQRQVASMVIVSWFKDLRKSDPAAVGTLLAFLSSLKGWMLDLLACSDPSFPTKDSPLPYAELARTYRKMRNEANNLFQSIESCALLKEYTSNLNFEADMLSVDDAINFTSKLLLPSEPDFSLDSDKIVLNNIESAKQGLLSTSGYLKCVQNNLHVTVSSLVASAVVWMAGLPSKLNPVILPLMAAVKREQEEILQDKAADALAELIFSCVGRKPGPNDKLTKNLCTLTCTDASETPQAAVINSIQVIEDQNLLSIGKRFSNHKSRGQMTSGGXXSKSEGFISRRGSELAFKHLCEKFGASLFEKLPKLWDCLTEFLKPETGDDLMKEDPSIAHINNIQVVRSVTPHLAEPLRPQLLSLLPCILGCVRHPHVAVRLAAARCITSMAKSLTANVMVIVIENVIPMLSDSSSVCARQGAGMLLSLLVQGLAVELVPYAPFLVVPLLRCMSDPDGSVRQTVTHSFAALVPLLPLAKGSLLPDGLSERLSSSAEDAQFLEQLLDNSQIDDYKLSIDLSVELRRYQQEGINWLAFLRRFKLHGILCDDMGLGKTLQASAIVAADIAESRARNDEQDPKSLIICPSTLVAHWEYEIEKYIDSSIMKPLQYIGSSQDRIILRSQFDKFNVIITSYDIIRKDIDFLENVFWNYCVLDEGHIIKNSRSKITSAVKQLKAQHRLILSGTPIQNNVLELWSLFDFLMPGFLGTEKQVMPFLLRRTKDEVLSDLPEKIIQDRYCNLSLLQLKLYDKFSNSNAKQEISTIVKENELDQSTSQPKATRHVFQALQYLLKLCSHPLLVTGESPPDYLVDLLKEIGMGTGDELHDLHHSPKLVALQEILQECGIGSEISSPDASAAIGQHRVLIFAQHKALLDIIEKDLFQSHMRSVTYLRLDGSVEPEKRFEIVKAFNSDPTIDVLLLTTHVGGLGLNLTSADTLVFMEHDWNPMKDXXQAMDRAHRLGQRKVVNVHRLIMRGTLEEKVMSLQRFKVSVANAVINAENASLKTMNTDQLLDLFASTPASRKASGSSGGDQSKDSKGKSGGKGLKSILNGLDELWDQSQYADEYDLNQFLAKLNG

SEQ ID NO: 8453 - protein, 664 aa, Oryza sativa
  unsure (1)..(664): unsure at all Xaa locations
XYEFLVKWVGKSNIHNSWISESELKALAKRKLENYKAKYGTGLINICKEQWCQPQRVIALRTSLDEIEEALIKWCALPYDECTWERLDEPTMVKYAHLVTQFKKFESQALDKDKGGSHAKPREHQEFNMLVEQPKELQGGMLFPHQLEALNWLRKCWYKSKNVILADEMGLGKTVSACAFLSSLCCEYKINLPCLVLVPLSTMPNWMAEFASWAPHLNVVEYHGSARARSIIRQYEWHEGDASQMGKIKKSHKFNVLLTTYEMVLVDAAYLRSVSWEVLIVDEGHRLKNSSSKLFSLLNTLSFQHRVLLTGTPLQNNIGEMYNLXNFLQXSSFPSLASFEEKFNDLTTTEKVEELKNLVAPHMLRRLKKDAMQNIPPKTERMVPVELTSIQAEYYRAMLTKNYQVLRNIGKGGAHQSLLNIVMQLRKVCNHPYLIPGTEPESGSPEFLHEMRIKASAKLTLLHSMLKILHKDGHRVLIFSQMTKLLDILEDYLTWEFGPKTFERVDGSVSVAERQAAIARFNQDKSRFVFLLSTRSCGLGINLATADTVIIYDSDFNPHADIQAMNRAHRIGQSNRLLVYRLVVRASVEERILHLAKKKLMLDQLFVNKSESQKEVEDIIRWGTEELFRKAMLQXXKDNNEASGAKNDVAEVSLSIKKNGXIGX

SEQ ID NO: 8454 - protein, 816 aa, Oryza sativa
  unsure (1)..(816): unsure at all Xaa locations
NAVHITEKEHGGAGDKITXXQGDLQVDRILGCRLQTSQIISPAHASSEQIDMAPPSASGAPEPKIQSSNSDTNVTEDACADELANDGGENNLDCSDAQKESNVRSHGHKESLNAKEIMNTASACSADQIVTVKDAGAVQTYVTASVNGEYVSKADTEVHTKQEHTPDSKLHGKIQETELKEHDGTTYEFLVKWVGKSNIHNSWISESELKALAKRKLENYKAKYGTGLINICKEQWCQPQRVIALRTSLDEIEEALIKWCALPYDECTWERLDEPTMVKYAHLVTQFKKFESQALDKDKGGSHAKPREHQEFNMLVEQPKELQGGMLFPHQLEALNWLRKCWYKSKNVILADEMGLGKTVSACAFLSSLCCEYKINLPCLVLVPLSTMPNWMAEFASWAPHLNVVEYHGSARARSIIRQYEWHEGDASQMGKIKKSHKFNVLLTTYEMVLVDAAYLRSVSWEVLIVDEGHRLKNSSSKLFSLLNTLSFQHRVLLTGTPLQNNIASFEEKFNDLTTTEKVEELKNLVAPHMLRRLKKDAMQNIPPKTERMVPVELTSIQAEYYRAMLTKNYQVLRNIGKGGAHQSLLNIVMQLRKVCNHPYLIPGTEPESGSPEFLHEMRIKASAKLTLLHSMLKILHKDGHRVLIFSQMTKLLDILEDYLTWEFGPKTFERVDGSVSVAERQAAIARFNQDKSRFVFLLSTRSCGLGINLATADTVIIYDSDFNPHADIQAMNRAHRIGQSNRLLVYRLVVRASVEERILHLAKKKLMLDQLFVNKSESQKEVEDIIRWGTEELFXESDVAVKDNNEASGAKNDVX

SEQ ID NO: 8455 - protein, 673 aa, Oryza sativa
  unsure (1)..(673): unsure at all Xaa locations
MAYNLPGRIFNMLYPHQREGLRWLWVLHCRGTGGILGDDMGLGKTMQVSAFLAGLFHSRLIKRVLVVAPKTLLTHWTKELSVVSLKDKIRDYSGPNANARNYELKYAFKEGGILLTTYDIVRNNFKMIKGNFTNDFDDEEETLWNYVILDEGHIIKNPKTQRAQSLFEIPCAHRIVISGTPIQNNLKEMWALFYFCCPEVLGDKEQFKARYEHAIIQGNDKNATNRQKHIGSNVAKELRERIKPYFLRRMKNEVFLDSGTGEDKKLAKKNELIIWLKLTSCQRQLYEAFLNSELVHSSMQGSPLAAITEAIILEGYKFLRIDGTTKISERERIVKDFQEGPGAPIFLLTTQVGGLGLTLTKAARVIVVDPAWNPSTDNQSVDRAYRIGQMKDVIVYRLMTSGTIEEKIYKLQVFKGALFRTATEHKEQTRYFSKRDIQELFSLPEQGFDVSLTQKQLQEEHGQQLVMDDSLRKHIQFLEQQGIAGVSHHSLLFSKTAILPTLNDNDGLDSSRRAMPMAKHYYKGASSDYVANGAAYAMKPKEFXXARTYSPNSTSTESPEEIKAKINRLSQTLANTVLVAKLPDRGDKIRRQINELDEKLTVIDHLEKIRMQIDDLHEEHMAKFDEMLERIKRMELADEGELIAKFGEMVERMRQRCDMDRLSLPLLSSTLVA

SEQ ID NO: 8456 - protein, 882 aa, Oryza sativa
  unsure (1)..(882): unsure at all Xaa locations
AMSLHSLKETLQSSSFSQPQSESQPRSPPPLLARRPPKTSLSQQLLRLDASSSSSSFSVSPPPPPRTSPTSDAAADDAPPLPEEEDEVPCIRPRAXXPSASXASLDSRGPYEPLALSPPGERPVVHKIYAAASLLATTVPSSINCRLLVHQRDGVRFLYNLYRNNHGGVLGDDMGLGKTIQTIAFLSAVIGKDNDHGDQLVEGRKIAPILILCPTSVIRNWENEFAEWARCSVAVYHGPNRDLVLQKVETQRLEIVITSFDTFRIHGKILCGISWDLVVVDEAHRLKNEKSKLYTACLEITTRKRFGLTGTIMQNKIMELFNLFDWIVPGCLGDREHFRVYYDEPLKHGQRFSAPERFVQVADKRKKHLVSVLSKFLLRRTKEETIGHLMLGKEDNIVFCRMSDVQKRVYRRMLQQPDVQILINKDLPCSCGSPLTQVECCKRTEPHGIIWSYLHRDNPEGCSLCPFCLVLPCLGKLQQISNHLELIKPNLKDEIEKQKKDAELAAAVFDTDIELVGGGAKSENFMGLSDAEHCGKMRALERLLSLWTLQGDKILLFSYSVRMLDILEKFLIRKGYCFSRFDGTTPMNARQLLIDEFNRCPSKQVFLISTRAGNLGVNLVSANRVVIFDPSWNPAQDLQAQDRSFRFGQRRHVTVFRLLGAGSLEELIYSRQIYKQQLSNIAVSGKIEKRYFEGVQDDKKFQGELFGICNLFRDLSDKLFTSEIIEMHGEHGKDTAETIGIREIVDTNIFGTQDQMKSSMPAIHNENKNLYHCGIVYAHRNEDVVNTRTNEASNCAEDKTVPRHLEELQSKKNETMHTIKAKSYSLVQKKKEFSRIASFMGMNDLEFSKWLLSVSPLQRHEVLDRYRNAKXAIGSMDNASLI

SEQ ID NO: 8457 - protein, 969 aa, Oryza sativa
  unsure (1)..(969): unsure at all Xaa locations
MQSWRRRQRWCRRRAQGRSSSSASMCWRCPVVLIDAGKPLPSPAVSSSLSPHSSSSTLCALFSDKTDETLCTWRXDATMRPPKTSLSQQLLRLDASSSSSSFSVSPPPPPRTSPTSDAAADDAPPLPEEEDEVPCIRPRAXXPSASXASLDSRGPYEPLALSPPGERPVVXXVPSSINCRLLVHQRDGVRFLYNLYRNNHGGVLGDDMGLGKTIQTIAFLSAVIGKDNDHGDQLVEGRKIAPILILCPTSVIRNWENEFAEWARCSVAVYHGPNRDLVLQKVETQRLEIVITSFDTFRIHGKILCGISWDLVVVDEAHRLKNEKSKLYTACLEITTRKRFGLTGTIMQNKIMELFNLFDWIVPGCLGDREHFRVYYDEPLKHGQRFSAPERFVQVADKRKKHLVSVLSKFLLRRTKEETIGHLMLGKEDNIVFCRMSDVQKRVYRRMLQQPDVQILINKDLPCSCGSPLXXQISNHLELIKPNLKDEIEKQKKDAELAAAVFDTDIELVGGGAKSENFMGLSDAEHCGKMRALERLLSLWTLQGDKILLFSYSVRMLDILEKFLIRKGYCFSRFDGTTPMNARQLLIDEFNRCPSKQVFLISTRAGNLGVNLVSANRVVIFDPSWNPAQDLQAQDRSFRFGQRRHVTVFRLLGAGSLEELIYSRQIYKQQLSNIAVSGKIEKRYFEGVQDDKKFQGELFGICNLFRDLSDKLFTSEIIEMHGDNTAETIGIREIVDTNISQDQMKSSMTAIHXXENKNLYHCGIVYAHRNEDVVNTRTNEASNCAEDKTVPRHLEELQSKKNETMHTIKAKSYSLVQKKKEFSRIASFMGMNDLEFSKWLLSVSPLQRHEVLDRYRNAKHNIVADRQRHTKCLNLKSLIFYNEGTTYILIKRLRRFYLYHPFDLIIRLNIHARTSENKYINQIDSCNRRIQGYRMDVTIQLLGSKPTCHLSQRSVKASPRRSNPGQITY

SEQ ID NO: 8458 - protein, 1403 aa, Oryza sativa
  unsure (1)..(1403): unsure at all Xaa locations
LLXLNLPPXSDVKFLHELLMQPLLNFKVPLPEDLDRYRRSSPNGSMSSQGGSLSDQYNGINDASHGLHRKRKRNLDGASDDDEVDAYSNQITEEHYRTMLSEHVQKYRRSKFKEDVFSSDPPQVIVPQKHKNGSARVTKYRSDTRNVAMLGGVEATAEYNGTKSTNAYGGFNKVVASLDSSYLDMGDNVSYKIPEGYDKLALSLNLPVFSDIRVEETFLNGTLDLRTLAAMLSTDQKFETTNRGGLAEPQPQYESLQERVKVXXKFSLQVTEDPXXAIPEGAAGRIRRFIISESGSLHVHYVKVLEKGDTYEIIERSLPKKQIIRKDPSEIAREESEKTIKLWHAIAVKGIPRHHRNFMALLKKRQVDAKRFSENCQREVKFKVSRSLKLMRSAAIRTRRLARDMLIFWKRVDKEQYELRKREEKEAAEALKREEELREAKRQQQRLNFLLSQTELYSHFMQNKAGESAPSDEASVPEEDEEDPEEAELKREALRAAQHAVSQQKRMTNAFDSETGRLRQSSDSGIPTDDLASMEPNKIDLLHPSTMPEKSSVQTPELFKGALKEYQLKGLQWLVNCYEQGLNGILADEMGLGKTVQAMAFLAHLAEDKNIWGPFLVVAPASVVNNWAEEVIRFCPDLKILPYWGPERMVLRKNINPKRLYRRDASFHILITNYQILVNEEKLLRRVKWQYMVLDEAQAIKSSSSQRWKTLLSFNCRNRLLLTGTPIQNNMAELWALLHFIMPTLFDSHEQFNEWFSKGIEGHAEHGGALNEHQLSRLHAILKPFMLRRVKIDVIAEMTKKKEEIVPCRLSSRQQVFYQAIKNKISLNELLDGSRGNLNDKKLLSLMNIVMQLRKVCNHPELFERNEGSSYFYFADIPNSLLSPAFGELQDVHYAGKRNPIMFEIPKLVYKGIVSNMEXCLCXGCGFLYGSFNRMFNIFSPSYIHQSAFPEAISPNNTVLLSGAFGFTRLINLSPVEASFLATCSLFNRLAFSAVRWNKKYTDELVDVFLDSESTDLESTHNDLTTVRAVVRLLLSPTKAESSFLRTKIETGPSDSPYEALVLSHHERLVSNIRLLRSTYAFIPPARAPPINVWCADRNFAYKLTDEMHDPLAKKLVLGFARTSEFNGPREPTSPHSLIEELHTDLPFPEPMLQLPYRIFGSSPPMSNFDPAKMLTDSGKLQTLDILLRRLRAENHRVLLFAQMTKMLDILEDYMNFRKFKYFRLDGSSAISDRRDMVRDFQNRNDIFVFLLSTRAGGLGINLTAADTVIFYEIDWNPTQDQQAMDRTHRLGQTKEDTIEEKILQRAKQKNAVQELVMKGKHVQDDHLMRQEDVVSLLIDDXXQISHKLKEISMQDRQKRRTKGIKVDKEGDLMLEDLDDQTSGAAEHDNTSSKKLPKEASKX

SEQ ID NO: 8459 - protein, 454 aa, Oryza sativa
  unsure (1)..(454): unsure at all Xaa locations
XSERLSSSAEDAQFLEQLLDNSQIDDYKLSIDLSVELRRYQQEGINWLAFLRRFKLHGILCDDMGLGKTLQASAIVAADIAESRARNDEQDPKSLIICPSTLVAHWEYEIEKYIDSSIMKPLQYIGSSQDRIILRSQFDKFNVIITSYDIIRKDIDFLENVFWNYCVLDEGHIIKNSRSKITSAVKQLKAQHRLILSGTPIQNNVLELWSLFDFLMPGFLGTEKQFQATYGKPLLAAKDPKCSAKDAEAGILAMEALHKQVMPFLLRRTKDEVLSDLPEKIIQDRYCNLSLLQLKLYDKFSNSNAKQEISTIVKENELDQSTSQPKATRHVFQALQYLLKLCSHPLLVTGESPPDYLVDLLKEIGMGTGDELHDLHHSPKLVALQEILQECGIGSEISSPDASAAIGQHRVLIFAQHXALLDIIEKDLVQSHLRSVXYLRLDGSVKPDQRTIEM

SEQ ID NO: 8460 - protein, 1108 aa, Oryza sativa
  unsure (1)..(1108): unsure at all Xaa locations
MERNGVAVNKAVFDTSQFPTRTVPTKNGAAEKFFFLSPLFPRTNPTPNPTQAREDKREISNPFLHRRRRRRRQNSEGSRSMASPPPFDICGDLDDDPTPPAPTPLAAPTPNGLNDRLLRLTRTHQRGPSQNPNPNPNPNPKPPPPPPPQEPEPAKVKLAGRRRLCKLSTAGDESAGDDDSIRDILDDLTTRLDSLSVDRPTARPRPHVSPLPCALHADPDPSQSQLNDGTKPSSSFVDCDDDDDDAGGAYGGFGVKEEVTRKVFKASSSFGGRGNDDKMKAKGAYAFDTVSRKTTTESKASKFFGDYDDEDDIDQDAENGKENHADDVGWEMERNGVEDRGLQDGAHWDRCNAQXXYNLPGRIFNMLYPHQREGLRWLWVLHCRGTGGILGDDMGLGKTMQVSAFLAGLFHSRLIKRVLVVAPKTLLTHWTKELSVVSLKDKIRDYSGPNANARNYELKYAFKEGGILLTTYDIVRNNFKMIKGNFTNDFDDEEETLWNYVILDEGHIIKNPKTQRAQSLFEIPCAHRIVISGTPIQNNLKXXLRERIKPYFLRRMKNEVFLDSGTGEDKKLAKKNELIIWLKLTSCQRQLYEAFLNSELVHSSMQGSPLAAITILKKICDHPLLLTKKAAEGVLEGMDAMLNNQEMGMVEKMAMNLADNDDDDVELQVGQDVSCKLSFMMSLLDFQEGPGAPIFLLTTQVGGLGLTLTKAARVIVVDPAWNPSTDNQSVDRAYRIGQMKDVIVYRLMTSGTIEEKIYKLQVFKGALFRTATEHKEQTRYFSKRNEQEYSSLPPHGFDASLTQHKMQVENGQQLVMDESLKKHIQFLEQQGIAGVNRHGVLFCKTETTATLGDDEQEGERRGAAMLLGSTFVEMSRKRVIDQVKEMSKKMDGLGDTMGRIVALEEEYAAELIGMLHENRWERSHLEKIRXXQIDDLHEEHMAKFDEMLERIKRMELADEVAPAHASCASSANAKHLEFALSSASSSTKYRYIIAYQRQLLGEDVVPEAGGEAMQEVGAADEAVHVQGHALLLLLLLPLGEDVVRPEAAVGGDGVGDGEGEVSGEVAVGEGVSSGEPGAAVPVAVGELYRQLAGIEAGGRAKQLGSLAS

SEQ ID NO: 8461 - protein, 553 aa, Oryza sativa
  unsure (1)..(553): unsure at all Xaa locations
XYQIRRRLLLTGTPIQNSLQELWSLLNFILPNIFNSSQNFEEWFNAPFAXXEVSLNDEEQLLIIHRLHQVLRPFLLRRKKDEVEKYLPVKTQVILKCDMSAWQKAYYEQVTSNGRVSLGSGRLKSKALQNLSMQLRKCCNHPYLFVEHYNMYQRQEIVRSSGKFELLDRLLPKLQRAGHRVLLFSQMTKLLDILEVYLQMYQFKYMRLDGSTKTEERGRLLADFNKKDSEYFLFLLSTRAGGLGLNLQTADTVIIFDSDWNPQMDQQAEDRAHRIGQKNEVRVFVLVSVGSIEEEILDRAKQKMGIDAKVIQAGLFNTTSTAQDRRALLQEILRRGTSSLGTDIPSEREINRLAARNDEEFWLVEKMDEERRQRENYKPRLMEGIEVPDWVFANDTLTEKIPADEPQNVLLTTKRRRKEVVYSDSFGDQWMKADDVVEETPRMAPRAKRSAYSSDVQEVDFSERRKRHKSLVNIADDASIPMWTPEKVRAGVSSYSKDENEDDAEDESTTSVLQGGSFTWKTLRRKRSSHFSNSSDSKGRSAFXSWDSGMLLP

SEQ ID NO: 8462 - protein, 423 aa, Oryza sativa
KGGRHVKFHTLITTYEVILKDKAALSKIKWNYLMVDEAHRLKNCEASLYTTLLEFSTKNKLLITGTPLQNSVEELWALLHFLDPSKFNSKDIFVERYKNLSSFNETELANLHKELRPHILRRVIKDVEKSLPPKIERILRVDMSPLQKQYYKWILERNFQNLNKGVRGNQVSLLNIVVELKKCCNHPFWFPGPQPGYGGDSIGDRNKVERIVMSSGKLVLLDKLLVRLRETNHRVLIFSQMVRMLDILAEYLSLRGFQFQRLDGSTRADLRHQAMEHFNAPGSDDFCFLLSTRAGGLGINLATADTVIIFDSDWNPQNDLQAMSRAHRIGQQETVNIYRFVTCKSVEEDILERAKKKMVLDHLVIQKLNAEGRLEKKESKKGGSMFDKNELSAILRFGAEELFKEDKTDEETKKKLESMDIDE

SEQ ID NO: 8463 - protein, 587 aa, Oryza sativa
  unsure (1)..(587): unsure at all Xaa locations
MSEVRSVPGMKVEASPAAAAAATVDSPTSVLEDDEISECKNGDVLDTTEAIAKNGDASLITDAMKEEEEKLHDARVKAEEEEVARKREEAARLAFDPTRFNKLDELLSQTQLYSEFLLEKMETIADVEGVQTHAEEEPVEEKKNGRGRKRKATSEYNDKKAKKAVAVMLTRSHEDCSPEDCTLTEEERFVPSMTGLIYHGDKAARAEIRRKFMPKTTGPDFPLIVTSYEMAMSDAKHLAHYKWKYVIVDEGHRLKNSKCLLLRELKRLPMDNKLLLTGTPLQNNLAELWSLLNFILPDIFSSHXEFESWFDFSAKGGEEDQEDSEEKRKVDVVSKLHAILRPFFLRRMKEDVEHMLPRKKEIIIYANMTDHQKQIQNHLVEQTFDQYLHEKSEIGLYPPVEKLLEQCGKFQLLNRLLSLLLARKHKWTKVLDIIEYYLETKGLQVCRIDGSVKLEERRRQIAEFNDLNSSMNIFILSTRAGGLGINLTSADTCILYDSDWNPQMDLQAMDRCHRIGQTRPVHVYRLATSHSVEGRIIKKAFGKLRLEHVVIGKGQFEQDRAKPNALDVSLDYFCTLKECRHHENPLX

SEQ ID NO: 8464 - protein, 1385 aa, Oryza sativa
  unsure (1)..(1385): unsure at all Xaa locations
MQPLLNFKVPLPEDLDRYRRSSPNGSMSSQGQGSLSDQYNGINDASHGLHRKRKRNLDGASDDDEVDAYSNQITEEHYRTMLSEHVQKYRRSKFKEDVFSSDPPQVIVPQKHKNGSARVTKYRSDTRNVAMLGGVEATAEYNGTKSTNAYGGFNKVVASLDSSYLDMGDNVSYKIPEGYDKLALSLNLPVFSDIRVEETFLNGTLDLRTLAAMLSTDQKFETTNRGGLAEPQPQYESLQERVKVXXKFSLQVTEDPXXAIPEGAAGRIRRFIISESGSLHVHYVKVLEKGDTYEIIERSLPKKQIIRKDPSEIAREESEKTIKLWHAIAVKGIPRHHRNFMALLKKRQVDAKRFSENCQREYELRKREEKEAAEALKREEELREAKRQQQRLNFLLSQTELYSHFMQNKAGESAPSDEASVPEEDEEDPEEAELKREALRAAQHAVSQQKRMTNAFDSETGRLRQSSDSGIPTDDLASMEPNKIDLLHPSTMPEKSSVQTPELFKGALKEYQLKGLQWLVNCYEQGLNGILADEMGLGKTVQAMAFLAHLAEILPYWGPERMVLXGKTSTPNVFIEGKKYLLSSFAFLPFIGAXKLNIDASFHILITNYQILVNEEKLLRRVKWQYMVLDEAQAIKSSSSQRWKTLLSFNCRNRLLLTGTPIQNNMAELWALLHFIMPTLFDSHEQFNEWFSKGIEGHAEHGGALNEHQLSRLHAILKPFMLRRVKIDVIAEMTKKKEEIVPCRLSSRQQVFYQAIKNKISLNELLDGSRGNLNDKKLLSLMNIVMQLRKVCNHPELFERNEGSSYFYFADIPNSLLSPAFGELQDVHYAGKRNPIMFEIPKLVYKGIVSNMEXCLCXGCGFLYGSFNRMFNIFSPSYIHQSAFPEAISPNNTVLLSGAFGFTRLINLSPVEASFLATCSLFNRLAFSAVRWNKKYTDELVDVFLDSESTDLESTHNDLTTVRAVVRLLLSPTKAESSFLRTKIETGPSDSPYEALVLSHHERLVSNIRLLRSTYAFIPPARAPPINVWCADRNFAYKLTDEMHDPLAKKLVLGFARTSEFNGPREPTSPHSLIEELHTDLPFPEPMLQLPYRIFGSSPPMSNFDPAKMLTDYMNFRKFKYFRLDGSSAISDRRDMVRDFQNRNDIFVFLLSTRAGGLGINLTAADTVIFYEIDWNPTQDQQAMDRTHRLGQTKEDTIEEKILQRAKQKNAVQELVMKGKHVQDDHLMRQEDVVSLLIDDTQISHKLKEISMQAKDRLKKRRTKGIKVDKEGDLMLEDLDDQTSGAAEHDNTSSKKKKSSQKKLPKLQDNGSVDKNAEAEGGEVEDEDTAPRPKRSKRLMKNLNEDKEPEQEPTTDGDNPAEAAENNISPDDNDTEEAKDRTPSA

SEQ ID NO: 8465 - protein, 578 aa, Oryza sativa
MRRGYEEIDDDEWSNHSFKPSRVLKRPRAPSRTRSLPRPSTPSVTTPGLPPPPPPPPPPPPSSSPTTTTISNLATAVADLSEEDDDLELADDDFDHPDPRPTRPRRATARRFVIKDDDDSDGDVGASEVDGVEAEEDDGVNWSELENEDDEDVVGKALRKCARISADLRQELYGSSTRNCESYAEIDDSSVRIVTQDDVDAACTSEESEFEPILKPYQLVGVNFLLLLHRKNIGGAILADEMGLGKTVQAVTYLTLLRHLYNDPGPHLIVCPASVLENWERELKKWCPSFSIIMFHGAGRTAYSKELSSLGKAGYPPPFNVLLVCYSLFERRSAQQKDDRKALKRWRWSCVLMDEAHVLKDKGSFRWRNLMAVAQHARQRLMLTGTPLQNDLHELWSLLEFMMPDIFATGDIDLKKLLNAEDHELISRIKSILGPFILRRLKSDVMQQLVPKIQHVNFVTMDSEQFQAYNYAIDEYRGACQARSAKSTSNFSNNVVGLIPKRQISNYFMQFRKIANHPLLIRRIYSDKDVDRIAKLLYPKGAFGFECSLERATQELRKYNDFAIHQVLFSYDDSGTKG

SEQ ID NO: 8466 - protein, 659 aa, Oryza sativa
MSMKCHEYHVVAKFYGGKVYNESPFFRKSICWRSLRGGAPVLPLLGGRPKFPSPRLLPPNSRAPRPPPPRLRPWLRLLQNPSPPAAAEAAAAPMRRGYEEIDDDEWSNHSFKPSRVLKRPRAPSRTRSLPRPSTPSVTTPGLPPPPPPPPPPPPSSSPTTTTISNLATAVADLSEEDDDLELADDDFDHPDPRPTRPRRATARRFVIKDDDDSDGDVGASEVDGVEAEEDDGVNWSELENEDDEDVVGKALRKCARISADLRQELYGSSTRNCESYAEIDDSSVRIVTQDDVDAACTSEESEFEPILKPYQLVGVNFLLLLHRKNIGGAILADEMGLGKTVQAVTYLTLLRHLYNDPGPHLIVCPASVLENWERELKKWCPSFSIIMFHGAGRTAYSKELSSLGKAGYPPPFNVLLVCYSLFERRSAQQKDDRKALKRWRWSCVLMDEAHVLKDKGSFRWRNLMAVAQHARQRLMLTGTPLQNDLHELWSLLEFMMPDIFATGDIDLKKLLNAEDHELISRIKSILGPFILRRLKSDVMQQLVPKIQHVNFVTMDSEQFQAYNYAIDEYRGACQARSAKSTSNFSNNVVGLIPKRQISNYFMQFRKIANHPLLIRRIYSDKDVDRIAKLLYPKGAFGFECSLERATQELRKYNDFAIHQ

SEQ ID NO: 8467 - protein, 697 aa, Oryza sativa
  unsure (1)..(697): unsure at all Xaa locations
MASKGPRSKLDHETRARRQKALEAPRGEPRRTKTHWDHLLGEMAWLAKEFDAERKWKLSMAKRIAQRANKGVVDQATKDERKQKVFYKNQLELEERKKKALDKQLDFLLGQTERYSTMLAENLVDVRLQNQENDSLQTNQRSQQELAQENINASSPTDVDNVEIDDDYNSSLGEEPKDDEHTIDEDEAQITEAERNEELAALQAEADLPLDDILKLYTKNKVQAFSVSRESSPVSDSDSKDLIKVFRVSDTFMVKCNGNISSVDAKLTELSVRSLVSTEMTEGTVVVRQSVGTWVVRSLGAGHGAMSSRGHGEAARGRRCNEXAERRADDEDYVANDEGKDDEATLSEEEELAKKEDCDPLDEVKLLQKESEIPLEELLARYQKDGYADDDTTELENSPALSVEDVNANMPVDDESADTVEVNRDLSADTMKLTRDQSAETVKGDVTDTKAMANGDNSDVIADAAAAARSAQPTGNTFSTTNVRTKFPFLLKHSLREYQHIGLDWLVAMYEKRLNGILADEMGLGKTIMTISLLAHLACEKGIWGPHLIVVPTSVMLNWETEFLKWCPAFKILTYFGSAKERKQKRQGWMKPNYFHVCITTYRLVIQDSKVFKRKKWKYLILDEAHLIKNWKSQRWQTLLNFNSKRRILLTGTPLQNDLMELWSLMHFLMPHVFQSHQEFKDWFCNPISGMVEGQDK

SEQ ID NO: 8468 - protein, 755 aa, Oryza sativa
  unsure (1)..(755): unsure at all Xaa locations
PKTXDSSLQNIGKMASKGPRSKLDHETRARRQKALEAPRGEPRRTKTHWDHLLGEMAWLAKEFDAERKWKLSMAKRIAQRANKGVVDQATKDERKQKEEEVRLRKVALNISKDVKKFWTKIEKLVFYKNQLELEERKKKALDKQLDFLLGQTERYSTMLAENLVDVRLQNQENDSLQTNQRSQQELAQENINASINSMLXTDNVEIDDDYNSSLGEEPKDDEHTIDEDEAQITEAERNEELAALQAEADLPLDDILKLYTKNKVSRESSPDGRDVFSDSDSKDLIKGYIYPLNQANGCNDESDHTSSDEGISSEEADDYQSYXXXXXXXTVCLISLCHSMTVWRSFKTRNIHSWISYHLHRFSLSHSFCGFFLYSYKLKDDEATLSEEEELAKKEDCDPLDEVNISIEHVKLLQKESEIPLEELLARYQKDGYADDDTTELENSPALSVEDVNANMPVDDESADTVEVNRDLSADTMKLTRDQSAETVKGDVTDTKAMANGDNSDVIADAAAAARSAQPTGNTFSTTNVRTKFPFLLKHSLREYQHIGLDWLVAMYEKRLNGILADEMGLGKTIMTISLLAHLACEKGIWGPHLIVVPTSVMLNWETEFLKWCPAFKILTYFGSAKERKQKRQGWMKPNYFHVCITTYRLVIQDSKVFKRKKWKYLILDEAHLIKNWKSQRWQTLLNFNSKRRILLTGTPLQNDLMELWSLMHFLMPHVFQSHQEFKDWFCNPISGMVEGQDKVNKEVIDRLHNV

SEQ ID NO: 8469 - protein, 904 aa, Oryza sativa
  unsure (1)..(904): unsure at all Xaa locations
NPLYLGTEGVSHSPPDAEFGEFPEERDWFLVGRSYVTGLSTNRGRRRLDAGELVHFSFPSLERTYVAEIVRFSTNRAGEIGKLSTEWTKCLVPLVSSSKVKIQGKIVFPTVELRLMQEILLYVSFYIHRSVFTASGNNSSWDLLAPANVDYSTNPLYRLFRLLKLRAFTKADITPEELAAGKRPRNLRNDEDEPMAIVGLENRRTAGQTFPEQGTDEQAISEAALNKIVGTAETYDLEEAEPPSTLVSVLKPYQKEALFWMSQLEKGIDGDQAKKTLHPCWSAYKIVDKRAPAVYVNVFTGEATTQFQSVTQSARGGILADAMGLGKTVMTIALILSNPRGELEQDKRGTRDRDTKAQTSRSSVRGGTLIICPMALLGQWKDELEAHSTPGALSVFVYYGGDRTTDLRFMAQHSVVLTTYGVLQSAHKNQDGSSIFHRIDWYRVVLDEAHTIKSPRTKAARAAYELTSHCRWCLTGTPLQNNLEDLFSLLCFLHVEPWGDASWWNKLIQRPYENGDERGLKLVRAILRPLMLRRTKETKDKMGNPILVLPPANIEIVECEQSEDERDFYEALFRRSKVQFDKFVAQGSVLNNYANILELLLRLRQCCDHPFLVISRADTQKYTDLDELAQRFLDGVQRDSARRSAPPSQAYVEEVVEEIRQGATTECPICLESASDDPVLTPCAHRMCRECLLSSWRTPSGGPCPLCRSPITKSELITLPSQCRFQVDPENNWKDSCKVIKLIKILEGLQEKXXEKSIVFSQFTSFFDLLEVPFNQKGIKFLRFDGKLSQKHREKVLKEFSESKDKLVLLMSLKAGGVGLNLTAASNVFLMDPWWNPAVEEQAIMRIHRIGQKRAVQVRRFIVKDTVEERMQKVQACKQRMISGALTDDEVRSARIEQLKMLFT

SEQ ID NO: 8470 - protein, 350 aa, Oryza sativa
  unsure (1)..(350): unsure at all Xaa locations
ICQQHEFFTNKKGGRHVKFHTLITTYEVILKDKAALSKIKWNYLMVDEAHRLKNCEASLYTTLLEFSTKNKLLITGTPLQNSVEELXXKDIFVERYKNLSSFNETELANLHKELRPHILRRVIKDVEKSLPPKIERILRVDMSPLQKQYYKWILERNFQNLNKGVRGNQVSLLNIVVELKKCCNHPFLFESADHGYGGDSIGDRNKVERIVMSSGKLVLLDKLLVRLRETNHRVLIFSQMVRMLDILAEYLSLRGFQFQRLDGSTRADLRHQAMEHFNAPGSDDFCFLLSTRAGGLGINLATADTVIIFDSDWNPQNDLQVLDHLVIQKLNAEGRLEKKESKKGGSMFDK

SEQ ID NO: 8471 - protein, 783 aa, Oryza sativa
  unsure (1)..(783): unsure at all Xaa locations
XRRESVGLVREPHNPHDANAIRVDNARGEKIGHIGRRAAAALAPLLDAGHVAAAHGIVPKPASXXRLYSLPCQVHLFARPPHAALVAAALAASGIDLIHVDHPEFALSESAIVQEQQTKRSRGDVDRLFSHVGKGGRARIAPMEAPRDVVVSELFEHQKAALGWLVHREESCDLPPFWEEDNDGGFKNVLTNQKTNERPPPLKGGIFADDMGLGKTLTLLSLIGRSKARNVGGKKARGAKRRKVEEAVEEESRTTLVVCPPSVFSSWVTQLEEHTKTGSLKVYLYHGERTKEKKELLKYDIVITTYSTLGQELEQEGSPVKEIEWFRVILDEAHVIKNSAARQTKAVIALNAERRWVVTGTPIQNSSFDLYPLMAFLRFQPFSIKSYWQSLIQLPLGKNNGIGLARLQVLLGAISLRRTKETESGSKSLVSIPPKTVLACYIELSAEEREYYDQMELEGKNKLREFGDRDSILRNYSTVLYFILRLRQLCNDIALCPLDLKSWLPGSGSSLEDVSKNPELLKKLASLVDDGDDFECPICLAPPAKTVITSCTHIYCQTCIMKILKSSSSRCPICRRSLCKEDLFIAPEIKXXPDEDSSVNLDRPLSSKVQALLKLLRRSQSEDPLSKSVIFSQFRKMLILLEGPLKAAGFNILRLDGSMTAKKRSEVIRQFGCVGPDSPTVLLASLKAAGAGVNLTAASTVYLFDPWWNPGVEEQAMDRVHRIGQTKEVKVVRLIVKDSIEERMLELQERKKKLISGAFGRKKGGKEHKEIRVEELQMMMGMK

SEQ ID NO: 8472 - protein, 222 aa, Oryza sativa
  unsure (1)..(222): unsure at all Xaa locations
VFPKYERRLLAAASLLLSADAQGQPPXTPPPNSEXGVTAELKPHQVDGVAWLIRRYQLGVNVLLGDFLGLGKTLQAISLLSYLKIHSISPGPFLVLCPLSVTDGWLSEFNKFCPSLRVIQYVGDKLHRRDLRRMMFQHSTELPFDVMMTTYDIALMDQEFLSQIPWHYVVIDEAQRLKNPSSVLYNVLEQRFIMPRRLLLTGTPIQNNLSGLWALMHFCMPX

SEQ ID NO: 8473 - protein, 772 aa, Oryza sativa
  unsure (1)..(772): unsure at all Xaa locations
KQLPQKHEHVIYCRLSRRQRNLYEDFIXSSETQATLASGNYFGMISIIMQLRKVCNHPDLFEGRPIISSFDMAGINMQISSSVGMVLDKGPFSQVDLSDMNFVFTQNEYNMTSWEEDEVAAIFSPSITLRGSGISRSTNDGQRSNGTNIFEEIHNSLWEERIKEANERAASIAWWNRVRCQKRPVYGTNIREVLTIKHPVSDILENLCHMEFSSSLANLVLSSVDRFKTMLDFIESFTFAIPAARAPAPLFWCNKGKSPVLIEPAYREKCMNEFSPVFSPIRPAIVRRQVYFPDRRLIQFDCGKLQELAILLRRLKSEGHRALIFTQMTKMLDILEEFINLYGYTYLRLDGSTQPEERQTLMQRFNTNPKFFLFILSTRSGGVGINLVGADTVIFYDSDWNPAMDQQAQDRCHRIGQTREVHIYRLISESTIEENILKKANQKRALDDLVIQRGSYNTEFFKKLDPMEFFSGHSSLHAENQQKDCSLSAGPSNGTNLALSNVDVEAAIRQAEDEADYMALKRLEQEEAVDNQEFSEEAAGRLEEDDLVNEDDTKPDEHTNEEHKYQCSDLVKDKHVALSINQLDEEKAITLAGGDGDIDMLADVKQMAAAAAAAGQASSSFENQLRPIDRYAMRFLELWDPIIDKAAINYQVNVEEEEWELERIEKLKEDLEAEIDEDQEPLSYESWDVDFATTAYRQHVEALAQKQVSSYFYSCEQERQAREAAKELEEKNDNSTQRKKSKKNKKKAAKFKSLKKGRLSSESEVMVEETSX

SEQ ID NO: 8474 - protein, 1432 aa, Oryza sativa
  unsure (1)..(1432): unsure at all Xaa locations
MDENRKLSDDMSKKMEPIHSNGEAGEDKTIIIEPESDANKLEVETDARHGICEAHKAHEYGTMENDLHEEASTTDDDSENDSYEYLLRESDNEQTSESDAGEGDNEAPLTDEEVETLITEFLDAESKLESAVSTEMKQYKKEWESELDDLETHIAVLLEQLDAAGVELPSLYKSIESQVPNVCETEAWKNRAHWAGYQVPEEANKSIRKADEYLQSCRPVRRKHGRLLEEGASGFLAGKIPVGDDGSAQCHEKSWNAFNELTKSKEYAESSFGSSNWASVYLASTPQEAAALGLQFPGVDEVEEIAEVEGAVSDIKGVDEIELSEVQRRKYRKVPEEDDAKMTKRLQRHLKERRTRHLHKXCCELPPKKLKTYXNGVSVELAKRTREDDVEFDNKRSKTVIIESDDDMQTDSKPDSAPSENADEIIDLDIFPSQSPKLGDKVRPKPFKCTICTEMLNVPEVHRHPVLDVIICGSCRFLVIEKNRLEDPVSGGYCTWCVKSEQLQSCSSCKLLFCRNCLSKNFGEEGLSEARVAGWQCCCCLPSQLEHLISDCDKALGGVESSDPENDFAELSVLESNEIFSKHKMKKRIRRIMDDEELGEETKLKIAMEKARQEHLKSMQEQSASKLKSNNIGISLEAPSEVSEYVGDGHIVNLAREEDEAPVRIPSSISAKLKPHQVSGIRFMWENVIQSVKKVKSGDKGFGCILAHNMGLGKTFQVITFLYTVMRCIQLGLRTALIVTPVNVLHNWKKEFIKWCPAELKPLRVYMLEDVPRCRLIILLKKWRIKGGVLLIGYSSFRNLSLGRSARDKTVANEITNALQCGPDILVCDEAHIIKNRRADTTQALKQVRTQRRIALTGSPLQNNLMEYYCMVDFVREGYLGSSHEFRNRFQNPIENGQHTNSTSDDVKIMNQRSHILYEQLKGFVQRMDMNVVKNDLPEKKVFVVTVKLSQLQRKLYRRFLDVNGFSSSAASEKSFQRSGFFAKYQTLALIWNHPGLLQMAKQKGNLRQEDVESFLMDESSSDDNIENYLPNGEKLRSRNDQLSKKSSDVESNWWENLLDENAYKEADYSGKMVLLLDILSSCSELGDKALVFSQSLSTLDLVEFYLSKLQVNGKEGKYWKQGKDWYRIDGSTPSSERQNLVERFNDPENIRVKCTLISTRAGSLGINLHSANRVILLDGSWNPTHDLQAIYRVWRYGQTKPVYAYRLMAHATMEEKIYKRQVTKEGLAARVVDRQQVSRTISKEEMLHLFEFGDEELLEQSGSTMNGHSKVGTEKPPTPNSSETTEHLPLDRLMVNLLHDHSRRWIASYHEHETLLQENEEERLTKEEQDMAWLSYNKLLEVAPRKATHDAERKPSTVPTESSLIQPPKATSRSRQPQQPKITSNNQKKCNNLSHLLTLRSQGTKPGCSTSCKECGQDISWETLNRDGRSR

SEQ ID NO: 8475 - protein, 1492 aa, Oryza sativa
MDENRKLSDDMSKKMEPIHSNGEAGEDKTIIIEPESDANKLEVETDARHGICEAHKAHEYGTMENDLHEEASTTDDDSENDSYEYLLRESDNEQTSESDAGEGDNEAPLTDEEVETLITEFLDAESKAAQAQESLEKESLEKIESEVRLELSESLQGNELESAVSTEMKQYKKEWESELDDLETHIAVLLEQLDAAGVELPSLYKSIESQVPNVCETEAWKNRAHWAGYQVPEEANKSIRKADEYLQSCRPVRRKHGRLLEEGASGFLAGKIPVGDDGSAQCHEKSWNAFNELTKSKEYAESSFGSSNWASVYLASTPQEAAALGLQFPGVDEVEEIAEVEGAVSDIKGVDEIELSEVQRRKYRKVPEEDDAKMTKRLQRHLKERRTRHLHKENIGLASSSNGCCELPPKKLKTYENGVSVELAKRTREDDVEFDNKRSKTVIIESDDDMQTDSKPDSAPSENADEIIDLDIFPSQSPKLGDKVRPKPFKCTICTEMLNVPEVHRHPVLDVIICGSCRFLVIEKNRLEDPVSGGYCTWCVKSEQLQSCSSCKLLFCRNCLSKNFGEEGLSEARVAGWQCCCCLPSQLEHLISDCDKALGGVESSDPENDFAELSVLESNEIFSKHKMKKRIRRIMDDEELGEETKLKIAMEKARQEHLKSMQEQSASKLKSNNIGISLEAPSEVSEYVGDGHIVNLAREEDEAPVRIPSSISAKLKPHQVSGIRFMWENVIQSVKKVKSGDKGFGCILAHNMGLGKTFQVITFLYTVMRCIQLGLRTALIVTPVNVLHNWKKEFIKWCPAELKPLRVYMLEDVPRCRANIQYLLKKWRIKGGVLLIGYSSFRNLSLGRSARDKTVANEITNALQMWVLIQSIYICHNQCGPDILVCDEAHIIKNRRADTTQALKQVRTQRRIALTGSPLQNNLMEYYCMVDFVREGYLGSSHEFRNRFQNPIENGQHTNSTSDDVKIMNQRSHILYEQLKGFVQRMDMNVVKNDLPEKKVFVVTVKLSQLQRKLYRRFLDVNGFSSSAASEKSFQRSGFFAKYQTLALIWNHPGLLQMAKQKGNLRQEDVESFLMDESSSDDNIENYLPNGEKLRSRNDQLSKKSSDVVNEESNWWENLLDENAYKEADYSGKMVLLLDILSSCSELGDKALVFSQSLSTLDLVEFYLSKLQVNGKEGKYWKQGKDWYRIDGSTPSSERQNLVERFNDPENIRVKCTLISTRAGSLGINLHSANRVILLDGSWNPTHDLQAIYRVWRYGQTKPVYAYRLMAHATMEEKIYKRQVTKEGLAARVVDRQQVSRTISKEEMLHLFEFGDEELLEQSGSTMNGHSKVGTEKPPTPNSSETTEHLPLDRLMVNLLHDHSRWIASYHEHETLLQENEEERLTKEEQDMAWLSYNKLLEVAPRKATHDAERKPSTVPTESSLIQPPKATSRSRQPQQPKITSNNQKKCNNLSHLLTLRSQGTKPGCSTSCKECGQDISWETLNRDGRSR

SEQ ID NO: 8476 - protein, 524 aa, Oryza sativa
  unsure (1)..(524): unsure at all Xaa locations
XIIYGPLIFFMQAIAVASCLHDAWPVLVISPSSLRLHWASVSTCXLNFLSFISTVTLCMREVXPFCFAVVXQMIQHWLNIPTEDILVVLPQTGGSNKAGYRLVYSNTKGDFNLDGVFNVISYDVVPKIKDMLLDLDFKIVIADESHFLKNAQAKRTMHSLPVLQKAKYVVLLSGTPALSRPIELFTQLQALYPTVYKNVNEYGNRYCKGVSTSSIESLLYELYQGFFGLYQGASNHEELHNLMKATVMIRRLKKDVLSQLPVKRRQQAFLDLSEKEMRHIRALFHELETVKIKIQSCDSQETMDSLKFAQKNLINKIYNDSAEAKIPAVLDYLGTIIEAECKFLIFAHHQSMLEAIHQHLLKKKVKCIRIDGQTPVPVRQTLVTDFQNKDDIKAAVLSIKAGGVGLTLTAASTVIFAELSWTPGDLIQAEDRAHRIGQVSSVNIYYLLANDTVDDIIWDVVQGKLENLGQMLDGQESWMCPRATLGPALPSRRRSTPTSSDAAIPQKLISPSSRTLGSDISQGF

SEQ ID NO: 8477 - protein, 371 aa, Oryza sativa
  unsure (1)..(371): unsure at all Xaa locations
XFFMMSLLQNLVSEGHNVLIFSQTRKMLNIIQEAIILEGYKFLRIDGTTKISERERIVKDFQEGPGAPIFLLTTQVGGLGLTLTKAARVIVVDPAWNPSTDNQSVDRAYRIGQMKDVIVYRLMTSGTIEEKIYKLQVFKGALFRTATEHKEQTRYFSKRDIQELFSLPEQGFDVSLTQKQLQEEHGQQLVMDDSLRKHIQFLEQQGIAGVSHHSLLFSKTAILPTLNDNDGLDSRRAMPMAKHYYKGASSDYVANGAAYAMKPKEFXXARTYSPNSTSTESPEEIKAKINRLSQTLANTVLVAKLPDRGDKIRRQINELDEKLTVIESSPEPLERKGPTEVICLDDLSVXCRACLFLLLKFHACMLVVTKA

SEQ ID NO: 8478 - protein, 322 aa, Oryza sativa
  unsure (1)..(322): unsure at all Xaa locations
TRLNNFHKQMDSTDKSDDDYSAIRPEWTTVDRILATRSSTGEREYYVKWKELTYDECTWENDSDIAVFQPQIERFNEIQSRRKKSTDXXCKSVTREIRQYKESPKFLSGGMLHLKHEYEGTLHPYQLEGLNFLRYSWYHNKRVILGDEMGLGKTIQSIAFLGSLSVDKLGPHLVVAPLSTLRNWEREFATWAPQMNVVMYFGSAASREIIRKYEFYYPKEKPKKLKKKKSSPSNEDKKQSRIKFDVLLTSYEMINMDSTVLKTIEWECMIVDEGHRLKNKDSKLFGQLKEYHTKHRVLLTGTPVQSSFEVSILLXTFRAAGX

SEQ ID NO: 8479 - protein, 483 aa, Oryza sativa
MAKPVKYDEEEEEVSSSGEEEEEQSDGAGSGSGEEEDEEEEEAPAAAAGEAAGGEEEEVDEEEIEAVTTGAGADEEEEESGAAAAAPGEGDEESQSTEDDEAVVGEDDDADEAEGGAVVGKREKARLKEMQKLKKQKIQEILDTQNAAVDADMISVIVGLFIWGRHASKMTEEEEDEEYLKEEEDALAGSGGTRLLSQPSCIKGKMRDYQLAGLNWLIRLYENGINGILADEMNNLHELWSLLNFLLPEIFSSAETFDEWFQISGENDQQEVVQQLHKMQKQYYRALLQKDLEVINAGEPGPPYTTGEHLVENAGKMVLLDKLLPKLKDRDSRVLIFSQMTRLLDILEDYLMYRGYQYCRIDGNTGGEDRDASIEAFNKPGSEKFVFLLSTRAGGLGINLATADVVVLYDSDWNPQADLQAQDRAHRIGQKKEVQVFRFCTEYTIEEKVIERAYKKLALDALVIQQGRLAEQKTVNKDDLLQM

SEQ ID NO: 8480 - protein, 283 aa, Oryza sativa
  unsure (1)..(283): unsure at all Xaa locations
PGLQDLIENAGKMVLLDKLLPKLKERDARVLIFSQMTRLLDILEDYLMYKGYQYCRIDGNTGGEDRDASIEAFNKPGSEKFVFLLSTRAGGLGINLATADVVILYDSDWNPQVDLQAQDRAHRIGQKKEVQVFRFCTEYTIEEKVIERAYKKLALDALVIQQGRLAEQKAVNKDELLQMVRFGAEMVFSSKDSTITDEDIDRIIAKGEEATAQLDAKMKKFTEDAIKFKMDDTAELYDFDDDKDENKLDFKKLVTDNWIEPTSRRERKRNYSESDYFKQALRX

SEQ ID NO: 8481 - protein, 525 aa, Oryza sativa
  unsure (1)..(525): unsure at all Xaa locations
MALGLFASKLPEGSWQVVLGPLASDLMSLSGVQRQVASMVIVSWFKDLRKSDPAAVGLPSKLNPSAEDAQFLEQLLDNSQIDDYKLSIDLSVELRRYQQEGINWLAFLRRFKLHGILCDDMGLGKTLQASAIVAADIAESRARNDEQDPKSLIICPSTLVAHWEYEIEKYIDSSIMKPLQYIGSSQDRIILRSQFDKFNFQATYGKPLLAAKDPKCSAKDAEAGILAMEALHKQALQYLLKLCSHPLLVTGESPPDYLVDLLKEIGMGTGDELHDLHHSPKLVALQEILQECGIGSEISSPDASAAIGQHRVLIFAQHKALLDIIEKDLFQSHMRSVTYLRLDGSVEPEKRFEIVKAFNSDPTIDVLLLTTHVGGLGLNLTSADTLVFMEHDWNPMKDXXQAMDRAHRLGQRKVVNVHRLIMRGTLEEKVMSLQRFKVSVANAVINAENASLKTMNTDQLLDLFASTPASRKASGSSGGDQSKDSKGKSGGKGLKSILNGLDELWDQSQYADEYDLNQFLAKLNG

SEQ ID NO: 8482 - protein, 304 aa, Oryza sativa
  unsure (1)..(304): unsure at all Xaa locations
MDSTDKSDDDYSAIRPEWTTVDRILATRKSSTGEREYYVKWKELTYDECTWENDSDIAVFQPQIERFNEIQSRRKKSTDXXCKSVTREIRQYKESPKFLSGGTLHPYQLEGLNFLRYSWYHNKRVILGDEMGLGKTIQSIAFLGSLSVDKLGPHLVVAPLSTLRNWEREFATWAPQMNVVMYFGSAASREIIRKYEFYYPKEKPKKLKKKKSSPSNEDKKQSRIKFDVLLTSYEMINMDSTVLKTIEWECMIVDEGHRLKNKDSKLFGQLKEYHTKHRVLLTGTPVQSSFEVSILLXTFRAAGX

SEQ ID NO: 8483 - protein, 735 aa, Oryza sativa
  unsure (1)..(735): unsure at all Xaa locations
XGSRRAPRPPPLVFSFGDDDPSPTDRSEQDAALDMLWADLDFTLESENIGTYYDDEGQEDSLLDHALAPITPCSRGKHEFIIDEQIGIRCKYCSLVNLEIRFIXTIAGLQFCRETCMAKQLLFEXXALMCPDLYEQTGTGDGQSQDFHINGTVWDLIPGVITDMYQHQREAFEFMWTNLVGDIRLNEIKHGAKPDVVGGCVICHAPGTGKTRLAIVFIQTYMKVFPDCRPVIIAPRGMLFAWEQEFKKWNVNVPFHIMNTTDYSGKEDRDICRLIKKEHRTEKLTRLVKLFSWNRGHGVLGISYGLYMKLTSXKRLAALEKTKXRTILLENPGLLVLDEGHTPRNERSVIWKTLGKVKTEKRIILSGTPFQNNFLELYNILCLVRPRFGEMFLTKTRVGRRHCVSKKQRDNLTSNVTDDNAEKVRSILKPFVHIHNGTILRTLPGLRECVIVLKPLPLQKSIIRKVENVGSGNNFEHEYVISLASTHPSLVNAINMTEEEASLIDKPMLXXRLRSNPYEGVKTRFVMEVVRLCEALKEKVLIFSQFIQPLELIKEHLRKIFKWREGKEILQMDGKILPRYRQNSIEVFNNPDSDARVLLASTRACCEGISLTGASRVVLLDVVWNPAVGRQAISRAFRIGQKKFVYTYNLITYGTGEGDKYDRQAEKDHLSKLVFSTEDEFSNVRNMLSKAVSEDKVLEEMTSHDQLKGMFLKIHYPPTESNIVFTYNQIAPELS

SEQ ID NO: 8484 - protein, 246 aa, Oryza sativa
  unsure (1)..(246): unsure at all Xaa locations
GLTSAWFDFSAKGGEEEQEDSEEKRKVDVVSKLHAILRPFLLRRMKEDVEHMLPRKKEIIIYANMTDHQKQIQNHLVEQTFDQYLHENVLRKPGIKAKLNNLLIQLRKNCNXHPDLXLESAYDSSXXLYPXPVEKLLEQCGKFQLLNRLLSLLLARKHKVLIFSQWTKVLDIIEYYLETKGLQVCRIDGSVKLEERRRQIAEFNDLNSSMNIFILSTRAGGLGINLTSADTCILYDSDWNPQMDLX

SEQ ID NO: 8485 - protein, 362 aa, Oryza sativa
  unsure (1)..(362): unsure at all Xaa locations
MEAPRDVVVSELFEHQKAALGWLVHREESCDLPPFWEEDNDGGFKNVLTNQKTNERPPPLKGGIFADDMGLGKTLTLLSLIGRSKARNVGGKKARGAKRRKVEEAVEEESRTTLVVCPPSVFSSWVTQLEEHTKTGSLKVYLYHGERTKEKKELLKYDIVITTYSTLGQELEQEGSPVKEIEWFRVILDEAHVIKNSAARQTKAVIALNAERRWVVTGTPIQNSSFDLYPLMAFLRFQPFSIKSYWQSLIQLPLGKNNGIGLARLQSLLEEREYYDQMELEGKNKLREFGDRDSILRNYSTVLYFILRLRQLCNDIALCPLDLKSWLPGSGSSLEEIKHPDEXIPQSILIALSSKEDADLAX

SEQ ID NO: 8486 - protein, 593 aa, Oryza sativa
  unsure (1)..(593): unsure at all Xaa locations
MAASVEAAAAAVVAPPASVGGDEVVVGGGGGGASEQARTLIGALNLLSRNLPLPPAVLHAVSSIYHGGDAWEGEGEEGGEEEDRADASPGADEGVTLIQELEDAVLKNQGPYMSYSELTALKEDRFNTSIQHRLTELEALCQWNDHTYVRVNRLFYAEQKTDITHWENAKMESLLDLQKKVRTDISAEYWLHKKCAHPDRQLFDWGMMRIRYPFTMYGIGDSFSMDADDINRKKRFSEDSLFGIWEQQRISRLEEEEKNQAEIRKRKFFSEILNAAREYQLQVPASYKRKKQRNDGVLAWHVRARQRINRMEKSRLQVLKAGDQEAYLRMVEESKNERLKLLLGKTNELLEGIGKAVQRQKDAEHVSRPDGSELPKGSESDDCSQISGLKVESPDEESPSDVDADHHSSADHSXXFNAGHRLDSTVHSIEEKVTEQPSALEGGXELRPYQLEGLQWMLSLFNNNLNGILADEMGLGKTIQTIALIAYLLERKEVTGPHFIIAPKAVLPNWSNEFKTWAPSIGTILYDGRPDDRKALREKNFAQRPLTVLLTPYDLVLGDLKFLKKVHWHYLIVDEGHRLKNHECALARTLVSX

SEQ ID NO: 8487 - protein, 822 aa, Oryza sativa
  unsure (1)..(822): unsure at all Xaa locations
MVFKQVLPMESRCLHLQCQQVVSLHMMDRGLNSHRIFPPSVPYNNSVNNFGVNGLGTQSHLNIEKRLFGRDERVVYDEALKQISQETTEENLPEGVMSVSLLKHQRIALAWMVSRENSSHCSGGILADDQGLGKTISTIALIQKERVEQSKFMSADVGSMKSVANLDEDDEVVIVMDKKQLKGESVNMLQDSTLFKKARVRPSPSSTLRSANRSTAGTLVVCPASVLRQWASELAAKVTESSKLSVLVYHGGSRTKDPTELTKYDVVVTTYTIVANEVPKQNXXDEDMEEKNSETYGLCPAFSIGNKRKXXDSEPKKKKKPKNSDADLDGGPLARVRWFRVVLDEAQTIKNHNTQVARACCGLRAKRRWCLSGTPIQNTIDDLYSYFRFLKYEPYSVYGSFRSMIKYQISRDATRGYKKLQAVLKIVLLRRTKETLIDGEPIIKLPPKTIQLSKIDFSKEERTFYMMLEEGSREKFKEYASAGTIRENFANILVLLLRLRQACDHPLLLKGKEKDLIDTGSVEVANKLPKETVINLLGQLEGDYAICSRCSDPPEDVVVATCGHVFCYQCVHKSLTSDENVCPSPSCGKKLSAQTVFSPGVLRFCIADKLESGATTSSSVEADVHQSGSYISSKIRATTDILNSIVNTPXXLTWSDTMESSPSEVAPSKAIVFSQWTGLLDLLELSLDSSRIKFRRLDGAMSLNLREAAVREFNTDPEVRVMLMSLKAGNLGLNMVAACHVIMIDPWWNPYAENQAVDRAHRIGQTRPVTVSRLTIKDTVEDRILALQEKKRKMVQSAFGEDKPGGSATRLPIDDLQYLFGI

SEQ ID NO: 8488 - protein, 782 aa, Oryza sativa
  unsure (1)..(782): unsure at all Xaa locations
XWLWVGRALLSHLAPEALRRLXESSGKMELLDKMMVKLKEQGHRVLIYSQFXQHMLDLLEDYLSYRKWSYERIDGKIGGAERQIRIDRFNAKNSTRFCFLLSTRAGGLGINLATADTVIIYDSDWNPHADLQAMARAHRLGQTSKVMIYRLVSRGTIEERMMQLTKKKMVLEHLVVGRLTKGTNIVQEELDDIIRHGSKELFDDENDEAGKSCQIHYDDAAIDRLLDRDQADGEEXXVEDEEEDEFLKGFKVANFEYIDEAKALAAKEEEARKKAEAEAANSDRANFWDKLLKDRYDVQKVEEHTTMGKGKRSRKQMAAADEDDITGLHDMSSEDDDYSYDDDVSDNDTSLQSGLAGRRGPYSKKKQRNVDSLPFMEGEGRALRVYGFNQIQRTQFLQTLMRYGFQNYDWKEFTPRLKGKSVEEIQRYAELVMIHLLEDINXXSGYYADGVPKEMRTDETLVRLANISLVEEKVAAMEQGKITKLFPSYLLYEFPSLVGGRVWKAEQDLLLLKALIKHGYARWQYISDDRDNGIFEAARQELRLPTANELISSHSNNETNGNLESTQEGQSNPTSMIHYRDTQRKIVEFIRKRYHLLERCLNLEYAVIKTKTPVPDDLAEQDFPGGHRPAVPDXXSEMLRELPVLEPISKEVAPEGTTDQSQVSHLYNKMCFVLEDSAVPALNSHFGDKAASSGLANSLHKFEAVCEDVSRILRSHENGTTPKEEVMLDASSKETTSPKDPATEVPSSASKEATPPVQDPVIEAVKEEPPTVKAEDKMEIDS

SEQ ID NO: 8489 - protein, 742 aa, Oryza sativa
  unsure (1)..(742): unsure at all Xaa locations
XLPKPHHTLPCSLLCSSLLKXRIALAWMVSRENSSHCSGGILADDQGLGKTISTIALIQKERVEQSKFMSADVGSMKSVANLDEDDEVVIVMDKKQLKGESVNMLQDSTLFKKARVRPSPSSTLRSANRSTAGTLVVCPASVLRQWASELAAKVTESSKLSVLVYHGGSRTKDPTELTKYDVVVTTYTIVANEVPKQNXXDEDMEEKNSETYGLCPAFSIGNKRKXXDSEPKKKKKPKNSDADLDGGPLARVRWFRVVLDEAQTIKNHNTQVARACCGLRAKRRWCLSGTPIQNTIDDLYSYFRFLKYEPYSVYGSFRSMIKYQISRDATRGYKKLQAVLKIVLLRRTKETLIDGEPIIKLPPKTIQLSKIDFSKEERTFYMMLEEGSREKFKEYASAGTIRENFANILVLLLRLRQACDHPLLLKGKEKDLIDTGSVEVANKLPKETVINLLGQLEGDYAICVLQDPPEDVVVATCGHVFCYQCVHKSLTSDENVCPSPSCGKKLSAQTVFSPGVLRFCIADKLESGATTSSSVEADVHQSGSYISSKIRATTDILNSIVNTPXXLTWSDTMESSPSEVAPSKAIVFSQWTGLLDLLELSLDSSRIKFRRLDGAMSLNLREAAVREFNTDPEVRVMLMSLKAGNLGLNMVAACHVIMIDPWWNPYAEDQAVDRAHRIGQTRPVTVSRLTIKDTVEDRILALQEKKRKMVQSAFGEDKPGGSATRLTIDDLQYLFGIFFFAL

SEQ ID NO: 8490 - protein, 440 aa, Oryza sativa
  unsure (1)..(440): unsure at all Xaa locations
PRFXCRRRDDGYEFLVKWKGLDYCEATWEPCCTDGVQQAVSMLVRRHKNASKRVNISQTCLDGSKIEEVHXXGALYDYQLQGLQWLIDNFKTRRSVILADEMGLGKTVQVVCFLYHIIKESLTASPALILAPKSILLQWEKEFCQWASDLNVIVYQGDRDSRKCIQVHEMYSSDGKPLFDALVTSYEFVQIDKAVLQKFKWSTIVIDEAHRMKKLDCNLAACLKRYCSEFRLLXXTMTRMLXXILEDFLCSLGYKYARIDGQTSLSARQESIEEYKNIDSETFIFLMSTRAGGMGVDLPGADRVIIYDPDFNPFMDLQAQSRAHRIGQTRPVVVYQLITKCSVEEKILQKSKQKLAIENMLISSKKPSADELQSILLHGAKTIVDRKISATSIHYDNEAIENLLKLDPSTGEKCSSDDNDETDSALQLQIVTVPDIDADX

SEQ ID NO: 8491 - protein, 379 aa, Oryza sativa
KVLEEVRTKKRIILSGTPFQKSFLELSNVLYLIRPKFARHFASKSFKKIGLEDYWTSLTLNNITEKKIDEIRQILDPIVHIHNGDILQKSLPGLRESVVILNPLPHQKEIITAMENTVTMGTLDAEYKISLASIHPFLVTCAKLSEKETSSVDVSLLKSLRPNPCVGVKTKFVLEIVRLCEAMKERVLVFSQYLEPLSLIMDQLSKMFNWTEGEEILLMSGNVLVQNREALMEAFNDMKSNAKVMLASTKACCEGITLIGASRVVLLDVVWNPSVGRQAIGRAYRIGQEKIVYTYNLITEGTKEKDKYDRQAKKDHMSKLLFSKEPHAAGFNLSQEVIFNDKILEAMTSHRELKDMFVNSILTNSKLTAKSGNLILMRL

SEQ ID NO: 8492 - protein, 200 aa, Oryza sativa
  unsure (1)..(200): unsure at all Xaa locations
DSAELVPNSARXESRARNDEQDPKSLIICPSTLVAHWEYEIEKYIDSSIMKPLQYIGSSQDRIILRSQFDKFNVIITSYDIIRKDIDFLENVFWNYCVLDEGHIIKNSRSXITSAVKHLKXQHRLXXSGXPIXNNXLEXWXLFDFLMPGFLGDXKNXXPSYLLGKPXXLXXXKNXKMXXPKGDXGNLXLPCXDESFFPXX

SEQ ID NO: 8493 - protein, 1081 aa, Oryza sativa
MEEAAAAAADFDGGFGGAGEDNLSMPLGDFMAFLDNEDWKEQQHEWRWAINGHQAVGIGEGQTGSSLVGNQGLEMPVDSTSSENAFQNHEDFLENSRNGNPEMHLPMDALNHAKTVDEEIVPPYEDYTNGLYYDSGCDMFAEQSGLSEVKCEGTGPMLGNSEQEGNHFTSVPMFDHSAVIPDIPYTELNIGDVPGSMQNGNGSCLTVQGEYLQGEYQEYPQPDYGSFDMANEIVLHDLPQNNQSYELEQLPQNICESSSMQVGSPDQYCDDTSLSDYYMDDVSSIESMSSEQNRSEDICFRRLQHNFQQSVCANPNLPRFGGRYRPHEERMTLRLALQFVLAVPLLRHQKIALSWMVQKERNGSSCSGGILADDQGLGKTVSTISLILTERSPVPSSAVKQEPCEAVTLDDDDEDDDAEPHLKKPALAHLADTCKPEATSSTIKTENPIANVKARPAAGTLVVCPTSVLRQWADELRNKVTSKANLTFLVYHGSNRTKDPNDLTKYDVVLTTYSIVSMEVPKQSSPDSDDEEKGKPDRYGAPVGSSGSKKRKTSSSKKNKSGSTPESKLPEKPLAKVAWFRVILDEAQSIKNYRTQVARACWGLRAKRRWCLSGTPIQNAVEDLYSYFRFLRYDPYAEYKKFCFMIKTPISRNPITGYKKLQVVLKTVMLRRTKATMLDGKPIISLPPKTVSLKTVDFTSEERAFYNTLEAESREQFKEYAAAGTVKQNYVNILLMLLRLRQACDHPHLVRGHESTSSWMSSLEMAKKLPVERQQSLLVCLQSCSAICALCNDAPEDAVVTICGHVFCNQCILEQLTGDDSVCPVSNCRVRLNSTSLFSRGTLECALSRSTCEFLSDDSCEDMVQGKQPRFDSSYASSKVRAALDILLSLPKLDLTHMSDDKNKIVHPDKINGNSTPSEYAGTKITEKAIVFSQWTRMLDLVEVHLKSSHLSYRRLDGTMSVAARDRAVKDFNTNPEVSVMIMSLKAASLGLNMVAACHVLLLDLWWNPTTEDQAVDRAHRIGQTRPVTVSRLTIKDTVEDRILALQEKKREMVASAFGEDKSGAHQTRLTVEDLNYLFMV

SEQ ID NO: 8494 - protein, 770 aa, Oryza sativa
  unsure (1)..(770): unsure at all Xaa locations
MCCHPKSRRLQHNFQQSVCANPNLPRFGGRYRPHEERMTLRLALQDILAVPLLRHQKIALSWMVQKERNGSSCSGGILADDQGLGKTVSTISLILTERSPVPSSAVKQEPCEAVTLDDDDEDDDAEPHLKKPALAHLADTCKPEATSSTIKTENPIANVKARPAAGTLVVCPTSVLRQWADELRNKVTSKANLTFLVYHGSNRTKDPNDLTKYDVVLTTYSIVSMEVPKQSSPDSDDEEKGKPDRYGAPVGSSGSKKRKTSSSKKNKSGSTPESKLPEKPLAKVAWFRVILDEAQSIKNYRTQVARACWGLRAKRRWCLSGTPIQNAVEDLYSYFRFLRYDPYAEYKKFCFMIKTPISRNPITGYKKLQVVLKTVMLRRTKGQMLDGKPIISLPPKTVSLKTVDFTSEERAFYNTLEAESREQFKEYAAAGTVKQNYVNILLMLLRLRQACDHPHLVRGHESTSSWMSSLEMAKKXHPLLIHXSVHHKLCXDAPEDAVVTICGHVFCNQCILEQLTGDDSVCPVSNCRVRLNSTSLFSRGTLECALSRSTCEFLSDDSCEDMSYASSKVRAALDILLSLPKLDLTHMSDDKNKIVHPDKINGNSTPSEYAGTKITEKAIVFSQWTRMLDLVEVHLKSSHLSYRRLDGTMSVAARDRAVKDFNTNPEVSVMIMSLKAASLGLNMVAACHVLLLDLWWNPTTEDQAVDRAHRIGQTRPVTVSRLTIKDTVEDRILALQEKKREMVASAFGEDKSGAHQTRLTVEDLNYLFMV

SEQ ID NO: 8495 - protein, 1082 aa, Oryza sativa; identical to SEQ ID NO: 8436

SEQ ID NO: 8496 - protein, 129 aa, Oryza sativa
  unsure (1)..(129): unsure at all Xaa locations
XRRLDGTMSVAARDRAVKDFNTNPEVSVMIMSLKAASLGLNMVAACHVLLLDLWWNPTTEDQAVDRAHRIGQTRPVTVSRLTIKDTVEDRILALQEKKREMVASAFGEDKSGAHQTRLTVEDLNYLFMV

SEQ ID NO: 8497 - protein, 428 aa, Oryza sativa
  unsure (1)..(428): unsure at all Xaa locations
YKYYKSXCHDVKSSTLLNFLLSWRLEQVCVEYCCYDPTKFPHASIEPLSHIKCYKVDVNLXVPFXLLEISQVXFLNADNCDPFQAYAAAGTLKQNYANILLMLLRLRQACDHPLLVKGHQSEYKGDGSIEMAKQLPKEMIINLLAKLEVGEFCSVCSDVPEXDAVVTMCGHVFCYQCIYERITTDENMCPSPNCGNTLSTDSVFSSGALRICMSGVSSSHASGSSSYDESAFSQTSYISSKIQAAIDILDSIINTYALTDSDTVESNPSRVVPVKAIVFSQWTGMLDLLGLSLNSNLIQYRRLDGTMSLNSRDKAVKDCNTDSEVRVMIMSLKAGNLGLNMVAACHVILLDLWWNPYAEDQAIDRAHRIGQTRPVTVSRLTIKDTVEDRILALQEKERPMVSSAFGEDKSGGHATRLTVDVLKYLFRF

SEQ ID NO: 8498 - protein, 556 aa, Triticum aestivum
  unsure (1)..(556): unsure at all Xaa locations
LILSCRYLIRRRLLLTGTPSQNSLQELWSLLNFILPNIFNSSGNFEEWFNAPFAXXDVSINDEEELLIIHRLHQVLRPFLLRRKKDEVEKYLPSKTQVILKCDFSAWQKAYYEQVASKGKVALGSGLKPKAVANLSMQLRKCCNHPYLFVEQYNMYQREEIVRASGKFELLDRLLPKLHRAGHRVLLFSQMTRLLNILEVYLQMYNFKYMRLDGSTKTEERGKLLADFNKKDSEYFIFLLSTRAGGLGLNLQTADTVIIFDSDWNPQMDQQAEDRAHRIGQKNEVRVFVLVSVGSIEEEILDRAKQKMGIDAKVIQAGLFNNTSTAQDRKALLQEILKRGTSTLGTDIPSEREINRLAARTEEEFWLFEKMDEERRRRENYKSRLMQGPEVPEWVYISETLAEKLLAEEAKNPVINTKRRRKEVVYSDSYVDQWMKSDEVYEDIPKMTPRAKRSAYLSDIQEVDLHDRASSNILTAPMAQATQPGHQRKEERVSSYSKDENEDDNDEDEVTAGGLQQGGSFTWNTLRRKRSSHSTNPSSDPKGRSAFXCPSDRSAI

SEQ ID NO: 8499 - protein, 440 aa, Triticum aestivum
  unsure (1)..(440): unsure at all Xaa locations
XDLAAKNGDVFFITEVMAKEGEEMDQGRIKLEEEEEARKREEAARQAFDPKAKFSKLDELLTQTQLYSEFLLEKMEQITDVKPTAVEIKDEEEPVEEQKKGRGRKRKAENSKPQYNDKKAKTAVVAMLSRSREDRSADDGTLTEEEKWEREQANLVPLLTGGKLKSYQIKGVKWLISLWQNGLNGILADQMGLGKTIQTIAFLAHLKGNGLHGPYMVIAPLSTLSNWLNELTRFAPSINGLIYHGDKVARTELRRKHMPKIVGPDFPTISASYEMAMFDAKFLANYKWKYVVVDEGHRLKNTKCKLXLRELRRIPMDNKLLLTGTPLQNNLAXELWSLLNFILPDIFSSHEDFESWFDFSGKADEELEEETDEKKRGLVVSKLHSILRPFLLRRLNEDVEHILSRKKEIIIYANMTEHQKQIQNHLIEQTFDDYLHESAX

SEQ ID NO: 8500 - protein, 325 aa, Triticum aestivum
  unsure (1)..(325): unsure at all Xaa locations
RGITGPHMVVAPKSTLGNWKKEIQRFCPVLRAVKFLGNPEERNHIRENLLAPGKFDVCVTSFEMAIKEKTALRRFSWRYIIIDEAHRIKNENSLLSKTMRLFSTNYRLLITGTPLQNNLHELWSLLNFLLPEIFSSAETFDEWFQISGENDQHEVVQQLHKVLRPFLLRRLKSDVEKGLPPKKETILKVGMSEMQKQYYRALLQKDLEVINAGGERKRLLNIAMQLRKCCNHPYLFQGAEPGPPYTTGDHLIENAGKMVLLDKLLPKLKARDSRVLIFSQMTRLLDILEDYLMYRGYQYCRIDGNTGGDDRDASIEAFNKPRREX

SEQ ID NO: 8501 - protein, 276 aa, Triticum aestivum
  unsure (1)..(276): unsure at all Xaa locations
XRIKNENSLLSKTMRLFSTNYRLLITGTPLQNNLHELWSLLNFLLPEIFSSAETFDEWFQITGETDQQEVVQQLHKVLRPFLLRRLKSDVEKGLPPKKEIILKGGMSQMQKQYYRGLLQKDLEVINAGGERKRLLNIAMQLRKCCNHPYLFQGAEPGPPYTTGDHLIETAGKMVLLDKLLPKLKDRDSRVLIFSQMTRLLDILEDYLIYRGYQFCRIDGSTGGQDRDASIDAFNKPGSEKFVFLLSTRAGGLGINLATADVVILYDSDWNPQADLX

SEQ ID NO: 8502 - protein, 192 aa, Triticum aestivum
  unsure (1)..(192): unsure at all Xaa locations
XHALRPPLXXGGTLIVCPMALLGQWKDELEAHSTPGAISVFVYYGGDRTGDLKLMAEHTVVLTTYGVLQSAHKADGSSAFHRIDWYRIVLDEAHTIKSPRTKAAQAAYMLSSQCRWCLTGTPLQNNLEDLYSLLCFLCVEPWCNSNWWQKLIQRPYENGDERGLKLVKAILRPXMLRRTKETKDKMGKPILX

SEQ ID NO: 8503 - protein, 214 aa, Triticum aestivum
  unsure (1)..(214): unsure at all Xaa locations
XGPHLIIVPNAVLVNWKSELLNWLPSASCIFYVGAKDQRQKLFSQEVFVKFNVLVTTYEFVMFDRSKLSRIDWKYIIIDEAQRMKDRESVLARDLDRYRCQRRLLLTGTPLQNDLKELWSLLNLLLPEVFDNRKAFQDWFSKPFQRDAPTPNEEDDWLETEKKVIIIHRLHQILEPFMLRRRVEDVEGSLPRKDSIVLRCKMSAIQGAIXXWIK

SEQ ID NO: 8504 - protein, 471 aa, Triticum aestivum
  unsure (1)..(471): unsure at all Xaa locations
XSQYDATKVRAVTRLLLSPKRADSSLLRTKFEIGLSDNPCEALVLSHHDRLVSNIRLLRSTYGFIPPARAPPINVCCSDRNFAYKLTDEMHDPWIKKLFLGFARISEFNGPRIPNGHNTLIQEVCTDLPIPEPMLQLPYRIFGSSPPMSNFDPAKMLTDSGKLHTLDKLLRQLRAENHRVLLFAQMTKMLDILEDYMNFRKFKYFRLDGSSAISDRRDMVRNFQNRNDIFVFLLSTRAGGLGINLTAADTVIFYEIDWNPTQDQQAMDRTHRLGQTKEVTVFRLICKDTIEENILQRAKQKNAVQELVMKGKQVQDDHLMRQEDVVSLLLDDXXQIAHKLKEISMQAKDRQKRRAKAIKVDKEGDLKLEDLDDPTEEPVEQDNTTSKKKKGSHKKPPKSQDNPDGDVPESGPVEDEEHIASLRPKRSKRLVRSTGEDKEPVAACDVEKPADAAENNDNNDAEELQYQTPSA

SEQ ID NO: 8505 - protein, 246 aa, Triticum aestivum
  unsure (1)..(246): unsure at all Xaa locations
XRILRIEMSPLQKQYYKWILERNFQNLNKGVRGNQVSLLNVVVELKKCCNHPFLFESADHGYGGDSIGDRNKVERIVMSSGKLVLLDKLLLRLRETNHRVLIFSQMVRMLDILSEYLSLRGFQFQRLDGSTRADLRHQAMEHFNAPGSDDFCFLLSTRAGGLGINLATADTVIIFDSDWNPQNDLQAMSRAHRIGQQDTGNIYRFVTCKSVEEDILERAKKKMVLDHLVIQKLNAEGRLEKKEPKR

SEQ ID NO: 8506 - protein, 250 aa, Triticum aestivum
  unsure (1)..(250): unsure at all Xaa locations
QCGICHELAEDVVVSSCPXKVIXAHALFSTGYLQHMNFPFKLTYLXENSRRKVPAYLKGGKRSGILGRLRLAEFKTSTKIDALREEIRNMIEHDGSAKGIASSQVTSFLDLIEFSLQRAGIKCVQLNGKMXTLVEKGRAIDAFINDPDCRIFLMSLKAGGVALNLTVASHVFLMDPWWNPAVESQAQDRIHRIGQFKPIRSTRFVIKDTVEERILQLQEKKQLVFDGTVGDSPEAMSKLTEADLKFLFQN

SEQ ID NO: 8507 - protein, 421 aa, Triticum aestivum
  unsure (1)..(421): unsure at all Xaa locations
XPVGIKHPIARNAVHGYKKLQTVLRIVLLRRTKETTINGEPIINLPPKTIKLQKVDFTKEERAFYLTLEERSRQQFKEYAAAGTVKQNYANILLLLLRLRQACDHPLLVKGHQSVFKGDGSIEMAKQLSKERVIDLLARLEVSALCAVCRDTPEDAVVAMCGHIFCYQCIYERITTDENMCPVPNCRNTLSTESVFSSGTLKICISGKTSTHAIASSSADDELFSQSSYISSKIQATVDILNSIINMHXXLTDSDTIESNPNRVSPVKAIVFSQWTGMLDLLEFSLNSNLIQYRRLDGTMSLNSRDKAVKDFNIDPEVRVMIMSLKAGNLGLNMVAACHVILLDLWWNPYAEDQAIDRAHRIGQTRPVTVSRLTITDTVEDRILSLQEEKRAMVNSAFGEDKSSAHATRLTVDDLRYLFRI

SEQ ID NO: 8508 - protein, 378 aa, Triticum aestivum
  unsure (1)..(378): unsure at all Xaa locations
XFSEFYLPTRDMTGASRETPSTKRFLVVFRRQSLRRRFRLRRVNPLGNYRRPRVAPPSLGADRSVRQLRCQVPRALPSLAASLLAIADXVLGRRPAAGSVRNCLRFPLRKNCGHPDLFHSAFDSNSLYPPVDKLLEQCGKFQLLDRLLNALIKRNHKVLIFSQWTKILDILDYYLSEKGLKVCRIDGNVKLEDRRNQIAAFNDLNSGMNVFILSTRAGGLGINLTSADTCILYDSDWNPQMDLQAMDRCHRIGQTQPVHVYRLATSNSVEGRIIKKAFGKLKLEHVVIGKGQFQQDAAKPNALDEGELLALLRDEQAEEDRMIQTDISDEDLLKVMDRSDLXXGARAAADAAPHFPLKGPGWEVVVAAGGGMLSALTS

SEQ ID NO: 8509 - protein, 291 aa, Triticum aestivum
  unsure (1)..(291): unsure at all Xaa locations
XQTCSSEVTTSTTVKTENHIVEIKARPAAGTLVVCPTSVLRQWAEELRNKVTSKANLSFLIYHGSNRTKDPNELTKYDVVLTTYSIVSKTKKATTEKSNLPEKPLARVAWFRVILDEAQSIKNYRTNVAGSCWNLRAKRXWCLSGTPIQNAVEDLFSYFKFLRYEPYCEYKHFCTMIKMPISRNPINGYKKLQVVLKTVMLRRTKATMLDGKPIISLPPKTITLKAVNFTSEERAFYNTLEAESRAQFKVYAAAGTVRQNYVNILLMLLRLRQACDHPHLVNESSWTSSLX

SEQ ID NO: 8510 - protein, 196 aa, Triticum aestivum
  unsure (1)..(196): unsure at all Xaa locations
XNKPXHLLXKTFDNYLLESTDXRPGLKMKLNNLMIQLRKNCAHPDLFNAAFDSTSLYPPTDKLLEQCGKFQLLDRLLESLLKQKHKVLIFSQWTKVLDIIEYYLYMKGLNICRIDGSVKLEDRMRQIAEFNDLNSSMNVFILSTRAGGLGINLASADTCILYDSDWNPQMDLQAMDRCHRIGQTRPLHVYRLATAX

SEQ ID NO: 8511 - protein, 97 aa, Triticum aestivum
  unsure (1)..(97): unsure at all Xaa locations
XLMSLKXAGGVGLNLTAASNVFLMDPWWNPAVEEQAIMRIHRIGQKRAVQVRRFIVRDTVEERMQQVQARKQRMIAGALTDEEVRSSRIEELKMLFK

SEQ ID NO: 8512 - protein, 114 aa, Triticum aestivum
  unsure (1)..(114): unsure at all Xaa locations
XVNDFKTVPEVSVMIMSLKAASLGLNMVAACHVLMLDLWWNPTTEDQAVDRAHRIGQTRPVTVSRLTVKDTVEDRILALQEKKREMVASAFGEDKSGGGQTRLTVDDLNYLFMV

SEQ ID NO: 8513 - protein, 220 aa, Triticum aestivum
  unsure (1)..(220): unsure at all Xaa locations
GLTSMWPHRLNVILGDQMGAGGVIPTLVFLDRLKENGQHGPYLIVSSLDSIGDWLRQIRLFPSMKELLYFGNQQGRATMRKQFARKAVGPDFPIILTTYNMVMVEKQWLAQYDWKYVVVDEGYQLKKREHEVLEAVKRQPMDHKLLLIREPFQNNLAELWSLLNFALLNAFSSREEFDSWFDKSGKEGEEQQIEEERRALLSKLHAILRPFLLRDMKGAX

SEQ ID NO: 8514 - protein, 138 aa, Triticum aestivum
TNFLLTTQVGGLGLTLTKAARVIVVDPAWNPSTDNQSVDRAYRIGQTKDVIVYRLMTSGTIEEKIYKLQVFKGALFRTATEQKEQTRYFSKRDIQELFSLPAQGFDVSLTQKQLQEEHGQQLVMDESLREHIEFLERQ

SEQ ID NO: 8515 - protein, 145 aa, Triticum aestivum
  unsure (1)..(145): unsure at all Xaa locations
XVRGRVGSESDVSWDSDQEEVTRMKPAQKWDDLISRVVNSGSGLLLTTYEQLRIIREKLLDVEWGYAVLDEGHRIRNPNAEVTLVCKQLQTVHRIIMTGAPIQNKLSELWSLFDFVFPGKLGVLPVFETEFSVPITVGGYANATP

SEQ ID NO: 8516 - protein, 207 aa, Triticum aestivum
  unsure (1)..(207): unsure at all Xaa locations
XTIMTISLLLSDSSKGRVTPQQRTQISGEASGLGETPIQSRDSVKNLASPFSISKLRKPKAPLIGGGNLVICPMTLLSQWKAEIEAHTKPDSLNIYVHYGQSRPKEASFIGQNDIVLTTYGVVASEFSTESSTENGGLYSVHWFRIVLDEAHTIKSSKSLISQAAAALTADRRRCLAGTPNQDNVEDRTQPXCLEFLKVEPWRNWVX

SEQ ID NO: 8517 - protein, 882 aa, Triticum monococcum
MAATAYERRLLAAADLVLSADGKSQLPRLSSADLGVTADLKPHQLDGVDWLIRRYHLGVNVLLGDEMGLGKTLQAISLLSYLKIKSIAPGPFLVLCPLSVTDGWLSEFGKFCPTLKVIQYVGDKPHRRQIRRTIHEDVQKSSHSDELPFDVMLTSYDIALMDQDFLSQVPWLYVVIDEAQRLKNPSSVLYNVLEERFMMPRRLLLTGTPVQNNLSELWALMHFCMPSVFGPLDEFLSTFKEAGNLLSGSEANKANRQFKILKHILRAFMLRRTKALLIESGILELPPLTELTVMVPLAPLQKKIYLSVLRKELQTLLSFTGGSSRHQSLQNIVVQLRKACSHPYLFSGIEPEPYEEGEHLVQASGKLIVLDLVLEKLHRLGHRVVLFAQMTQTLDILQDFLELRNYTYERLDGSVRAEERFAAIRNFSSQPTKGVVRDDSNPSGAFVFMISTRAGGVGLNLIGADTVIFYEQDWNPQADKQALQRTHRIGQLNHVLSINLVSQRTIEEVIMRRAERKLKLSHNIFGDKDATDGKGNDLGNEANDMCSIIFGLHQFDPADTAAETINEETLEKLKSMSENVIKMRTHEPSEKDDRAFEINPDLTEGSGLVITRACDSISIDPGVDEAAYLSWVEKFKEASHSIEDVPVELERQRPAPEDKLLKREANKKKAEEKRLAKWKDLGYQTLGVKVPDNIPNQNISDSGSVQLVYGDCTDPSKVCAAKPAIIFSCVDNSGTWGHGGMFDALTSLSTYIPDAYHRASEVDDLHMGDLHLIQLDEANCSRNLDAPLWVALAVVQSYNPKRKIPRSEISMSDLELCLSKAAFSAAQRSASIHMPRIGQRSGSQRSEWYTIERLLRKYASLHGIDIFVYYFRRPTRQQPDSD

SEQ ID NO: 8518 - protein, 832 aa, Zea mays
  unsure (1)..(832): unsure at all Xaa locations
PRVRLXLLKTGDQEAYMRMVEESKNERLKMLLDKTNELLEGIGKAVQRQKDAEHVSKPEGGSEVPKGSESEDCSQISGIKSESAEESTSDDDGDLPGPADESKFNAGRRLDVTVHSIEEKVTEQPSALEGGELRPYQLEGLQWMLSLFNNNLNGILADEMGLGKTIQTIALIAYLLEKKEVAGPHLIIAPKAVLPNWSNEFKTWAPSIGTILYDGRPEERRLLRDKNFDGEQFNVLLTHYDLILKDKKFLKKVHWHYLIVDEGHRLKNHECALARTLVSGYMIRRRLLLTGTPIQNSLQELWSLLNFILPNIFNSSQNFEEWFNAPFAXXDVSLNDEEQLLIIHRLHQVLRPFLLRRKKDEVEKYLPVKTQVILKCDMSAWQKAYYEQVTSREKVALGYGIRKKALQNLSMQLRKCCNHPYLFVEHYNMYQREEIVRASGKFELLDRLLPKLQRAGHRVLLFSQMTKLLDILEVYLQMYNFKYMRLDGSTKTEERGRLLADFNKKNSEYFMFLLSTRAGGLGLNLQTADTVIIFDSDWNPQMDQQAEDRAHRIGQKNEVRVFVLVSVGSIEEEILDRAKQKMGIDAKVIQAGLFNTTSTAQDRRALLQEILRRGTSSLGTDIPSEREINRLAARNDEEFRLFEKMDEERRLRENYKSRLMDGNEVPNWVYDNETLRKKTVADEFRNIIVGSKRRRKEVVYSDSFGDQWMKSDEGFEEIAKMTPRVKRTAYSPDIQVEYNERRKRPKSVENSADGASNPTRTPDKGRAGVSSYSKDETEDDGEDEVITSGLQKGNSFTWKTLGRKRSSHLSSSSDSKGRXHHSNVSCLDAFAR

SEQ ID NO: 8519 - protein, 1107 aa, Zea mays
  unsure (1)..(1107): unsure at all Xaa locations
MAKPVKYDDEEEISSSSAEEDDDQSAAAASGSGEEGDDDEEDAAALPTEEEEAEGEGQQEEEVDEEEIEAVTTGAGAEDGEDASAATAAEGEEESQSTEDDESVARDKDNGDETDAVVGKREKTRLKELQKMKKQKIQEILDTQNAAIDADMNNKGKGRLKYLLQQTEIFAHFAKGSQSNEKKPRGRGRHASKMTEEEEDEEYLKEEEDALAGAGGTRLVSQPSCIKGKMRDYQLAGLNWLIRLYENGINGILADEMGLGKTLQTISLLGYLHEFRGIAGPHMVVAPKSTLGNWMKEIQRFCPILRAVKFLGNPEERNHIRDNLLQPGKFDVCVTSFEMAIKEKSALRRFSWRYIIIDEAHRIKNENSLLSKTMRIYNTNYRLLITGTPLQNNLHELWALLNFLLPEIFSSAETFDEWFQISGENDQQEVVQQLHKVLRPFLLRRLKSDVEKGLPPKKETILKVGMSQMQKQYYRALLQKDLEVINAGGERKRLLNIAMQLRKCCNHPYLFQGAEPGPPYTTGEHLIENAGKMVLLDKLLPKLKERDSRVLIFSQMTRLLDILEDYLMYRGYQYCRIDGNTGGEDRDASIEAFNSPGSEKFVFLLSTRAGGLGINLATADVVVLYDSDWNPQADLQAQDRAHRIGQKKEVQVFRFCTEYTIEEKVIERAYKKLALDALVIQQGRLAEQKTVNKDDLLQMVRFGAEMVFSSKDSTITDEDIDRIIAKGEETTAELDAKMKKFTEDAIKFKMDDNAELYDFDDXXKDENKVDFKKLVSDNWIEPPRRERKRNYSESDYFKQALRQGAPAKPREPRIPRMPHLHDFQFFNNQRLNELYEKEVRYLMQANQKKDTIDGEDEDQLEPLTAEEQEEKEQLLEEGFASWTRRDFNTFIRACEKYGRNDIKSISSEMEGKTEEEVQRYARVFKERYKELSDYDRIIKNIERGEARISRKDEIMKAIGKKLDRYKNPWLELKIQYGQNKGKFYNEECDRFMLCMVHKLGYGNWDELKAAFRMSPLFRFDWFVKSRTTQELARRCDTLIRLVEKENQEYDEQERQARKEKRLAKNMTPTKRAALKNSEGENTPPSSFKRRRQSLMDDYVGSGKRKRG

SEQ ID NO: 8520 - protein, 1107 aa, Zea mays
  unsure (1)..(1107): unsure at all Xaa locations
MAKPVKYDDEEEISSSSAEEDDDQSAAAASGSGEEGDDDEEDAAALPTEEEEAEGEGQQEEEVDEEEIEAVTTGAGAEDGEDASAATAAEGEEESKSTDQDESVAHDKAIGAEIDAEGGEREKKILNEIQKFSKLKIRHKLDNKNPGSSADMIYKVNGLLEYRILHKEEIADFASGSGTLFVQPPSGIQEXTHDAEQAEDEEYLKEEEDALAGAGGTRLVSQPSCIKGKMRDYQLAGLNWLIRLYENGINGILADEMGLGKTLQTISLLGYLHEFRGIAGPHMVVAPKSTLGNWMKEIQRFCPILRAVKFLGNPEERNHIRDNLLQPGKFDVCVTSFEMAIKEKSALRRFSWRYIIIDEAHRIKNENSLLSKTMRIYNTNYRLLITGTPLQNNLHELWALLNFLLPEIFSSAETFDEWFQISGENDQQEVVQQLHKVLRPFLLRRLKSDVEKGLPPKKETILKVGMSQMQKQYYRALLQKDLEVINAGGERKRLLNIAMQLRKCCNHPYLFQGAEPGPPYTTGEHLIENAGKMVLLDKLLPKLKERDSRVLIFSQMTRLLDILEDYLMYRGYQYCRIDGNTGGEDRDASIEAFNSPGSEKFVFLLSTRAGGLGINLATADVVVLYDSDWNPQADLQAQDRAHRIGQKKEVQVFRFCTEYTIEEKVIERAYKKLALDALVIQQGRLAEQKTVNKDDLLQMVRFGAEMVFSSKDSTITDEDIDRIIAKGEETTAELDAKMKKFTEDAIKFKMDDNAELYDFDDXXKDENKVDFKKLVSDNWIEPPRRERKRNYSESDYFKQALRQGAPAKPREPRIPRMPHLHDFQFFNNQRLNELYEKEVRYLMQANQKKDTIDGEDEDQLEPLTAEEQEEKEQLLEEGFASWTRRDFNTFIRACEKYGRNDIKSISSEMEGKTEEEVQRYARVFKERYKELSDYDRIIKNIERGEARISRKDEIMKAIGKKLDRYKNPWLELKIQYGQNKGKFYNEECDRFMLCMVHKLGYGNWDELKAAFRMSPLFRFDWFVKSRTTQELARRCDTLIRLVEKENQEYDEQERQARKEKRLAKNMTPTKRAALKNSEGENTPPSSFKRRRQSLMDDYVGSGKRKRG

SEQ ID NO: 8521 - protein, 847 aa, Zea mays
  unsure (1)..(847): unsure at all Xaa locations
VLAWHVRARQRISRHAKNPINLLKTGDQEAYMRMVEESKNERLKMLLDKTNELLEGIGKAVQRQKDAEHVSKPEGGSEVPKGSESEDCSQISGIKSESAEESTSDDDGDLPGPADESKFNAGRRLDVTVHSIEEKVTEQPSALEGGELRPYQLEGLQWMLSLFNNNLNGILADEMGLGKTIQTIALIAYLLEKKEVAGPHLIIAPKAVLPNWSNEFKTWAPSIGTILYDGRPEERRLLRDKNFDGEQFNVLLTHYDLILKDKKFLKKVHWHYLIVDEGHRLKNHECALARTLVSGYQIRRRLLLTGTPIQNSLQELWSLLNFILPNIFNSSQNFEEWFNAPFAXXDVSLNDEEQLLIIHRLHQVLRPFLLRRKKDEVEKYLPVKTQVILKCDMSAWQKAYYEQVTSREKVALGFGLRSKALQNLSMQLRKCCNHPYLFVEHYNMYQREEIVRASGKFELLDRLLPKLQRAGHRVLLFSQMTKLLDVLEIYLQMYNFKYMRLDGSTKTEERGRLLADFNKKDSEYFMFLLSTRAGGLGLNLQTADTVIIFDSDWNPQMDQQAEDRAHRIGQKNEVRVFVLVSVGSIEEEILDRAKQKMGIDAKVIQAGLFNTTSTAQDRRALLQEILRRGTSSLGTDIPSEREINRLAARNDEEFRLFEKMDEERRLRENYKSRLMDGNEVPNWVYDNETLRKKTVADEFRNIIVGSKRRRKEVVYSDSFGDQWMKSDEGFEEIAKMTPRVKRTAYSPDIQVEYNERRKRPKSVENSADGASNPTRTPDKGRAGVSSYSKDETEDDGEDEVITSGLQKGNSFTWKTLGRKRSSHLSSSSDSKGRXHHSNVSCLDAFAR

SEQ ID NO: 8522 - protein, 779 aa, Zea mays
MGTLSMSDASPIPAKNWDASPVKLEAQGGDAILGMKEEERLLELVKDEQADGILDSLPIDLEAKNGDASLITEAMKKEEEQLEDTRIKVQEEEEARKREEAARLAFDPETQYNKLDELLTKTQLFSEFLLENMDRIADESVETQAEQPQVEEKKKGRGRKRKAKPQYNDKKAKTAVAAMLTRSREERLAEDSTLSEEERWEKEQANLVPLLTGGKLKSYQIKGVKWLISLWQNGLNGILADQMGLGKTIQTIGFLAHLKGKGMHGPYLIIAPLSTLSNWVNEISRFTPSLVSIIYHGGKAARAEIRRKFMPTNVGPDFPIVVTSYEMAMFDAKFLAAYKWKYVVVDEGHRLKNAKCLLLKQLKRIPMDNKLLLTGTPLQNNLAELWSLLNFILPDIFSSHQEFESWFDFSGGNEETDEKKRLHVVSKLHAILRPFLLRRMKEDVEQMLPRKKEIIIYANMTEQQKQIQHHLIEKTFDNYLHEESDIILKRPGIRARLHNLMIQLRKNCNHPDLLESPVDSTGLYPPVEKLLEQCGKFQLFDRLLNFLMAQKHKVLVFSQWTKVLDIIEYYLDSKGHAVCRIDGNVKLEERRRQIAEFNDVNSSMRIFLLSTRAGGLGINLTAADTCILYDSDWNPQMDLQAMDRCHRIGQTRPVHVYRLATSHSVEGRMIKRAFGKLKLEHVVIGKGQFEQDRAKPSALDEGELLALLKDEQTEEDRIVQTDISNEDLQRLMDRSDLMGPPPGAGGANAASPLVPLKGPGWEVVVPAKSGGGMLSSLTS

SEQ ID NO: 8523 - protein, 796 aa, Zea mays
  unsure (1)..(796): unsure at all Xaa locations
XLPKLWDCLTEFLRPHSWADRMRIRTHSHXINNIQVVRSISPHLAEPLRPQLLNLLPSILGCVRHPHVAVRLAAARCITSMAKSLTDDVMVLVIENVIPMLSDLSSVCARQGAGILLSLLVQGLAVELVPYAPFLVVPLLKCMSDPDGSVRQTVTHSFAALVPLLPLSRGASLPCGLSERLSSSAEDVQFLEQLLDNTQIDDFKLNIDLNVELRRYQQEGINWLAFLRRFKLHGILCDDMGLGKTLQASAIVASDIAEARARNDEXXILTSLIICPSTLVAHWEYEIEKYIDSSILKPLQYVGSSQDRVTLRSQFDKVNVIITSYDIIRKDIDFLGNITWNYCVLDEGHIIKNSRSKITFAVKQLKAQHRLILSGTPIQNNVLELWSLFDFLMPGFLGTEKQFQAAYGKPLLAAKDSKCSAKDAEAGILAMEALHKQVMPFLLRRTKDEVLSDLPEKIIQDRYCDLSLLQLKLYDKFSSSNAKDEISTIVKANELEESAXXQPKATRHVFQALQYLLKLCSHPLLVTGXEPPKSSCGSSEXNRSGICSELHELHHSPKLVALQEILQECGIGSEISSPDASTAVGQHRVLIFAQHKAFLDIIEKDLFQSHMRSVTYLRLDGSVDPEKRFEIVKAFNSDPTIDVLLLTTHVGGLGLNLTSADTLVFVEHDWNPMKDXXQAMDRAHRLGQRKVVNVHRLIMRGTLEEKVMSLQRFKVSVANAVINAENSSLKTMNTDQLLDLFTSTPXXSRKASDEQSKRKSGGKGLKSILNGLDELWDQSQYADEYDLNQFLAKLNG

SEQ ID NO: 8524 - protein, 780 aa, Zea mays
  unsure (1)..(780): unsure at all Xaa locations
MGTLSMSDASPIPAKNWDASPVKLEAQGGDTILGMKEEERLLELVKDEQADGILDSLPIDLEAKNGDASLITEAMKKEEEQLEDTRIKVQEEEEARKREEAARLAFDPETCSISMDELLTKTQLFSEFLLENMDRIADESVETQAEQPQVXEEKKKGRGRERKAKPQYIDKKAKTAVAAMLTRSREERLAEDSTLSEEERWEKEQANLVPLLTGGKLKSYQIKGVKWLISLWQNGLNGILADQMGLGKTIQTIGFLAHLKGKGMHGPYLIIAPLSTLSNWVNEISRFTPSLVSIIYHGGKAARAEIRRKFMPTNVGPDFPIVVTSYEMAMFDAKFLAAYKWKYVVVDEGHRLKNAKCLLLKQLKRIPMDNKLLLTGTPLQNNLAELWSLLNFILPDIFSSHQEFESWFDFSGGNDXETDEKKRLHVVSKLHAILRPFLLRRMKEDVEQMLPRKKEIIIYANMTEQQKQIQHHLIEKTFDNYLHEESDIILKRPGIRARLHNLMIQLRKNCNHPDLLESPVDSTGLYPPVEKLLEQCGKFQLFDRLLNFLMAQKHKVLVFSQWTKVLDIIEYYLDSKGHAVCRIDGNVKLEERRRQIAEFNDVNSSMRIFLLSTRAGGLGINLTAADTCILYDSDWNPQMDLQAMDRCHRIGQTRPVHVYRLATSHSVEGRMIKRAFGKLKLEHVVIGKGQFEQDRAKPSALDEGELLALLKDEQTEEDRIVQTDISDEDLQRLMDRSDLMGPPPGXRANARPPLVPLKGPGWEVVVPAKSGGGMLSSLTS

SEQ ID NO: 8525 - protein, 683 aa, Zea mays
  unsure (1)..(683): unsure at all Xaa locations
XMGLGKTIQPIALIAYLLENKEVAGPHLIIAPKAVLPNWSNEFKTWAPSIGTILYDGRPEERKLLREKNFDGLQFNVLLTHYDLILKDKKFLKKVHWHYLIVDEGHRLKNHECALARTLVSGYQIRRRLLLTGTPIQNSLQELWSLLNFILPNIFNSSQNFEEWFNAPFAXXDVSLNDEEQLLIIHRLHQVLRPFLLRRKKDEVEKYLPVKTQVILKCDMSAWQKAYYEQVTSREKVALGFGLRSKALQNLSMQLRKCCNHPYLFVEHYNMYQREEIVRASGKFELLDRLLPKLQRAGHRVLLFSQMTKLLDVLEIYLQMYNFKYMRLDGSTKTEERGRLLADFNKKDSEYFMFLLSTRAGGLGLNLQTADTVIIFDSDWNPQMDQQAEDRAHRIGQKNEVRVFVLVSVGSIEEEILDRAKQKMGIDAKVIQAGLFNTTSTAQDRRALLQEILRRGTSSLGTDIPSEREINRLAARTDEEFWLFEKMDEERRLRENYKSRLMDGNEVPDWVFANNDLPKRTVADEFQNIMVGAKRRRKEVVYSDSFGDQWMKSDEGFEDIPKATQRSKKTAYSSDIQVEFSERRKRPRSVENSADGVSNPTWTPDKGRAGVSSYSKDETEDDGEDEVITSGLQKGNSFTWNTLGRRRSSHFSSSSDSRGXXQHSNGNIHECYGLDLLVDGIPL

SEQ ID NO: 8526 - protein, 626 aa, Zea mays
  unsure (1)..(626): unsure at all Xaa locations
XTRPLITTYDIVRNNYKLIRGNSYNNSNDDDDEEGTLWNYVILDEGHLIKNNKTQRAQSLYEIPCAHRIVISGTPIQNNLKEMWTLFNFCCPDVLGDKQQFKIRYETAILRGNDKNATAREKHVGSNVAKELRERIKPYFLRRLKSEVVFDTGASEEKTLAKKNELIVWLKLTPCQRKLYEAFLNSELVHLALQPKASPLAAITILKKICDHPLLLTKKGAEGVLEGMGEMLNDQDIGMVEKMAMNLADMAHDDNALEVGQDVSCKLSFIMSLLRNLVGEGHHVLIFSQTRKMLNLIQEAIILEGYAFLRIDGTTKVSDRERIVKDFQEGCGAPVFLLTTQVGGLGLTLTKATRVIVVDPAWNPSTDNQSVDRAYRIGQTKNVIVYRLMTSATIEEKIYKLQVLKGALFRTATEQKEQTRYFSKSEIQELFSLPQQGFDVSLTHKQLQEEHGQQVVLDESLRKHIQFLEQQGIAGVSHHSLLFSKTATLPTLSENELDSKPRGMPMMPQQYYKGSSSDYVANGASFALKPKDESFTVRNYIPSNRSAESPEEIKARINRLSQTLSNAVLLSKLPDGGEKIRRQINELDEKLTSAEKGLKEGGTEVISLDXXDPRHGESALGKSKVF

SEQ ID NO: 8527 - protein, 627 aa, Zea mays
  unsure (1)..(627): unsure at all Xaa locations
XTRPLITTYDIVRNNYKLIRGNSYNNSNDDDDEEGTLWNYVILDEGHLIKNNKTQRAQSLYEIPCAHRIVISGTPIQNNLKEMWTLFNFCCPDVLGDKQQFKIRYETAILRGNDKNATAREKHVGSNVAKELRERIKPYFLRRLKSEVVFDTGASEEKTLAKKNELIVWLKLTPCQRKLYEAFLNSELVHLALQPKASPLAAITILKKICDHPLLLTKKGAEGVLEGMGEMLNDQDIGMVEKMAMNLADMAHDDNALEVGQDVSCKLSFIMSLLRNLVGEGHHVLIFSQTRKMLNLIQEAIILEGYAFLRIDGTTKVSDRERIVKDFQEGCGAPVFLLTTQVGGLGLTLTKATRVIVVDPAWNPSTDNQSVDRAYRIGQTKNVIVYRLMTSATIEEKIYKLQVLKGALFRTATEQKEQTRYFSKSEIQELFSLPQQGFDVSLTHKQLQEEHGQQVVLDESLRKHIQFLEQQGIAGVSHHSLLFSKTATLPTLSENELDSKPRGMPMMPQQYYKGSSSDYVANGASFALKPKDESFTVRNYIPSNRSAESPEEIKARINRLSQTLSNAVLLSKLPDGGEKIRRQINELDEKLTSAEKGLKEGGTEVISLDXLIQDMESLCSAKVKCFE

SEQ ID NO: 8528 - protein, 569 aa, Zea mays
  unsure (1)..(569): unsure at all Xaa locations
XLLRLHMMGCSSGLCISYMIRRRLLLTGTPIQNSLQELWSLLNFILPNIFNSSQNFEEWFNAPFAXXDVSLNDEEQLLIIHRLHQVLRPFLLRRKKDEVEKYLPVKTQVILKCDMSAWQKAYYEQVTSREKVALGYGIRKKALQNLSMQLRKCCNHPYLFVEHYNMYQREEIVRASGKFELLDRLLPKLQRAGHRVLLFSQMTKLLDILEVYLQMYNFKYMRLDGSTKTEERGRLLADFNKKNSEYFMFLLSTRAGGLGLNLQTADTVIIFDSDWNPQMDQQAEDRAHRIGQKNEVRVFVLVSVGSIEEEILDRAKQKMGIDAKVIQAGLFNTTSTAQDRRALLQEILRRGTSSLGTDIPSEREINRLAARNDEEFRLFEKMDEERRLRENYKSRLMDGNEVPNWVYDNETLRKKTVADEFRNIIVGSKRRRKEVVYSDSFGDQWMKSDEGFEEIAKMTPRVKRTAYSPDIQVEYNERRKRPKSVENSADGASNPTRTPDKGRAGVSSYSKDETEDDGEDEVITSGLQKGNSFTWKTLGRKRSSHLSSSSDSKGRXHHSNVSCLDAFAR

SEQ ID NO: 8529 - protein, 335 aa, Zea mays
  unsure (1)..(335): unsure at all Xaa locations
XATWQNILHELWALLNFLLPEIFSSRETFDEWFQISGENDQQEVVQQLHKVLRPFLLRRLKSDVEKGLPPKKETILKVGMSQMQKQYYRALLQKDLEVINAGGERKRLLNIAMQLRKCCNHPYLFQGAEPGPPYTTGEHLIENAGKMVLLDKLLPKLKERDSRVLIFSQMTRLLDILEDYLMYRGYQYCRIDGNTGGEDRDASIEAFNSPGSEKFVFLLSTRAGGLGINLATADVVVLYDSDWNPQADLQAQDRAHRIGQKKEVQVFRFCTEYTIEEKVIERAYKKLALDALVIQQGRLAEQKTVNKDDLLQMVRFXGAEMVFSSKDSTLTDEDX

SEQ ID NO: 8530 - protein, 536 aa, Zea mays
  unsure (1)..(536): unsure at all Xaa locations
LFSLLNSLSFRHXRVLLTGTPLQNNIGEMYNLLNFLQPTSFPSLSSFEEKFNDLTTAEKVEELKKLVAPHMLRRLKKDAMQNIPPKIERMVPVELTSIQAEYYRAMLTKNYQVLRNIGKGGAHQSLLNIVMQLRKVCNHPYLIHGTEPESGSPEFLHEMRIKASAKLTLLHSMLKILHKEGHRVLIFSQMTKLLDILEDYLTLEFGPKTFERVDGSVSVAERQAAIARFNQDKTRFVFLLSTRSCGLGINLATADTVIIYDSDFNPHADIQAMNRAHRIGQSNRLLVYRLVVRASVEERILQLAKKKLMLDQLFVNKSESQKEVEDIIRWGTEELFGSSDSVDGKDSNEASGSVADVEFKHRRKTGGLGDVYEDKCIGGSTKLVWDENAILKLLDRSNLPSSVAESTDGDLDNDMLGTVKSIDWNDELNDHPGTNEDIAPIDNDGSELASESKQGATNRLEENEWDKLLRVRWEQYQIEEEASLGRGKRLRKAVSYRETFATLPNEALSEGSDEGDEPKREYTAAGLVLKEKKKKX

SEQ ID NO: 8531 - protein, 454 aa, Zea mays
  unsure (1)..(454): unsure at all Xaa locations
NSARGVDEAHRLKNCEASLYTTLLEFSTKNKLLITGTPLQNSVEELWALLHFLDPVKFNSKDSFVERYKNLSSFNETELANLHKELRPHILRRVIKDVEKSLPPKIERILRVEMSPLQKQYYKWILERNFQNLNKGVRGNQVSLLNIVVELKKCCNHPFLFESADHGYGGDSIGDRNKVERIVMSSGKLVLLDKLLVRLRETNHRVLIFSQMVKMLDILAEYLSLRGFQFQRLDGSTRADLRHQAMEHFNAPGSDDFCFLLSTRAGGLGINLATADTVIIFDSDWNPQNDLQAMSRAHRIGQQETVNIYRFVTCKSVEEDILERAKKKMVLDHLVIQKLNAEGRLEKKESKKGGSIFDKNELSAILRFGAEELFKEDKTDEEAKRNLESLDIDEILERAEKVETKGGEGEEGNELLSAFKVANFSSGEDDATLWSRLIQPDPAGRLDRSTRTEX

SEQ ID NO: 8532 - protein, 296 aa, Zea mays
  unsure (1)..(296): unsure at all Xaa locations
XTVQAMAFLSHLAEDKNIWGPFLVVAPASVVNNWAEELIRFCPDLKILPYWGPERMILRKNINPKRLYRRDASFHILITNYQILVNEEKLLRRVKWQYMVLDEAQAIKSSSSQRWKTLLSFSCRNRLLLTGTPIQNNMAELWALLHFIMPTLFDSHEQFNEWFSKGIEGHAEHGGALNEHQLSRLHAILKPFMLRRVKIDVIAEMTKKKEEIVPCKLSSRQQVFYQAIKNKISLNELLAGSRGSLNDKKLLSLMNIVMQLRKVVGCYSIFLKNPSLTXILLNVTPFLVLIGCYFSX

SEQ ID NO: 8533 - protein, 680 aa, Zea mays
  unsure (1)..(680): unsure at all Xaa locations
QEVVQQLHKVLRPFLLRRLKSDVEKGLPPKKETILKVGMSQMQKQYYRALLQKDLEVINAGGERKRLLNIAMQLRKCCNHPYLFQGAEPGPPYTTGEHLVENAGKMVLLDKLLPKLKERDSRVLIFSQMTRLLDILEDYLMYRGYQYCRIDGNTGGEDRDASIEAFNKPGSEKFVFLLSTRAGGLGINLATADVVVLYDSDWNPQADLQAQDRAHRIGQKKEVQVFRFCTEYTIEEKVIERAYKKLALDALVIQQGRLAEQKTVNKDDLLQMVRFGAEMVFSSKDSTITDEDIDRIIAKGEETTAELDAKMKKFTEDAIKFKMDDNAELYDFDDXXKDENKVDFKKLVSDNWIEPPRRERKRNYSESDYFKQALRQGAPTKPREPRIPRMPHLHDFQFFNNQRLNELYEKEVRYLMQANQKKDTIDGEDEDQLEPLTAEEQEEKEQLLEEGFASWTRRDFNTFIRACEKYGRNDIKSISSEMEGKTEEEVQRYAKVFKERYKELTDYDRIIKNIERGEARISRKDEIMKAIGKKLDRYKNPWLELKIQYGQNKGKFYNEECDRFMLCMVHKLGYGNWDELKAAFRMSPLFRFDWFVKSRTTQELARRCDTLIRLVEKENQEYDEQERQARKEKRLAKNTTPTKRAALRNSEGESAPLSSFKRRRQSLMDDYVGSGRRKRG

SEQ ID NO: 8534 - protein, 637 aa, Zea mays
  unsure (1)..(637): unsure at all Xaa locations
AKTLNPCWSAYNIADRRAPPVYVNLFTGQATTQFPSMTETVRGGILADAMGLGKTVMTIALILSNPRGEFSNCIKGDTRYLGDRATRXXIHXXTSSVRGGTLVVCPMSLLGQWKDELEAHSAQGALSVFVHYAGDKTSSLMLMAQHDVVLTTYGVLSAACKTXXCNSIFHRMDWYRIVLDEAHTIKSPKTKSAQAAYRLKSECRWCLTGTPLQNNLEDLYSLLCFLHVEPWCNAKWWQRLIQKPYENGDDRGLKLVRAILRPLMLRRTKETKDKIGNPILVLPPARIEVVECEQTDHERDFYEALFRRSKVQFDKFVAQGSVLNNYANILELLLRLRQCCDHPFLVISRADPKKYADLNQLAQQFLEGVQQSSSGRQNVVPSLAYVEGVVEEIRQGATMECPICLESASDDPVLTPCAHRMCGECLVSSWRTPEGGPCPLCRRHISKSDLIVLPAQSRFQVDAKNNWKDSCKVKTLVTMLESLQRKQEKSIVFSQFTSFFDLLEIRFTQKGIKFLRFDGKLSQKHKEKVLKEFSESQDKLVLMMSLKAGGVGLNLTAASNVFMMDPWWNPAVEEQAIMRIHRIGQKREVRVRRFIVKGTVEERMQQVQMRKQRMVSGALTDEEIRGARIEHLKMLFK

SEQ ID NO: 8535 - protein, 567 aa, Zea mays
  unsure (1)..(567): unsure at all Xaa locations
XSLSSRRPLASWAGPVSKHKKPKAPLYXGGSNLIICPMTLISQWKAEIEAHTKPGTANIYVHYGQNRPKDASIIGQSDIVLTTYGVVSSEFSIDGSTENGALYSVHWFRVVLDEAHMIKSSKSLISLAAAALTADRRWCLTGTPIQNNLEDLYSLFRFLKVEPWRNWALWNKLVQKPYEEGDERGLKLLQSILKPIMLRRTKNCTDKEGRPILNLPPANIEVKYCVLSEAEKDFYEALFRRSKVKFDQFVEQGRVLHNYASILELLLRLRQCCDHPFLVMSRGDTKEYADLNKLAKRFLRGGNGAVNGDSCIPSRAYIEQVVQELQKDEGECPICLEAFEDAVLTPCAHRLCRECLLSSWRSATAGLCPVCRMSMSKQDLITAPTDNRFQIDVEKNWVESSKISALLQELEALRSSGAKSIVFSQWTAFLDLLQIPLSRNNFSFARLDGTLNLQQREKVIKEFSEDKGILVLLMSLKAGGVGINLTAASNAFVMDPWWNPAVEEQAVMRIHRIGQTKTVSIRRFIVKGTVEERMEAVQARKQRMISGALTDQEVRTARIEELKMLFS

SEQ ID NO: 8536 - protein, 255 aa, Zea mays
  unsure (1)..(255): unsure at all Xaa locations
XGLEKTVQVLSFLGSLHNSGMYKPSIVVCPVTLLQQWQREASRWYPKFKVEILHDSANGSSKKSKAYSDSDSEGSWDSDQEEVRRAKPAKKWDDLISRVVNSGSGLLLTTYEQLRILGEKLLDIEWGYAVLDEGHRIRNPNAEITLVCKQLQTVHRIIMTGAPIQNKLSELWSLFDFVFPGKLGVLPVFETEFSVPITVGGYANATPLQVSTAYRCAIVLRDLIMPYLLRRMKVDVNAQLPKKTEHVLFCSLTAX

SEQ ID NO: 8537 - protein, 332 aa, Zea mays
  unsure (1)..(332): unsure at all Xaa locations
XEQMLPRKKEKSIYANMTEVQKRIQDHLVEKTFDVYLNDESDIVLRRPGIKTKLNSLFIQLRKNCAHPDLLEAAFGTTSLYPPVNKLLEQCGKFQLLDRLLTSLLARKHKVLIFSQWTKVLDILEYYLDSKGLGVCRIDGSVNLEERRRQIAEFNDLNSSLNVFILSTRAGGLGINLTSADTCILYDSDWNPQMDQQAMDRCHRIGQTRPVHVYRLATSYSVEERIIKKAFGKLKLEHVVIGKGQFEQERAKPNALEEGELLALLRDEQDEEDRMIQTDISDEDLLKLMDRSDLSGPPGAADAAPLIPLKGPGWEVVVPTKSGGGMLSSLTS

SEQ ID NO: 8538 - protein, 332 aa, Zea mays; identical to SEQ ID NO: 8537
  unsure (1)..(332): unsure at all Xaa locations

SEQ ID NO: 8539 - protein, 521 aa, Zea mays
PTRPSWVTQLEEHLKAGSLKVYMYHGERTRDKKELLKYDLVLTTYSILGTEFEQEDSPVKDIEWFRVILDEAHVIKNSAARQTKAVIALNAERRWVVTGTPIQNSSFDLYPLMAFLRFQPFSIKSYWQSLIQRPLEKGSKAGLSRLQNLLGAISLRRIKEMDDGNKSMVELPSKTVLACYIDLSAEEREYYDQMEQEGRNKMQEFGDRDSILSNYSTVLYFILRLRQLCDDVALCPLDMKAWFPASSIEDVSKHPELLKKLALLVDDGDDFDCPICLSPPTKTVITSCTHIYCQTCILKILKSSSSRCPICRRTLSKEDLFLAPEVKHPDEDGSGNLESDRPLSSKVQALLKLLTASQNEDPSSKSVVFSQFRKMLILLEAPLRRAGFKTLRLDGSMSAKKRLQVIQEFSHGGSDSPTVLLASLKAAGAGVNLTAASTVYLFDPWWNPGVEEQAMDRVHRIGQKKEVKVIRLIVKGSIEERILALQERKKRLISGAFGKKGGKNEKEMRVEELRMMLGLGK

SEQ ID NO: 8540 - protein, 799 aa, Zea mays
  unsure (1)..(799): unsure at all Xaa locations
XDTSDTDFVADSGDAVENDDSDEEFAPDKDTPPAPAVPEAALPRREKRRRGKKARRDAPPLPWEEWQVANDSWLDERNAADGGVEATDATVAAVPTADPAPEVVLRLLRFQKEWLAWALAQEASVTRGGILADEMGMGKTIQAISLVLTARRLRPPDHHSAVGCTLVVCPVVAVIQWTEEIERHTASGSVRVLIYHGAKRVTQSFDFNSYDFVITTYSTIEADYRKHIMPPKTRCQYCNKLFYPNKMKVHLMYHCGPNAKRTEAQAKQQSKRKWDSSKEKVKEXXRRVHKKGDEVNKDFQESDELGRQLRGQSPLHSVRWERVILDEAHFIKDRRCNTARAVFALESECKWALSGTPLQNRVGELYSLIRFLQIFPYSYYFCKDCSCEILDTSMKKQCXXCGHSSVRHFCWWNKYISTPIQYGSTSFEGKRAMTLLKEKVLKGIVLRRTKKGRAADLALPPKIVTLRRDSFDKNEMEFYEALYTQSVTQFDAYVDAGTLMNNYAHIFDLLTRLRQAVDHPYLVAYSKTAGHPEGMKNEGNESMESQCGICHNLAEDVVVTSCDHAFCKTCLIDYSAALGNVSCPSCSIPLTVDLTAQNSVGKVTRSVKGRKCSGILSRLRLVDFKTSTKIDALREEIRNMIEHDGSAKGIVFSQFTSFLDLIQFSLERSGIKCVQLNGAMNITEKGRAIDTFTHDADCRVFLMSLKAGGVALNLTVASHVFLMDPWWNPAVENQAQDRIHRIGQFKPIKSTRFVIKDTVEERILQLQQKKQLVFEGTVGDSPDAMSKLTEADLKFLFQI

SEQ ID NO: 8541 - protein, 376 aa, Zea mays
  unsure (1)..(376): unsure at all Xaa locations
XHASDALEVGQDVSCKLSFIMSLLRNLVGEGHHVLIFSQTRKMLNLIQEAIILEGYAFLRIDGTTKVSDRERIVKDFQEGCGAPVFLLTTQVGGLGLTLTKATRVIVVDPAWNPSTDNQSVDRAYRIGQTKNVIVYRLMTSATIEEKIYKLQVLKGALFRTATEQKEQTRYFSKSEIQELFSLPQQGFDVSLTHKQLQEEHGQQVVLDESLRKHIQFLEQQGITGVSHHSLLFSKTATLPTLSENDALDSKRGMPMMPQQYYKGSSSDYVANGASFALKPKDESFTVRNYIPSNRSAESPEEIKARINRLSQTLSNAVLLSKLPDGGEKIRRQINELDEKLTSAEKGLKEGGTEVISLDXXDPRHGESALGKSKVF

SEQ ID NO: 8542 - protein, 162 aa, Zea mays
  unsure (1)..(162): unsure at all Xaa locations
DPLKGKGMHGPYLIIAPLSTLSNWVNEISRFVPSVSSIIYHGDKVARAEIRRKFMPKTAGPDFPIIVTSYEIAMLDARFLAHYRWTYVVVDEGHRLKNSKCKLLREMKRIPMANKLLLTGTPLQNNLAELWSLLNFILPDIFSSNEEFESWYDSQNHFRXXD

SEQ ID NO: 8543 - protein, 709 aa, Zea mays
  unsure (1)..(709): unsure at all Xaa locations
XGRELSSSRPILKPFMLRRVKIDVIAEMTKKKEEIVPCKLSSRQQVFYQAIKNKISLNELLAGSRGSLNDKKLLSLMNIVMQLRKVCNHPELFERNEGSSYFNFADIPNSLLSPPFGELQDVHYAGKRNPIIFEIPKLVYEGIISNTENSGNICGFQNGYLNRLFNIFLPSNIYRSAIPEVSSSKESLLSSGAFGFTRLSNLCPVEASFLATASLFERLVFSVMQWNRNYTAEILDEFLDSEDTGIQSSQNDSTKVRAVARLLLSSTKAKPSLLRTKIGTGPIDGPYEALVLSHRDRLASNIRLLRSAYAFIPPARAPPINVWCADRNFAYKFTDEMYDPWAKKLFLGFARTSEFNGPRQPIAPHPLIQELNTDLPIIEPMLQLPYRIFGSSPPMSNFDPAKMLTDSGKLHTLDMLLRRLRAEGHRVLLFAQMTKMLDILEDYMNFRKFKYFRLDGSSAISDRRDMVRDFQNRNDIFVFLLSTRAGGLGINLTAADTVIFYEIDWNPTQDQQAMDRTHRLGQTKEVTVYRLICKDTIEEKILQRAKQKNAVQELVMKGKHVQDDHLMRQEDVVSLLIDDXXQIAHKLKEISMQAKDRQKRRRAKGIKVDKEGDLTLEDLDDATAEAVDQDKTTSKKKKSSHKKHTNTHDNDKGRCGRSSGESENEQMPESRPKRSKRLMKSITDDKELAAAADHXETGKXSGKSLSPXL

SEQ ID NO: 8544 - protein, 696 aa, Zea mays
  unsure (1)..(696): unsure at all Xaa locations
XHSAPRHSTLVDVQLSRLRPILKPFMLRRVKIDVIAEMTKKKEEIVPCKLSSRQQVFYQAIKNKISLNELLAGSRGSLNDKKLLSLMNIVMQLRKVCNHPELFERNEGSSYFNFAEIPNSLLSPPFGELQDVHYAGKRNPIIFEIPKLVYEGIISNMENSGNICGFQNGYLNRLFNIFLPSNIYRSAIPEVSSSKESLLSSGAFGFTRLSNLCPVEASFLATASLFERLVFSVMQWNRNYTAEILDEFLDSEDTGIQSSQNDSTKVRAVARLLLSSTKAKPSLLRTKIGTGPIDGPYEALVLSHRDRLASNIRLLRSAYAFIPPARAPPINVWCADRNFAYKFTDEMYDPWAKKLFLGFARTSEFNGPRQPIAPHXLIQELNTDLPIIEPMLQLPYRIFGSSPPMSNFDPAKMLTDSGKLHTLDMLLRRLRAEGHRVLLFAQMTKMLDILEDYMNFRKFKYFRLDGSSAISDRRDMVRDFQNRNDIFVFLLSTRAGGLGINLTAADTVIFYEIDWNPTQDQQAMDRTHRLGQTKEVTVYRLICKDTIEEKILQRAKQKNAVQELVMKGKHVQDDHLMRQEDVVSLLIDDXXQIAHKLKEISMQAKDRQKRRRAKGIKVDKEGDLTLEDLDDATAEAVDQDXNDQQKETSSSKRSKLTRKXKNLAPAQLFTEINAPELPKKQCXQCCPRTKVLQAVC

SEQ ID NO: 8545 - protein, 233 aa, Zea mays
  unsure (1)..(233): unsure at all Xaa locations
XIRHEGMFKEMIVHRXXNVLLTTYEYLMNKHDRPKLSKIQWHYIIIDEGHRIKNASCKLNADLKLYRSSHRILLTGTPLQNNLEELWALLNFLLPNIFNSSEDFSQWFNKPFESNGDNSPDEALLSEEENLLIINRLHQVLRPFVLRRLKHKVENELPEKIERLVRCEASAYQKLLMTRVEENLGGIGAVKVRFVHNSVMELXNIXHHPYLSQLHXERDEGYLPXHFTTSILX

SEQ ID NO: 8546 - protein, 322 aa, Zea mays
  unsure (1)..(322): unsure at all Xaa locations
XXDSFKANQPVXDPFLQLPYRIGGSSPPMSNFDPAKMLTDSGKLHTLDMLLRRLRVEGHRVLLFAQMTKMLDILEDYMNFRKFKYFRLDGSSAISDRRDMVRAFQNRNDIFVFLLSTRAGGLGINLTAADTVIFYEIDWNPTQDQQAMDRTHRLGQTKEVTVYRLICKDTIEEKILQRAKQKNAVQELVMKGKHVQDDHLMRQEDVVSLLIDDXXQIAHKLKEISMQAKDRQKRRRAKGIKVDKEGDLTLEDLDDATXEAVDQDKTTSKKEPRNSDSRYSAHGGCHVRAPAQLFTETNAPELPKKQVXRQCCPRTKVLQAVC

SEQ ID NO: 8547 - protein, 257 aa, Zea mays
  unsure (1)..(257): unsure at all Xaa locations
LKRIPMDNKLLLTGTPLQNNLAELWSLLNFILPDIFSSHQEFESWYNFSRFDFSGGNEETDEKKRLHVVSKLHAILRPFLLRRMKEDVEQMLPRKKEIIIYANMTEQQKQIQHHLIEKTFDNYLHEESDIILKRPGIRARLHNLMIQLRKNCNHPDLLESPVDSTGLYPPVEKLLEQCGKFQLFDRLLNFLMAQKHKVLVFSQWTKVLDIIEYYLDSKGHAVCRIDGNVKLEERRRQVIPFPHLSFGCFLFYMAEXX

SEQ ID NO: 8548 - protein, 339 aa, Zea mays
  unsure (1)..(339): unsure at all Xaa locations
PRVVTLRRDSFDKSEMEFYEALYTQSVTXFDAYVDAGTLMNNYAHIFDLLTRLRQAVDHPYLVAYSKTAGHPEGMKNEGNESMESQCGICHNLAEDVVVTSCDHAFCKTCLIDYSAALGNVSCPSCSIPLTVDLTAQNSVGKVTRSVKGRKCSGILSRLRLVDFKTSTKIDALREEIRNMIEHDGSAKGIVFSQFTSFLDLIQFSLERSGIKCVQLNGAMNITEKGRAIDTFTHDADCRVFLMSLKAGGVAKNLTVASHVFLMDPWWNPAVENQAQDRIHRIGQFKPIKSTRFVIKDTVEERILQLQQKKELVFEGTVGDSSYAMSKLTEADLKFLFQI

SEQ ID NO: 8549 - protein, 369 aa, Zea mays
  unsure (1)..(369): unsure at all Xaa locations
XQKKRAFYCGDVGEGCRQKFKGYDAAGTIRXENYANILVLLLRVXQACDHPLLLKGHESDLGEGNSIERGKQLPKETVTNLLEKVEKGAGICSICNDPPEDAVVTTCGHVFCYQCVHERLTSDGHVCPYALCGNKLSFRSVFTPAVLKLCISPKPEFGEETSCSTAADKPSSICESSYISSKIRAAVEILNSIIKTPALTAGDTTESIPSMAPPVKAIVFSQWTGMLDLLELSLSRNGIQFRRLDGAMSLDLREKEVNGFKTDPEVRVMLMSLKAGNLGLNMVAACHVIMLDPWWNPYAEDQAVDRAHRIGQTRPVTVSRFTVKDTVEDRILALQEKKREMVESAFGEDGSRGTATKLTVEDLRYLFMV

SEQ ID NO: 8550 - protein, 663 aa, Zea mays
  unsure (1)..(663): unsure at all Xaa locations
KNSARGSHDGLDDYWKDFALAVESTKLDEVDEAAIEKEDNGKMEDIDCNHDIRIHEDLGHVCRVCGMIVRRADSIIDYQWKKASRRRTNGYGGHSKDADEIDCGTVKLSEDFIVADIAIHPRHARIMKPHQLEGFNFLVKNLIGDKPGGCILAHAPGTGKTFMLISFIQSFMARYPSARPLVVLPKGILGIWKTEIKRWQVQDIPVYDFYSVKAEKRVEQLQILKSWEDKMSILFLGYKQFSTIVTDDGGSNVTAACRDRLLKVPNLLILDEGHTPRNRETNVLESLNRVETPRKVVLSGTLFQNHVEEVFNILNLVRPKFLRMESSRPTARRIMSQVEIVGRSSKGLADGAFTKAVEETLLNDENFKRKAHVIRGLRELTKDVLHYYKGDILDELPGLVDFSVFLKLTPKQKDIIYKLEAHDRFKRNAVGSALYIHPCLSELSDRANTFRDDLVDSLVDSITVRDGVKANFFMNILSLANSAGEKVLAFSQYISPMIFFERLLVKKKGWHVGKEIFMISGDTSQEDRELATDHFNNSADAKIMFGSIKACGEGXISLVGASRVVILDVHLNPSVTRQAIGRAFRPGQQKKVFVYRLVAADSDEVKVHETAFKKEVIPKLWFEWSEHCTTEDFKLGQIDIDDSGDELLDTKAIRKDIKALYRR

SEQ ID NO: 8551 - protein, 221 aa, Zea mays
  unsure (1)..(221): unsure at all Xaa locations
VDEGHRLLNKDSKLFGQRKDYNTKHRVLLTGTPVQNNLDELFMLMHFLEGESFGSITDLQEEFKDINQDKQIEKLHGMLKPHLLRRFKKDVMKELPPKKELILRVELTRKQKEYYKPILTKNYDVLARRNGGHTSLINVVMELRKLCCHGFMIDEPDLEPANPEEGLKTLLYSSGKMQLLHKMMEKLXXQXHRSLIYSQFHHMLDLLEDYLNYRKWTYERX

SEQ ID NO: 8552 - protein, 151 aa, Zea mays
  unsure (1)..(151): unsure at all Xaa locations
XWRYIIIDEAHRIKNENSLLSKTMRIYNTNYRLLITGTPLQNNLHELWALLNFLLPEIFSSAETFDEWFQISGENDQQEVVQQLHKVLRPFLLRRLKSDVEKGLPPKKEAILKVGMSQMQKQYYRALLQKDLEVINAGGERKRLLNIAMQX

SEQ ID NO: 8553 - protein, 188 aa, Zea mays
  unsure (1)..(188): unsure at all Xaa locations
XCDLLICDEAHRLINDQTLTNKALAALPCSRRILLSGAPMQNDLEEFFSMVNFTNPGVLGDASYFRRYYEAPIICGREPTASAEEKKLGSERSAELSAKVNQFILRRTNALLSNHLPPKIIEVVCCKLTPLQTTLYNHFIHSKNIKRLISEETKQSKILAYITALKKLCNHPKVNXFNISTGDAFILQ

SEQ ID NO: 8554 - protein, 958 aa, Zea mays
  unsure (1)..(958): unsure at all Xaa locations
XIYDWIKSTGTIRVDPEDEKRRAQRNPMYQVKTYKNLNNKCMELRKVCNHPLLSYPFLNHGKDFMIRSCGKLWNLDRILIKLHKSGHRVLLFSTMTKLLDIMEDYLQWRRLVYRRIDGTTSLEDRESAIVDFNRPGSDCFIFLLSIRAAGRGLNLQSADTVVIYDPDPNPQNEEQAVARAHRIGQTREVKVIYMEAVVDNISSYQKEDELRNGGSGDLEDDLAGKDRYMGSIESLIRNNIQQYKIDMADEVINAGRFDQRTTHEERRMTLETLLHDEERYQDSVHDVPSLQEVNRMIARTESEVELFDQMDEDFDWTGDMTKHHQVPKWLRVNSNEVDAVVASLSKKPSRNMSSGGIALDTNETLEKRRGRPRGTGKYSIYREIDDEDLEESDEDSEERNTASLPEEGRVGEFEDEEDNDDSVPDNKDESEEEEPMNDDVYEFTEGLRGRKANRMEEAGSTGSSSGSRRLPPPVPSSSSKKIGSLSALDARPGTLSKRTPDDLEEGEIAMSGDSHMDLQQSGSWNHERDDGEDEQVLQPKIKRKRSIRLRPKPNAEKQEDRSGEGAFPQRAARXARRGSSYSETEXRNMSSRKVSPASRSGKLSHLSGSGEGSAELSKENWSSKAIDSTAPEFGGTKMSDSMQRKCKNVISKLWRRIDKEGHQMIPNISSWWRRNENSSFRGPAGSTLDLQKIEQRVDGLEYGAVTEFIADMQQMLKSVVQHFSYRHEVRIEAETLHNLFFNIMKIAFPDSDFMEAKNAMSFSNPGSGAAAAPSSSKHAAPSLKRSRAXVPVPVPVKQSSSMARDTAAGTISLARRSRPAGPTAPGQRETPDMAHPSDMFIVKKKRQERARSGIGSPSSSXPRRRTSXSPANPGRPGPAPSPRGARTPXSRGIHRHTRLSSRCRWGSGGAHSDHQAGASSSVQWAKPAKRLRTDRGQRRPSLTVGSSLASYGCVNAST

SEQ ID NO: 8555 - protein, 741 aa, Zea mays
  unsure (1)..(741): unsure at all Xaa locations
NISREKSEDDLPEGVLAVPLLRHQKMALAWMVSKENSSHCAGGILADDQGLGKTVSTIALIQKQRMEQSKFMFVDSDRLKSEALNLDEDDEGEQTVSNEPKKDQGACSLSTSAGTKKAKVSTSSASTSRSMTRPAAGTLVVCPASVLKQWSNELTDKVSESAKLSVLVYHGGARTKDPRELAKYDVVVTTYTIVANEVPKQMADDDADQKNSEEXXSASNKRKPSANMQTKAKKKKKKLKDSNXXDLDSGPIARVRWFRVVLDEAQTIKNFRTVVARACCGLRAKRRWCLSGTPIQNAIDDLFSYFRFLKYDPYCTYNSFCTMIKHPIARDAINGYKKLQAVLKVVLLRRTKETVINGKPIINLPPKTINLNKVDFTQEERSFYLMLEERSRQQFKAFAAAGTLKQNYANILLMLLRLRQACDHPILVKGNQSEYGGDGSIEMAKKLPKEVVIDLLAKLEVGSTLCGLCNDTPEDAIVTICGHVFCYQCIHERITTDENMCPAPNCSRTLGLELLFSSGALKICISGKSSSAVASSSSDNESSFSQSSFVSSKIQAAIDILNSIIXHGSXXTESYTMESSRSGLGPVKAIVFSQWTGMLDLLELSLNINCIQYRRLDGTMSLNLREKNVKDFNTDPEVRVMIMSLKAGNLGLNMVSACHVILLDLWWNPYAEDQAVDRAHRIGQTRPVTVSRLTVKDTVEDRILALQEEKRTMVNSAFGDDKAGGHATRLTVEDLRYLFRI

SEQ ID NO: 8556 - protein, 159 aa, Zea mays
  unsure (1)..(159): unsure at all Xaa locations
RXQSWLGCYNRVSLSSYSVRMLDILEKFLIRKGYCFSRFDGTTPMNARQSLVDEFNRSPSKQVFLISTRAGNLGVNLVSANRVVIFDPSWNPAQDLQAQDRSFRYGQRRHVTVFRLLGAGSLEELIYSRQIYKQQLSNIAVSGKIERRYFEGVQDSVFS

SEQ ID NO: 8557 - protein, 341 aa, Zea mays
  unsure (1)..(341): unsure at all Xaa locations
XSKKQKDKFSDKYEKGVWASLTSNVTDDNAEKVRSILKPFVHIHNGNILRTLPGLRESVIILKPLPLQKSIIKKVENIGSGNNFEHEYVISLASTHPSLVTAINMSEEEASLIDKPMLAKVRSNPYEGVKTRFVIEVVRLSEALREKVLIFSQFIQPLELIKEHLRKFFKWREGKEILQMDGKILPRYRQASIEAFNNPNNDSRVLLASTRACCEGISLTGASRIVLLDVVWNPAVGRQAISRAFRIGQKKFVYTYNLITYGTGEGDKYDRQAEKDHLSKLVFSTEDEFNNVRNMLSKAVSEDKVLEEMTSHDQLKGMFLKIHYPPTESNIVYSYNQIATE

SEQ ID NO: 8558 - protein, 382 aa, Zea mays
  unsure (1)..(382): unsure at all Xaa locations
XPRVRQNDLHELWSLLEFMMPDIFATGDVDLKKLLNAEDRELISQIKSILGPFILRRLKSDVMQQLVPKIQHVKFVVMGTEQSEAYKNAINEYRAACQARSAKSSDGISNNVAGLIPKRQISNYFTQFXRKIANHPLLIRCIYGDKDVDRIXRLRYPKGAFGFQCSLVRAIQGLKNYSDFNIHQLLLSYGDVGTKGALKDEHVFASAKCQALGELLPSLANDGHRVLIFSQWTTMLDILEWALEIIGVTYRRLDGGTAVTERQTIVDTFNNDLSIFACLLSTRAGGQGLNLVGADTVIIHDMDFNPQMDRQAEDRCHRIGQQKPVTIYRLVTKDSVDENIYEIARRKLVLDAAILHSGAELDNSTDVPEKTMGEILASLLLV

SEQ ID NO: 8559 - protein, 156 aa, Zea mays
  unsure (1)..(156): unsure at all Xaa locations
XQGMWVELSGKMHVLARXLGHLRQKTDDRIVLVSNYTQTLDLFVQLCRERRYPYVRLDGSTSINKRQKLVNQFNDLSRDEFVFLLSSKAGGCGLNLVGGNRLVLFDPDWNPANDKQAAARVWRDGQKKRVYIYRFLSTGTIEEKVYQRQMSKEGLX

SEQ ID NO: 8560 - protein, 644 aa, Zea mays
  unsure (1)..(644): unsure at all Xaa locations
XDAWVKGGVLLIGYSSFRNLSLGKHVKDKNSANEITYALQCGPDILVCDEAHMIKNRRADITQALKQVRTQRRIALTGSPLQNNLMEYYCMVDFVREGFLGSTHEFRNRFQNPIENGQHTNSTSDDVKIMNQRSHILFEQLKGFVQRKSMNVVKNDLPPKKVFVITVLCLQLQRKLYKRFLDVHGFSSSGYSEKSHRSFLAKYQTLSQVWNHPGLLQMAKEQRGNLRRGVAGRCVGWGESSSDDNVENYLPNGEKQKDKADQQSKKSNIIMNEESNWWEELLEENAYGKADYSGKMTLLLDILSKSSELGDKVLVFSQSLTTLDLVEFYLAXLQINGKEGKHWKRGKDWYRLDGSTPSSDRQNLVEMFNDLENTRVKCTLISTRAGSLGINLHAANRVVLLDGSWNPTHDLQAIYRVWRYGQTKPVYAYPLMAHQTMDQFIYKRQVTKEGLAARVVDRQQVSRTISKEEMLHLFEFGEEELMEQNENGSTMIEKPSTSNTIKTSVPVPVDSLMLSLLSEQTRWISGYHEHEALLQENEEEKLTKEEQDLALSEWESLRKAASDPERKSSTVPTYPNPVRPLKPASRSRQLQQPKANSNNQKKCTNLTHLLTLRSHGTKAGCTTTCNECGQEISWETLNRDGRSR

SEQ ID NO: 8561 - protein, 579 aa, Zea mays
ELTKYDVVLTTYSIVSMEVPKQSNPDSDGEEKGKPDPYGAPVSSSGSKKRKASSSKKTKNKSVAESCLPEKPLAKVAWFRVILDEAQSIKNYRTQVARACWGLRAKRRWCLSGTPIQNAVEDLYSYFRFLRYNPYAVYKQFCTLIKIPISRNPNNGYKKLQAVLKPVMLRRTKATMLDGEPIISLPPKTVSLKTVDFTSEERGFYNTLEVESREQFKEYAAAGTVKQNYVNILLMLLRLRQACDHPHLVRGYDSCSSWMSSLEMVKKLPMERQHKLLICLQSCSAFCALCNDAPEDPVVTLCGHVFCNQCILEQLTGDDSVCPVSNCRVRLNTSSLFSRGTLECSLSKLASDFKSDDTCMEMIHAEKRPGMDSSYASSKLRAALDILLSLPKIDPTIDSKCSIGIESEKFDGKGISEQTDTKLTEKAIVFSQWTRMLDLLEVHLKASHVTYRRLDGTMSVAARDKAVNDFNMVPEVTVMIMSLKAASLGLNMVAACHVLMLDLWWNPTTEDQAVDRAHRIGQKRPVTVSRLTIKDTVEDRILALQEKKREMVASAFGEDKSGSRQTRLTVEDLNYLFMV

SEQ ID NO: 8562 - protein, 334 aa, Zea mays
  unsure (1)..(334): unsure at all Xaa locations
XHASGGYDSCSSWMSSLEMVKKLPMERQHKLLICLQSCSALCALCNDAPEPPVRPRVRPRVRPRVRPRVRTGDDSVCPVSNCRVRLNTSSLFSRGTLECSLSKLASDFKSDDTCMEMIHAEKRPGMDSSYASSKLRAALDILLSLPKIDPTIDSKCSIGIESEKFDGKGISEQTDTKLTEKAIVFSQWTRMLDLLEVHLKASHVTYRRLDGTMSVAARDKAVNDFNMVPEVTVMIMSLKAASLGLNMVAACHVLMLDLWWNPTTEDQAVDRAHRIGQKRPVTVSRLTIKDTVEDRILALQEKKREMVASAFGEDKSGSRQTRLTVEDLNYLFMV

SEQ ID NO: 8563 - protein, 334 aa, Zea mays
  unsure (1)..(334): unsure at all Xaa locations
XHASGGYDSCSSWMSSLEMVKKLPMERQHKLLICLQSCSALCALCNDAPEDPVVTLCGHVFCNQCILEQLTGDDSVCPVSNCRVRLNTSSLFSRGTLECSLSKLASDFKSDDTCMEMIHAEKRPGMDSSYASSKVRAALDILLSLPKIDPTIDSKCSIGIESEKFDGKGISEQTDTKLTEKAIVFSQWTRMLDLLEVHLKASHVTYRRLDGTMSVAARDKAVKDFNMVPEVTVMIMSLKAASLGLNMVAACHVLMLDLWWNPTTEDQVVDRAHRIGQKRPVTVSRLTIKDTVEDRILALQEKKREMVASAFGEDKSGSRQTRLTVEDLNYLFMV

SEQ ID NO: 8564 - protein, 187 aa, Zea mays
  unsure (1)..(187): unsure at all Xaa locations
XPXLYHCNSYGSILSMNGAFEVFEGTLHPYQLEGLNFLRYSWFHNKRVILGDEMGLGKTIQSIAFLASLFEDKFGPHLVVAPLSTLRNWEREFATWAPQMNVVMYFGAAASRDIIRKYEFYYPKEKLKKLKKKKSSPSNEDKKQSRIRFDVLLTSYEMINMDSSILKNIEWECLVLLFCFSIISLSX

SEQ ID NO: 8565 - protein, 254 aa, Zea mays
  unsure (1)..(254): unsure at all Xaa locations
NNDLGTTSVTVLCHIXIFWFNLILVXFAATWQNNLHELWALLNFLLPEIFSSAETFDEWFQISGENDQQEVVQQLHKVLRPFLLRRLKSDVEKGLPPKKETILKVGMSQMQKQYYRALLQKDLEVINAGGERKRLLNIAMQLRKCCNHPYLFQGAEPGPPYTTGEHLIENAGKMVLLDKLLPKLKERDSRVLIFSQVCFPIPCRFECIIYLASVCXEISDTTLDGEHVHSAPHXKLGCPRIFICLTXHHPAGMQ

SEQ ID NO: 8566 - protein, 179 aa, Zea mays
  unsure (1)..(179): unsure at all Xaa locations
CMPAVASSSSDNESSSISQSSFVSSKIQAAIDILNSIIVMDPLTESYTMESSRSGLGPVKAIVFSQWTGMLDLLELSLNINCIQYRRLDGTMSLNLREKNVKDFNTDPEVRVMIMSLKAGNLGLNMVSACHVILLDLWWNPYAEDQAVDRAHRIGQTRPVTVSRLTVKDTVEDRILALX

SEQ ID NO: 8567 - protein, 354 aa, Zea mays
  unsure (1)..(354): unsure at all Xaa locations
XKAQYVVLLSGTPALSRPIELFTQIQALYPTVYKSVSEYGNIYCKGGFFGLYQGASNHEELHNLMKATVMIRRLKKDVLSQLPVKRRQQLETLKVKIESSDSKEMIDSLRFAYQNIVNKIYTDSAVAKIPAVLDFLGTMIEEGCKFLIFAHHQPMIDAIEKHLLKKKVKCIKIDGKTPLTTRQTLVTDFQNNDDVKAAVLSIKAGGYGITLTAASTVIFAELSWTPGDIIQAEDRAHRIGQVSSVNVYYLLSNGTIDDLMWDVVQGKLENLGQMLDGQEKTLEVSQRDCRPSPSKKQKTLVGFLKRPSASTSAEEGMXPALKQPRIXGAVVACERTRSGHRQPAATMVFGSITL

SEQ ID NO: 8568 - protein, 370 aa, Zea mays
  unsure (1)..(370): unsure at all Xaa locations
XSVPVSYGLRVVQASGKLIVLDLILKKLHECGHRVLLFAQMTQTLDILQDFLELRNYTYERLDGSVRAEERFAAIRNFSSQSTKGLIRDDNRSEAFVFMISTRAGGVGLNLIGADTVIFYEQDWNPQADKQALQRAHRIGQLNHVLSINLVSQRTMKKVIMRRADRKLKLSHNIIGEEDGTDGKGGDPGIEASDMRSIIFGLHLFDPADTATETIDEDITAETFSVEKLAKLKTMSEKVVMMRSHESSEKDERAFEINPNMTDDSGTVIRRASDSIRIDPGLNEAAYLSWVKKFKEASISSEDATVGFGRQRAAPEEKLLKHDVNKQKIEEKRLAKWESLGYQTLAVKEPDITASQNISDAXGSIQFGYG

SEQ ID NO: 8569 - protein, 469 aa, Zea mays
ELTKYDVVLTTYSIVSMEVPKQSNPDSDGEEKGKPDPYGAPVSSSGSKKRKASSSKKTKNKSVAESCLPEKPLAKVAWFRVILDEAQSIKNYRTQVARACWGLRAKRRWCLSGTPIQNAVEDLYSYFRFLRYNPYAVYKQFCTLIKIPISRNPNNGYKKLQAVLKPVMLRRTKATMLDGEPIISLPPKTVSLKTVDFTSEERGFYNTLEVESREQFKEYAAAGTVKQNYVNILLMLLRLRQACDHPHLVRGYDSCSSWMSSLEMVKKLPMERQHKLLICLQSCSAFCALCNDAPEDPVVTLCGHVFCNQCILEQLTGDDSVCPVSNCRVRLNTSSLFSRGTLECSLSKLASDFKSDDTCMEMIHAEKRPGMDSSYASSKLRAALDILLSLPKIDPTIDSKCSIGIESEKFDGKGISEQTDTKLTEKAIVFSQWTRMLDLLEVHLKASHVTYRRLDGTMSVAARDKAVND

SEQ ID NO: 8570 - protein, 728 aa, Zea mays
  unsure (1)..(728): unsure at all Xaa locations
DLLEDYLSYRKWTYERIDGKISGADRQIRIDRFNAKNSTRFCFLLSTRAGGLGINLATADTVIIYDSDWNPHADLQAMARAHRLGQTSKVMIYRLVSRGTIEERMMQLTKKKILLEHLVVGRLTKANNVNQEELDDIIRYGSKELFEDENDESRQIHYDEAAIERLLDRDQVDGDESVEDEEEDGFLKGFKVANFEYIDEAKAQAEKEEARRKAAAEAENSERNYWDELLKDRYDVQKVEEHTAMGKGKRSRKQMAAADEDDIHDLSSEDEDYSLEDDISDNDTSLQGNISGKRGQYSKRKSRNVDSIPLMEGEGRTLRVLGFNHAQRAMFLQTLNRFGFQNYDWKEYLPRLKGKSVEEIQRYAELVMAHLVEEINXXSDYFSDGVPKEMMRVDDVLVRIANISLIEEKMAATGPGKITNIFPNYLLYEFQGLSGGRIWKAEHDLLLLRGILKHGYARWQYISDDRENGLFEAARRELHLPSVNEIIGAQLNEANGNLEGAQEGQANTTSMSHYKEIQRKIVEFLRKRYHLMERALNMEYAVIKKKIPVPDDITEQGVPXXGHAPFIPDISELLRELPNLEPISTNELVSEGTAGQLQVPHLYNKMCGVLEESGAYALSSFFGDKSASSSLANSLRQFETVCENVVEALRPHQNGTGSXPSKRNWXMQPPKQQQQQLLNKIQAMXAPHGQSSTAKADMEIDVXVPEWXERESPSNHYVYCGQNVRYIL

SEQ ID NO: 8571 - protein, 228 aa, Zea mays
  unsure (1)..(228): unsure at all Xaa locations
XKLEPCPRLASTRQIISVWTETACYSISPTGAGSLEELIYSRQIYKQHSNIAVSGKIERRYFEGVQDDKNRRPSKQVFLISTRAGNLGVNLVSANRVVIFDPSWNPAQDLQAQDRSFRYGQRRHVTVFRLLGAGSLEELIYSRQIYKQQLSNIAVSGKIERRYFEGVQDDKKFQGELFGICNLFRDLSDKLFTSEIIEMHGEHGKSSATEATGIREIVDTDLFXFTRE

SEQ ID NO: 8572 - protein, 168 aa, Zea mays
  unsure (1)..(168): unsure at all Xaa locations
XISSVIRDLPPKQKQVLKVVLNPRHQKVYQTHLQRERQKILGLIEDVNKNRFTIFQSLTLLRQLSLDPSLIDPSLSGIRASKLDVLFEQLQDLVAEGHRALIFSQFTGFLGKVRERLIEENIEFCYLDGSTRNRADVVSEFKNGAAQKLKISLKAGGFGLNLPRRLGV

SEQ ID NO: 8573 - protein, 177 aa, Zea mays
  unsure (1)..(177): unsure at all Xaa locations
IRXSRCIKIDGKTPLTTRQTLVTDFQNNDDVKAAVLSIKAGGYGITLTAASTVIFAELSWTPGDIIQAEDRAHRIGQVSSVNVYYLLSNGTIDDLMWDVVQGKLENLGQMLDGQEKTLEVSQRDCRPSPSKKQKTLVGFLKRPSASTSAEEGMXPALNEAASDLRRGRGLXANQIRS

SEQ ID NO: 8574 - protein, 268 aa, Zea mays
  unsure (1)..(268): unsure at all Xaa locations
XTRPXVDFSVFLKLTPKQKDIVHKLEMHDRFKRSAVGSALYIHPCLSGLSDRAHTLRDDSVDSLMDSINVRDGVKANFFMNILSLANSAGEKVLAFSQYILPMTFFERLLVKKKGWHVGREIFMISGDTSQEDREAAVDRFNISADAKVLFGSIRACGEGISIVGASRVVILDVHLNPSVTRQAIGRAFRPGQQKKVFVYRLVAADSDEVKVHETAFKKEVIQKLWFEWSEQCTTEDFKLGQVDIDDSGDELLDTRAIRQDIKALYRR

SEQ ID NO: 8575 - protein, 168 aa, Zea mays
DLLELILYSFHMFLLQNNLHELWAFLNFLLPEVFSSAETFDEWFQISGENDQQEVVQQLHKVLRPFLLRRLKSDVEKGLPPKKETILKVGMSQMQKQYYKALLQKDLEVVNGGGERKRLLNIAMQLRKCCNHPYLFQGAEPGPPYTTGDHKVTNAGKIYITSRSFRKV

SEQ ID NO: 8576 - protein, 506 aa, Autographa californica nucleopolyhedrovirus
MDNYKLQLQEFFDQAPDNDDPNFEHQTPNLLAHQKKGIQWMINREKNGRPNGGVLADDMGLGKTLSVLMLIAKNNSLQLKTLIVCPLSLINHWVTENKKHDLNFNILKYYKSLDADTVEHYHIVVTTYDVLLAHFKLIKQNKQSSLFSTRWHRVVLDEAHIIKNCKTGVHNAACALTATNRWCITGTPIHNKHWDMYSMINFLQCRPFNNPRVWKMLNKNNDSTNRIKSIIKKIVLKRDKSEISSNIPKHTVEYVHVNFNEEEKTLYDKLKCESEEAYVKAVAARENENALSRLQQMQHVLWLILKLRQICCHPYLAMHGKNILETNDCFKMDYMSSKCKRVLDLVDDILNTSNDKIILVSQWVEYLKIFENFFKQKNIATLMYTGQLKVEDRILAETTFNDAANTQHRILLLSIKCGGVGLNLIGGNHIVMLEPHWNPQIELQAQDRISRMGQTKNTYVYKMLNVEDNSIEKYIKQRQDKKIAFVNTVFEETLLNYEDIKKFFNL

SEQ ID NO: 8577 - protein, 1953 aa, Schizosaccharomyces pombe
MTTRLDRLVVLLDSGSTSVVRETAAKQIGDIQKVHPDELYNLLGRVVPYLKSKNWDTRVAAAKAIGGIVENVPVWNPNRTSPVKKEETEDLPSFNGDTEEKPFIKTEEGAPASSQSQVVVSSNLTSNSEVSKLEEERLSTRSHSQEIKPIVDFGPDEETAKELNTELKGKFENSLLSFESFDIANVLKAGKKLLGSASRDYDVNPANYSTHYLQQLSNLKSRLDLAGEYLDDSIMNDLGDNVGSNSKGSPTTSIPEHKTSINNNKPEDTPTPSENVHLSARQRNALKRKARQMKNSQKVRVIDVAPTLVHQQNSTSSADKKTGADYNFTAQSRSDRLVVEHKAPIVPSAAVAVTSDSVWPFETLVELLLIDMFDPSWEIRHGACMGLREIIRYAGFGYGRVVGKSEAENEQLNKKYFDDLLCRIACVFALDRFGDYLADQVVAPIRESVSQVLGVALIYVPNDSVFSMYKVLHSLVFQNELGLTNTVWEAAHGGMLGIKYLVAVKYPLFFSHSDYLDSLINTVIHGLANHDDDVRAVSALTLLPIADKLVQEKLSSCKNLLKVLWDCLDDVKDDLSSSTSCVMDLLSSLCSFTEVMNLMQETANSDPEFSFETLVPRLFHLMRYTLTGVRRSVVYALTKFISVQTSCSWITGLTLRLCFQNVLLEQQEDISKSSCELAQRVMDILYRDGPESFSKLLYSHIEPMLKVSITPIGSFRRPYPLDTTLIVKPSGQPYAPSTSRERNNNISELSNSRTKHRAKDDPKGSFCFSVDEPMLNGDVEFVGEERMLKARLRASSLLGRIIGRWKRDEILLFFKPFLQACLTSSFSTPVVLGSRLIESFFEVEDNDLTIQKDELYHLLCDQFATVPRENYANLVSQLHVVRAQCNALLNTFLDVGRLSRSKIPSLAVVVKGDPEAGPIAFGIADAEKLVGPTYENLCKLLSPSQKAQSSKALNEIKYLIIDEISIYKIAKERQDIQCSASIASAMVTYDKLPKKLNSIIKGIMESIKKEQFSCLQMHSASAMMKLISACYKESRQVISEKIVRNLCAYVCMDTTETPIFHDSGKNGILSLHSIGTSDDNDEQVSGKLVDDSDDVSNDRKSSLSSVSDKDAAVLQRMGAQLTLQQMAQNFGSSLFSRVPVLSQCLFVPLQQYAESGFPSEVDQASCTVGQDLLDAMSILRFLVAYLDSGLQSEIVSTLPHLLATLQSNYSAVRNMASKCFAAITESNAAGSKALHLLVEDVVPLLGDASSTIHRQGAIECIYHVVQRLGVRILPYILYLIIPLLGRMSDADQDVRVLATTSFATLVKLVPLEAGLPDPPDLPQYLLDSREKERKFLEQMLNPSKVEAFSIPVPISADLRKYQQEGVNWLAFLNKYELHGILCDDMGLGKTLQTICIVASDHYNRQKLFEESGSPKFAHVPSLIVCPSTLAGHWQQELSTYAPFLKVSAYVGPPAERAKIRSKMKKSDVVVTSYDICRNDVDELVKIDWNYCVLDEGHVIKNARAKLTKAVKSLRSYHRLILSGTPIQNNVLELWSLFDFLMPGFLGTEKTFQERFVRPIAASRDAKSSSKERERGTLALEAIHKQVLPFMLRRLKEDVLADLPPKIIQDYYCDMSDLQRKLLNDFVSQLNINEELEDDETEKTQGTRKKKSQKAHIFQALQYMRKLCNHPALILTEKHPKRNAIVKQLAKENSGLHDLKHAPKLTALGQLLRDCGLGNSSVNSNGIDSALTNAVSEHRVLIFCQLKDMLDMVEKDLLQATMPDVTYMRLDGSVEPTKRQEAVTKFNNDPSIDVLLLTTHVGGLGLNLTGADTVIFVEHDWNPMRDLQAMDRAHRIGQKKVVNVYRLITRGCLEEKIMGLQRFKMNVASTVVNQQNAGLSSIGTDQILDLFNTTADEQQTVQNIDKEESEDAAGRGLSGTSKKALEGLPEMWDESQYDEFNLDGFISTLPKDAS

SEQ ID NO: 8578 - protein, 635 aa, Schizosaccharomyces pombe
PDLPQYLLDSREKERKFLEQMLNPSKVEAFSIPVPISADLRKYQQEGVNWLAFLNKYELHGILCDDMGLGKTLQTICIVASDHYNRQKLFEESGSPKFAHVPSLIVCPSTLAGHWQQELSTYAPFLKVSAYVGPPAERAKIRSKMKKSDVVVTSYDICRNDVDELVKIDWNYCVLDEGHVIKNARAKLTKAVKSLRSYHRLILSGTPIQNNVLELWSLFDFLMPGFLGTEKTFQERFVRPIAASRDAKSSSKERERGTLALEAIHKQVLPFMLRRLKEDVLADLPPKIIQDYYCDMSDLQRKLLNDFVSQLNINEELEDDETEKTQGTRKKKSQKAHIFQALQYMRKLCNHPALILTEKHPKRNAIVKQLAKENSGLHDLKHAPKLTALGQLLRDCGLGNSSVNSNGIDSALTNAVSEHRVLIFCQLKDMLDMVEKDLLQATMPDVTYMRLDGSVEPTKRQEAVTKFNNDPSIDVLLLTTHVGGLGLNLTGADTVIFVEHDWNPMRDLQAMDRAHRIGQKKVVNVYRLITRGCLEEKIMGLQRFKMNVASTVVNQQNAGLSSIGTDQILDLFNTTADEQQTVQNIDKEESEDAAGRGLSGTSKKALEGLPEMWDESQYDEFNLDGFISTLPKDAS

SEQ ID NO: 8579 - protein, 1680 aa, Schizosaccharomyces pombe
MFAVQGNQKFPKGLTKDNIQSLYQQWQVMRNQGATEENNPEFAQISSILRMVQRAHYARMQQMRNQSSEFPDAENTNLRKQQDTLPTTGFNNLPEGKAGMQTLPGRPASNGPTPPNPGNGNVGLNNPSYMNSQASPNIMNAPLQRDTSVPPAPSMVHPHTNTNANSNNLKVYANQLSQQNTSNPTYHNAYDMASMMKNGSRMNNSFPPTTPYPPANDTTVNSSLPHSFASPSSTFEQPHTVQSRAPSVDTTSSSHSFSARNIPANVSMQQQMGRRGSIPVNPSTFSASSPPSGSMLASPYNGYQNDAASFAHSKLPSSANPNTPFNSTATVDVGAAGSHFPYPQPSNLDAINAKTYFQSSSNSPAPYVYRNNLPPSATSFQPSSSRSPSVDPNTVKSAQHIPRMSPSPSASALKTQSHVPSAKVPPTSKLNHAQLAMLKSQIVAYNCLNSPNGQVPPAVQQAIFGRVYGASNEVSPSMPFQQNVPQMSSVKKDTPTRDANMRTSKAPYIQNIPNQFQRRAYSATIPVKNESLAKPSVSPMPLQQSTGKTEVAKRAQFPTNVNYSSCVDPRTYVKTPIPFSKFSSSENLSLIPSLLPPSISWDDVFLSSEIAIACSIANRIDFLEKENRPKSVNKKILQQDKSKSMIELRCLRLLEKQRSLRETINSVIPHSDSLAAGNLRLMFRNVKRQTMQEANLVLALAEKQKTEHAMRQKEKLLTHLRSIMLHRKSIVTKVDKQNKAKTQRCKDIINFHAHLEKEEKKRIERSARQRLQALRADDEAAYLQLLDKAKDTRITHLLKQTDQYLENLTRAVRIQQSNIHSGNTSGKGSNSAELEAPISEEDKNLDYFKVAHRIHEEVEQPKIFVGGTLKDYQLKGLEWMLSLYNNNLNGILADEMGLGKTIQTIAFITYLIEKKNQQGPFLIIVPLSTLTNWIMEFEKWAPSVKKIAYKGPPQLRKTLQSQIRSSNFNVLLTTFEYIIKDRPLLSRIKWVHMIIDEGHRIKNTQSKLTSTLSTYYHSQYRLILTGTPLQNNLPELWALLNFVLPKIFNSIKSFDEWFNTPFANTGGQDKIGLNEEEALLIIKRLHKVLRPFLFRRLKKDVEKELPDKVEKVIKCPLSGLQLKLYQQMKKHGMLFVDGEKGKTGIKGLQNTVMQLKKICNHPFIFEDVERAIDPSGTNVDLLWRAAGKFELLDRILPKLFLTGHKTLMFFQMTQIMTIMEDYLRSKNWKYLRLDGSTKSDDRCSLLAQFNDPKSDVYIFMLSTRAGGLGLNLQTADTVIIFDTDWNPHQDLQAQDRAHRIGQTKEVRILRLITEKSIEENILSRAQYKLDLDGKVIQAGKFDNKSTPEEREAFLRSLLEHDGDDDHDLTYGELQDDELNELISRTDEELVLFKKLDKERAATDIYGKGKPLERLLTVNELPDFYKVEVDSFAVQSSSELEDQYLERKRRRRNSISYTELTLDELNTVDDPSSTLMPRKRGRPRKKTNSGSSLSTPLSQESSLARSGRKNTPSYKQKALRRYCMEIFERLYNLQSEDGRFVNGLFLYPPNRKLYPDYYIIIKRPIALGKIKRNIKNDRYGDVGELIADFMLMFNNAYTYNEEHSIVYEDAKLMEKTLKEVIEDLEKNNSLHAYEEEALNEEQASLVFLENSEAELPLDSGIVSAEDDKVITYEDSSSSYSE

SEQ ID NO: 8580 - protein, 1199 aa, Schizosaccharomyces pombe
MRAEKQYTRNEVEETIVRWKKLKESGATEHDNTEYAQLCDVLRSAQSEIEARRDLKGHIKRCFSSVDKNTEKLILKQQVLAYKKLSQNLPAPDDCILSVLLRLSKDEQLLQSIVKQPLQNSKVDGKVRRDFGSCQITPSAKQQRKYLQYQISEDDAIKNRMFRRMSDLESYPAVMRDVAELKDDNERLNLDTIKRNALVELKKLRLIKQQESLRHQVMHCQPHLRTIVNAVERMSCRRPKLVPQATRLTEVLERQQRSDRERRLKQKQCDYLQTVCAHGREINVRTKNAQARAQKANRAVLAYHSHIEKEEQRRAERNAKQRLQALKENDEEAYLKLIDQAKDTRITHLLRQTDHYLDSLAAAVKVQQSQFGESAYDEDMDRRMNPEDDRKIDYYNVAHNIREVVTEQPSILVGGKLKEYQLRGLQWMISLYNNHLNGILADEMGLGKTIQTISLITHLIEKKRQNGPFLVIVPLSTLTNWTMEFERWAPSIVKIVYKGPPQVRKALHPQVRHSNFQVLLTTYEYIIKDRPLLSRIKWIYMIIDEGHRMKNTQSKLTNTLTTYYSSRYRLILTGTPLQNNLPELWALLNFVLPRIFNSIKSFDEWFNTPFANTGGQDKMELTEEESLLVIRRLHKVLRPFLLRRLKKDVEAELPDKVEKVIRCQMSGLQQKLYYQMKKHGMLYVEDAKRGKTGIKGLQNTVMQLKKICNHPFVFEDVERSIDPTGFNYDMLWRVSGKFELLDRILPKLFRSGHRILMFFQMTQIMNIMEDYLHYRQWRYLRLDGSTKADDRSKLLGVFNDPTAEVNLFLLSTRAGGLGLNLQTADTVIIFDSDWNPHQDLQAQDRAHRIGQTKEVRIYRLITEKSVEENILARAQYKLDIDGKVIQAGKFDNKSTPEEREAFLRSLLENENGEEENDEKGELDDDELNEILARGDDELRLFKQMTEDLERESPYGKNKEKERLIQVSELPEFYQREEPEKTTDLLQEEPLGRGARRRTPVVYDEAVRDAQWMAEMDMESEARPTRGRPKRNIASVDETPALTLNGKPKKKRGPAPDTLTSEHRSLLRRVCLEIYKAVNELEDDNGRPLNKLFLELPSKKLYPDYYMIIKSPIALDAIRKHINGTFYKTLEAMKSDLMTMFNNARTYNEEGSFVYEDANKMQTAMETKIEELEEDGTLATLRGMEAEATSQLEDRIENEA

SEQ ID NO: 8581 - protein, 973 aa, Schizosaccharomyces pombe
MSVNEDLSHLGVFSVDQENLERDVTNTASEYIAHESREIEKKRLQKVRKEISSVKEKIRRLDERIDSRLTKISVKENFRKQLSKFRDTLQSLQSDENDIKRRLNNEDSANAPGIGAFSTEELERQELIRTGKVTPFRNLSGLQKEVDFDDESSIREAVIKSEGTYYETAPHLSSEPSNIDHGIIPRDEKDEYVTVDAVTEKVVTAAIDDGDDLVYRQRLNAWCANRKELRDQASASENNKDRGEFEGKDEWLLPHPSKKGQTFEGGFTIPGDIRPHLFRYQVTCVQWLWELYCQEAGGIIGDEMGLGKTIQIVSFLSSLHHSGKFQKPALIVCPATLMKQWVNEFHTWWAPLRVVVLHATGSGQRASREKRQYESDASESEAEESKTSIKLRGASSSFHRYAKNLVESVFTRGHILITTYAGLRIYGDLILPREWGYCVLDEGHKIRNPDSEISISCKQIRTVNRIILSGTPIQNNLTELWNLFDFVFPGRLGTLPVFQNQFALPINIGGYANASNVQVQTAYKCACMLRDLISPYLLRRMKLDVAADLPKKSEQVLFCKLTPLQRKAYQDFLQGSDMQKILNGKRQMLYGIDILRKICNHPDLVTREYLLHKEDYNYGDPEKSGKLKVIRALLTLWKKQGHRTLLFSQTRQMLDILEIGLKDLPDVHYCRMDGSTSIALRQDLVDNFNKNEYFDVFLLTTRVGGLGVNLTGADRVILFDPDWNPSTDAQARERAWRLGQKKDVVVYRLMTAGTIEEKIYHRQIFKQFLTNKILKDPKQRRFFKMTDLHDLFTLGDNKTEGTETGSMFLGSERVLRKDNSSRNGNEAEDIPARDRKKHKIHDKGKKVNSSKVFEKMGIASMEKYKPPQESNVTKTNSDSTLGDDSVLDDIFASAGIQSTLKHDDIMEASQTESILVEKEATRVANEALRAVSSFRRPPRQLIPPQQSTNVPGTSKPSGPITSSTLLARLKQRR

SEQ ID NO: 8582 - protein, 852 aa, Schizosaccharomyces pombe
MIQQPTTAKPRISTSSKLNTVLSKNKENVPGKLFKKFKCPSLVISEKRKELPLRKKPRVNYSEYGSVDGKYDSAYVSENVSGLATIKEANRLILNHERRDPSTVIKKQFSVPKPIKGHEDISKLCAHRPPPTLGMKRKVDFIPRPLYDPADEFAIVLYDPTTDADEIIPDIKEVLAEKRKKDELLKNRKGKKEISDSEPESDHDSCVSTDTVASCSTEQSLITSNTSKHRRPNKSLKDLLGIQKEKPPPPPVAVVIDPKLARILRPHQIEGVKFLYKCVTGRIDRCANGCIMADEMGLGKTLQCIALLWTLLKQSPQAGKPTIEKAIITCPSSLVKNWANELVKWLGKDAITPFILDGKSSKQELIMALQQWASVHGRQVTRPVLIASYETLRSYVEHLNNAEIGMLLCDEGHRLKNSDSLTFTALDKLNVQRRVILSGTPIQNDLSEYFSLLNFANPGLLGSRQEFRKNYEIPILKGRDADGTEKDKENGDAKLAELAKIVNRFIIRRTNDILSKYLPVKYEHVVFCNLSEFQLSLYKHFITSPEINKILRGTGSQPLKAIGLLKKICNHPDLLNLTEDLEGCEALFPPGFIPRELRGRDRNIDSSLSGKMLVLERMLYQIKQETDDKIVLISNYTSTLDLFEQLCRARGYKALRLDGTMNVNKRQRLVDTFNDPEKDAFVFLLSSKAGGCGINLIGANRLILFDPDWNPAADQQALARVWRDGQKKDCFVYRFIATGTIEEKIFQRQSHKQSLSSCVVDEAQDVERHFSLDNLRQLFQLNDHTVCETHETYKCKRCRDGKQFIRAPAMLYGDTSTWNHFTNPTLDRIEDHLLKREAGKQQVSTVFQYKSH

SEQ ID NO: 8583 - protein, 852 aa, Schizosaccharomyces pombe
MIQQPTTAKPRISTSSKLNTVLSKNKENVPGKLFKKFKCPSLVISEKRKELPLRKKPRVNYSEYGSVDGKYDSAYVSENVSGLATIKEANRLILNHERRDPSTVIKKQFSVPKPIKGHEDISKLCAHRPPPTLGMKRKVDFIPRPLYDPADEFAIVLYDPTTDADEIIPDIKEVLAEKRKKDELLKNRKGKKEISDSEPESDHDSCVSTDTVASCSTEQSLITSNTSKHRRPNKSLKDLLGIQKEKPPPPPVAVVIDPKLTRILRPHQIEGVKFLYKCVTGRIDRCANGCIMADEMGLGKTLQCIALLWTLLKQSPQAGKPTIEKAIITCPSSLVKNWANELVKWLGKDAITPFILDGKSSKQELIMALQQWASVHGRQVTRPVLIASYETLRSYVEHLNNAEIGMLLCDEGHRLKNSDSLTFTALDKLNVQRRVILSGTPIQNDLSEYFSLLNFANPGLLGSRQEFRKNYEIPILKGRDADGTEKDKENGDAKLAELAKIVNRFIIRRTNDILSKYLPVKYEHVVFCNLSEFQLSLYKHFITSPEINKILRGTGSQPLKAIGLLKKICNHPDLLNLTEDLEGCEALFPPGFIPRELRGRDRNIDSSLSGKMLVLERMLYQIKQETDDKIVLISNYTSTLDLFEQLCRARGYKALRLDGTMNVNKRQRLVDTFNDPEKDAFVFLLSSKAGGCGINLIGANRLILFDPDWNPAADQQALARVWRDGQKKDCFVYRFIATGTIEEKIFQRQSHKQSLSSCVVDEAQDVERHFSLDNLRQLFQLNDHTVCETHETYKCKRCRDGKQFIRAPAMLYGDTSTWNHFTNPTLDRIEDHLLKREAGKQQVSTVFQYKSH

SEQ ID NO: 8584 - protein, 1367 aa, Schizosaccharomyces pombe
MEPEHSNYDLKNHPTSVQESTLNGSAVTDPQFGNTTNSLPSMNGLLNHENSFASQQSLSSSAFDDSEMVTSTANSTVVSSALSTPKIDDAQNSDDVRVDGTRRSSRAKRPVYRDFSYTEIDEHEIPIPKKRKRKPAPKQKKSVASDDEDAYDKRHRFSINSASGTEIRTSLRSSKGKSVNYNEQEFYDDFEDEEEEVEEQVEEEYEPIIDFVLNHRKRADAQDDGPKSSYQYLIKWQEVSHLHNTWEDYSTLSSVRGYKKVDNYIKQNIIYDREIREDPTTTFEDIEALDIERERKNMLFEEYKIVERIVASETNEEGKTEYFVKWRQLPYDNCTWEDSDVIYSMAPNEVYQFLQRENSPYLPYKGVFYNTRPPYRKLEKQPSYMKGGEIRDFQLTGINWMAYLWHRNENGILADEMGLGKTVQTVCFLSYLVHSLKQHGPFLIVVPLSTVPAWQETLANWTPDLNSICYTGNTESRAILESMNSRKLKFNILLTTYEYILKDKQELNNIRWQYLAIDEAHRLKNSESSLYETLSQFRTANRLLITGTPLQNNLKELASLVNFLMPGKFYIRDELNFDQPNAEQERDIRDLQERLQPFILRRLKKDVEKSLPSKSERILRVELSDMQTEWYKNILTKNYRALTGHTDGRGQLSLLNIVVELKKVSNHPYLFPGAAEKWMMGRKMTREDTLRGIIMNSGKMVLLDKLLQRLKHDGHRVLIFSQMVRMLNILGEYMSLRGYNYQRLDGTIPASVRRVSIDHFNAPDSPDFVFLLSTRAGGLGINLNTADTVIIFDSDWNPQADLQAMARAHRIGQKNHVNVYRFLSKDTVEEDILERARRKMILEYAIISLGVTEKSKNSKNDKYDAQELSAILKFGASNMFKATENQKKLENMNLDDILSHAEDRDSSNDVGGASMGGEEFLKQFEVTDYKAEDLNWDDIIPEEEMERIEEEERMLAAQRAKEEERERREEEERENDEDHPSRTYKRTTKSITKRQQRREEMVREKEIRLLYRAMIKFGLVDERFDTIVKEAELQATDPKRIYSLSADMVKACDEAVERLGADDTKNKQPRKAILIEFKGVKNINAETVTLRVKDLTHLHRAYKGLDPLKQIIGYPIRSVHSWNCSWGIKEDSMLLAGINKHGFGCWQAIKNDPDLGLHDKIFLDEAKNDKESRYVPSAVHLVRRGEYLLSVVREHPDLFVVKTDQPTKRKYNRKAPTKSSTRQTTLDGSISNTKKSSRTKKKKEEETNRGDETSPEGTVGEDEVEEEPRQAEPPKRALRSNSGKAASNKRTTRNSMKTHSAMDTLTAVAALDAELDNMSNEKAKEEVDHVKSENGESVNEPNTEDLSLETEENTTVSDISPLVKNEA

SEQ ID NO: 8585 - protein, 1373 aa, Schizosaccharomyces pombe
MEPEHSNYDLKNHPTSVQESTLNGSAVTDPQFGNTTNSLPSMNGLLNHENSFASQQSLSSSAFDDSEIVTSTANSTVVSSALSTPKIDDAQNSDDVRVDGTRRSSRAKRPVYRDFSYTEIDEHEIPIPKKRKSKPAPKQKKSVASDDEDAYDKRHRFSINSASGTEIRTSLRSSKGKSVNYNEQEFYDDFEDEEEEVEEQVEEEYEPIIDFVLNHRKRADAQDDDPKSSYQYLIKWQEVSHLHNTWEDYSTLSSVRGYKKVDNYIKQNIIYDREIREDPTTTFEDIEALDIERERKNMLFEEYKIVERIVASETNEEGKTEYFVKWRQLPYDNCTWEDADVIYSMAPNEVYQFLQRENSPYLPYKGVFYNTRPPYRKLEKQPSYIKGGEIRDFQLTGINWMAYLWHRNENGILADEMGLGKTVQTVCFLSYLVHSLKQHGPFLIVVPLSTVPAWQETLANWTPDLNSICYTGNTESRANIREYEFYLSTNSRKLKFNILLTTYEYILKDKQELNNIRWQYLAIDEAHRLKNSESSLYETLSQFRTANRLLITGTPLQNNLKELASLVNFLMPGKFYIRDELNFDQPNAEQERDIRDLQERLQPFILRRLKKDVEKSLPSKSERILRVELSDMQTEWYKNILTKNYRALTGHTDGRGQLSLLNIVVELKKVSNHPYLFPGAAEKWMMGRKMTREDTLRGIIMNSGKMVLLDKLLQRLKHDGHRVLIFSQMVRMLNILGEYMSLRGYNYQRLDGTIPASVRRVSIDHFNAPDSPDFVFLLSTRAGGLGINLNTADTVIIFDSDWNPQADLQAMARAHRIGQKNHVNVYRFLSKDTVEEDILERARRKMILEYAIISLGVTEKSKNSKNDKYDAQELSAILKFGASNMFKATENQKKLENMNLDDILSHAEDRDSSNDVGGASMGGEEFLKQFEVTDYKAEDLNWDDIIPEEEMERIEEEERMLAAQRAKEEERERREEEERENDEDHPSRTYKRTTKSITKRQQRREEMVREKEIRLLYRAMIKFGLVDERFDTIVKEAELQATDPKRIYSLSADMVKACDEAVERLGADDTKNKQPRKAILIEFKGVKNINAETVTLRVKDLTHLHRAYKGLDPLKQIIGYPIRSVHSWNCSWGIKEDSMLLAGINKHGFGCWQAIKNDPDLGLHDKIFLDEAKNDKESRYVPSAVHLVRRGEYLLSVVREHPDLFVVKTDQPTKRKYNRKAPTKSSTRQTTLDGSISNTKKSSRTKKKKEEETNRGDETSPEGTVGEDEVEEEPRQAEPPKRALRSNSGKAASNKRTTRNSMKTHSAMDTLTAVAALDAELDNMSNEKAKEEVDHVKSENGESVNEPNTEDLSLETEENTTVSDISPLVKNEA

SEQ ID NO: 8586 - protein, 1283 aa, Schizosaccharomyces pombe
MFAVQGNQKFPKGLTKDNIQSLYQQWQVMRNQGATEENNPEFAQISSILRMVQRAHYARMQQMRNQSSEFPDAENTNLRKQQDTLPTTGFNNLPEGKAGMQTLPGRPASNGPTPPNPGNGNVGLNNPSYMNSQASPNIMNAPLQRDTSVPPAPSMVHPHTNTNANSNNLKVYANQLSQQNTSNPTYHNAYDMASMMKNGSRMNNSFPPTTPYPPANDTTVNSSLPHSFASPSSTFEQPHTVQSRAPSVDTTSSSHSFSARNIPANVSMQQQMGRRGSIPVNPSTFSASSPPSGSMLASPYNGYQNDAASFAHSKLPSSANPNTPFNSTATVDVGAAGSHFPYPQPSNLDAINAKTYFQSSSNSPAPYVYRNNLPPSATSFQPSSSRSPSVDPNTVKSAQHIPRMSPSPSASALKTQSHVPSAKVPPTSKLNHAQLAMLKSQIVAYNCLNSPNGQVPPAVQQAIFGRVYGASNEVSPSMPFQQNVPQMSSVKKDTPTRDANMRTSKAPYIQNIPNQFQRRAYSATIPVKNESLAKPSVSPMPLQQSTGKTEVAKRAQFPTNVNYSSCVDPRTYVKTPIPFSKFSSSENLSLIPSLLPPSISWDDVFLSSEIAIACSIANRIDFLEKENRPKSVNKKILQQDKSKSMIELRCLRLLEKQRSLRETINSVIPHSDSLAAGNLRLMFRNVKRQTMQEANLVLALAEKQKTEHAMRQKEKLLTHLRSIMLHRKSIVTKVDKQNKAKTQRCKDIINFHAHLEKEEKKRIERSARQRLQALRADDEAAYLQLLDKAKDTRITHLLKQTDQYLENLTRAVRIQQSNIHSGNTSGKGSNSAELEAPISEEDKNLDYFKVAHRIHEEVEQPKIFVGGTLKDYQLKGLEWMLSLYNNNLNGILADEMGLGKTIQTIAFITYLIEKKNQQGPFLIIVPLSTLTNWIMEFEKWAPSVKKIAYKGPPQLRKTLQSQIRSSNFNVLLTTFEYIIKDRPLLSRIKWVHMIIDEGHRIKNTQSKLTSTLSTYYHSQYRLILTGTPLQNNLPELWALLNFVLPKIFNSIKSFDEWFNTPFANTGGQDKIGLNEEEALLIIKRLHKVLRPFLFRRLKKDVEKELPDKVEKVIKCPLSGLQLKLYQQMKKHGMLFVDGEKGKTGIKGLQNTVMQLKKICNHPFIFEDVERAIDPSGTNVDLLWRAAGKFELLDRILPKLFLTGHKTLMFFQMTQIMTIMEDYLRSKNWKYLRLDGSTKSDDRCSLLAQFNDPKSDVYIFMLSTRAGGLGLNLQTADTVIIFDT

SEQ ID NO: 8587 - protein, 1388 aa, Schizosaccharomyces pombe
MSTSAIALALSSSKAIEQLDHVQTETPNLKQEMSESPSNSGVASKRKLQSTEWLDPELYGLRRSGRTRSNPGRYVDTDDQEDVFPSKHRKGTRNGSSFSRHRTIRDLDDEAESVTSEESESDDSSYGGTPKKRSRQKKSNTYVQDEIRFSSRNSKGVNYNEDAYFESFEEEEEEEMYEYATEVSEEPEDTRAIDVVLDHRLIEGHDGSTPSEDYEFLIKWVNFSHLHCTWEPYNNISMIRGSKKVDNHIKQVILLDREIREDPTTTREDIEAMDIEKERKRENYEEYKQVDRIVAKHLNSDGSVEYLVKWKQLLYDFCTWEASSIIEPIAATEIQAFQEREESALSPSRGTNYGNSRPKYRKLEQQPSYITGGELRDFQLTGVNWMAYLWHKNENGILADEMGLGKTVQTVAFLSYLAHSLRQHGPFLVVVPLSTVPAWQETLALWASDMNCISYLGNTTSRQVIRDYEFYVDGTQKIKFNLLLTTYEYVLKDRSVLSNIKWQYMAIDEAHRLKNSESSLYEALSQFKNSNRLLITGTPLQNNIRELAALVDFLMPGKFEIREEINLEAPDEEQEAYIRSLQEHLQPYILRRLKKDVEKSLPSKSERILRVELSDLQMYWYKNILTRNYRVLTQSISSGSQISLLNIVVELKKASNHPYLFDGVEESWMQKINSQGRRDEVLKGLIMNSGKMVLLDKLLSRLRRDGHRVLIFSQMVRMLDILGDYLSLRGYPHQRLDGTVPAAVRRTSIDHFNAPNSPDFVFLLSTRAGGLGINLMTADTVIIFDSDWNPQADLQAMARAHRIGQKNHVMVYRLLSKDTIEEDVLERARRKMILEYAIISLGVTDKQKNSKNDKFSAEELSAILKFGASNMFKAENNQKKLEDMNLDEILEHAEDHDTSNDVGGASMGGEEFLKQFEVTDYKADVSWDDIIPLTEREKFEEEDRLREEEEALKQEIELSSRRGNRPYPSSAVESPSYSGTSERKSKKQMLKDEVLLEKEIRLLYRAMIRYGSLEHRYNDIVKYADLTTQDAHVIKKIAADLVTASRKAVSAAEKDLSNDQSNNKSSRKALLITFKGVKNINAETLVQRLNDLDILYDAMPTSGYSNFQIPMHVRSVHGWSCQWGPREDSMLLSGICKHGFGAWLEIRDDPELKMKDKIFLEDTKQTDNSVPKDKENKEKKVPSAVHLVRRGEYLLSALREHHQNFGIKSSPAISTNGKTQPKKQTANRRQSGKPNVKSAQKIESATRTPSPAISESRKKPSSKDTKIETPSREQSRSQTASPVKSEKDDGNVSLNAEQKARCKELMYPVRKHMKRLRKDSSGLGRAELVKLLTECLTTIGKHIEKTVNDTPSEEKATVRKNLWMFACYFWPKEEVKYTSLISMYEKMK

SEQ ID NO: 8588 - protein, 1418 aa, Schizosaccharomyces pombe
MPKEDDSLCKIVVRREPLDVLLPYYDASETTVQKILHENDSTLSVKFLAGVEALIKKDELDKYKNGKACLRVWLKHKSRKRYHGYMTSTDKDEEEKNDYLLKSNGSKVLRDSTRTKKFKFGKEFHCALNPSFVSDETASDSATSSSSDTNKKVNRKEHNELSLSHLSFNDTSDFGSSDLSSSEIESTENDNKAPYFSLLYSDGFDFIKFLHVCVCVKCHGREHRSSGKNFVYCDHCSNVYHYDCSPLPSLNKETRNYSQQNGFICPLCSKNSKDVLCNTGFVSGVSSGQDLVIPPSLADRESLSILVNYCKSIRFRCFRCRRVEYFFYLDSNPLSIQRTITHFIKKLVCNECSMHPCDIEEIIAWRTLNSLYPSKATLSNNFVSTSDLSFWSREYFVRSKGKSYLHCFWCSASWLAGISLAKKKNFDGLENASYDATKPIIPVSYTIIDKVWDVQYRSGKNARTAKYKTKKHQLKAISEVTFAFVSWRGLTYYMSNWEPPPKETDRNRWKAWLKGYSDLLECLWIEKAPTASINIDLPFTNLEWHSQPSFIKGGTLMPYQLKGLNWLYLRWYTHHPCILADEMGLGKTVQVISFISVLFYRHKCFPVLVIVPHATVANWERELKKWAPFLQINVLVGSEKNRSLVRDYRLINQKDPKHVSTHVLVISASNVEREISLLRKFQWKVLIVDEGQRLKNDQSSLFYYLSSVKSDFKLLLTGTPLQNNVRELFNLLQFLNPMKINAAELEKRYSIIDTEKVTELHQILKPFFLRRVKSEVLDNFPTKVEVIIPLSMTPVQKGLYKSILSKNLSLLRNITGYANTSSSGGQRTTSLNNILMQLRKTLAHPYIYSPDIEDRNLPYELAMRSLEEASCKFLILRLLVPKLITRGHRILLFSQFIQQLDILEDWFEYKNIAYARFDGASSEMERQSAIDSFNAPNSELSCFLLSTRAGGVGINLASADTVIILDPDFNPHQDMQAIARAHRYGQKKKVLVFVLTTRDSVEEKIIQNAQKKLVLDHLIVESLDQNHNSEKDLESILRHGARALFEEAGDEPSIKYNEYSVELLISEAEKQEDTSTDESDIKSNKFGFFRVWDNKHISSNHYEVKENVLVDEEDVWSVILKQREKDAMLEKTDETTSNRRLRAHHKIHYGEDLNIYDNSDDTDYTVNDRSSPGSPFPIETETISSITDTLSDKQKLKYDSSVNIENLNDESDSQKSADVHFDSILAKSLLATTPKEDEFNKTLSTINLEVANKLTSSEYINDSEMQLIDDPVFYPPYEIIEKNHQLVGRSLSKAVLDNFFLLSSLSDNVRCRCCGIKHLPAHCPLSIVPLEICFLCGTPHFSGRDTCPMLRNKEAIYRLKDSLSKSREPFHIKKQAMARLNSFLQKKEEPTVSSSAKTNELSSKVIIKESIINEAKTL

SEQ ID NO: 8589 - protein, 944 aa, Schizosaccharomyces pombe
MKRKDNKELICIPSSSPPSTPIREENYYLLTSSPIECSPIQQLDLSGSFKNYSTTSSRANGKKFGQLAMQSRIFFDTTDHKKYVESSYAAYDPHDQPPERDVSLKESSNKINPSNFFDSEQITKINAVKKRFPALDSEMIIATLEKFNWRENITIHKLTFQKLLGRGNSTINKSAQKLNNQPIEKSSVDKENAKRKRYVEEGTKQGQKKKPLRVIELSDEETNEDDLLGQSPTACTTDANIDNSIPENSDKIEEVSIESSGPSEVEDEMSEYDVRVLNFLNESTLQEIVEVSGCESKVVEYFISKRPFPSLEKAEALCQRNAHAATGKRKKSDGRNVGRKLVNSTYEVLQGFDAVDSLIAKCERYGAMISNTMRSWHNLFDDKKMEQFLNTSTGSISYEYNSQQPSSIASGITLKSYQIVGLNWLCLMYKAKLSGILADEMGLGKTCQVISFLASLKEKGIQNRHLVVVPSSTLGNWLREFEKFCPSLRVESYSGTQSERINKRYYLMDTDFDVLVTTYQLASGSRDDRSFLRKQRFDISIFDEGHYLKNRMSERYKHLMNIPANFRLLITGTPLQNNLKELISLLAFMLPKVFDNNMQGLDIIYKIKTTSDGDIERAYLSQERISRAKTIMNPFILRRRKENVLSDLPPKIQHVEYCHMEETQLSLYLSVLELKNLVNANRENILMQLRKAALHQLLFRSQYNLETLSLMSKRILREDAYLDANPQYIFEDMEVMSDFELHKLADQYRHLHPFALKGKPWMDSAKVKKLCSLLKKSRPNERILIFSQFTQVLDILEYVLNTLDLEFLRLDGSTPVETRQQLIDDFHTNENYKVFLLSTKSGGFGINLTCANIVILFDCSFNPFDDMQAEDRAHRVGQTRPVHVYRLITKNTIEENIRRLANTKLTLESSLTTDSEKIQKEISGELMKSLQMDGRVDTMDGSVV

SEQ ID NO: 8590 - protein, 922 aa, Schizosaccharomyces pombe
MDGKRKIEHTADGTHYDATSNVKRKPIFPPFIADSLSEATEKANVMGGGMNSRLQILSEMSKRVQATAPISSLEHFKQLSDISPSFTSSANSINQPYNYSGSLENLVPTPSAGTPSQFMDAQNPYGAVYNALSQFSETEPKMPSYMDDEEASDSLPLSLSSQSLSSQVTNQKPAPHRLTMRERYAANNLTNGLQFTLPLSSRKTYEPEADDDSNDDMYSDDDSNADRWASRIDTAALKEEVLKYMNRCSTQDLADMTGCTLAEAEFMVAKRPFPDLESALVVKQPRPVIPKGRRGRREKTPLGPRLVGICMEIMRGYFVVDALIRQCEQLGGKIQRGIEAWGLSNTATSDEGETSLVNFDQMKSFGTPANSSFITTPPASFSPDIKLQDYQIIGINWLYLLYELKLAGILADEMGLGKTCQTIAFFSLLMDKNINGPHLVIAPASTMENWLREFAKFCPKLKIELYYGSQVEREEIRERINSNKDSYNVMLTTYRLAATSKADRLFLRNQKFNVCVYDEGHYLKNRASERYRHLMSIPADFRVLLTGTPLQNNLKELISLLAFILPHVFDYGLKSLDVIFTMKKSPESDFERALLSEQRVSRAKMMMAPFVLRRKKSQVLDALPKKTRIIEFCEFSEEERRRYDDFASKQSVNSLLDENVMKTNLDTNANLAKKKSTAGFVLVQLRKLADHPMLFRIHYKDDILRQMAKAIMNEPQYKKANELYIFEDMQYMSDIELHNLCCKFPSINSFQLKDEPWMDATKVRKLKKLLTNAVENGDRVVLFSQFTQVLDILQLVMKSLNLKFLRFDGSTQVDFRQDLIDQFYADESINVFLLSTKAGGFGINLACANMVILYDVSFNPFDDLQAEDRAHRVGQKKEVTVYKFVVKDTIEEHIQRLANAKIALDATLSGNAETVEAEDDDD

SEQ ID NO: 8591 - protein, 1288 aa, Schizosaccharomyces pombe
MTYEESEKNKNGLSSYIKKEGSSDLKVRVRFREPKLLVTHSGHITEQPKYEHLEQYLDSYVSLEDGDHDPKEAKELVFREVQLRHRINEFRKKGYFTAEAPVELKKAPSSNNIPISYRDNLLSHVNGYARSMHNDRKVRASRSRRISGMILAHFKRLSGADEKKAKEEDKRIRLLAKRTAWEIRKKWKVIEREVRRRRAERAAEAQRVAGKEQLANILKHSTDLLEARIERANINISAQTSESAVDWNYLLKTSDDLLSVDELKLKYSNPDLIKNIEREEEAEETSDDEPLSSEDEENEDEDITEESNLRKRKVSDKTRVVNKHPPSLRRSRRFFAKKSYNHVSDLDGEVIVMKKEDITDGVSTKKDLNDGDQNEVPLHDTGSSSSLSLLYNEDVASKKKRRVNDDGLARKKSIAGISEQRKFDEPNGSPVLHANKIQVPFLFRGTLREYQQYGLEWLTALHDSNTNGILADEMGLGKTIQTIALLAHLACEKENWGPHLIIVPTSVMLNWEMEFKKFLPGFKILTYYGNPQERKEKRSGWYKPDTWHVCITSYQLVLQDHQPFRRKKWQYMILDEAHNIKNFRSQRWQSLLNFNAEHRLLLTGTPLQNNLVELWSLLYFLMPAGVTQNNSAFANLKDFQDWFSKPMDRLIEEGQDMNPEAMNTVAKLHRVLRPYLLRRLKTEVEKQMPAKYEHVVYCQLSKRQRFLYDDFINRARTREILASGNFMSIINCLMQLRKVCNHPNLHEERPIVTSFALRRSAIADLEIKDLLVRKRLLHEEPMTKLDLSTLRLIRTDSEAFDTFVSDELNSLCATNAYNRISTFLRMQIDEECKPCQFKKSNFKEHFQNKIYQEQLDKLNFQKYLNESKCSHSPIYGSNLIRLAEKLPKHSTSIDYTLYAKDDPLYLLNTTKALRSCILSTEERASNMKEIIQRFACITPKAVVVDLPELFCKTIPRDLLYEVSRKINPLHQASTRLAIAFPDKRLLQYDCGKLQVLDRLLKDLVSNGHRVLIFTQMTKVLDILEQFLNIHGHRYLRLDGATKIEQRQILTERFNNDDKIPVFILSTRSGGLGINLTGADTVIFYDSDWNPQLDAQAQDRSHRIGQTRDVHIYRLISEYTVESNMLRRANQKRMLDKIVIQGGEFTTEWFRKADVLDLFDLDDESLKKVKADSDSGSTKNEENWEVALAAAEDEEDVQAAQVARKESALEQTEFSETSTPQAMLTKDSTPLSSDSATPGFERDSTEEQSNTNDMDEDRSELEEDLDETVGHIDEYMISFLEQEGTSDEW

SEQ ID NO: 8592 - protein, 768 aa, Schizosaccharomyces pombe
MKRRATFQCPLIESTIKHQSTNYTKTETATTSHEVSENANEHKGKSNIDINKIAYYNVVWRKITMKKHKTWEGDGFLVREDSNLTLYNSDFTRLGSCHSRVPQIKEGELLRISGKEISTISALPKPRHDPTVLGALVMSRPKTWDPRTHVDVVIDPFLSKHLYSHQREGVSFLYDCLLGMEGKCGYSAILADEMGLGKTLQTITVVWTLLKQSYYANRSSTINNAMVVAPVTLLKNWENEFYNWLGHERIHVYIARCAEDFQEFTSNKTYSIIITGYETVCTYLRNYGCGIDIDLLICDEAHRLKSMSSQTWITLNKLKTRKRLLLTGTPLQNDLSEYFSMVNFIIPGSLGTPNSFKAQYERPILRSRSMNASSRDISLGAARLQRLFEFTSNFTLRRKANILAKHLPPRTDIVLFIKPTHQQENVYGHVLDGFKSSVDQKGYYLKILTRLSKICNSTILLRNEKENFLSTELQDKHVFEQENMLLSSSKLQILAALLKSFQRGCQKAVIVSQYKETLELIELFLSILHVRFCKLLGSTPFSERDLIVHNFNTSSFKEFSVLLLSSKAGGCGLNLTGSTRLIIYEPSWNPAQDLQALSRIYRSGQKRPVCIYTFLSSGMLDERIFIRQNTKQGLSSSFIDSDASQKKNFFTGEDIKTLFSYSKTETCLTYELAFDSDEIDSLTKKKDPLTKIDHTIDSPNTKEKDKEISSWKKASEYMDTNLGKKCPENAFQGWTWQFPNDLSIMNGVEDYIPLEPLPINCLMHKKFE

SEQ ID NO: 8593 - protein, 780 aa, Schizosaccharomyces pombe
MKRRATFQCPLIESTIKHQSTNYTKTETATTSHEVSENANEHKGKSNIDINKIAYYNVVWRKITMKKHKTWEGDGFLVREDSNLTLYNSDFTRLGSCHSRVPQIKEGELLRISGKEISTISALPKPRHDPTVLGALVMSRPKTWDPRTHVDVVIDPFLSKHLYSHQREGVSFLYDCLLGMEGKCGYSAILADEMGLGKTLQTITVVWTLLKQSYYANRSSTINNAMVVAPVTLLKNWENEFYNWLGHERIHVYIARCAEDFQEFTSNKTYSIIITGYETVCTYLRNYGCGIDIDLLICDEGIDLFINSLLILAHRLKSMSSQTWITLNKLKTRKRLLLTGTPLQNDLSEYFSMVNFIIPGSLGTPNSFKAQYERPILRSRSMNASSRDISLGAARLQRLFEFTSNFTLRRKANILAKHLPPRTDIVLFIKPTHQQENVYGHVLDGFKSSVDQKGYYLKILTRLSKICNSTILLRNEKENFLSTELQDKHVFEQENMLLSSSKLQILAALLKSFQRGCQKAVIVSQYKETLELIELFLSILHVRFCKLLGSTPFSERDLIVHNFNTSSFKEFSVLLLSSKAGGCGLNLTGSTRLIIYEPSWNPAQDLQALSRIYRSGQKRPVCIYTFLSSGMLDERIFIRQNTKQGLSSSFIDSDASQKKNFFTGEDIKTLFSYSKTETCLTYELAFDSDEIDSLTKKKDPLTKIDHTIDSPNTKEKDKEISSWKKASEYMDTNLGKKCPENAFQGWTWQFPNDLSIMNGVEDYIPLEPLPINCLMHKKFE

SEQ ID NO: 8594 - protein, 1040 aa, Schizosaccharomyces pombe
MRNNTAFEQFTLNPCEQIPLDDKHNIGFNKNNTPDYSSSASSDQLLKNDINRHEMERRIAFLNRKQALFNAFMHDSSSSLNTMESNIEKVNGLFPNDNSVIALKPNEEKLNSSLSVENNDSTYTDATLIAPKIGLDRPNINAITIDVDGHSLQNEISSSTDKLSPSQSDALFEQKQDSLFWNDNAVIVVSDSESDDNNVRTKSSLNDHDKVNMKEKRNLELAFMNSKRKKLELPSLPVLSTAGPSYTNSLALPPFHHHNNYKMFNTTHTLEDDKFLQGKGTSNNPISLSDEEDNEINFQNKRYGSDSVILPGGLLHDSKLPEPGKHLFHLQWYHDRFHNIEGFNLSDSNNQKVQDDQQQQLEELFKDLDEQLVNDPTIREGTPAGLIPTLMEHQKEGLMWLKRLEESSKKGGILADDMGLGKTVQALALLVTRPPESKSVKTTLIITPVSLLQQWHNEILTKIAPSHRPTVYIHHGSSKKHKIAEQLMSYDIVLTTYNVIAYEFKNKMAYDKSIEDNAPIKKFEHLPFFEAEWYRVILDEAQTIKNRNTLAARGCCLLESTYRWCLSGTPMQNGVEEFYSLIKFLRIKPYSDWSSFSKDFTIPLSSNINTSAPMKRFRGLLKAVLLRRTKNTKIDGKPILTLPPKTAVKSETDLSSSEMEFYNTLQSGAQIQMRKYLQEGTITTHYGSLLVLLLRLRQACCHPWLIVAREAAVDDNDSFQAKNRAIYNQIYPEAVNRLKLIETLQCSLCMDVVAELLIIVPCGHFLCRECLTHVITSSEDMAKQTSNENISPKCSVCEEYIDTERLLSYALFRRYSGMAPIVDADNKLRTENISELLPKQYSNILENRQMGMKIFTDPKHWTTSTKIEKALNAVKEIIKKQPTDKILIFSQFVSFLELFTVPFRQEGIKYLMYTGGLSTAERNQALINFEVDPNVRVLLISLKAGNVGLNLTCANHVIILDPFWNPYIEEQAVDRAHRIGQDKPVNILRIVTNNTIEERVLALQDRKRELIDSALGEKGLREISRLNTKELSFLFGMSSR

SEQ ID NO: 8595 - protein, 1063 aa, Schizosaccharomyces pombe
MDPSRETFDGSTRDSYKPPNGAEMMGQSELNTQNRIPYNTSANNRNWQIPLYWQQRGNEFQASPPPPLGYVTPEYGATGTPVNANNASRVDYATTAANVPEEYANDYSSELAYIHNVNDMPHVDGLSNHSPATQPDLFETPAQSDPILFSSYPHAAQARVDPSISKDLYNMVPRPDANTVSPHAARSASSLPVPKEASETPFRDASTDLFDEHAHAAPMHSSISISTLLSDSDRYEPHVSLTENISPVMAPSIDARLSQTILRGLPPAQKLSPNSSQSQITHNRRKHKLPLNATTNNSVVLTPDTSPLLDSDEVVSDDDSNEQQTMMMKFNYLQHLRNKRDEAVHAEKRRLLDIRGSIHDRLVCRYENRYNKLHASEYNHHHDWAVRQAIREEVAAVEAAKIRADEEKKKKEREEQVRLLQESADKDAEMNEASTATSENEDLKDDLSLADLSSKKTANSQATENNNTPSKAKVKAESKVRSKAKSDKSRAKLSSDTNKDSEKNDNNDASLQSAGVASDGESSPETPLTKASKSKKAKASKLANDTSKNANGETKSTPKKSKKKTSKAQQEANSTTAEGKEKLSGDSTETGNSTNKEASTEDTKANATASAPNKKKKTVETLQQQVIKEIARKEIPRVYKIIQQNQYNRSTNARKTSQLCGREARRWQFRTIKNNKDMQTKAKRAMRETMVFWKRNERVERDLRKKAEREALDRAKKEEELRESRRQARKLDFLITQTELYSHFVGRKMDREQDLPSATNTASVSEINFDSDEEEDIRRLAVESAQEAVQKAREHSQLFDANRQQSPNNSSSDMNEGEMNFQNPTLVNAFEVKQPKMLMCKLKEYQLKGLNWLANLYEQGINGILADEMGLGKTVQSISVMAYLAETHNIWGPFLVIAPASTLHNWQQEITRFVPKLKCIPYWGSTKDRKILRKFWCRKNMTYDENSPFHVVVTSYQLVVLDAQYFQSVKWQYMILDEAQAIKSSSSSRWKSLLAFKCRNRLLLTGTPIQNTMQELWALLHFIMPSLFDSHNEFSEWFSKDIESHAQSNTQLNEQQLKRLHMI

SEQ ID NO: 8596 - protein, 897 aa, Schizosaccharomyces pombe
MDSLSAYPPQSTFQQLQNDEELARRLQDEWNSSSPSSAPSSSSSQNQVELDEQFARSLQNSQSSSYSLPPFDHPPSKNPTSSSLSTRKRWRQKRLWSFKNFPFRPPTRLTSTPSNSSSLPSIPSSSSTPSISSIPHTTSSVSNDIPSVLGSSDHPIDLDNPEHLTPPSSFITAKQLSRLPTPLPPPSSSSLPTGTISTNSFCPYERKVQPEHVTKELHQLLQHNTPSPFDTIDLQLKNEQVQSAGLLVSLLPHQVEGHAWMESMEQSSKCGGVMADDMGLGKTIQTIALLLTQKSQDPLRKTNLIVVSVALLHQWAEELSTKVHPSKKLSVYIHHGSTKKNLDSYELSQYDVVLTTYSMLAYEMKQNDAFNNNNPATATPPPACSLLETSWYRIVLDEAHTIRNRDTLAAKCCVKLDAKYRWCLSGTPIQNHIDEFYSLLKFLRIKPYCVWSLFAKDISRPLKSYRADIVEAALKRLRILLASTVFRRTKETRVNNLPIVNLPPKTIRTVSVNLLPEERALYNEQMSSAQSLVDNYFNNDHDLSRYGFLLVSLLRLRQFCCHPWLVKSSSLDNSFRIRDSENVRNACKSLDPLTIERIATLQDFNCSVCLDPCLAPVFIIPCGHFTCQECMSMLVGQKYGSSSTSTIIAKCPMCRGNIVQDSLVDATILQAIHGPLNSLKQLELDMNQSFSEQESIKLRWENRIDQMFTKKFGKRASEWKSSSKLNQARQTILDIIGSKRNEKILVYSQFSQYLCLVSHMLKLENIRHVRYDGTMSANQRQKSLHSFNNDKDVLVMLVSLKAGSVGLNLTIANHVILQEPFYNPSIEDQAIDRVHRLGQQKPVTVYRFITKDTIEERIVSVQRKKRQLVKEALDSNENNPLSRLDKEELLYLFGLNS

SEQ ID NO: 8597 - protein, 1284 aa, Schizosaccharomyces pombe
MLPYNSNYLSDNGKRKFSDENPQSEVYGSSQTGLPSSYGNPQSYGTPPVQQSSAMYGVNNSMGGGMYNTSENTQFMNTDYSQTSSYASTPMSNAYSRDAPAAINNNFGYSYVGQSSQPVPSYNPLPSYNTASLPNAGIPAAMPGMPSGYPGTVPIPQGGYNAHYSSPYNNGYPIGAVNPTSAIPAQPPAQPVNNVLPSYVRSNSRSSARSTARSAPRSTQRSRSSSANPVTTPPVNNTLLTPPAPPVELPPVTTTSPNAIIRSVQWIRSFVPQAPIHQVINTLAQTKWDETAALSILSQKYLSCDLGIPIQEHKRFKQSPVASNMPTYGSSNRTVQSQKRSIRDKYIQMPNDSTQASLMPSYTRKTSNASKKLTTEEDEFYDSEEEPEAIVHRDTSALERTVLNFINSSTAKELSDTASCPLSHSKLLLEHRPFQTLAEACIIKHPDDVPSKPGRRGRRREKNPMGQKIVNACMETMEGYYAIDNLIAKCEFLGNRISKGMASWGIKLEMSNGELNIVDMESVPTEAADNSDFPKFVTEQPKTLASDVQLKSYQLVGVNWLHLLYQQKLSGILADEMGLGKTCQVVAFFALLLEQGHHGPHLVVVPSSTLENWLRELARFCPSLRVEPYYGSQQERANIREAIEENEIKYDILVTTYQLATNNKEDRSFLKHQNFDVCVYDEGHYLKNRMSERYKHLMNLNANFRLLLTGTPLQNNLKELVSLLAFILPNMFDSDMDDLDVIFKAKPTADADIEQALLSKQRISRAKTMMTPFVLRRRKNQVLNDLPKKTQIIEHCKLSENQLEIYNRYAALQKNQQLRRDDKRNKRSKNDEESDGKSLSAGHVLMQLRKAANHALLFRKFYDDEKLKQMAKDIMQEEQYKNANEQYIYEDMEVMSDFELHRLCRSFPTLQSYTLKDDPWMDSGKIRVLKELLPKMKEEGSRILLFSQFTQMLDILEQVLDTLKISYVRLDGSTQVEVRQDIIDQFHKEEDVTVFLLSTKAGGFGINLACANVVILYDCSYNPFDDLQAEDRAHRVGQVREVTVIRLITDNTIEEYIQKLANTKLALDMSLSSDGKDREEIGERLVQDMLDEENNGNNTKPEITGNESDGEFKVSSSNNSKQTDAEETNTGVPLEGSQPNSVEKTDLADGDEKANIKTEMKSETVEGDNKELRETMKGENVQTDSNAAVPSSKSSTEEPNESVLSGHLDLDTEASPVVSTIEKTTKGDVSVTEEQQSANIDGQLEKPEIEESKKPDVLNQVSLSIEEEKPKNKESEVDNNAAKD

SEQ ID NO: 8598 - protein, 830 aa, Schizosaccharomyces pombe
MEKASKNKESGVKKANNSFLQNFGVNTAGKENESTSLPRLPKSEDESIPKQSIKSKNKKKTQHFLSDAFESLKRQEIDTNEKEVIVSAPITSKPAQVFYSKKLERKDEGIRKWEKDPFAPISVKSGAWKKPYTKVPEVSINKATSKRTDLINDKPIVIPIPRASTSTLYFGKHNKPTSENRKGPIGIPTEEILTSQNTQAMLHKLFENNVLDNVKDDSMQRQSSFIPGMHIRLLDHQVQGLTWLKSRETVSKSSASGGILADDMGLGKTIQMIALILSHPLPKKKHSIKSTLVVAPLSLIKQWESEVQTKSKLTAIVYHGASRYKLLKVIHEYDVVITTYQILVSEWVSHNTTGTDGKSPTEAKSYEKKKPSLFAFYWWRIILDEAHTIKNKSSKSALACCALQGINRWCLTGTPLQNNVDELYSLVKFLHINPFNDQSVWKDQISLPLCQGEENLVFKRLRMLLSVIMLRRTKTLLEANAGKDGTGGALKLSKRLVYKVICKFEESERDFYSNLARNMERTMSNFVNSGKLGKNYTNILCLLLRLRQACNHPQSLNFQFEQDVDAFNALDGAANTNKLASDQDVDDLANLLETVEIGSRKKSFCTICMAELPPDFHEKKCKDCSRNFKELDKGIQDPNDKTLYKSSKIREILKILSLDEQEEDDTVRGLRKTIIFSQFTTFLDIIDLHLRKAGIGFVRYDGRMNNRAREKSLDLLRSDSGTQVLLCSLKCGALGLNLTCASRVILCDVWWNPAIEEQAIDRVHRIGQRRDVLVYKLVVENTIEEKIVELQNLKRDLAKQALGDGKKSVFTSKKLTLNDLLFLFNKRAAA

SEQ ID NO: 8599 - protein, 861 aa, Schizosaccharomyces pombe
MGTSCNKINSNSNKGKENMHFVLDDNGDSKGNASNQQVERDDKLDMETTRWNGKEFEEPLSTNKKLIIQSNNTSSQHSTPPLSISDTSTHTGSSTDNVEANPNTGFSSARKRSLRSSNLKKKFVPLSSPEESNESEFIDDDESDEVASIIDIKEDETFDSKVEIPEAAPSSSTESDEESIPLSYQSKRRRVSARASSSASSSSRTQAKSIPSHERTHYRLIRQHPELEHVWEKLEEEAPREVKQIEQPKELVLNLLPFQREGVYWLKRQEDSSFGGGILADEMGMGKTIQTIALLLSEPRGKPTLVVAPVVAIMQWKEEIDTHTNKALSTYLYYGQARDISGEELSSYDVVLTSYNVIESVYRKERSGFRRKNGVVKEKSLLHQMEFYRIILDEAHGIKSRTCNTARAVCGLRTTRKICLSGTPLQNRIGELFSLLRFLRADPFAYYYCLQCECKSLHWRFSDRSNCDECGHKPMSHTCYFNAEMLKPIQKFGYEGPGKLAFKKVHSLLKHIMLRRTKLERADDLGLPPRVVEVRKDLFNEEEEDVYQSLYMDSKRKFNTYLAEGVVLNNYANIFQLITRMRQMADHPDLVLASKRKTVDIENQENIVCKICDEVAQDAIESRCHHTFCRLCVTEYINAAGDGENVNCPSCFIPLSIDLSAPALEDFSEEKFKNASILNRIDMNSWRSSTKIEALVEELYLLRKKDRTLKSIVFSQFTSMLDLIHWRLRKAGFNCVKLDGGMTPKARAATIEAFSNDINITIFLVSLKAGGVALNLTEASQVFMMDPWWNGAVQWQAMDRIHRIGQKRPIKVITLCIENSIESKIIELQEKKAQMIHATIDQDEKALNQLSVEDMQFLFSN

SEQ ID NO: 8600 - protein, 963 aa, Schizosaccharomyces pombe
MHISTLKVDQLQNEAVDINSNDTIDSINWKNTRNNHTTQASLQADNNDEQSNGQAPFSTTYSEINNIHDVPGNQDEWSSSPIAGIIVESEDEEVVENNLHSQMGTSCNKINSNSNKGKENMHFVLDDNGDSKGNASNQQVERDDKLDMETTRWNGKEFEEPLSTNKKLIIQSNNTSSQHSTPPLSISDTSTHTGSSTDNVEANPNTGFSSARKRSLRSSNLKKKFVPLSSPEESNESEFIDDDESDEVASIIDIKEDETFDSKVEIPEAAPSSSTESDEESIPLSYQSKRRRVSARASSSASSSSRTQAKSIPSHERTHYRLIRQHPELEHVWEKLEEEAPREVKQIEQPKELVLNLLPFQREGVYWLKRQEDSSFGGGILADEMGMGKTIQTIALLLSEPRGKPTLVVAPVVAIMQWKEEIDTHTNKALSTYLYYGQARDISGEELSSYDVVLTSYNVIESVYRKERSGFRRKNGVVKEKSLLHQMEFYRIILDEAHGIKSRTCNTARAVCGLRTTRKICLSGTPLQNRIGELFSLLRFLRADPFAYYYCLQCECKSLHWRFSDRSNCDECGHKPMSHTCYFNAEMLKPIQKFGYEGPGKLAFKKVHSLLKHIMLRRTKLERADDLGLPPRVVEVRKDLFNEEEEDVYQSLYMDSKRKFNTYLAEGVVLNNYANIFQLITRMRQMADHPDLVLASKRKTVDIENQENIVCKICDEVAQDAIESRCHHTFCRLCVTEYINAAGDGENVNCPSCFIPLSIDLSAPALEDFSEEKFKNASILNRIDMNSWRSSTKIEALVEELYLLRKKDRTLKSIVFSQFTSMLDLIHWRLRKAGFNCVKLDGGMTPKARAATIEAFSNDINITIFLVSLKAGGVALNLTEASQVFMMDPWWNGAVQWQAMDRIHRIGQKRPIKVITLCIENSIESKIIELQEKKAQMIHATIDQDEKALNQLSVEDMQFLFSN

SEQ ID NO: 8601 - protein, 854 aa, Schizosaccharomyces pombe
MGTSCNKINSNSNKGKENMHFVLDDNGDSKGNASNQQVERDDKLDMETTRWNGKEFEEPLSTNKKLIIQSNNTSSQHSTPPLSISDTSTHTGSSTDNVEVKSQYRFSSARNVIKVLEFEKVVPLSSPEESNESEFIDDDESDEVASIIDIKEDETFDSKVEIPEAAPSSSTESDEESIPLSYQSKRRRVSARASSSASSSSRTQAKSIPSHERTHYRLIRQHPELEHVWEKLEEEAPREVKQIEQPKELVLNLLPFQREGVYWLKRQEDSSFGGGILADEMGMGKTIQTIALLLSEPRGKPTLVVAPVVAIMQWKEEIDTHTNKALSTYLYYGQARDISGEELSSYDVVLTSYNVIESVYRKERSGFRRKNGVVKEKSLLHQMEFYRIILDEAHGIKSRTCNTARAVCGLRTTRKICLSGTPFENRIGELFSLLRFLRADPFAYYYCLQCECKSLHWRFSDRSNCDECGHKPMSHTCYFNAEMLKPIQKFGYEGPGKLAFKKVDSLSMVRRTKLERRIPWIPPRVVEVRRLFNEEEEDVYQSLYMDSKRKFNTYLAEGVVLNNYANIFQLITRMRQMADHPDLVLASKRKTVDIENQENIVCKICDEVAQDAIESRCHHTFCRLCVTEYINAAGDGENVNCPSCFIPLSIDLSAPALEDFSEEKFKNASILNRIDMNSWRSSTKIEALVEELYLLRKKDRTLKSIVFSQFTSMLDLIHWRLRKAGFNCVKLDGGMTPKARAATIEAFSNDINITIFLVSLKAGGVALNLTEASQVFMMDPWWNGAVQWQAMDRIHRIGQKGRIKVITLCIENSIESKIIELQEKKAQMIHATIDQDEKALNQLSVEDMQFLFSN

SEQ ID NO: 8602 - protein, 570 aa, Schizosaccharomyces pombe
SEWFSKDIESHAQSNTQLNEQQLKRLHMILKPFMLRRVKKNVQSELGEKIEKEVYCDLTQRQKILYQALRRQISIAELLEKAILGGDDTVASIMNLVMQFRKVCNHPDLFEREDVRSPLSLATWSKSIYINREGNFLDVPYNTRNFITFSIPRLLYEQGGILSVPGLNTSRGFETKYLYNLMNIWNPEYTNDSIKSNPEGSPFSWLRFVDESPQTLFQTFQNPVVHYLDEAEASSSLKEEQLCRQEFCYGKDYSNVRKMLLLPKSITKVDVLGSDFKEDSPFYHLTHVLEESDSQLDLTLLDSVLVQRASAPPIDIYCPGSRQFTVLQSRFQRDHLWSHYLYQPLKGEEDLIINNQAVSKLPIPRKPLLPSFGIAKGSYSNVRIPSMLRFIADSGKLSKLDKLLVELKANDHRVLIYFQMTRMIDLMEEYLTFRQYKYLRLDGSSKISQRRDMVTEWQTRPELFVFLLSTRAGGLGINLTAADTVIFYDSDWNPSIDSQAMDRAHRIGQQKQVTVYRFITRGTIEERIVIRAKEKEEVQKVVISGGETRPTKQMDLKGNSREMVSWLLEE

SEQ ID NO: 8603 - protein, 688 aa, Schizosaccharomyces pombe
MHISTLKVDQLQNEAVDINSNDTIDSINWKNTRNNHTTQASLQADNNDEQSNGQAPFSTTYSEINNIHDVPGNQDEWSSSPIAGIIVESEDEEVVENNLHSQMGTSCNKINSNSNKGKENMHFVLDDNGDSKGNASNQQVERDDKLDMETTRWNGKEFEEPLSTNKKLIIQSNNTSSQHSTPPLSISDTSTHTGSSTDNVEANPNTGFSSARKRSLRSSNLKKKFVPLSSPEESNESEFIDDDESDEVASIIDIKEDETFDSKVEIPEAAPSSSTESDEESIPLSYQSKRRRVSARASSSASSSSRTQAKSIPSHERTHYRLIRQHPELEHVWEKLEEEAPREVKQIEQPKELVLNLLPFQREGVYWLKRQEDSSFGGGILADEMGMGKTIQTIALLLSEPRGKPTLVVAPVVAIMQWKEEIDTHTNKALSTYLYYGQARDISGEELSSYDVVLTSYNVIESVYRKERSGFRRKNGVVKEKSLLHQMEFYRIILDEAHGIKSRTCNTARAVCGLRTTRKICLSGTPLQNRIGELFSLLRFLRADPFAYYYCLQCECKSLHWRFSDRSNCDECGHKPMSHTCYFNAEMLKPIQKFGYEGPGKLAFKKVHSLLKHIMLRRTKLERADDLGLPPRVVEVRKDLFNEEEEDVYQSLYMDSKRKFNTYLAEGVVLNNYANIFQLITRMRQMAD

SEQ ID NO: 8604 - protein, 1133 aa, Schizosaccharomyces pombe
MKRKVQKIIDEAPLEENSPPRFFDSDVEADSKPNDLTAANSIVDLKTNSQHENANAAGKEYGDSGVSESWVLDFLSVTGEKTISEFLAQKIWKTSNGDLNVAVDMYFDESFNIKNSNPDSESQKDTDASLTQMDQLSNTVSVKDLSINRNTNKKALNAVSPSLNLSSNSSVQDVSIDKEEMMKKQSRNALTPLDFIMKKNELMKYIGCFGVEAYSTASGTRTLQAGERIYLERQKLSIKSQSRNSRKKSKLLSINSSCYSNIVRFCNSDHHEIGKLPTEVASVISTLMEQGFWSFEAICIYSDNIIRFGSNVTLQVYCFINVNHPSLNRSPFTLATNSMQEEEEHLKASFAQNKRDHLLRLFTWIALEPDLEDCNTKESIHIDDILKTSSLPEARDESNSDLTPSSTEDEEDVVSDQLAILYDKVKTSGAELPSAPKPSTFALDLREYQKQALYWMCCKEEGVQSDGSAPKLHPLWSRFRFPKDSEFPEFFKCSSDDDNTHFYVNLYTGETTMLFPNSMPYHRGGILADEMGLGKTIEVLSLIHSRPCFSTDEIPEAFRHSKPSLPVASRTTLVVAPMSLLDQWHSEACKVSQGTKFRSMIYYGSEKPLDLKSCVIDTSTAPLIIITSYGVLLSEFSQQSHSSGLFSVHWFRVVLDEGHNIRNRESKTAKACHSISSQNRWVITGTPIVNKLDDLYSLIKFMRYEPWCNYTYWQTFVSLPYQSKDVLKALNVVQSILEFLVLRRTKETKDRNGNSIVTLPPKTVKIEYLDFSDSERKIYDSLYTKAKSTVNANIVAGTLFRNYTTILGLLLRLRQACCDPVLLSNMTINSETFDDFEFSVEQFNSLINQFVVTGKPIPSDILKIDTLKSFEALITECPICCNEPIQNPLLLNCKHACCGDCLSEHIQYQKRRNIIPPLCHTCRQPFNEQDVYKPFFVKNNGTQSTLLVGEEVKWKYWNRLQSVKLNGLLGQLRQLTHSSEPEKVVIFSQFTTFLDIIADVLESEKMGYARFDGTMSQQMRSTALETFRNDPDVNVLIISLKAGGVGLNLTCANHVFIMDPWWSWSVEAQAIDRIHRLGQEKPVFVTRYIVRDTVEERMLKIQERKNFITGTLGMSEGKQQVQSIEDIKMLFEY

SEQ ID NO: 8605 - protein, 1070 aa, Schizosaccharomyces pombe
MKRKVQKIIDEAPLEENSPPRFFDSDVEADSKPNDLTAANSIVDLKTNSQHENANAAGKEYGDSGVSESWVLDFLSVTGEKTISEFLAQKIWKTSNGDLNVAVDMYFDESFNIKNSNPDSESQKDTDASLTQMDQLSNTVSVKDLSINRNTNKKALNAVSPSLNLSSNSSVQDVSIDKEEMMKKQSRNALTPLDFIMKKNELMKYIGCFGVEAYSTASGTRTLQAGERIYLERQKLSIKSQSRNSRKKSKLLSINSSCYSNIVRFCNSDHHEIGKLPTEVASVISTLMEQGFWSFEAICIYSDNIIRFGSNVTLQVYCFINVNHPSLNRSPFTLATNSMQEEEEHLKASFAQNKRDHLLRLFTWIALEPDLEDCNTKESIHIDDILKTSSLPEARDESNSDLTPSSTEDEEDVVSDQLAILYDKVKTSGAELPSAPKPSTFALDLREYQKQALYWMCCKEEGVQSDGSAPKLHPLWSRFRFPKDSEFPEFFKCSSDDDNTHFYVNLYTGETTMLFPNSMPYHRGGILADEMGLGKTIEVLSLIHSRPCFSTDEIPEAFRHSKPSLPVASRTTLVVAPMSLLDQWHSEACKVSQGTKFRSMIYYGSEKPLDLKSCVIDTSTAPLIIITSYGVLLSEFSQQSHSSGLFSVHWFRVVLDEGHNIRNRESKTAKACHSISSQNRWVITGTPIVNKLDDLYSLIKFMRYEPWCNYTYWQTFVSLPYQSKDVLKALNVVQSILEFLVLRRTKETKDRNGNSIVTLPPKTVKIEYLDFSDSERKIYDSLYTKAKSTVNANIVAGTLFRNYTTILGLLLRLRQACCDPVLLSNMTINSETFDDFEFSVEQFNSLINQFVVTGKPIPSDILKIDTLKSFEALITECPICCNEPIQNPLLLNCKHACCGDCLSEHIQYQKRRNIIPPLCHTCRQPFNEQDVYKPFFVKNNGTQSTLLVGEEVKWKYWNRLQSVKLNGLLGQLRQLTHSSEPEKVVIFSQFTTFLDIIADVLESEKMGYARFDGTMSQQMRSTALETFRNDPDVNVLIISLKAGGVGLNLTCANHVFIMDPWWSWSVEAQA

SEQ ID NO: 8606 - protein, 1375 aa, Schizosaccharomyces pombe
MDRTKRRKIEKEASLLNERNNLLESDFANCYRAFQHQLKLDQQIWRGPEDELNRLKSTIYPVVFWVDGSEKLHAYSFTQRKISLAKNLIPLFSVDLNKDTYSALKAPLKIWSKLWEDNRRLKKIIKYTSYVTVKGSELILSFGISILDSFLAPQDAILSSGSSSSYTALLDYTFLPSEDEEYSCLDINTALFYDCARKLAKSLRFANVSRDPRLSSELLPFQMRVLEWMKRREEEKFLTSNDLPPLWYHCKSLFDDRMVYVNHVYGYMTFSKEKTYLLASGDIRGGILADEMGMGKTLEVLGLVLHHQLPISLTDTCTFDQVVGKNVKYSKATLIITPSTILDQWLSEIDLHVPSLKVFHYQGIRKSNGLKSAKIFLDCDIVVTSYSDLRFELLYTESHSRTLRHEKRHVSPKSPLIDVCWWRICVDEAQMVETSQSNVAQMIYRIPRVNCWTVSGTPVRSEVDDLFGLLFLLRYSPMYLYKKQAWMQIIEKKRVREFCDLFGSLVCRHSKQDVEEELKLPPQHRICMTTRLSVVEETNYQDLLSEAAKSLHFFKDRNLDLCDEESMRRWLVRLRQACCHPQVGFGNKSAFGGGPMKSINDVLVFMLEQTNSTFSSLNRKLYSDKIIVGQIYDHIKDYNKALAIWSEVRIPVELAVKELENVIYNSKYEDHGKNLPINYFGLDHFIHLRVWYVLLHKIYFFIASAYFSLKNEKFENEFYLLAQDLRRKIMSDVIIKTSKHLEEFSEKFIPKKLVKIPRLQKSYAKGLITGHGIIEDYNRLYKELNDQKEVLIKFRDRLIHLMKLPLLDQESDPTGDEYEESLNAQSEISYCIDVYRQMLSDRVAAVSGTINTFVSHETELEKYKLIESIKKSEKSLDKQAEERDKKYLLYFEEREEARPKADQYGSLINIVSRLLDASNRSTSSFETSKNMEEYERIDAMAKEQSRICQKLEKELSIIQLTYNSRIEYYKQLQEISDSLMPPPVSNISLNNYVKDDEKKQKFLNSVIIKASVILEKEISEKQDEASQTTNVAELVNQKISEMNIPGHIHLLRELEEEKSNTQRKIAHFESRRRYLTNLYEHIVLKAESHQICIICRDIIKQGFITTCGHLYCSFCLEAWLKHSSSCPMCKTKLNKNNAYYIGESRDIYSRQEFVTGFNKRDERLEILDDEAYRQISNMELKESFGSKIDTISKHLLYLKHNELYPKVVVFSQWLDVLDVLHKSFEANGIVFIRFDGKSKNTCLKRFKEERSLQVLTLHARSQSSGLTLTNATHVFMCEPLLNSGIEMQAISRVHRIGQTRPTFVYYYIVEDTVEGHILNLSLTKHEQLDKLGLDVPLVGNINRTTEASSGGEQVDAAEIKDCLKMALKRLTTEDS

SEQ ID NO: 8607 - protein, 180 aa, Schizosaccharomyces pombe
MGLGKTIQMIALILSHPLPKKKHSIKSTLVVAPLSLIKQWESEVQTKSKLTAIVYHGASRYKLLKVIHEYDVVITTYQILVSEWVSHNTTGTDGKSPTEAKSYEKKKPSLFAFYWWRIILDEAHTIKNKSSKSALACCALQGINRWCLTGTPLQNNVDELYSLVKFLHINPFNDQSVWKD

SEQ ID NO: 8608 - protein, 104 aa, Schizosaccharomyces pombe
DPDVNVLIISLKAGGVGLNLTCANHVFIMDPWWSWSVEAQAIDRIHRLGQEKPVFVTRYIVRDTVEERMLKIQERKNFITGTLGMSEGKQQVQSIEDIKMLFEY

SEQ ID NO: 8609 - protein, 430 aa, Schizosaccharomyces pombe
DPKSDVYIFMLSTRAGGLGLNLQTADTVIIFDTDWNPHQDLQAQDRAHRIGQTKEVRILRLITEKSIEENILSRAQYKLDLDGKVIQAGKFDNKSTPEEREAFLRSLLEHDGDDDHDLTYGELQDDELNELISRTDEELVLFKKLDKERAATDIYGKGKPLERLLTVNELPDFYKVEVDSFAVQSSSELEDQYLERKRRRRNSISYTELTLDELNTVDDPSSTLMPRKRGRPRKKTNSGSSLSTPLSQESSLARSGRKNTPSYKQKALRRYCMEIFERLYNLQSEDGRFVNGLFLYPPNRKLYPDYYIIIKRPIALGKIKRNIKNDRYGDVGELIADFMLMFNNAYTYNEEHSIVYEDAKLMEKTLKEVIEDLEKNNSLHAYEEEALNEEQASLVFLENSEAELPLDSGIVSAEDDKVITYEDSSSSYSE

SEQ ID NO: 8610 - protein, 1867 aa, Saccharomyces cerevisiae
MTSRVSRLDRQVILIETGSTQVVRNMAADQMGDLAKQHPEDILSLLSRVYPFLLVKKWETRVTAARAVGGIVAHAPSWDPNESDLVGGTNEGSPLDNAQVKLEHEMKIKLEEATQNNQLNLLQEDHHLSSLSDWKLNEILKSGKVLLASSMNDYNVLGKADDNIRKQAKTDDIKQETSMLNASDKANENKSNANKKSARMLAMARRKKKMSAKNTPKHPVDITESSVSKTLLNGKNMTNSAASLATSPTSNQLNPKLEITEQADESKLMIESTVRPLLEQHEIVAGLVWQFQGIYELLLDNLMSENWEIRHGAALGLRELVKKHAYGVSRVKGNTREENNLRNSRSLEDLASRLLTVFALDRFGDYVYDTVVAPVRESVAQTLAALLIHLDSTLSIKIFNCLEQLVLQDPLQTGLPNKIWEATHGGLLGIRYFVSIKTNFLFAHGLLENVVRIVLYGLNQSDDDVQSVAASILTPITSEFVKLNNSTIEILVTTIWSLLARLDDDISSSVGSIMDLLAKLCDHQEVLDILKNKALEHPSEWSFKSLVPKLYPFLRHSISSVRRAVLNLLIAFLSIKDDSTKNWLNGKVFRLVFQNILLEQNPELLQLSFDVYVALLEHYKVKHTEKTLDHVFSKHLQPILHLLNTPVGEKGKNYAMESQYILKPSQHYQLHPEKKRSISETTTDSDIPIPKNNEHINIDAPMIAGDITLLGLDVILNTRIMGAKAFALTLSMFQDSTLQSFFTNVLVRCLELPFSTPRMLAGIIVSQFCSSWLQKHPEGEKLPSFVSEIFSPVMNKQLLNRDEFPVFRELVPSLKALRTQCQSLLATFVDVGMLPQYKLPNVAIVVQGETEAGPHAFGVETAEKVYGEYYDKMFKSMNNSYKLLAKKPLEDSKHRVLMAINSAKESAKLRTGSILANYASSILLFDGLPLKLNPIIRSLMDSVKEERNEKLQTMAGESVVHLIQQLLENNKVNVSGKIVKNLCGFLCVDTSEVPDFSVNAEYKEKILTLIKESNSIAAQDDINLAKMSEEAQLKRKGGLITLKILFEVLGPSILQKLPQLRSILFDSLSDHENEEASKVDNEQGQKIVDSFGVLRALFPFMSDSLRSSEVFTRFPVLLTFLRSNLSVFRYSAARTFADLAKISSVEVMAYTIREILPLMNSAGSLSDRQGSTELIYHLSLSMETDVLPYVIFLIVPLLGRMSDSNEDVRNLATTTFASIIKLVPLEAGIADPKGLPEELVASRERERDFIQQMMDPSKAKPFKLPIAIKATLRKYQQDGVNWLAFLNKYHLHGILCDDMGLGKTLQTICIIASDQYLRKEDYEKTRSVESRALPSLIICPPSLTGHWENEFDQYAPFLKVVVYAGGPTVRLTLRPQLSDADIIVTSYDVARNDLAVLNKTEYNYCVLDEGHIIKNSQSKLAKAVKEITANHRLILTGTPIQNNVLELWSLFDFLMPGFLGTEKMFQERFAKPIAASRNSKTSSKEQEAGVLALEALHKQVLPFMLRRLKEDVLSDLPPKIIQDYYCELGDLQKQLYMDFTKKQKNVVEKDIENSEIADGKQHIFQALQYMRKLCNHPALVLSPNHPQLAQVQDYLKQTGLDLHDIINAPKLSALRTLLFECGIGEEDIDKKASQDQNFPIQNVISQHRALIFCQLKDMLDMVENDLFKKYMPSVTYMRLDGSIDPRDRQKVVRKFNEDPSIDCLLLTTKVGGLGLNLTGADTVIFVEHDWNPMNDLQAMDRAHRIGQKKVVNVYRIITKGTLEEKIMGLQKFKMNIASTVVNQQNSGLASMDTHQLLDLFDPDNVTSQDNEEKNNGDSQAAKGMEDIANETGLTGKAKEALGELKELWDPSQYEEEYNLDTFIKTLR

SEQ ID NO: 8611 - protein, 1129 aa, Saccharomyces cerevisiae
MAYMLAIANFHFFKFYTRMRKKHENNSCNEKDKDENLFKIILAIFLQEKKKYDCISSGSIMTASEEYLENLKPFQVGLPPHDPESNKKRYLLKDANGKKFDLEGTTKRFEHLLSLSGLFKHFIESKAAKDPKFRQVLDVLEENKANGKGKGKHQDVRRRKTEHEEDAELLKEEDSDDDESIEFQFRESPAYVNGQLRPYQIQGVNWLVSLHKNKIAGILADEMGLGKTLQTISFLGYLRYIEKIPGPFLVIAPKSTLNNWLREINRWTPDVNAFILQGDKEERAELIQKKLLGCDFDVVIASYEIIIREKSPLKKINWEYIIIDEAHRIKNEESMLSQVLREFTSRNRLLITGTPLQNNLHELWALLNFLLPDIFSDAQDFDDWFSSESTEEDQDKIVKQLHTVLQPFLLRRIKSDVETSLLPKKELNLYVGMSSMQKKWYKKILEKDLDAVNGSNGSKESKTRLLNIMMQLRKCCNHPYLFDGAEPGPPYTTDEHLVYNAAKLQVLDKLLKKLKEEGSRVLIFSQMSRLLDILEDYCYFRNYEYCRIDGSTAHEDRIQAIDDYNAPDSKKFVFLLTTRAGGLGINLTSADVVVLYDSDWNPQADLQAMDRAHRIGQKKQVKVFRLVTDNSVEEKILERATQKLRLDQLVIQQNRTSLKKKENKADSKDALLSMIQHGAADVFKSGTSTGSAGTPEPGSGEKGDDIDLDELLLKSENKTKSLNAKYETLGLDDLQKFNQDSAYEWNGQDFKKKIQRDIISPLLLNPTKRERKENYSIDNYYKDVLNTGRSSTPSHPRMPKPHVFHSHQLQPPQLKVLYEKERMWTAKKTGYVPTMDDVKAAYGDISDEEEKKQKLELLKLSVNNSQPLTEEEEKMKADWESEGFTNWNKLEFRKFITVSGKYGRNSIQAIARELAPGKTLEEVRAYAKAFWSNIERIEDYEKYLKIIENEEEKIKRVKMQQEALRRKLSEYKNPFFDLKLKHPPSSNNKRTYSEEEDRFILLMLFKYGLDRDDVYELVRDEIRDCPLFELDFYFRSRTPVELARRGNTLLQCLEKEFNAGIVLDDATKDRMKKEDENGKRIREEFADQTANEKENVDGVESKKAKIEDTSNVGTEQLVAEKIPENETTH

SEQ ID NO: 8612 - protein, 1143 aa, Saccharomyces cerevisiae
MQKPARGGCRNTLLWPNMLAIANFHFFKFYTRMRKKHENNSCNEKDKDENLFKIILAIFLQEKKKYDCISSGSIMTASEEYLENLKPFQVGLPPHDPESNKKRYLLKDANGKKFDLEGTTKRFEHLLSLSGLFKHFIESKAAKDPKFRQVLDVLEENKANGKGKGKHQDVRRRKTEHEEDAELLKEEDSDDDESIEFQFRESPAYVNGQLRPYQIQGVNWLVSLHKNKIAGILADEMGLGKTLQTISFLGYLRYIEKIPGPFLVIAPKSTLNNWLREINRWTPDVNAFILQGDKEERAELIQKKLLGCDFDVVIASYEIIIREKSPLKKINWEYIIIDEAHRIKNEESMLSQVLREFTSRNRLLITGTPLQNNLHELWALLNFLLPDIFSDAQDFDDWFSSESTEEDQDKIVKQLHTVLQPFLLRRIKSDVETSLLPKKELNLYVGMSSMQKKWYKKILEKDLDAVNGSNGSKESKTRLLNIMMQLRKCCNHPYLFDGAEPGPPYTTDEHLVYNAAKLQVLDKLLKKLKEEGSRVLIFSQMSRLLDILEDYCYFRNYEYCRIDGSTAHEDRIQAIDDYNAPDSKKFVFLLTTRAGGLGINLTSADVVVLYDSDWNPQADLQAMDRAHRIGQKKQVKVFRLVTDNSVEEKILERATQKLRLDQLVIQQNRTSLKKKENKADSKDALLSMIQHGAADVFKSGTSTGSAGTPEPGSGEKGDDIDLDELLLKSENKTKSLNAKYETLGLDDLQKFNQDSAYEWNGQDFKKKIQRDIISPLLLNPTKRERKENYSIDNYYKDVLNTGRSSTPSHPRMPKPHVFHSHQLQPPQLKVLYEKERMWTAKKTGYVPTMDDVKAAYGDISDEEEKKQKLELLKLSVNNSQPLTEEEEKMKADWESEGFTNWNKLEFRKFITVSGKYGRNSIQAIARELAPGKTLEEVRAYAKAFWSNIERIEDYEKYLKIIENEEEKIKRVKMQQEALRRKLSEYKNPFFDLKLKHPPSSNNKRTYSEEEDRFILLMLFKYGLDRDDVYELVRDEIRDCPLFELDFYFRSRTPVELARRGNTLLQCLEKEFNAGIVLDDATKDRMKKEDENGKRIREEFADQTANEKENVDGVESKKAKIEDTSNVGTEQLVAEKIPENETTH

SEQ ID NO: 8613 - protein, 1120 aa, Saccharomyces cerevisiae
MTTQQEEQRSDTKNSKSESPSEVLVDTLDSKSNGSSDDDNIGQSEELSDKEIYTVEDRPPEYWAQRKKKFVLDVDPKYAKQKDKSDTYKRFKYLLGVTDLFRHFIGIKAKHDKNIQKLLKQLDSDANKLSKSHSTVSSSSRHHRKTEKEEDAELMADEEEEIVDTYQEDIFVSESPSFVKSGKLRDYQVQGLNWLISLHENKLSGILADEMGLGKTLQTISFLGYLRYVKQIEGPFLIIVPKSTLDNWRREFLKWTPNVNVLVLHGDKDTRADIVRNIILEARFDVLITSYEMVIREKNALKRLAWQYIVIDEAHRIKNEQSALSQIIRLFYSKNRLLITGTPLQNNLHELWALLNFLLPDIFGDSELFDEWFEQNNSEQDQEIVIQQLHSVLNPFLLRRVKADVEKSLLPKIETNVYVGMTDMQIQWYKSLLEKDIDAVNGAVGKREGKTRLLNIVMQLRKCCNHPYLFEGAEPGPPYTTDEHLIFNSGKMIILDKLLKRLKEKGSRVLIFSQMSRLLDILEDYCYFRDFEYCRIDGSTSHEERIEAIDEYNKPNSEKFVFLLTTRAGGLGINLVTADTVILFDSDWNPQADLQAMDRAHRIGQKKQVHVYRFVTENAIEEKVIERAAQKLRLDQLVIQQGTGKKTASLGNSKDDLLDMIQFGAKNMFEKKASKVTVDADIDDILKKGEQKTQELNAKYQSLGLDDLQKFNGIENQSAYEWNGKSFQKKSNDKVVEWINPSRRERRREQTTYSVDDYYKEIIGGGSKSASKQTPQPKAPRAPKVIHGQDFQFFPKELDALQEKEQLYFKKKVNYKVTSYDITGDIRNEGSDAEEEEGEYKNAANTEGHKGHEELKRRIEEEQEKINSAPDFTQEDELRKQELISKAFTNWNKRDFMAFINACAKYGRDDMENIKKSIDSKTPEEVEVYAKIFWERLKEINGWEKYLHNVELGEKKNEKLKFQETLLRQKIEQCKHPLHELIIQYPPNNARRTYNTLEDKFLLLAVNKYGLRADKLYEKLKQEIMMSDLFTFDWFIKTRTVHELSKRVHTLLTLIVREYEQPDANKKKRSRTSATREDTPLSQNESTRASTVPNLPTTMVTNQKDTNDHVDKRTKIDQEA

SEQ ID NO: 8614 - protein, 1703 aa, Saccharomyces cerevisiae
MNIPQRQFSNEEVNRCYLRWQHLRNEHGMNAPSVPEFIYLTKVLQFAAKQRQELQMQRQQQGISGSQQNIVPNSSDQAELPNNASSHISASASPHLAPNMQLNGNETFSTSAHQSPIMQTQMPLNSNGGNNMLPQRQSSVGSLNATNFSPTPANNGENAAEKPDNSNHNNLNLNNSELQPQNRSLQEHNIQDSNVMPGSQINSPMPQQAQMQQAQFQAQQAQQAQQAQQAQQAQARLQQGRRLPMTMFTAEQSELLKAQITSLKCLVNRKPIPFEFQAVIQKSINHPPDFKRMLLSLSEFARRRQPTDQNNQSNLNGGNNTQQPGTNSHYNNTNTDNVSGLTRNAPLDSKDENFASVSPAGPSSVHNAKNGTLDKNSQTVSGTPITQTESKKEENETISNVAKTAPNSNKTHTEQNNPPKPQKPVPLNVLQDQYKEGIKVVDIDDPDMMVDSFTMPNISHSNIDYQTLLANSDHAKFTIEPGVLPVGIDTHTATDIYQTLIALNLDTTVNDCLDKLLNDECTESTRENALYDYYALQLLPLQKAVRGHVLQFEWHQNSLLTNTHPNFLSKIRNINVQDALLTNQLYKNHELLKLERKKTEAVARLKSMNKSAINQYNRRQDKKNKRLKFGHRLIATHTNLERDEQKRAEKKAKERLQALKANDEEAYIKLLDQTKDTRITHLLRQTNAFLDSLTRAVKDQQKYTKEMIDSHIKEASEEVDDLSMVPKMKDEEYDDDDDNSNVDYYNVAHRIKEDIKKQPSILVGGTLKDYQIKGLQWMVSLFNNHLNGILADEMGLGKTIQTISLLTYLYEMKNIRGPYLVIVPLSTLSNWSSEFAKWAPTLRTISFKGSPNERKAKQAKIRAGEFDVVLTTFEYIIKERALLSKVKWVHMIIDEGHRMKNAQSKLSLTLNTHYHADYRLILTGTPLQNNLPELWALLNFVLPKIFNSVKSFDEWFNTPFANTGGQDKIELSEEETLLVIRRLHKVLRPFLLRRLKKDVEKELPDKVEKVVKCKMSALQQIMYQQMLKYRRLFIGDQNNKKMVGLRGFNNQIMQLKKICNHPFVFEEVEAQINPTRETNDDIWRVAGKFELLDRILPKLKATGHRVLIFFQMTQIMDIMEDFLRYINIKYLRLDGHTKSDERSELLRLFNAPDSEYLCFILSTRAGGLGLNLQTADTVIIFDTDWNPHQDLQAQDRAHRIGQKNEVRILRLITTNSVEEVILERAYKKLDIDGKVIQAGKFDNKSTSEEQEALLRSLLDAEEERRKKRESGVEEEEELKDSEINEILARNDEEMAVLTRMDEDRSKKEEELGVKSRLLEKSELPDIYSRDIGAELKREESESAAVYNGRGARERKTATYNDNMSEEQWLRQFEVSDDEKNDKQARKQRTKKEDKSEAIDGNGEIKGENIDADNDGPRINNISAEDRADTDLAMNDDDFLSKKRKAGRPRGRPKKVKLEGSENSEPPALESSPVTGDNSPSEDFMDIPKPRTAGKTSVKSARTSTRGRGRGRGRGRGRGRGRGRPPKARNGLDYVRTPAAATSPIDIREKVAKQALDLYHFALNYENEAGRKLSDIFLSKPSKALYPDYYMIIKYPVAFDNINTHIETLAYNSLKETLQDFHLIFSNARIYNTEGSVVYEDSLELEKVVTKKYCEIMGDNSQLDFTEFDEQYGTRPLVLPPVVTSSVAESFTDEADSSMTEASV

SEQ ID NO: 8615 - protein, 1703 aa, Saccharomyces cerevisiae
MNIPQRQFSNEEVNRCYLRWQHLRNEHGMNAPSVPEFIYLTKVLQFAAKQRQELQMQRQQQGISGSQQNIVPNSSDQAELPNNASSHISASASPHLAPNMQLNGNETFSTSAHQSPIMQTQMPLNSNGGNNMLPQRQSSVGSLNATNFSPTPANNGENAAEKPDNSNHNNLNLNNSELQPQNRSLQEHNIQDSNVMPGSQINSPMPQQAQMQQAQFQAQQAQQAQQAQQAQQAQARLQQGRRLPMTMFTAEQSELLKAQITSLKCLVNRKPIPFEFQAVIQKSINHPPDFKRMLLSLSEFARRRQPTDQNNQSNLNGGNNTQQPGTNSHYNNTNTDNVSGLTRNAPLDSKDENFASVSPAGPSSVHNAKNGTLDKNSQTVSGTPITQTESKKEENETISNVAKTAPNSNKTHTEQNNPPKPQKPVPLNVLQDQYKEGIKVVDIDDPDMMVDSFTMPNISHSNIDYQTLLANSDHAKFTIEPGVLPVGIDTHTATDIYQTLIALNLDTTVNDCLDKLLNDECTESTRENALYDYYALQLLPLQKAVRGHVLQFEWHQNSLLTNTHPNFLSKIRNINVQDALLTNQLYKNHELLKLERKKTEAVARLKSMNKSAINQYNRRQDKKNKRLKFGHRLIATHTNLERDEQKRAEKKAKERLQALKANDEEAYIKLLDQTKDTRITHLLRQTNAFLDSLTRAVKDQQKYTKEMIDSHIKEASEEVDDLSMVPKMKDEEYDDDDDNSNVDYYNVAHRIKEDIKKQPSILVGGTLKDYQIKGLQWMVSLFNNHLNGILADEMGLGKTIQTISLLTYLYEMKNIRGPYLVIVPLSTLSNWSSEFAKWAPTLRTISFKGSPNERKAKQAKIRAGEFDVVLTTFEYIIKERALLSKVKWVHMIIDEGHRMKNAQSKLSLTLNTHYHADYRLILTGTPLQNNLPELWALLNFVLPKIFNSVKSFDEWFNTPFANTGGQDKIELSEEETLLVIRRLHKVLRPFLLRRLKKDVEKELPDKVEKVVKCKMSALQQIMYQQMLKYRRLFIGDQNNKKMVGLRGFNNQIMQLKKICNHPFVFEEVEDQINPTRETNDDIWRVAGKFELLDRILPKLKATGHRVLIFFQMTQIMDIMEDFLRYINIKYLRLDGHTKSDERSELLRLFNAPDSEYLCFILSTRAGGLGLNLQTADTVIIFDTDWNPHQDLQAQDRAHRIGQKNEVRILRLITTNSVEEVILERAYKKLDIDGKVIQAGKFDNKSTSEEQEALLRSLLDAEEERRKKRESGVEEEEELKDSEINEILARNDEEMAVLTRMDEDRSKKEEELGVKSRLLEKSELPDIYSRDIGAELKREESESAAVYNGRGARERKTATYNDNMSEEQWLRQFEVSDDEKNDKQARKQRTKKEDKSEAIDGNGEIKGENIDADNDGPRINNISAEDRADTDLAMNDDDFLSKKRKAGRPRGRPKKVKLEGSENSEPPALESSPVTGDNSPSEDFMDIPKPRTAGKTSVKSARTSTRGRGRGRGRGRGRGRGRGRPPKARNGLDYVRTPAAATSPIDIREKVAKQALDLYHFALNYENEAGRKLSDIFLSKPSKALYPDYYMIIKYPVAFDNINTHIETLAYNSLKETLQDFHLIFSNARIYNTEGSVVYEDSLELEKVVTKKYCEIMGDNSQLDFTEFDEQYGTRPLVLPPVVTSSVAESFTDEADSSMTEASV

SEQ ID NO: 8616 - protein, 1085 aa, Saccharomyces cerevisiae
MEDKEQQDNAKLENNESLKDLGVNVLSQSSLEEKIANDVTNFSNLQSLQQEETRLERSKTALQRYVNKKNHLTRKLNNTTRISVKQNLRDQIKNLQSDDIERVLKDIDDIQSRIKELKEQVDQGAENKGSKEGLQRPGETEKEFLIRTGKITAFGHKAGFSLDTANREYAKNDEQKDEDFEMATEQMVENLTDEDDNLSDQDYQMSGKESEDDEEEENDDKILKELEDLRFRGQPGEAKDDGDELYYQERLKKWVKQRSCGSQRSSDLPEWRRPHPNIPDAKLNSQFKIPGEIYSLLFNYQKTCVQWLYELYQQNCGGIIGDEMGLGKTIQVIAFIAALHHSGLLTGPVLIVCPATVMKQWCNEFHHWWPPLRTVILHSMGSGMASDQKFKMDENDLENLIMNSKPSDFSYEDWKNSTRTKKALESSYHLDKLIDKVVTDGHILITTYVGLRIHSDKLLKVKWQYAVLDEGHKIRNPDSEISLTCKKLKTHNRIILSGTPIQNNLTELWSLFDFIFPGKLGTLPVFQQQFVIPINIGGYANATNIQVQTGYKCAVALRDLISPYLLRRVKADVAKDLPQKKEMVLFCKLTKYQRSKYLEFLHSSDLNQIQNGKRNVLFGIDILRKICNHPDLLDRDTKRHNPDYGDPKRSGKMQVVKQLLLLWHKQGYKALLFTQSRQMLDILEEFISTKDPDLSHLNYLRMDGTTNIKGRQSLVDRFNNESFDVFLLTTRVGGLGVNLTGANRIIIFDPDWNPSTDMQARERAWRIGQKREVSIYRLMVGGSIEEKIYHRQIFKQFLTNRILTDPKQKRFFKIHELHDLFSLGGENGYSTEELNEEVQKHTENLKNSKSEESDDFEQLVNLSGVSKLESFYNGKEKKENSKTEDDRLIEGLLGGESNLETVMSHDSVVNSHAGSSSSNIITKEASRVAIEAVNALRKSRKKITKQYEIGTPTWTGRFGKAGEIRKRDPLKNKLTGSAAILGNITKSQKEASKEARQENYDDGITFARSKEINSNTKTLENIRAYLQKQNNFFSSSVSILNSIGVSLSDKEDVIKVRALLKTIAQFDKERKGWVLDEEFRNNNAS

SEQ ID NO: 8617 - protein, 1085 aa, Saccharomyces cerevisiae
MEDKEQQDNAKLENNESLKDLGVNVLSQSSLEEKIANDVTNFSNLQSLQQEETRLERSKTALQRYVNKKNHLTRKLNNTTRISVKQNLRDQIKNLQSDDIERVLKDIDDIQSRIKELKEQVDQGAENKGSKEGLQRPGETEKEFLIRTGKITAFGHKAGFSLDTANREYAKNDEQKDEDFEMATEQMVENLTDEDDNLSDQDYQMSGKESEDDEEEENDDKILKELEDLRFRGQPGEAKDDGDELYYQERLKKWVKQRSCGSQRSSDLPEWRRPHPNIPDAKLNSQFKIPGEIYSLLFNYQKTCVQWLYELYQQNCGGIIGDEMGLGKTIQVIAFIAALHHSGLLTGPVLIVCPATVMKQWCNEFQHWWPPLRTVILHSMGSGMASDQKFKMDENDLENLIMNSKPSDFSYEDWKNSTRTKKALESSYHLDKLIDKVVTDGHILITTYVGLRIHSDKLLKVKWQYAVLDEGHKIRNPDSEISLTCKKLKTHNRIILSGTPIQNNLTELWSLFDFIFPGKLGTLPVFQQQFVIPINIGGYANATNIQVQTGYKCAVALRDLISPYLLRRVKADVAKDLPQKKEMVLFCKLTKYQRSKYLEFLHSSDLNQIQNGKRNVLFGIDILRKICNHPDLLDRDTKRHNPDYGDPKRSGKMQVVKQLLLLWHKQGYKALLFTQSRQMLDILEEFISTKDPDLSHLNYLRMDGTTNIKGRQSLVDRFNNESFDVFLLTTRVGGLGVNLTGANRIIIFDPDWNPSTDMQARERAWRIGQKREVSIYRLMVGGSIEEKIYHRQIFKQFLTNRILTDPKQKRFFKIHELHDLFSLGGENGYSTEELNEEVQKHTENLKNSKSEESDDFEQLVNLSGVSKLESFYNGKEKKENSKTEDDRLIEGLLGGESNLETVMSHDSVVNSHAGSSSSNIITKEASRVAIEAVNALRKSRKKITKQYEIGTPTWTGRFGKAGKIRKRDPLKNKLTGSAAILGNITKSQKEASKEARQENYDDGITFARSKEINSNTKTLENIRAYLQKQNNFFSSSVSILNSIGVSLSDKEDVIKVRALLKTIAQFDKERKGWVLDEEFRNNNAS

SEQ ID NO: 8618 - protein, 1359 aa, Saccharomyces cerevisiae
MLQEQSELMSTVMNNTPTTVAALAAVAAASETNGKLGSEEQPEITIPKPRSSAQLEQLLYRYRAIQNHPKENKLEIKAIEDTFRNISRDQDIYETKLDTLRKSIDKGFQYDEDLLNKHLVALQLLEKDTDVPDYFLDLPDTKNDNTTAIEVDYSEKKPIKISADFNAKAKSLGLESKFSNATKTALGDPDTEIRISARISNRINELERLPANLGTYSLDDCLEFITKDDLSSRMDTFKIKALVELKSLKLLTKQKSIRQKLINNVASQAHHNIPYLRDSPFTAAAQRSVQIRSKVIVPQTVRLAEELERQQLLEKRKKERNLHLQKINSIIDFIKERQSEQWSRQERCFQFGRLGASLHNQMEKDEQKRIERTAKQRLAALKSNDEEAYLKLLDQTKDTRITQLLRQTNSFLDSLSEAVRAQQNEAKILHGEEVQPITDEEREKTDYYEVAHRIKEKIDKQPSILVGGTLKEYQLRGLEWMVSLYNNHLNGILADEMGLGKTIQSISLITYLYEVKKDIGPFLVIVPLSTITNWTLEFEKWAPSLNTIIYKGTPNQRHSLQHQIRVGNFDVLLTTYEYIIKDKSLLSKHDWAHMIIDEGHRMKNAQSKLSFTISHYYRTRNRLILTGTPLQNNLPELWALLNFVLPKIFNSAKTFEDWFNTPFANTGTQEKLELTEEETLLIIRRLHKVLRPFLLRRLKKEVEKDLPDKVEKVIKCKLSGLQQQLYQQMLKHNALFVGAGTEGATKGGIKGLNNKIMQLRKICNHPFVFDEVEGVVNPSRGNSDLLFRVAGKFELLDRVLPKFKASGHRVLMFFQMTQVMDIMEDFLRMKDLKYMRLDGSTKTEERTEMLNAFNAPDSDYFCFLLSTRAGGLGLNLQTADTVIIFDTDWNPHQDLQAQDRAHRIGQKNEVRILRLITTDSVEEVILERAMQKLDIDGKVIQAGKFDNKSTAEEQEAFLRRLIESETNRDDDDKAELDDDELNDTLARSADEKILFDKIDKERMNQERADAKAQGLRVPPPRLIQLDELPKVFREDIEEHFKKEDSEPLGRIRQKKRVYYDDGLTEEQFLEAVEDDNMSLEDAIKKRREARERRRLRQNGTKENEIETLENTPEASETSLIENNSFTAAVDEETNADKETTASRSKRRSSRKKRTISIVTAEDKENTQEESTSQENGGAKVEEEVKSSSVEIINGSESKKKKPKLTVKIKLNKTTVLENNDGKRAEEKPESKSPAKKTAAKKTKTKSKSLGIFPTVEKLVEEMREQLDEVDSHPRTSIFEKLPSKRDYPDYFKVIEKPMAIDIILKNCKNGTYKTLEEVRQALQTMFENARFYNEEGSWVYVDADKLNEFTDEWFKEHSS

SEQ ID NO: 8619 - protein, 1352 aa, Saccharomyces cerevisiae
MLQEQSELMSTVMNNTPTTVAALAAVAAASETNGKLGSEEQPEITIPKPRSSAQLEQLLYRYRAIQNHPKENKLEIKAIEDTFRNISRDQDIYETKLDTLRKSIDKGFQYDEDLLNKHLVALQLLEKDTDVPDYFLDLPDTKNDNTTAIEVDYSEKKPIKISADFNAKAKSLGLESKFSNATKTALGDPDTEIRISARISNRINELERLPANLGTYSLDDCLEFITKDDLSSRMDTFKIKALVELKSLKLLTKQKSIRQKLINNVASQAHHNIPYLRDSPFTAAAQRSVQIRSKVIVPQTVRLAEELERQQLLEKRKKERNLHLQKINSIIDFIKERQSEQWSRQERCFQFGRLGASLHNQMEKDEQKRIERTAKQRLAALKSNDEEAYLKLLDQTKDTRITQLLRQTNSFLDSLSEAVRAQQNEAKILHGEEVQPITDEEREKTDYYEVAHRIKEKIDKQPSILVGGTLKEYQLRGLEWMVSLYNNHLNGILADEMGLGKTIQSISLITYLYEVKKDIGPFLVIVPLSTITNWTLEFEKWAPSLTTIIYKGTPNQRHSLQHQIRVGNFDVLLTTYEYIIKDKSLLSKHDWAHMIIDEGHRMKNAQSKLSFTISHYYRTRNRLILTGTPLQNNLPELWALLNFVLPKIFNSAKTFEDWFNTPFANTGTQEKLELTEEETLLIIRRLHKVLRPFLLRRLKKEVEKDLPDKVEKVIKCKLSGLQQQLYQQMLKHNALFVGAGTEGATKGGIKGLNNKIMQLRKICNHPFVFDEVEGVVNPSRGNSDLLFRVAGKFELLDRVLPKFKASGHRVLMFFQMTQVMDIMEDFLRMKDLKYMRLDGSTKTEERTEMLNAFNAPDSDYFCFLLSTRAGGLGLNLQTADTVIIFDTDWNPHQDLQAQDRAHRIGQKNEVRILRLITTDSVEEVILERAMQKLDIDGKVIQAGKFDNKSTAEEQEAFLRRLIESETNRDDDDKAELDDDELNDTLARSADEKILFDKIDKERMNQERADRKAQGLRVPPPRLIQLDELPKVFREDIEEHFKKEDSEPLGRIRQKKRVYYDDGLTEEQFLEAVEDAIKKRREARERRRLRQNGTKENEIETLENTPEASETSLIENNSFTAAVDEETNADKETTASRSKRRSSRKKRTISIVTAEDKENTQEESTSQENGGAKVEEEVKSSSVEIINGSESKKKKPKLTVKIKLNKTTVLENNDGKRAEEKPESKSPAKKTAAKKTKTKSKSLGIFPTVEKLVEEMREQLDEVDSHPRTSIFEKLPSKRDYPDYFKVIEKPMAIDIILKNCKNGTYKTLEEVRQALQTMFENARFYNEEGSWVYVDADKLNEFTDEWFKEHSS

SEQ ID NO: 8620 - protein, 1468 aa, Saccharomyces cerevisiae
MAAKDISTEVLQNPELYGLRRSHRAAAHQQNYFNDSDDEDDEDNIKQSRRKRMTTIEDDEDEFEDEEGEEDSGEDEDEEDFEEDDDYYGSPIKQNRSKPKSRTKSKSKSKPKSQSEKQSTVKIPTRFSNRQNKTVNYNIDYSDDDLLESEDDYGSEEALSEENVHEASANPQPEDFHGIDIVINHRLKTSLEEGKVLEKTVPDLNNCKENYEFLIKWTDESHLHNTWETYESIGQVRGLKRLDNYCKQFIIEDQQVRLDPYVTAEDIEIMDMERERRLDEFEEFHVPERIIDSQRASLEDGTSQLQYLVKWRRLNYDEATWENATDIVKLAPEQVKHFQNRENSKILPQYSSNYTSQRPRFEKLSVQPPFIKGGELRDFQLTGINWMAFLWSKGDNGILADEMGLGKTVQTVAFISWLIFARRQNGPHIIVVPLSTMPAWLDTFEKWAPDLNCICYMGNQKSRDTIREYEFYTNPRAKGKKTMKFNVLLTTYEYILKDRAELGSIKWQFMAVDEAHRLKNAESSLYESLNSFKVANRMLITGTPLQNNIKELAALVNFLMPGRFTIDQEIDFENQDEEQEEYIHDLHRRIQPFILRRLKKDVEKSLPSKTERILRVELSDVQTEYYKNILTKNYSALTAGAKGGHFSLLNIMNELKKASNHPYLFDNAEERVLQKFGDGKMTRENVLRGLIMSSGKMVLLDQLLTRLKKDGHRVLIFSQMVRMLDILGDYLSIKGINFQRLDGTVPSAQRRISIDHFNSPDSNDFVFLLSTRAGGLGINLMTADTVVIFDSDWNPQADLQAMARAHRIGQKNHVMVYRLVSKDTVEEEVLERARKKMILEYAIISLGVTDGNKYTKKNEPNAGELSAILKFGAGNMFTATDNQKKLEDLNLDDVLNHAEDHVTTPDLGESHLGGEEFLKQFEVTDYKADIDWDDIIPEEELKKLQDEEQKRKDEEYVKEQLEMMNRRDNALKKIKNSVNGDGTAANSDSDDDSTSRSSRRRARANDMDSIGESEVRALYKAILKFGNLKEILDELIADGTLPVKSFEKYGETYDEMMEAAKDCVHEEEKNRKEILEKLEKHATAYRAKLKSGEIKAENQPKDNPLTRLSLKKREKKAVLFNFKGVKSLNAESLLSRVEDLKYLKNLINSNYKDDPLKFSLGNNTPKPVQNWSSNWTKEEDEKLLIGVFKYGYGSWTQIRDDPFLGITDKIFLNEVHNPVAKKSASSSDTTPTPSKKGKGITGSSKKVPGAIHLGRRVDYLLSFLRGGLNTKSPSADIGSKKLPTGPSKKRQRKPANHSKSMTPEITSSEPANGPPSKRMKALPKGPAALINNTRLSPNSPTPPLKSKVSRDNGTRQSSNPSSGSAHEKEYDSMDEEDCRHTMSAIRTSLKRLRRGGKSLDRKEWAKILKTELTTIGNHIESQKGSSRKASPEKYRKHLWSYSANFWPADVKSTKLMAMYDKITESQKK

SEQ ID NO: 8621 - protein, 898 aa, Saccharomyces cerevisiae
MARRRLPDRPPNGIGAGERPRLVPRPINVQDSVNRLTKPFRVPYKNTHIPPAAGRIATGSDNIVGGRSLRKRSATVCYSGLDINADEAEYNSQDISFSQLTKRRKDALSAQRLAKDPTRLSHIQYTLRRSFTVPIKGYVQRHSLPLTLGMKKKITPEPRPLHDPTDEFAIVLYDPSVDGEMIVHDTSMDNKEEESKKMIKSTQEKDNINKEKNSQEERPTQRIGRHPALMTNGVRNKPLRELLGDSENSAENKKKFASVPVVIDPKLAKILRPHQVEGVRFLYRCVTGLVMKDYLEAEAFNTSSEDPLKSDEKALTESQKTEQNNRGAYGCIMADEMGLGKTLQCIALMWTLLRQGPQGKRLIDKCIIVCPSSLVNNWANELIKWLGPNTLTPLAVDGKKSSMGGGNTTVSQAIHAWAQAQGRNIVKPVLIISYETLRRNVDQLKNCNVGLMLADEGHRLKNGDSLTFTALDSISCPRRVILSGTPIQNDLSEYFALLSFSNPGLLGSRAEFRKNFENPILRGRDADATDKEITKGEAQLQKLSTIVSKFIIRRTNDILAKYLPCKYEHVIFVNLKPLQNELYNKLIKSREVKKVVKGVGGSQPLRAIGILKKLCNHPNLLNFEDEFDDEDDLELPDDYNMPGSKARDVQTKYSAKFSILERFLHKIKTESDDKIVLISNYTQTLDLIEKMCRYKHYSAVRLDGTMSINKRQKLVDRFNDPEGQEFIFLLSSKAGGCGINLIGANRLILMDPDWNPAADQQALARVWRDGQKKDCFIYRFISTGTIEEKIFQRQSMKMSLSSCVVDAKEDVERLFSSDNLRQLFQKNENTICETHETYHCKRCNAQGKQLKRAPAMLYGDATTWNHLNHDALEKTNDHLLKNEHHYNDISFAFQYISH

SEQ ID NO: 8622 - protein, 1131 aa, Saccharomyces cerevisiae
MSGSHSNDEDDVVQVPETSSPTKVASSSPLKPTSPTVPDASVASLRSRFTFKPSDPSEGAHTSKPLPSGSPEVALVNLAREFPDFSQTLVQAVFKSNSFNLQSARERLTRLRQQRQNWTWNKNASPKKSETPPPVKKSLPLANTGRLSSIHGNINNKSSKITVAKQKTSIFDRYSNVINQKQYTFELPTNLNIDSEALSKLPVNYNKKRRLVRADQHPIGKSYESSATQLGSAREKLLANRKYGRHANDNDEEEEESMMTDDDDASGDDYTESTPQINLDEQVLQFINDSDIVDLSDLSDTTMHKAQLIASHRPYSSLNAFVNTNFNDKDTEENASNKRKRRAAASANESERLLDKITQSIRGYNAIESVIKKCSSYGDLVTSQMKKWGVQVEGDNSELDLMNLGEDDDDDNDDGNNDNNNSNNNNTAGADATSKEKEDTKAVVEGFDETSAEPTPAPAPAPVERETKRIRNTTKPKVVEDEDDDVDLEAIDDELPQSEHEDDDYEEEDEDYNDEEEDVEYDDGDDDDDDDDEFVATRKNTHVISTTSRNGRKPIVKFFKGKPRLLSPEISLKDYQQTGINWLNLLYQNKMSCILADDMGLGKTCQVISFFAYLKQINEPGPHLVVVPSSTLENWLREFQKFAPALKIEPYYGSLQEREELRDILERNAGKYDVIVTTYNLAAGNKYDVSFLKNRNFNVVVYDEGHMLKNSTSERFAKLMKIRANFRLLLTGTPLQNNLKELMSLLEFIMPNLFISKKESFDAIFKQRAKTTDDNKNHNPLLAQEAITRAKTMMKPFILRRRKDQVLKHLPPKHTHIQYCELNAIQKKIYDKEIQIVLEHKRMIKDGELPKDAKEKSKLQSSSSKNLIMALRKASLHPLLFRNIYNDKIITKMSDAILDEPAYAENGNKEYIKEDMSYMTDFELHKLCCNFPNTLSKYQLHNDEWMQSGKIDALKKLLKTIIVDKQEKVLIFSLFTQVLDILEMVLSTLDYKFLRLDGSTQVNDRQLLIDKFYEDKDIPIFILSTKAGGFGINLVCANNVIIFDQSFNPHDDRQAADRAHRVGQTKEVNITTLITKDSIEEKIHQLAKNKLALDSYISEDKKSQDVLESKVSDMLEDIIYDENSKPKGTKE

SEQ ID NO: 8623 - protein, 1514 aa, Saccharomyces cerevisiae
MTTSRKSHAKDKKAGGEQDLADLKFRYDLLTNELFHLREFVSLVDYDPTHFNDSESFQKFLRETHLSLEERGEKFTDDVAKKGTNGDLTRRRRNLRTSTVVSSETTNEKKGDIELKLESIAPLVRNKCEELKYKLSDHSNRKSIVPQKRPIQHLKKREAAKSLKFKSERKENPLPLHEHIAEERYDHIAKVEEPSEAFTIKCPSDDSSFENTSEHYSDNFYFTTSSEEEDIKKKRGRKKKKPRIKLVVHPPKQTITNPLHVVKPGYESLHEYIASFKSLEDDLTLEEYNKYIDEQRRLLSRLKKGIENGALKYDKETDSLQPITSKEIKTIITYKPDPISYFYKQQDLQIHTDHLINQGIHMSKLFRSSTKARIARAKKVSQMIEQHFKHVAGAEERKAKEEERHKKSLARFAVQAVKKRWNMAEKAYRILRKDEEEQLKRIEGKQHLSKMLEKSTQLLEAQLNQVNDDGRSSTPSSDSNDVLSESDDDMDDELSTSSDEDEEVDADVGLENSPASTEATPTDESLNLIQLKEKYGHFNGSSTVYDSRNKDEKFPTLDKHESSSSESSVMTGEESSIYSSSENESQNENDRESDDKTPSVGLSALFGKGEESDGDLDLDDSEDFTVNSSSVEGEELEKDQVDNSAATFERAGDFVHTQNENRDDIKDVEEDAETKVQEEQLSVVDVPVPSLLRGNLRTYQKQGLNWLASLYNNHTNGILADEMGLGKTIQTISLLAYLACEKENWGPHLIVVPTSVLLNWEMEFKRFAPGFKVLTYYGSPQQRKEKRKGWNKPDAFHVCIVSYQLVVQDQHSFKRKRWQYMVLDEAHNIKNFRSTRWQALLNFNTQRRLLLTGTPLQNNLAELWSLLYFLMPQTVIDGKKVSGFADLDAFQQWFGRPVDKIIETGQNFGQDKETKKTVAKLHQVLRPYLLRRLKADVEKQMPAKYEHIVYCKLSKRQRFLYDDFMSRAQTKATLASGNFMSIVNCLMQLRKVCNHPNLFEVRPILTSFVLEHCVASDYKDVERTLLKLFKKNNQVNRVDLDFLNLVFTLNDKDLTSYHAEEISKLTCVKNFVEEVNKLRETNKQLQEEFGEASFLNFQDANQYFKYSNKQKLEGTVDMLNFLKMVNKLRCDRRPIFGKNLIDLLTKDRRVKYDKSSIIDNELIKPLQTRVLDNRKIIDTFAVLTPSAVSLDMRKLALGLNDDSSVGENTRLKVMQNCFEVSNPLHQLQTKLTIAFPDKSLLQYDCGKLQKLAILLQQLKDNGHRALIFTQMTKVLDVLEQFLNYHGYLYMRLDGATKIEDRQILTERFNTDSRITVFILSSRSGGLGINLTGADTVIFYDSDWNPAMDKQCQDRCHRIGQTRDVHIYRFVSEHTIESNILKKANQKRQLDNVVIQEGDFTTDYFSKLSVRDLLGSELPENASGGDKPLIADADVAAKDPRQLERLLAQAEDEDDVKAANLAMREVEIDNDDFDESTEKKAANEEEENHAELDEYEGTAHVDEYMIRFIANGYYY

SEQ ID NO: 8624 - protein, 1489 aa, Saccharomyces cerevisiae
MSLAVLLNKEDKDISDFSKTTAGKSAKKNSRERVADVAPTRVLDKKQAYLSQLNSEFNRIKRRDSIEQLYQDWKFINLQEFELISEWNQQSKDWQFDNTNDSQDLHFKKLYRDMSMINKEWAEYQSFKNANLSDIINEKDADEDEEDDEDELEDGEEDMEEDEASTGRHTNGKSMRGNGIQKSRKKDAAAAAAIGKAIKDDQTHADTVVTVNGDENEDGNNGEDEDNDNDNENNNDNDNDNENENDNDSDNDDEEENGEEDEEEEEIEDLDEEDFAAFEEQDDNDDEDFNPDVEKRRKRSSSSSSSTKLSMNSLSLITSKKINKNITINSDRPKIVRELIKMCNKNKHQKIKKRRFTNCIVTDYNPIDSKLNIKITLKQYHVKRLKKLINDAKREREREEALKNNVGLDGNDLDNDEDGSESHKRRKLNNNTANGADDANKRKFNTRHGLPTYGMKMNAKEARAIQRHYDNTYTTIWKDMARKDSTKMSRLVQQIQSIRSTNFRKTSSLCAREAKKWQSKNFKQIKDFQTRARRGIREMSNFWKKNEREERDLKKKIEKEAMEQAKKEEEEKESKRQAKKLNFLLTQTELYSHFIGRKIKTNELEGNNVSSNDSESQKNIDISALAPNKNDFHAIDFDNENDEQLRLRAAENASNALAETRAKAKQFDDHANAHEEEEEEDELNFQNPTSLGEITIEQPKILACTLKEYQLKGLNWLANLYDQGINGILADEMGLGKTVQSISVLAHLAENHNIWGPFLVVTPASTLHNWVNEISKFLPQFKILPYWGNANDRKVLRKFWDRKNLRYNKNAPFHVMVTSYQMVVTDANYLQKMKWQYMILDEAQAIKSSQSSRWKNLLSFHCRNRLLLTGTPIQNSMQELWALLHFIMPSLFDSHDEFNEWFSKDIESHAEANTKLNQQQLRRLHMILKPFMLRRVKKNVQSELGDKIEIDVLCDLTQRQAKLYQVLKSQISTNYDAIENAATNDSTSNSASNSGSDQNLINAVMQFRKVCNHPDLFERADVDSPFSFTTFGKTTSMLTASVANNNSSVISNSNMNLSSMSSNNISNGKFTDLIYSSRNPIKYSLPRLIYEDLILPNYNNDVDIANKLKNVKFNIFNPSTNYELCLFLSKLTGEPSLNEFFRVSTTPLLKRVIERTNGPKNTDSLSFKTITQELLEVTRNAPSEGVMASLLNVEKHAYEREYLNCIQRGYHPNVSAPPVTIEVLGSSHVTNSINNELFDPLISQALSDIPAITQYNMHVKKGIPVEDFPKTGLFPEPLNKNFSSNISMPSMDRFITESAKLRKLDELLVKLKSEGHRVLIYFQMTKMMDLMEEYLTYRQYNHIRLDGSSKLEDRRDLVHDWQTNPEIFVFLLSTRAGGLGINLTAADTVIFYDSDWNPTIDSQAMDRAHRLGQTRQVTVYRLLVRGTIEERMRDRAKQKEQVQQVVMEGKTQEKNIKTIEVGENDSEVTREGSKSISQDGIKEAASALA

SEQ ID NO: 8625 - protein, 958 aa, Saccharomyces cerevisiae
MAVISVKPRRREKILQEVKNSSVYQTVFDSGTTQMQIPKYENKPFKPPRRVGSNKYTQLKPTATAVTTAPISKAKVTVNLKRSISAGPTLNLAKKPNNLSSNENTRYFTIMYRKPTTKKHKTWSGDGYATLKASSDKLCFYNEAGKFLGSSMLPSDSDSLFETLFKAGSNEVQLDYELKENAEIRSAKEALSQNMGNPSPPTTSTTETVPSTKNDGGKYQMPLSQLFSLNTVKRFKSVTKQTNEHMTTVPKTSQNSKAKKYYPVFDVNKIDNPIVMNKNAAAEVDVIVDPLLGKFLRPHQREGVKFMYDCLMGLARPTIENPDIDCTTKSLVLENDSDISGCLLADDMGLGKTLMSITLIWTLIRQTPFASKVSCSQSGIPLTGLCKKILVVCPVTLIGNWKREFGKWLNLSRIGVLTLSSRNSPDMDKMAVRNFLKVQRTYQVLIIGYEKLLSVSEELEKNKHLIDMLVCDEGHRLKNGASKILNTLKSLDIRRKLLLTGTPIQNDLNEFFTIIDFINPGILGSFASFKRRFIIPITRARDTANRYNEELLEKGEERSKEMIEITKRFILRRTNAILEKYLPPKTDIILFCKPYSQQILAFKDILQGARLDFGQLTFSSSLGLITLLKKVCNSPGLVGSDPYYKSHIKDTQSQDSYSRSLNSGKLKVLMTLLEGIRKGTKEKVVVVSNYTQTLDIIENLMNMAGMSHCRLDGSIPAKQRDSIVTSFNRNPAIFGFLLSAKSGGVGLNLVGRSRLILFDNDWNPSVDLQAMSRIHRDGQKKPCFIYRLVTTGCIDEKILQRQLMKNSLSQKFLGDSEMRNKESSNDDLFNKEDLKDLFSVHTDTKSNTHDLICSCDGLGEEIEYPETNQQQNTVELRKRSTTTWTSALDLQKKMNEAATNDDAKKSQYIRQCLVHYKHIDPARQDELFDEVITDSFTELKDSITFAFVKPGEICLREQ

SEQ ID NO: 8626 - protein, 778 aa, Saccharomyces cerevisiae
MSRCSNAALMTVVEDAVGARVAARTRNMSNGVNYREKEVNDLTADISDSDSDLDSEDNKHGKGDNDTAPIWLQDDVHSDEDIQLDSEDDSDTEAVQAQVVDKLAKDTKSEQKSLDDELSEMDTKTVSLKLKKLNEFVRQSQVYSSIIADTLLHRSNEVANANTKDNSNSDDEEHSSKKRKTKKKSITDFFKKQKKNEDTTTQNGAPDDAAIKQPRLLKNCILKPYQLEGLNWLITLYENGLNGILADEMGLGKTVQSIALLAFIYEMDTKGPFLVTAPLSTLDNWMNEFAKFAPDLPVLKYYGTNGYKERSAKLKNFFKQHGGTGIVITSYEIILRDTDLIMSQNWKFLIVDEGHRLKNINCRLIKELKKINTSNRLLLTGTPLQNNLAELWSLLNFIMPDIFADFEIFNKWFDFDSLNLGSGSNSEALNKLINDELQKNLISNLHTILKPFLLRRLKKVVLANILPPKREYIINCPMTSAQEKFYKAGLNGKLKKTMFKELIKDFFTLNDEYIGHVSNRSIRDFINYKLSGNETSNTDNKINPTLLQMDKLYKKNLQMEISNKKLQNMMMQLRQIIDSTFLFYFPYLHPEDLTLETLLKTSGKLQILQKLIPPLISEGHKVLIYSQFVNMLDLIEDWCDLNSFATFRIDGSVNNETRKDQLEKFNSSKDKHNIFLLSTRAAGLGINLVGADTVVLFDSDWNPQVDLQAMDRCHRIGQESPVIVYRLCCDNTIEHVILTRAANKRNLERMVIQMGKFNNLKKLALNEGFFFEGKQSGC

SEQ ID NO: 8627 - protein, 790 aa, Saccharomyces cerevisiae
MQEGGFIRRRRTRSTKKSVNYNELSDDDTAVKNSKTLQLKGNSENVNDSQDEEYRDDATLVKSPDDDDKDFIIDLTGSDKERTATDENTHAIKNDNDEIIEIKEERDVSDDDEPLTKKRKTTARKKKKKTSTKKKSPKVTPYERNTLRLYEHHPELRNVFTDLKNAPPYVPQRSKQPDGMTIKLLPFQLEGLHWLISQEESIYAGGVLADEMGMGKTIQTIALLMNDLTKSPSLVVAPTVALMQWKNEIEQHTKGQLKIYIYHGASRTTDIKDLQGYDVVLTTYAVLESVFRKQNYGFRRKNGLFKQPSVLHNIDFYRVILDEAHNIKDRQSNTARAVNNLKTQKRWCLSGTPLQNRIGEMYSLIRFLNINPFTKYFCTKCDCASKDWKFTDRMHCDHCSHVIMQHTNFFNHFMLKNIQKFGVEGPGLESFNNIQTLLKNIMLRRTKVERADDLGLPPRIVTVRRDFFNEEEKDLYRSLYTDSKRKYNSFVEEGVVLNNYANIFTLITRMRQLADHPDLVLKRLNNFPGDDIGVVICQLCNDEAEEPIESKCHHKFCRLCIKEYVESFMENNNKLTCPVCHIGLSIDLSQPALEVDLDSFKKQSIVSRLNMSGKWQSSTKIEALVEELYKLRSNKRTIKSIVFSQFTSMLDLVEWRLKRAGFQTVKLQGSMSPTQRDETIKYFMNNIQCEVFLVSLKAGGVALNLCEASQVFILDPWWNPSVEWQSGDRVHRIGQYRPVKITRFCIEDSIEARIIELQEKKANMIHATINQDEAAISRLTPADLQFLFNN

SEQ ID NO: 8628 - protein, 674 aa, Saccharomyces cerevisiae
MVTSYQMVVTDANYLQKMKWQYMILDEAQAIKSSQSSRWKNLLSFHCRNRLLLTGTPIQNSMQELWALLHFIMPSLFDSHDEFNEWFSKDIESHAEANTKLNQQQLRRLHMILKPFMLRRVKKNVQSELGDKIEIDVLCDLTQRQAKLYQVLKSQISTNYDAIENAATNDSTSNSASNSGSDQNLINAVMQFRKVCNHPDLFERADVDSPFSFTTFGKTTSMLTASVANNNSSVISNSNMNLSSMSSNNISNGKFTDLIYSSRNPIKYSLPRLIYEDLILPNYNNDVDIANKLKNVKFNIFNPSTNYELCLFLSKLTGEPSLNEFFRVSTTPLLKRVIERTNGPKNTDSLSFKTITQELLEVTRNAPSEGVMASLLNVEKHAYEREYLNCIQRGYHPNVSAPPVTIEVLGSSHVTNSINNELFDPLISQALSDIPAITQYNMHVKKGIPVEDFPKTGLFPEPLNKNFSSNISMPSMDRFITESAKLRKLDELLVKLKSEGHRVLIYFQMTKMMDLMEEYLTYRQYNHIRLDGSSKLEDRRDLVHDWQTNPEIFVFLLSTRAGGLGINLTAADTVIFYDSDWNPTIDSQAMDRAHRLGQTRQVTVYRLLVRGTIEERMRDRAKQKEQVQQVVMEGKTQEKNIKTIEVGENDSEVTREGSKSISQDGIKEAASALA

SEQ ID NO: 8629 - protein, 1619 aa, Saccharomyces cerevisiae
MAAVPTIDLTLADSDNEDIFHSFSSSTSVDKIDIRKENGKLRMAGLEVAQSNDDAARQAFHVFKTNISNNETFDTILSKSKTITDSTFNNEKSSNEVKQQQVLKEETMGSSNDEKKTQESSPSAEMIKLFYENDDVPLSDSFKQKEEGKRINQDEQVKENICGISSSYVSKDYDGVEDDFEPNTCQDSNLDFQEEKLNLNNKPSQQQFSDPETKDNSLKSENKDQIKGVTTTSYRDLPIESSAFQDSETQNNSKNTIPNIVNEKRTPALPSNLSSVESSLKNETAKVEGKTTVRLPGLQNNVALLEQEQSELFKHFSEQPVDISDFGRKIKRKHSGDFADNKILKRPILPSKNMDHTTHNSHDSEQKNSSIIILSDEDESGAGINDIESPLKVSEPNTADALRSSVPEVISLLDLPNIDLNNSVIKEASGSNSIPTSETDAQSSSSSVLQGTIMTEQATQSSQHECNSSLDTLKKNHQKLLKDLNSRESELRNALSCCKTNSEILRRKLSRREKEVSDAEKHWQLLLTSMARGGRTISSTQQILVDEAENQLNKLKEKRQLTKSKLDSINLKMYNYNEQWKSFVHSKNINLQKSLAALERSARDSKASATVNKRNECLAEKEKLDQMLKEGTLSFSTYKQLTGEIQQKLNDLKLGDQRTTDINSVLPIVRQPLAKRDLFIKSIDTAKDLLAKNTSRTEMTKRILYRHLDNLVSYKNFFEDGRSLIDINRRHVAHESAQILFTNGVKMPIVFETLQDYGIKFSNPAIVNPDRRAQYFKSIEVARDLISKSTRSEDAKRKITRFLNIIEEFRKDIDTGFPPTPLKREGVGKAVVGLRQQGLKMDRLYENLRRYKIPITSEELLQQSYLFPVNADQRPPSNWNIVENTEDTSSTANDLSMQDEFHISNMHAAEDQEQIRALLENVKQSESIIDGEALTPEDMTVNLLKHQRLGLHWLLQVENSAKKGGLLADDMGLGKTIQAIALMLANRSEESKCKTNLIVAPVSVLRVWKGELETKVKKRAKFTTFIFGGSGNGKVKHWRDLARYDAVLVSYQTLANEFKKHWPKKLDGEQNQLPAVPHIQALNRLKTSNEYYSPFFCNDSTFYRILLDEGQNIKNKNTRASKACCTINGMYRWVLSGTPIQNSMDELYSLIRFLRIPPYHKEQRFKLDIGRFFQRNKQYQYDNEDRKNALRKVRVLLNAIMLRRSKADKIDGKPLLELPPKIVEVDESRLKGEELKFYTALESKNQALAKKLLNNSTRGSYSSVLTLLLRLRQACCHSELVVMGEKKAEGTKVANGKSFEDDWLRLYYKITHMSGEAQAQVITSMNSMTCFWCMEQLEPEAMSVLTGCGHLICDTCIEPFIEESSMLPQAKKTKGGAFAIPCKDCQRLTNEKDIVSHKLYDQVINQGFTEEDLHAEYLSEMEKQKIQQKNVYVPNFESLEPSTKIEQCIQVIQRVFDESATEKIIIFSQFTTFFEILEHFLKNKLNFPYLKYIGSMNAQRRSDVINEFYRDPEKRILLISMKAGNSGLTLTCANHVVIVDPFWNPYVEEQAQDRCYRISQTKKVQVHKLFIKDSVEDRISELQKRKKEMVDSAMDPGKIKEVNSLGRRELGFLFGLNAL

SEQ ID NO: 8630 - protein, 662 aa, Saccharomyces cerevisiae
MNLNQLKTFYKAAQSSESLKSLPETEPSRDVFKLELRNYQKQGLTWMLRREQEFAKAASDGEASETGANMINPLWKRFKWPNDMSWAAQNLQQDHVNVEDGIFFYANLHSGEFSLAKPILKTMIKGGILSDEMGLGKTVAAYSLVLSCPHDSDVVDKKLFDIENTAVSDNLPSTWQDNKKPYASKTTLIVVPMSLLTQWSNEFTKANNSPDMYHEVYYGGNVSSLKTLLTKTKNPPTVVLTTYGIVQNEWTKHSKGRMTDEDVNISSGLFSVNFYRIIIDEGHNIRNRTTVTSKAVMALQGKCKWVLTGTPIINRLDDLYSLVKFLELDPWRQINYWKTFVSTPFESKNYKQAFDVVNAILEPVLLRRTKQMKDKDGKPLVELPPKEVVIKRLPFSKSQDLLYKFLLDKAEVSVKSGIARGDLLKKYSTILVHILRLRQVCCHPSLIGSQDENDEDLSKNNKLVTEQTVELDSLMRVVSERFDNSFSKEELDAMIQSLKVKYPDNKSFQSLECSICTTEPMDLDKALFTECGHSFCEKCLFEYIEFQNSKNLGLKCPNCRNQIDACRLLALAQTNSNSKNLEFKPYSPASKSSKITALLKELQLLQDSSAGEQVVIFSQFSTYLDILEKELTHTFSKDVAKIYKFDGRLSLKERTSVLADFR

SEQ ID NO: 8631 - protein, 1169 aa, Saccharomyces cerevisiae
MSHIEQEERKRFFNDDLDTSETSLNFKSENKESFLFANSHNDDDDDVVVSVSDTTEGEGDRSIVPVRREIEEEGQNQFITELLRIIPEMPKDLVMELNEKFGSQEEGLSLALSHYFDHNSGTSISKIPSSPNQLNTLSDTSNSTLSPSSFHPKRRRIYGFRNQTRLEDKVTWKRFIGALQVTGMATRPTVRPLKYGSQMKLKRSSEEISATKVYDSRGRKKASMASLVRIFDIQYDREIGRVSEDIAQILYPLLSSHEISFEVTLIFCDNKRLSIGDSFILQLDCFLTSLIFEERNDGESLMKRRRTEGGNKREKDNGNFGRTLTETDEELESRSKRLALLKLFDKLRLKPILDEQKALEKHKIELNSDPEIIDLDNDEICSNQVTEVHNNLRDTQHEEETMNLNQLKTFYKAAQSSESLKSLPETEPSRDVFKLELRNYQKQGLTWMLRREQEFAKAASDGEASETGANMINPLWKQFKWPNDMSWAAQNLQQDHVNVEDGIFFYANLHSGEFSLAKPILKTMIKGGILSDEMGLGKTVAAYSLVLSCPHDSDVVDKKLFDIENTAVSDNLPSTWQDNKKPYASKTTLIVVPMSLLTQWSNEFTKANNSPDMYHEVYYGGNVSSLKTLLTKTKTPPTVVLTTYGIVQNEWTKHSKGRMTDEDVNISSGLFSVNFYRIIIDEGHNIRNRTTVTSKAVMALQGKCKWVLTGTPIINRLDDLYSLVKFLELDPWRQINYWKTFVSTPFESKNYKQAFDVVNAILEPVLLRRTKQMKDKDGKPLVELPPKEVVIKRLPFSKSQDLLYKFLLDKAEVSVKSGIARGDLLKKYSTILVHILRLRQVCCHPGLIGSQDENDEDLSKNNKLVTEQTVELDSLMRVVSERFDNSFSKEELDAMIQRLKVKYPDNKSFQSLECSICTTEPMDLDKALFTECGHSFCEKCLFEYIEFQNSKNLGLKCPNCRNQIDACRLLALVQTNSNSKNLEFKPYSPASKSSKITALLKELQLLQDSSAGEQVVIFSQFSTYLDILEKELTHTFSKDVAKIYKFDGRLSLKERTSVLADFAVKDYSRQKILLLSLKAGGVGLNLTCASHAYMMDPWWSPSMEDQAIDRLHRIGQTNSVKVMRFIIQDSIEEKMLRIQEKKRTIGEAMDTDEDERRKRRIEEIQMLFE

SEQ ID NO: 8632 - protein, 392 aa, Saccharomyces cerevisiae
CSHVIMQHTNFFNHFMLKNIQKFGVEGPGLESFNNIQTLLKNIMLRRTKVERADDLGLPPRIVTVRRDFFNEEEKDLYRSLYTDSKRKYNSFVEEGVVLNNYANIFTLITRMRQLADHPDLVLKRLNNFPGDDIGVVICQLCNDEAEEPIESKCHHKFCRLCIKEYVESFMENNNKLTCPVCHIGLSIDLSQPALEVDLDSFKKQSIVSRLNMSGKWQSSTKIEALVEELYKLRSNKRTIKSIVFSQFTSMLDLVEWRLKRAGFQTVKLQGSMSPTQRDETIKYFMNNIQCEVFLVSLKAGGVALNLCEASQVFILDPWWNPSVEWQSGDRVHRIGQYRPVKITRFCIEDSIEARIIELQEKKANMIHATINQDEAAISRLTPADLQFLFNN

SEQ ID NO: 8633 - protein, 753 aa, Desulfitobacterium hafniense
MSGKNLQTLTFPDHQKDFFASEAIPLIEQMGSVAIDPQLAEKFVREELQARIYFDRMGDYGIRARLEFHYGDHIINPFTSQTGANRQEAADAQILIRNIERERKILGIFEQAEFIVSQGVISLEDDEKLFAFITTWLPQLQDCAETFYSDDFKLTIRTSTSFSGRVRLDESSDLLEISFQYSDIDRDELTHIFHSLQVKRNYYRLRDGSFLDLRQPELESMAMFLEHLNLRGEDLNEQTLRLPKFRAMYIDSFLRQANLPGIQRNKAFKQLVQSILEPQDGEYDPPPSLMSVLRDYQKTGFRWLKTLAAYGLGGILADDMGLGKTLQTLAFILSEKLSSPALVVAPTSLIYNWQAEGEKFAPGLHILVVDGSPQERQEQLKGLDQADLVVTSYALLRRDIETFAQVDFSYCFLDEAQNIKNPQTLNAKSVQRIKAKSYFALTGTPIENSLAELWSLFNFCLPGYLLSHQEFQKKYSTPIIKDGDPLALRELSRHIKPFILRRLKKDVLKELPPKIETEIKAALTEEQRKIYLAYLQQTKSQIAQELATHGFAKSQIQILAALTRLRQICSHPGMFIDNYTGESGKMLLFQELLEDSLAGGHRVLVFSQFTSMLDIIGEYLHSENIDYFYLSGSTKALERSRMAASFNNGEGQVFLISLKAGGTGLNLTGADTVIHFDPWWNPAVEDQATDRAHRIGQQNSVQVIKLLTQGTIEEKVNALQAKKKKLIDSVIQPGETMLSKLTEKELRELFELN

SEQ ID NO: 8634 - protein, 858 aa, Aspergillus fumigatus
MDELEQGSPMSGVENGKREQVEDVEEMDVKSKALMHLLNTSEVFVAIMADKMKKQQEEARLEAAKQQQQRQQKLTEDQKKPTATRSVARRETRARAKQPSADETTPAVSEQADEKTATSSRRGRGKKGASAMNGNSIASYFKKVDMEDPEDKPTVQEALEHAADEYEANPSALGGQDLVATQQPELVTGGRMRKYQLEGLEWLKSLWMNGLCGILADEMGLGKTVQAISLIAFFKEKNVSGPFLIAAPLSTVSNWVDEFAKWTPSIKTVLYHGSKDERATIRRNLMKLKDQRSADFPVVCTSYEICMNDRKFLAQYQWRYIIVDEGHRLKNMNCKLIKELLSYNSANRLLITGTPLQNNITELWSLLHFLLPEIFNDLNSFQSWFDFSSMLDSSGQTDVIERRKRTLVSTMHSILKPFLLRRVKSDVETALPKKREYILYAPLTAEQKDLYREILNGTGRQYLEDKAAERLLAKNERLSRSASLKRSAESSNASTPNKSLKSSRDSTPASVASSTRRRRAPQNYKELSDREFNAQLRRLEQGLEDDLDIQQSPTDTEQEEIERANTIKLAKKEIAQKKLQNPVMQARLACNSPHNFYWPWSDDPAAIDETLVTASGKMLLLDRLVPCLLKKGHKILIFSQFKTQLDILQDWATQLRGWNCCRIDGAISQTDRQAQIKAFNSDPGYKIFLLSTRAGGQGINLVAADTVILYDSDWNPQQDLQAQDRAHRIGQTKPVIVYRLATKGTVEQTLLEKADSKRRLERLVIQKGKFRSLLDSSSVNHSDVEELKKALGEDEFERFETGADPTALLSQKDLEILTDRSEEAYARAEKGLEHTGRAFKAVETKKEGNSLMAQITGK

SEQ ID NO: 8635 - protein, 1127 aa, Neurospora crassa
MAPRSRQPVNDDDASMPDAPETSNAPASEMEVDETPDYTDSDTNPNTTESSVAGEPVDGHCSHVSNFGPPPQLPGGLLFAILTRLQEDDSLRRFRYLLGLTDLFRHFIETNPNPKVREIMAEIDRQNAEDAKSKKGAGRQGGATSDRRRRTEAEEDAELLKDEKVGGSAETVFRESPAFIQGTMRDYQIAGLNWLISLHENGISGILADEMGLGKTLQTISFLGYLRHIMDTPGPHLVIVPKSTLDNWKREFAKWTPEVNVLVLQGAKEERQQLIQDRLVDENFDVCITSYEMILREKAHLKKFAWEYIIIDEAHRIKNEESSLAQVIRVFNSRNRLLITGTPLQNNLHELWALLNFLLPDVFGDSEAFDQWFSGQDRDQDTVVQQLHRVLRPFLLRRVKSDVEKSLLPKKEVNVYIGMSEMQVKWYQKILEKDIDAVNGAGGKRESKTRLLNIVMQLRKCCNHPYLFEGAEPGPPYTTDEHLVYNAGKMLVLDKLLKRLQKQGSRVLIFSQMSRLLDILEDYCVFRQYKYCRIDGGTAHEDRIAAIDEYNKPDSDKFVFLLTTRAGGLGINLTSADIVILYDSDWNPQADLQAMDRAHRIGQTKQVVVYRFVTDNAIEEKVLERAAQKLRLDQLVIQQGRAQIAAKAAANKDELLSMIQHGAEKVFQSKGGFGALPENGAELGDDDIDAILAAGENRTKELNAKYEKLGLDDLQKFTSESAYEWNGEDFAARKKDIGINWINPAKRERKEQIYSIDKYYKQALQTGGRTADTKPKAPRAPKQVPVHDYQFYPLRLRELQDRETAYYRKEIGYKVPLPDGDDETVEEREAERALDQQEIDNATPLTEEEQAEKQKLAEQGFGDWNRRDFQQFINGSGRYGRNDYEGIAQEVDSKTPAEIKAYAKVFWQRYTEIADYNKYLKVIEDGEERMRKIEHQRKMLRKKMSQYRVPLQQLKINYTVSTTNKKVYTEEEDRFLLVMLDKYGVDSEGIYEKIRDEIRESPLFRFDWFFLSRTPIEISRRCNTLLTTIVKEFEDEPSNTTKAKVNGVNGKLKREANDEDNDEDSVLGLAPAKKKTKANGVKNKALDNVKSASGSKATSAAPSRASSVASTESKATKGKAAPKGKKK

SEQ ID NO: 8636 - protein, 1893 aa, Neurospora crassa
MASRLDRLVTLIETGSTRLIRDAAVDQLATWQKEHPDELFNLLSRVVPYLRHKDWETRSTAAKAIGKIIENAPQYDPNADEEPDAAMKDEDSNSFIKKEEGPPKLSLSEEEQFSLMTLDVINILKYGRSLLRIGDKSDWGLAALDPQSRLNHQKRTLNGRLGLLGREFKDEEIPVINDAILSPATPLDPAAANGFGRHDSVGSAQTQNGETAGLSARQLNVLKRKRKKEAQKAAQGKSGFGDLSLRRNTTAGSEGFDDTPMVDADSKGGKMNDYFSLDRPADIEEDTKVVSEYKGPIIPIKSEIEADDNLEGVEWPYERLCDFLKVDLFDPQWETRHGAAMGLREVIRVHGAGAGRLMAKSRSENNELNRKWLDDLACRLCCVLMLDRFTDYSSDTSVAPIRETVGQTLGSVLRHCPPATVHAIYELLFRMVMQKDLQLNHHEWAICHGGMIGLRYVVAVRKDLLLQDTAMIDGVILAVMEGLANQDDDVRSVSAATLIPMAKEFVKMRSDALPDLINIVWESLSNLGDDLSASTGKIMDLLATLCSFPEVLETMKHSASHDEERSFTLLVPRLYPFLRHTITSVRLAVLKALMTFAKLGGDTTQGWLGGRILRLIFQNILVERDQETLNASVDLWAALVRTLANNNPAILADEFGPHVDTLMQLTLHPIGVSRNPIPMNASLFQKPSGGTYSMPGLVAGGNRRSSPPEGADRTVKRRRKSTKVDEPPPTSHTHDVDGHMMQGDVDLVGMDVLIRSRVSAAKAMGLVMALVPPSTVEAYDASIIPALSSAYSSTQLTASIVIDEYAKNSASSQASTRFVQPLLAIIEQERPSHYRDLVTYVQRVRSQSQQLLNLCRDHGKVSQSKLPTLAVVVQGEPEAGPGAFSIANAEKVVNEDFERLKKIMAPGQRLIAVKDLNDARDLVVTAIEEAKAAKEARDTRIRAAAACALVSMEVLPKKPSPLIKAIMDSVKGEENNLLQGRSATSVARLVQLFTESGRRGPGDKIVANLVKYTCVETAETPEFPQHAHKTNVILSMSKEEDRAEHEDPIKYALEAKKAHITRRGAKQALEVLSQTYGPELLSRVPSLRTFMEEPLVRAFSGELPAEARDPSSTFGQEIVDALSIIRTMTPTLHTALHSFVMQQVPFVIKALQSQLSVFRYMAAKCMATICSVITVDGMTALVEKVLPSINNPVDLNFRQGAIEVIYHLIAVMGDAILPYVIFLIVPVLGRMSDSDDNIRLIATTSFATLVKLVPLEAGIPDPPGLSEELLRGRDRERTFIQQLLDPKKVEPFQIPVAIKAELRSYQQEGVNWLHFLNKYHLHGILCDDMGLGKTLQTICIVASDHHQRAEEFAKTGAPDVRRLPSLIVCPPTLSGHWQQEIKNYAPFLSVTTYVGPPAERKAMKDTLDKTDIVITSYDVCRNDIDVIKKYSWNYVVLDEGHLIKNPKAKITIAVKQLASNHRLILTGTPIQNNVLELWSLFDFLMPGFLGAEKVFLDRFAKPIANSRYSKASSKEQEAGALAIEALHKQVLPFLLRRLKEEVLNDLPPKILQNYYCDLSDLQRKLFEDFTKREAKKITEEAGRDDKEAKAHIFQALQYMRKLCNSPALVMKPGHKQYDDTQKFLAKRNTSLEDPVHAPKLTALRDLLVDCGIGVEGQESSDPLYTPIKPHRALIFCQMKEMLDMVQNTVLKTMLPSVSHLRLDGSVDPTRRQDIVNKFNSDPSYDVLLLTTSVGGLGLNLTGADTVIFVEHDWNPQKDLQAMDRAHRIGQKKVVNVYRLITRGTLEEKILSLQRFKIDVASTVVNQQNAGLATMDTDQILDLFNLGDAGPNLITEGKNKDNLEGREEDMVDIETGDVRQPGKKAAWLEGLGELWDNSQYEESFDLDGFLKTMQ

SEQ ID NO: 8637 - protein, 1455 aa, Neurospora crassa
MAGVQMPAAVAQHPQMVMAANMSGQQIQEVYARYQQLKKQGVPQNDPEFMKLHNIILAVSRRQQQQQQQQQMQRQQQQQQQQQQQQMAGGAVNGGQPGRAPGPQQTDGVSGAQIPKTPAAKPVGMPTGQPQGGVPYTKAQIQLLKDQIKAFQALSRNQGVPAALQKQLYEFRARRNSAQVAQAVSNASAAQTNSSTPTQDTPKTGSSNGQEEADSTPKARELKTVKLPLEAGLVKNSINYLEHGRRKNRLIIPGIFPTGVDFEQLRADREKIVFNRMSARYAELKSLPGNLAHWDTSKDEVVADDTAKRKAIIEMKKLALTMYRRMKKQSVREARVTEKLEKQQRDARENRERKKHVEFLQAVQNHKVEIQNVASIQRNKLQKMGRLMYAHHFNIEKEEQKRVERTAKQRLQALKANDEEAYLKLLDQAKDTRITHLLRQTDGFLHQLASSVRAQQREAAERYGDDLQNIPEEESDVDEDEESSRKIDYYAVAHRIKEEVTEQASILVGGTLKEYQLKGLQWMLSLYNNNLNGILADEMGLGKTIQTISLVTYLIEKKQQNGPYLVIVPLSTLTNWNLEFDKWAPSVAKIVYKGPPNTRKLQQEKIRRGEFQVLLTTYEYIIKDRPLLSKIKWFHMIIDEGHRMKNANSKLSATIQQFYSTRFRLILTGTPLQNNLAELWSMLNFVLPNIFKSAKTFDEWFNTPFANTGGQDKMELTEEEQILVIRRLHKVLRPFLLRRLKKDVEKDLPDKTEKVIKCKFSALQQRLYKQMVTHQKILVSDGKGGKTGARGLSNMIMQLRKLCNHPFVFDEVENQMNPTNTSNDLLWRTAGKFELLDRVLPKYKATGHRVLMFFQMTAIMDIMEDFLRFRGIQYLRLDGTTKAEDRSELLRLFNAPDSPYFMFLLSTRAGGLGLNLQTADTVIIYDSDWNPHQDLQAQDRAHRIGQKNEVRILRLISSASVEEKILERARFKLDMDGKVIQAGRFDNKSSETDRDAMLRTLLETADMAEVGEQEEMDDEELNMILARNEDELVTFQQLDDERARDPLYGTAPGCKGIPRLMAEKELPDIYLQEGNPIEEEEAVSLGRGARERTKVKYDDGLTEEQWLMAVDDDDDSPEAAAARKAARKERREQNRLKKMAILNNASGSVDASPSVSRASTEEVEVAPPTPKKRGRKPGSKNLEKRPREDGDDEPPVTKKRRGPGGRPKAVSNGDSRMSAEMRTKLQQSMRRIFDGLMNLEVEDDEPAEQLDGDKDEDEGPPTRLIIGPFVKLPPKREWPDYYLMITNPICMKDIEKKMKKEDYHSLSDMRKDLELLVRNCRTFNEETSMICIDANRIEAHFKDQFEKELNDHPELRTLEDPSSSTFSVGASSTKDGSVAPSTITNFTETPQPSSAPPVLAPAPTQPTRIKLVSSSTSYNNAASSSSAMTSAVNSMSVSQVMNGTSAADSEAGDED

SEQ ID NO: 8638 - protein, 1150 aa, Neurospora crassa
MDPDTTQLSKTTEALPELTPNVEHTEAMTLDNKNSAADTQSAPNADELDEEAALKKLTENVRDQDDLERDITLQASRALIEAEDKRDQKRIEKAEATRTRLENQKKTQQQKLRPGITNPTARLRIQQEIARIDAEIELCDKDIADFRARIEQRNQQGETGTLAPATGKILPNETQREYLIRTGKITPFAKFGGPRPAEVEGDLANAIVDAEDEAVAEELEEKENDGPRSHQNLRLPGFADENEVATVAVADDFSLRPRKRRRVQPPPESDDEFVLGESGSEAASPEADASDDYDDYEMAGTTLKKRKKAVREADGDDKVDLTGIDDGNEKVYQARLKGWVTRRSNARRARQQRLGQPIDKDDDGTEEWFKPAPDQPDHQFENGLKLPGDIYPALFDYQKTSVQWLAELYAQQVGGIVGDEMGLGKTAPATVLRQWVNEFHRWWPPLRVSILHSSGSGMLNVRNEGALDDREDDYGKRKPKKSSQAAKKIVDRVVKHGHVLVTTYAGLQTYGDILIPVDWGYAVLDEGHKIRNPNTAITIYCKELRTPNRVILSGTPMQNNLTELWSLFDFIYPMRLGTLVAFRNQFEIPIKLGGYANATNLQIMTAQKCAETLKETISPYLLQRLKVDVAADLPKKSEQVLFCKLSKPQREAYELFLKSDDMTAILNRTRQSLYGIDILRKICNHPDLLDPRLKDDPSYKWGSTSKSGKMAVVKSLLPMWKRLGHKTLLFCQGTQMLDIIEAFVRRQDGINYLRMDGKTPVKDRQTLVDQFNNDPDLHLFLLTTKVGGLGTNLTGANRVIIFDPDWNPSTDVQARERAWRLGQKKEVTIYRLMTAGTIEEKIYHRQIFKQFLSNKVLKDPKQQTSFNLNDLHDLFSLSSYEDGKTETAELFKGSEVKRLPSGPTEIVLPGNDTPVLRAPGASKPVEVKDESTSEDETSNLRHLEGVAGLETFNDDGPAPAPNEEDRLMEGIFARSIHSALEHDEIMNGKKPTVKADRRILQAEADRVAAQAALALRRAGEEARNVPIGTVTWTGEYGEAGRPAPRHERGGFSSVGVRGAAGGAGPSRASRPATPSDKRNLKAEDFERMIPAFIKRHGGRVPSKSLVDHFNHYCTGARQADMFKIALEKVAKLEKKGSSMRGIWTVRPEYH

SEQ ID NO: 8639 - protein, 1642 aa, Neurospora crassa
MSTSPESGPVFGHVSPPADDSHFNFTNDTESTSDLSDVNAAEADPNDDADAQSYQPADEAVSPIQKPELTFEEASDSASDNDASDDGDFDAPDSPRSAQSNEVVSASSSRTVVKRKVAHATEDDYIRENPALYGLRRSSRPTQRRAQIIDSDEEDEPSESDATPVSRKPAKRRRVERSLPASKRGTPARQPSIDDSDSDTYGGAKARSFQRKVRRQQEQDPALAFSEKRWSSRRAAQVSAGAYQESDAEEDEEDDSELTPNYWSANVEDNSPYIEKILGHRPKEGVEVTVDSTRHDFEYFIKWQGQSYPHNTWETTETVAGFRGFRRLENYYKKVVEYELEMQFGGDDISPEQKEQWYLDREREQEALEDYTKVERVVAVRDGDEGTEYYIKWKGLQYDECTWEAESLVAELAQDKINQFLDRCNRSWQSDRKQTNPDTRSRMTKLEKQPDYIKGGELREFQMKGLNFLALNWVRGNNVILADEMGLGKTVQSVSFLSWLRNERGQEGPFLVVAPLSVIPAWCDTFNHWAPDLNYVVYLGPEAARSNIRDYELFVDGNPKKTKFNVLVTSYDYILADADHLKNIKWQVLAVDEAHRLKNRESQLYIKLNNFGVPCKVLITGTPIQNNLAELSALLDFLNPGKVVIDEELEALSTADNKGPTDEEQDEARRIRTQEKLRELHQSIAPFILRRTKETVESDLPPKTEKIIRVELSDVQLDYYKNILTRNYAALSDASNGHKQSLLNIMMELKKVSNHPYMFQGAEERVLNGSTRREDQIKGLITSSGKMMLLDQLLAKLRKDGHRVLIFSQMVKMLDILGDYLRVRGYQFQRLDGTIPAGPRRMAINHFNAEGSDDFCFLLSTRAGGLGINLMTADTVIIYDSDWNPQADLQAMARAHRIGQKRPVNVYRLVAKQTIEEEVVKRARNKLFLEYLTIQAGVTDEGKALKEQFKERGLKMDEAKTAEDISMILKMRSQNLFEQSSNQQKLEQLDIDAILENAEVTKTDVDDKINLSSGGIDWDNWMQVTDVKVDDLALDWDQIIPAEQLAAIKAEENRKKEEEYLAKTIEENAPRKAALKGSKKSAENDRAERLAKKRQREREEQEELEEQRALLSDPKRPLNEKETRNLIRAFFRYGSLDDREEEVVQDARLSDRDRDFLKSIIEDLVVISRRAVDANNERLREEEARAGKPLAKKDKKAVLVDFGEVRKVNAETVVERPPQLKLLRRVLREHADILSFRLPEASKAAAYTCDWGAREDAMLLIGIDRYGFGAWTQIRDDPELQMHDKFFLEEHRVDKREERKKTEAVGIQSPGAVHLVRRSEYLLSVLLAKHSNDAAAKKAVENHHRSKKLLTNNGHRRGEASSISGSPAPLGVKKPDHKRKYTDDYEERSSKHRRVEDERRGTDSKLDKKKDKAPKVDPETLEKWKRDRQKAVERFHELAKLNNDEIDSSDNFQLVWSLLRPLKANMERIMYSKERFPAAKERAKILGEEIRAFGNFLKQLEEKNPLDGLEPQFWEFLSSIWPIGEVKVSGRRLQRMFGDLCKKDSENKEDRSQNLKKPSRQDLEDGEIASDRDDRRSRDPYRDDRREDRREERREEPKRRPNYYENGDRLNFYRHRRDIDRGAPIRHSWQSSRSPSQQQRPY

SEQ ID NO: 8640 - protein, 831 aa, Neurospora crassa
MVSTPKAASKDNSTNSLALTQRSKFPTPQSLDKLTKPFKCPGSATRTVAVDRPARKRRKIDYKGAGGEDDEDGADKPYTNADRLALANRDANKFPVFAVKDKSQVFRKAFSVPLINKNTTAYNPNRPPPTLGLRQGAVFVAKPLHDPCDEFAIVLYDPTVDDKPKDTAPEAIEEKKEEPEVKVDAPLVHKSLAEILGIKKKVEGEHPRVPVVIDPRLAKVLRPHQIEGVRFMYRCVTGMIDEKANGCIMADEMGLGKTLQCITLLWTLLKQSPDAGKSTIQKAIVACPSSLVRNWANELVKWLGADAITPFAIDGKASKEELTRQLRQWAIASGRSVTRPVIIVSYETLRLNVDELKGTPIGLMLCDEGHRLKNGDSQTFSALNSLNVSRRVILSGTPIQNDLSEYFALISFANPDLLGTRLEFRKRFEIPILRGRDADASEAERKRGDECLVELLAIVNKFIIRRTNDILSKYLPVKYEHVVFCNLAPFQLDLYNYFVASPDIQALLRGKGSQPLKAINILKKLCNHPDLLDLSADLPGCEQYWPEDYVPKEARGRDRDVKPWYSGKMQVLDRMLARIRADTNDKIVLISNYTQTLDLFERLCRNRQYGCLRLDGTMNVNKRQKLVDKFNDPEGDEFVFLLSSKAGGCGLNLIGANRLVLFDPDWNPAADQQALARVWRDGQKKDCFVYRFIATGTIEEKIFQRQSHKQSLSSCVVDSAEDVERHFSLDSLRELFTYRPGTKSDTHDTFKCKRCKPDGRQYMKAQAMLYGDTSTWNHFVNHWEGEDAAGKSGKGGDPNGGSGGMKSIHDHLLRQEVGERDVSAVFQYISH

SEQ ID NO: 8641 - protein, 1178 aa, Neurospora crassa
MAENAIVLSDDDPTLSFDEDFRPQSSASATTTSLGKRKLSVSFEEKVDWSDDSDDGEKLKARRNAKRRATSGSVRGRGSKGKGRGGKKTAAATNRSRHDEIIELNQPTVRKEEETDYAEAFIPDYLLERRRKFNKDRELLRNAGLKLPPDYHDIYFSDDEKGTRYEQRPKFEESSGIKPCRPYKDVELEYSAGIIPACIAQYLRDYQVEGVKFLHQKFVYQRGCILGDDMGLGKTVQVAAFLTAAFGKTGDERDAKRMRKMRRAGDLWYPRVIIVCPGSLIQNWKNELDRWGWWHVDVFHGSNREDVLQAAKSGRIEVMITTYDTYRNCHEAVNTVEWDCVVADECHILKNTVSETTRAMDKINAMCRIGLTGTAIQNRYEELWTLLNWTNPGYFGTRAEWNESITKPLTAGQSHDATLKQLSIARTTAKKLVQNLLPEFFLRRMKSLIAHQLPKKSDKVVFCPLTDVQRDAYENFLEGEHVTFILNAYQPCKCHSGRAGGFCCYKTLSDGRTWKSYVFPSIITLQKIANHLTLLIPSSSDPKEKQRSELNVLQTCAPDTWKELYNNRESMLSLANPEFCGKWKILRKLLRFWHESGDKVLVFSHSVRLLRILQHLFHNTSYNVSFLDGALSYEERQRVVDEFNTDPRQFVFLISTKAGGVGLNITSANKVVIFDPHWNPSYDLQAQDRAYRIGQIRDVDVFRLVSAGTIEEIVYARQIYKQQQANIGYNASNERRYFKGVQRDKNRKGELFGLENLFTFHADQVVLRDIVNKTNIAEAKAGVNLTDIDMEKAVKDEDEELDFIKKESEDKDDDTGMSSLAKLVTAEEPDKLLEASKSKKPKSDAIAAILASAGVEYTHENSEVIGTSKVEAQLSRRAELAANAADSQLFPGANNALFADSTESSDGGDDDDDDEDQEDLNGPARKKMLRMHYKFNPPEDVKRRQFCSMAREFGFQNATDFALVVESWTQEQRRNCLDTFYRRREVKLLEQEMAKMEAEKETEDDDDENDESTMVKTDDDDDDETVDLEKAVANEEILVLGESKPNAGVEVTRGEIAEKRAVAGAAERGEEGDPLRGTGALGYGVRSLPNARAGASASPVPKAEAGERRTDETATIVSEAGKPVDSGASSVAVKTEGVEEPRTVTVGAGTSFDNTAAAGQKKVTTIFLYDDEDEDDEL

SEQ ID NO: 8642 - protein, 834 aa, Neurospora crassa
MSASMVSTPKAASKDNSTNSLALTQRSKFPTPQSLDKLTKPFKCPGSATRTVAVDRPARKRRKIDYKGAGGEDDEDGADKPYTNADRLALANRDANKFPVFAVKDKSQVFRKAFSVPLINKNTTAYNPNRPPPTLGLRQGAVFVAKPLHDPCDEFAIVLYDPTVDDKPKDTAPEAIEEKKEEPEVKVDAPLVHKSLAEILGIKKKVEGEHPRVPVVIDPRLAKVLRPHQIEGVRFMYRCVTGMIDEKANGCIMADEMGLGKTLQCITLLWTLLKQSPDAGKSTIQKAIVACPSSLVRNWANELVKWLGADAITPFAIDGKASKEELTRQLRQWAIASGRSVTRPVIIVSYETLRLNVDELKGTPIGLMLCDEGHRLKNGDSQTFSALNSLNVSRRVILSGTPIQNDLSEYFALITVANPDLLGTRLEFRKRFEIPILRGRHADASEAERKRGDECLVELLAIVNKFIIRRTNDILSKYLPVKYEHVVFCNLAPFQLDLYNYFVASPDIQALLRGKGSQPLKAINILKKLCNHPDLLDLSADLPGCEQYWPEDYVPKEARGRDRDVKPWYSGKMQVLDRMLARIRADTNDKIVLISNYTQTLDLFERLCRNRQYGCLRLDGTMNVNKRQKLVDKFNDPEGDEFVFLLSSKAGGCGLNLIGANRLVLFDPDWNPAADQQALARVWRDGQKKDCFVYRFIATGTIEEKIFQRQSHKQSLSSCVVDSAEDVERHFSLDSRELFTYRPGTKSDTHDTFKCKRCKPDGRQYMKAQAMLYGDTSTWNHFVNHWEGEDAAGKSGKGGDPNGGSGGMKSIHDHLLRQEVGERDVSAVFQYISH

SEQ ID NO: 8643 - protein, 1486 aa, Neurospora crassa
MTSTTFLEFQGFFGPAPVLLCLGPGISLPPQPAYDDYRFDDELEGLGLRKRKRRYEDDEELYEENSGDDYGGRHSLHDYGFVNGAKRSTRTSARASSERSIAYESGTESRALRPRSAKKYRDYDRDELQNSDDDDGFFVVTSDIVKTRGRKKRKSTAKLKTTMGDGDSDIEFESKRRSSRANKSKKSMKEIFDDDDDDDIFYVQDTKPTAPRIASVREVFKPAPVDFKDAHRPKKTPKQEEKLREENDGVDPIMPVDPKLVNNPLNVLFRCSKCHRGWHYEHLPHPNDTRDPAISDPLNLRNHRLQEYQTTWRCKECIDTEDLKIDKVVAWRPTHIKPSQYVRGQTILNFNEDEIEYLVKWENKSYAHCVWMPGPWIYGVSKGNMRLSFIKRALGEGMEDQASRDEPADALLKWTEKDAIHDSWLTPDIILDVQYAAKSIEDTKKYKAMSLADRMEYDLSRIFHVVKIFVKFEGLGYDDAVWDTPPPADSSMYDAYLEAYREYLNGKHFKSEPWRNQKERIEAFRQMEFNGAIEVKKQPPGLTRGKLMTYQLEGLNWMLYNFRHDRSVILADEMGLGKTVQVVALLSSMIQDNPKIWPFLIVVPNATCANWRREIKKWAPDLRVVAYYGGRVSQTLALQYELFPNGTKDMKAHVVIMSYDSIKDTDTRSRFNSVKWAGLIVDEAQALKNDENSLYKALSVMNIPFKLLLTGTPLQNNKRELFNLLQFIDPKLKAEELDEEFKDITKENLPKLHELIRPYFLRRTKAMVLTFLPPMAQIILPVSMTVLQEKLCKSIMERNPQLIRAIFSANGKLKSQDRGSLSNILMQLRKCLCHPFVYSQSIEDRNLSPEVTKRNLIEASSKLLLLEVMLPKLRERGHRVLIFSQFLDQLTILEDFLAGMDLPYQRLDGSQSSMEKQKRIDAFNAPDSQLFCMLLSTRAGGVGINLATADTVIILDPDWNPHQDIQALSRAHRIGQQKKVLCFQLMTVDSAEEKILQIGRKKMALDHLLIETMDDKEGEAANDVETVLKHGAAALFGEGRKKDRIVYDEAAIDKLLDRSAKEETKQDGDKSAESAFAFARVWAQDEGGLKDDVETEQKALTMSVWDQILQQREEEARLEREKELQALGRGGRRRGTANYRGPKFEFEEGQEGGESDRGDQDGDFMGGDDSDGETSGNENGNSPHGEFLPNGGSSRKSQARNAQQADAQDSSDPRHPQQTRSRQGSQNQLVVQIAPAPGPAAPNPKGRPTKPVRPSSHNQEVHRIADFNTPHGQIPASGGLAMPSHAIGGDLAVHPRPVPSTHRPNGNPNGASKLTSNTPILVPRPGAGVVTGARIRPPSLNGLPNLNPNRQPNNLPSDVTKQPKPGILWSNQGPPVPPGVPHTSCFVCGFVHPPTWMCPEMSQEVPLRLALDNLRLIPHQTPERMEIKRKFLLEMLRVVQQRKEEAMRAKQRQQSGQQTQEGQQSQQGQQGQQRQEGQEPPQVPPS

SEQ ID NO: 8644 - protein, 1011 aa, Neurospora crassa
MAFSSLPEDDSLRSSSVVVDSPVPQRRTKPDLDFIDEDDEDELSIVSQSPYFTQPTQIASQPTVKPREAAIPSSPTVVEVPASSPFRQQSSNIGGRFASAMAPRGTSFKAPAAQPLPAKAGAKRDYIMIDDDEFDKPLYAGDSSDDEGPARGDIQPSAFKKPNPTSAKAAPAVYLKPSKKPKLFNDVGSPITSPSKPYVLQEDWVTLRSSSPESLQSIRPKDSPLKPAPAPPAPARRRLIQGRRRRSPSPASSPAKPIEKPVPKLKQTKIITLVSDDEDDDDYVQKKSVRSPEPQPELSQRDPEEDAFEERVLKYLNTCDPIQLMAIANVKEDVAKHMLSYQPFDSVADAERVTMAAKATKVKRKKSTRAPVGEDIVGSIKEYTKALDGIDHVIAVCESQAAAIKDATSRWKVDQTGQPRTVKNKDGTITPLSIDGTTTLVDLPLSQPKLMSGCTMKPFQLYGLNWLYLLYENQYASILADDMGLGKTCQVISLISAIVEEHDKHSQDDDSNQPWPNIIFVPPSTLANWAAEFKRFAPGLNVTLYQGSQSVRDEIADNILDDPASHHVVLTSYSQVSRQDDISNLRRLKPMVAVFDEGHKMKNPKTKLYKDLLKITATWRLILSGTPVQNNLMEMISLLQFVEPELFRDHFDDLEALFNQKFSLTAVSQGALLHSERVARARTILEPFILQRRKEQVLKDMPPKTAKVVYCEMDDVQAAIYKDYERRFRKTDATGASSVGRDNDNNNVWIQLRKSAIHPQLFRRYFNDSTVEKMANILMKKVDQSELRQPKIEHLINELKALSDFELHLWCRDYKCIRQFDLPDGSWMESAKVQALLKLIKQYQKNGDRALVFTRFAKVIEILGECLASEKIEYLSLQGNTDVSERQELINDFNADATIPVFLLTTGSGGTGINLTAANKVIIFDQSDNPQDDIQAENRAHRLGQTRPVEIVRLISKDTVEELVYKACQKKLELANKVVGWSTVEMSQSEMEAQVRAAIMNGGSIATPPSD

SEQ ID NO: 8645 - protein, 1845 aa, Neurospora crassa
MTTMMTDSGTASDSGAGLVDSTRNDTTTTTTTTTTPGDNDADDDNTNGTTTGHHDNNETDNNSKSYSSTHHVPAIDNTSTTNANDNEDAAGFLDRDQSPLSSISSPLSEPDNFEFDTEPIPSILSPKSTTSDNHARDGETPELDEDGQPPAKRRRVRETTPHNHSRKPKPESPPWKKFEAEGPTTIITEDGRRKSGRVNPVLLGMKPSDKKVTRKAIQTSPVSNKSSASTSRKPAPASSSNSKHAPAKMPPPPPPPKAPARKSATTHETRPSASRSRRRSPSPRRPATPPKPAAVGTRRSTRQALAHSRASYDDGQLSPGASRATPRIKLKVRPPLTVIPLVHPNQANVRPKLGPTFEEYFARAHEIPVEEGGQHIPDEEPKYTDEMALQDAKVILRVEKEVEPGGLLAPDRCSAFEPEAEEEPPRQWAHLDHLTKAMTNFRKLMYREQQLHMQAAKRIAIACEAEWRRRNPQPKTAEEIELEEMEASKAKWRQVIRAFAGTWENVRVEVNRRRLVEWEAEEQRRVKAALNQAVNLSEQKLQQRQAQVDGDEITDEDEDEDDEDLASGMPSVMGDEKESDEHSDQGSDEMSDENDEDEDEDNMSSSEDDDKKSTASDEGLTQEELRAKYANLPTLGTTDETEETTKDVEMADAPAAMDGSVANDDDTSDESVDMDDDLGSSEESDDDEEEEEDDEEEEESDDEPAGLLGLFFGKSELKKLKEEAVTEEPSVEPAGDVEMTDASAALRPELQVNGHAHEAPITNGTHTNEQLASSQTEGADDEVSLLVIPNDEIAAENTQTAAEPGSGVVEKDFLTNDSSLKYPNEIVQSENQTLPAKESVEAGGDLPMVDAPSTDDLQRETAAAPSLEAPPNTRHDSQETVAATDMQSQSQTQSPKTTDTKPTDVDTPHSELAVSVQKPDSRQSSPQPTTPTVKTEIPFLLRGTLREYQHHGLDWLAGLYANNTNGILADEMGLGKTIQTIALLAHLACHHEVWGPHLVIVPTSVMLNWEMEFKKWCPGFKILTYYGNQEERKRKRQGWNNDDVWNVCITSYQMVLQDQQVFRRRRWHYMILDEAHNIKNFKSQRWQTLLGFNTQARLLLTGTPLQNNLTELWSLLYFLAPPENGEGGFVDLTEFHNWFARPESQILESGREQLDDEARAIIAKLHKVLRPYLLRRLKADVEKQMPAKYEHVEFCRLSKRQRELYDGFLSRADTRETLQSGNYMSIINCLMQLRKVCNHPDLFVDRPIMTSFRMSRSVPADYEWKEKFIRNRLLATKPMTTVNLSFLNMIPTEYEDLSKTHTDRIAQLSSHRILLDLREAQKVRANNAYTALDPSSVKSNLVYLESAARWGRFEELQHCVYINALRRQQRPIYGKRLTEFLTLDTHLRPYKPRPRVPAKIMSWFEEDSFLLHNAIPTLQQRAESMEMTITKFACVTPAVVTGPEMNRFLLGERGIQLFEDLDLKLSAPVKYAPYMPPQPPPDPWHEARMRLTIQFPDKRLLQYDCGKLQALDKLLRKLQAGGHRALIFTQMTKVLDILEQFLNIHGHKYLRLDGATKVEQRQILTDRFNHDPRILCFILSTRSGGLGINLTGADTVIFYDQDWNPAMDKQCQDRCHRIGQTRDVHIYRLVSEHTIEANILRKASQKQMLDDVVIQEGEFTTDYFNRLSVRDVLGSNGEVIASNEDDVAANLAMDRVLGGPSTTGAGGYDGTADGGGGASQPPVRNVGRVLEMAEDREDVDAAKAAEKEIMQDEADFGEAGSTRPGTPGDGLADLDGQLLGGEENKEVEDEVIEYNAWGERMHTIDEYMLGFMAKALEGTPLELPRDRKKGRDRNRNRKGKDSRKR

SEQ ID NO: 8646 - protein, 1146 aa, Neurospora crassa
MAENAIVLSDDDPTLSFDEDFRPQSSASATTTSLGKRKLSVSFEEKVDWSDDSDDGEKLKARRNAKRRATSGSVRGRGSKGKGRGGKKTAAATNRSRHDEIIELNQPTVRKEEETDYAEAFIPDYLLERRRKFNKDRELLRNAGLKLPPDYHDIYFSDDEKGTRYEQRPKFEESSGIKPCRPYKDVELEYSAGIIPACIAQYLRDYQVEGVKFLHQKFVYQRGCILGDDMGLGKTVQVAAFLTAAFGKTGDERDAKRMRKMRRAGDLWYPRVIIVCPGSLIQNWKNELDRWGWWHVDVFHGSNREDVLQAAKSGRIENTCVSETTRAMDKINAMCRIGLTGTAIQNRYEELWTLLNWTNPGYFGTRAEWNESITKPLTAGQSHDATLKQLSIARTTAKKLVQNLLPEFFLRRMKSLIAHQLPKKSDKVVFCPLTDVQRDAYENFLEGEHVTFILNAYQPCKCHSGRAGGFCCYKTLSDGRTWKSYVFPSIITLQKIANHLTLLIPSSSDPKEKQRSELNVLQTCAPDTWKELYNNRESMLSLANPEFCGKWKILRKLLRFWHESGDKVLVFSHSVRLLRILQHLFHNTSYNVSFLDGALSYEERQRVVDEFNTDPRQFVFLISTKAGGVGLNITSANKVVIFDPHWNPSYDLQAQDRAYRIGQIRDVDVFRLVSAGTIEEIVYARQIYKQQQANIGYNASNERRYFKGVQRDKNRKGELFGLENLFTFHADQVVLRDIVNKTNIAEAKAGVNLTDIDMEKAVKDEDEELDFIKKESEDKDDDTGMSSLAKLVTAEEPDKLLEASKSKKPKSDAIAAILASAGVEYTHENSEVIGTSKVEAQLSRRAELAANAADSQLFPGANNALFADSTESSDGGDDDDDDEDQEDLNGPARKKMLRMHYKFNPPEDVKRRQFCSMAREFGFQNATDFALVVESWTQEQRRNCLDTFYRRREVKLLEQEMAKMEAEKETEDDDDENDESTMVKTDDDDDDETVDLEKAVANEEILVLGESKPNAGVEVTRGEIAEKRAVAGAAERGEEGDPLRGTGALGYGVRSLPNARAGASASPVPKAEAGERRTDETATIVSEAGKPVDSGASSVAVKTEGVEEPRTVTVGAGTSFDNTAAAGQKKVTTIFLYDDEDEDDEL

SEQ ID NO: 8647 - protein, 1930 aa, Neurospora crassa
MAELNENEPFHWDVERVVKELCTPERTWDAPAPHKLPDPERLAFKLRELDIDGETLLMYPDEYGWPTFWEMLGIKKLAHHLSIGKAIKQFRETSTLYYRQRRDIDLPKGLLSTTPAIKPDPLDPSEPTPPLVDNSIPEPTAAAIDGPVSEPSPAGVGNAATDASPAIVNNTAVEANSVMLNDAASEPTPGVVSAPASETAPVMTGSAAVAPTPMEGVISQHAAPAEQAQDVQMSGIPDRSPESPEKRALGNGLRQDTEEVSRDPERPLKKRRIAPTIVSTVAPAQARSFIPTEGDMFYHPLLDIPSSQTGASQTGASQTGASQTGASFRSATLPTSTFLSDANFDRFLDVDDSKFSYLGSSALRSEDIASLPYNFESDDDGDDKEASEEFTWVRSGAVPPARALQVARVMRKFFRKRSPFVNEDEEVVLDFGEDDDGMSVDSETYREYEQEEQERKAHQSMHGSTQLSEVQAEEAIEDAIQRLEVSWEKIKKPKFERRAWKIWQDARRNRTRLSLITFAKNQLRSLEVRLENMEKELLIQKWFKEDKIEAKVEGFLEESVYDRKYQTWLLNLLENPHEPPKPSTLPRLKPEPKKERETLASDEELLTSDSEEEDQFIEDDLSPVDQMVIDPKETIPSIRPSTPVRPLNPSTEENSTNQIPEEEAEKEEDTTARPSAVDDETGTVNKVEPTTPQRIIHTIPAEPIEILSSPSDVDQLANVPPLTDVDTIGKLGTQFWAKHRDGERLVIAALWSWSPLRQSEIFDTIQDRGDKETWKEHIQPLIDRAATGISRIDVDPDSISLILALLFLTYSDFSEGRLKIRSTTLRCVTCQKLHREYLRFGEFFNFLQNCIRYFRSEPKSPTPMEMTSAESPEATQDIPMDITSESEHMDTDLEELSSQFPLSSAKKGRRPKHDEKAKKLRVDSKALLKQMDERRKLLRAKLAETGSVPSDKSRLIINETKESDDLPLIYVHEEIGGRIKDHQIDGVRFMWDQIVVESNSRQGCLLAHTMGLGKTMQVITLLVAIAEASQSDDPRVVAQIPKDLRVGRPLILCPSGLVENWIDEICKWAPKDILGTITKIDASTVPPSERVLLIKEWARSRGVLVMGYELFRSLVSGNEDNVAELLHSSPSIVICDEAHRFKNKTSKLYAVVQDFHTMSRIATTGSPLTRNVMDYYSMINWVAPNYLSDVGEFNQKYAEPISLGLHADSTDAQKRLARERLQILKAIVAPKVNRKDIQVLVDELPQKREFILTIQMTKVQRDAYQEYLETAQRNKGNDLYRTACVWGLIASLKLLLAHPKIFRSKMEERLSTNPALVKGKQRITNDEDPESDEVDEPLDLSRDTLRNVLAKVSIRGIDDIVHSTKVTVLLQILKECKQIGDKVLVFSQSIPTLNFLQDLFKLKKINYRKLDGKTPVSQRQAAVKEFNAVDSLDVYLISTRAGGVGLNIPGANRVVLFDFGFTPAEEQQAVGRAYRIGQEKKVFVYHLKVGGTYETAIHNLAIFKRQLSERVVDKKKPIPTSTRMREYFITPPENLEQKDLSAVKGLDPAVLDKVLASAECGSIIREIDSTETFEREEVYEFTAEQHRELNKQIELEELRINNPEEYYKRQMPTGSGFALPSLPPNLVPLHLRDKHNPTAPGSAPGIPPSAANNISASTQAGAPIPRVASTVIASQTVASSPSPANGQVAALNPILGTNTHYKVAEAARKPATLKAPEIIPKPRKPEDTTPKLLEALGEVHRKLRDEGYDMSIHPQDLVMQINSECDRQDMAAGTLPRMDKLRSLCKAVTESTRFGEALLAGYLTPNEAVAMGMAQMKAKIAEFQTMTDDCFKQELWARHKASHASKSTADVTVKTETTKMRPPLAESDAIDGIARSSSTSTTTKATPSRTLTEEIERKKKKKKKKEERKKHKRRLQPGGTADMPLVIDDD

SEQ ID NO: 8648 - protein, 1955 aa, Neurospora crassa
MDHFSTVLQRPPHFDEDGTEGRGDRGNGAGPGPAPPPPPPRGGLRDILNPVSSNSAVQSQAAAAAPPPPPAVASSSLHGIAASVPPPSSTNSMRATPHSSSSFNLRSPTREPSEYRHPLSSLATPAPFAASPPTSIANANNTNNNNALGAAGSLSSQPPPPPPTGPRSILNPPTPSQQHQQQHHHPNPFVAASAPSLPPPPSSLQAPPAITPIAGLSAPAPASGSLPLSAGGIGNSITVSSSSQPPARASQLHAPSAYYSPAESFRDRDSSVREKSSTGGSFYDPTAEASNGISGSSPRKDRDRDRDHRGTTRESQRRSVSGHSDTGSSWRNATQTSASNKTRDPYNYSPSSADYYNTRKKENYPVDNTTSSSIAAPSNFTVATRSPVAALSHPASIAAPASVGSLTGSISPRLSLRPPSMASPTIRSAVLANPTNGTTSTALPALGRNDSPPSKMSPGTSTNPSRAAGVMSFSNILSSSEPVPRPRATSPNNPDDDDDVPMKVERADSSEKVVKEKKERKPRQPKQPRISDIRHSESTPKGRRGSTKQESPLPNIRIPAKRMANGAPKQQKTFSAENEEKIRKAMDRIETRELPHEDEFEEELRLWRERREYKRQQMNQRDLRQRRQRRADYTEVEAQKLKLHADFGKRRYDDLNYDDALQEVRERELFAEKERKKDMQRKRRREKSMATTMEAKAAALARASAAQDEAERQKYMREAERANKKVQQTRLILQKGIKGPSRNTGPIEPNLEGGTMATFQAENMEPGKTKGKGRAGARPKKSKEQKQAEKDAAEAAQAALDAGLELPPKEETNKIRIKLTKTKAPKEADVDKDKENKEPQEPKEPKEPKEKVIKEKVVEEPKDPLELKFQSKGFNQIYDQIWRDLARKDVNKVFRLAIDSYSTKSSNLKKTAILASKEAKRWQLRTNKGTKDLQARAKRVMRDMMGFWKRNEREERDLRKAAEKQELENARKEEADREAARQKRKLNFLISQTELYSHFIGKKIKTNEVERSTDHPDEIAAEKDKIPENEMDIEVPTGPIGAKVTNFENLDFDAEDESTLRAAAMANAQNAIAEAQKKAREFNKEESKLDEDGEMNFQNPTMMGDVEIEQPKLLNCQLKEYQLKGLNWLVNLYEQGINGILADEMGLGKTVQSISVMAYLAEKYDIWGPFLVVAPASTLHNWQQEITKFVPQFKVLPYWGTAGDRKVLPQAIKSSQSSRWKCLLGFHCRNRLLLTGTPIQNNMQELWALLHFIMPSLFDSHDEFSEWFSKDIESHAQSNTKLNEDQLKRLHMILKPFMLRRVKKHVQKELGDKIEMDVFCDLTYRQRAMYANLRNQISIMDLIEKATLGDDDSASLMNLVMQFRKVCNHPDLFERADTASPYSFGHFAETASFIREGSQVTVGYSTRSLIQYELPRLLWRDGGRLHKAGEDNQVAGWRNQWLNEKFNIWTPEHIRESLAGTDNFSWLRFADTSYEEAYRASHKDLFARAVEMSTKKNRLAEIKIAYDEPEDLNFTPAHALFHIREREDRRPLAEITEQGILGSLMNVSRSAFSETGLGRLEQAAAPKASAPPIEVVCDSRSAVVERENIMFNAPMRKVLFGPTLAEEKALVVQKVPPSRYPPPALLPAPDKEKQKFTNITVPSMRRFVTDSGKLAKLDELLRELKENGHRVLLYFQMTRMIDLMEEYLTYRNYKYCRLDGSTKLEDRRDTVADFQTRPEIFIFLLSTRAGGLGINLTSADTVIFYDSDWNPTIDSQAMDRAHRLGQTKQVTVYRLITRGTIEERIRKRAMQKEEVQRVVITGGSSAAGGGVDFSGRRAPENRNRDIAMWLADDEQAEMIEKRERELLESGELDKMQKKSRGGNKRKRGGAGGEGKEVSLDEMYHEEMITGEGNFDDGGNNIKGSGTATPNGAAGGEGGDGKGAVGGAAKKRKTGGSKKAKTTKQRLAIADGEIDI

SEQ ID NO: 8649 - protein, 1951 aa, Neurospora crassa
MDHFSTVLQRPPHFDEDGTEGRGDRGNGAGPGPAPPPPPPRGGLRDILNPVSSNSAVQSQAAAAAPPPPPAVASSSLHGIAASVPPPSSTNSMRATPHSSSSFNLRSPTREPSEYRHPLSSLATPAPFAASPPTSIANANNTNNNNALGAAGSLSSQPPPPPPTGPRSILNPPTPSQQHQQQHHHPNPFVAASAPSLPPPPSSLQAPPAITPIAGLSAPAPASGSLPLSAGGIGNSITVSSSSQPPARASQLHAPSAYYSPAESFRDRDSSVREKSSTGGSFYDPTAEASNGISGSSPRKDRDRDRDHRGTTRESQRRSVSGHSDTGSSWRNATQTSASNKTRDPYNYSPSSADYYNTRKKENYPVDNTTSSSIAAPSNFTVATRSPVAALSHPASIAAPASVGSLTGSISPRLSLRPPSMASPTIRSAVLANPTNGTTSTALPALGRNDSPPSKMSPGTSTNPSRAAGVMSFSNILSSSEPVPRPRATSPNNPDDDDDVPMKVERADSSEKVVKEKKERKPRQPKQPRISDIRHSESTPKGRRGSTKQESPLPNIRIPAKRMANGAPKQQKTFSAENEEKIRKAMDRIETRELPHEDEFEEELRLWRERREYKRQQMNQRDLRQRRQRRADYTEVEAQKLKLHADFGKRRYDDLNYDDALQEVRERELFAEKERKKDMQRKRRREKSMATTMEAKAAALARASAAQDEAERQKYMREAERANKKVQQTRLILQKGIKGPSRNTGPIEPNLEGGTMATFQAENMEPGKTKGKGRAGARPKKSKEQKQAEKDAAEAAQAALDAGLELPPKEETNKIRIKLTKTKAPKEADVDKDKENKEPQEPKEPKEPKEKVIKEKVVEEPKDPLELKFQSKGFNQIYDQIWRDLARKDVNKVFRLAIDSYSTKSSNLKKTAILASKEAKRWQLRTNKGTKDLQARAKRVMRDMMGFWKRNEREERDLRKAAEKQELENARKEEADREAARQKRKLNFLISQTELYSHFIGKKIKTNEVERSTDHPDEIAAEKDKIPENEMDIEVPTGPIGAKVTNFENLDFDAEDESTLRAAAMANAQNAIAEAQKKAREFNKEESKLDEDGEMNFQNPTMMGDVEIEQPKLLNCQLKEYQLKGLNWLVNLYEQGINGILADEMGLGKTVQSISVMAYLAEKYDIWGPFLVVAPASTLHNWQQEITKFVPQFKVLPYWGTAGDRKVLPQAIKSSQSSRWKCLLGFHCRNRLLLTGTPIQNNMQELWALLHFIMPSLFDSHDEFSEWFSKDIESHAQSNTKLNEDQLKRLHMILKPFMLRRVKKHVQKELGDKIEMDVFCDLTYRQRAMYANLRNQISIMDLIEKATLGDDDSASLMNLVMQFRKVCNHPDLFERADTASPYSFGHFAETASFIREGSQVTVGYSTRSLIQYELPRLLWRDGGRLHKAGEDNQVAGWRNQWLNEKFNIWTPEHIRESLAGTDNFSWLRFADTSYEEAYRASHKDLFARAVEMSTKKNRLAEIKIAYDEPEDLNFTPAHALFHIREREDRRPLAEITEQGILGSLMNVSRSAFSETGLGRLEQAAAPKASAPPIEVVCDSRSAVVERENIMFNAPMRKVLFGPTLAEEKALVVQKVPPSRYPPPALLPAPDKEKQKFTNITVPSMRRFVTDSGKLAKLDELLRELKENGHRVLLYFQMTRMIDLMEEYLTYRNYKYCRLDGSTKLEDRRDTVADFQTRPEIFIFLLSTRAGGLGINLTSADTVIFYDSDWNPTIDSQAMDRAHRLGQTKQVTVYRLITRGTIEERIRKRAMQKEEVQRVVITGGSSAAGGGVDFSGRRAPENRNRDIAMWLADDEQAEMIEKRERELLESGELDKMQKKSRGGNKRKRGGAGGEGKEVSLDEMYHEGEGNFDDGGNNIKGSGTATPNGAAGGEGGDGKGAVGGAAKKRKTGGSKKAKTTKQRLAIADGEIDI

SEQ ID NO: 8650 - protein, 950 aa, Neurospora crassa
MPKRPYTSGVGAAASDRRDEARRRRLNADSSSSGPSQSQYVPQSTSTNGLSSSSQTSSGRRQLPWQTPPGTQGAQSRHNTQGATSTYSARSSQATPSSQHRPPEHVQAIHDTLNWLSTQPDILESDDEAEVIDLTQADPGPVLEFYGHFDGKIVGVRYYNGVASPGEVVVCKREPQNQYDPNAIRVDNVLGTQIGHIPRTVAAKLAPYMDNGDLVVEGMLTGEKEFYDCPVRLYFYGTSASLQRARLEERLKKDKLVKATQLNQTRKANEEQRKKQTLELRGNGTYGFPSQTQEPEPQVTMEQLAKMSEVISFRSGGDMIKSLAMSEEDLANLPMASQPEKLRAKLLPYQLQGLAWMISKENPTMPAKGSTDSVQLWQHTADGRYHNMATGFYNKSPPQLLSGAICADDMGLGKTIQIISLIMTEGLGTGPTLIVAPVGVMSNWKQQIRRHVHEEHQPKIVIYHGSKRKEFAKALQDQDVVITSYGTLSDDALVKTRWRRVVLDEGHSIRNAKAQVAQNACKLEAKSRWVLTGTPIINSIRDLHSLLKFLRITGGIEQSEIFNTVLTRPLANGEPKGEALLKSLMKDLCIRRKKDMKFVDLKLPEKTEHMSRITFWPDEQKKYDALLSEAQGVLENYRTQSKRSQGQFQGVLERLLRLRQTCNHWVLCKKRITEVLELLADKDVVDLTDENRAILQQALQLYIESQEECPICIDPLSNPIITHCKHVFCRGCIDKVIEVQQKCPMCRAPLSEDKLLEPAPEHSATQDEEELESETKSSKTEAVLALVKGTLDKEGSKIIIFSQWTSFLTIIQHQLDEAGYTYTRIDGSMNAAQRDAAIRALDYDPNTRILLASLGVCSVGLNLVSADTVILADSWWAPAIEDQAVDRVHRLGQTRPTTVWRLVMDNSIEERVLDIQKEKRELVGKAFQEKQDGKKKVKETRMADIMKLLS

SEQ ID NO: 8651 - protein, 1079 aa, Neurospora crassa
MVRTRRSVVAADEVVVAAPIAEIKKPRGRPRKSATPAVSATASSVPTPATYTSGSEYATPLTSHAATPTPSLLKENVRSTRSTQSAPKIEVAIPVLKASHTMQTTLRSSASATTSKRKRNMVADSQEDDSDDGHDAKLARMLQDEEDAKVASSSKTPSFRVDHLGSTPRSTRSSHRGNTNVSSSKTKKEVIADSEDDGFDDSPDATLARKLQAEEYGEEDSEVEAATSNVKALGLRRSSRRLNSSPVRASSNVTGKSTAVAKGNQSAPTRNSTRRGVAESSTQVLGFRTAKDLIADSQDDDDDFDSLSAFESDDNDSDVSAQGGRPSAAQKGKGKAIAPPPESEDENDSDDSVLSLPDEADEMSVLGTGSYVSIDEDPDFLLPPNLQASVHGSDDDEDATLGAHIAEAGEGLDRIRAQMSNRRAYRSYRSNRRVKKDRLRLEKQHPELTTMWKDLENMPVLKAGRAEQPKSISRQLKPFQLEGLAWMTAMEKTEWKGGLLGDEMGLGKTIQAVSLIMSDYPAKKPSLVLVPPVALMQWMTEIESYTDGTLKTLVVHGTNSKSKNLTVKNIKSYDVIIMSYNSLESMYRKQEKGFKRKEGLYKEKSVVHQTEWHRVILDEAHSIKSRTTMTAKACFALKVTYRWCLSGTPLQNRIGEFFSLIRFLNIRPFTCYLCRGCPCKTLEWGMDDDNRCKHCNHSAMQHVSVFNQELLNPIQKFGNRGEGALAFKKLRILTDRIMLRRLKKDHTNAMELPVKEINVERQFFGEVENDFANSIMTSGQRKFDTYVATGVLLNNYANIFGLIMQMRQVADHPDLILKKNGEGGQNVLVCCICDEPAEDAIRSRCKHDFCRVCVKTYVHSATDPNCPSCHIPLSIDLEQPELEQDEAQVKKSSIINRIKMENWTSSSKIELLVHELHKLRSDNASHKSIIFSQFTTMLQLIEWRLRRAGITTVMLDGSMTPAQRQASINHFMTNVDVECFLVSLKAGGVALNLTEASRVFIVDPWWNPAAEWQSADRCHRIGQSRPCTITRLCIEDSVESRMVLLQEKKTNMINSTINADDAAMDSLSPEDLQFLFRGN

SEQ ID NO: 8652 - protein, 1097 aa, Neurospora crassa
MTTPSRATAFSTRASLRQTRTGSPSPNPQPQPTAEAKDLADLEINLTIQLELRAQLQEGPETDESKAILIETNDKICDIVSNMDRIRASRGSPMYAGFRGTADGGRSPAGTATAQQRARQQGNQVRQQQTQRGLNPQQHPPQRPPQRQQQQQHQQQGQQRPLQGLYQQEQENLQQHPQQHESRVDGSEDAQNSFSGFVPRERKRSIGTSLGNDALNDTGRSSKRTASGSGTSDHSTFSDPFNASTFAGNGIDPFDDNFGFDNGFDFGPLIDLTESLAFPSLPGGLVTVDSSRPGTLINGDYYAPNNSGSSRVHIPSLTDVISRTATYDFTSMTDLLGNPLDERLTTLDLDDPLKREDEISKLLSNIRPDEDIPPEERGDTPPDLKYPLYPHQQLALKWMTDMEGGHNRGGILADDMGLGKTISTLALMASRRAPEGEVVTNLIVGPVALIKQWELEIQNKMKEDRRMKVYLYHGGSKKKPWTELQKYDVVLTTYGTLTAQFKKHHHYLEKNTESLNGLDEQAEKRYRLECPMLHPSTKFFRVILDEAQCVKNANTMQSRAVRQVRATYRWCLTGTPMMNSVSELSSLLRFLQIKPFCDEKKFKEAFASLDHKYTGRDVEKSTAMKQLQALLKAIMLRRMKTTVIDGNPILNLPPKSLYTEHVEFSEGELEFYKNLQEKSQVIYGRYVRNNTVGKNYSNILVLLLRLRQACCHPHLTDFEANPKNHLAEATMIELAKTLEPVVIDRLKQIKAFECPICYDAVIDPTILLPCGHDICADCFSSLTDQSAMNGIRNGQDGANVAKCPVCRGPADHTRVTNYTSFQAAHMPEALEKLDNDDADSLVGDGSDTSDGSLGSLSGEKKRKAKSEGKRPTKVKPEEKEDWKPTVFDQLRKEANASRNQDARDRLLQYTWDHWQDSAKVSRVTELVDQFQQFNEKTIIFSQWTSHLDLIECSLKFKLNIKYRRYTGNMSRSQRDNAIQAFVEDPDVKVLLVSLKAGNAGLNLTVASRVIVCDPFWNPFIEDQAVDRAYRIGQQREVHVYKILVQETIEDRIIELQNLKRNIVETALDETEGKQLARLSIDDLNYLFTGRRGGARQQ

SEQ ID NO: 8653 - protein, 882 aa, Neurospora crassa
MRSTSSSSASGRGSGSSRAPSRLPDSVPSSPPPEEPLARQQEDIMMDDSKMSYTKLRAEQRLAEEEEKARVENEKAEERRKKKWKKKVLSKEERDAKAKDLDRLLAQSAAFSSILTNKTKVLGRVGTGLDGKTLGEHELAMAKQPKCVVGGTMRDYQLEGLTWMYEICVQGMSGILADEMGLVAPLSTLSNWIDEFHRWVPSIPVVMYHGTPQERQDIFKTKLMHHLHGGRPTEKFPVVCTSYEMVLKDRANLSKINWEFIIIDEGHRMKNFNSKLFRELKTFTSATRILMTGTPLQNNLKELWSLLNFLLPKIFRDWEAFESWFDFSDLEDEEGTEEFIADKTKQELVKKMHVVLQPLLLRRVKSDVAKYLPKKREYVLYAPMTKEQTDLYNVINDKHIDTRSYLESKVVERLTGATASTASSPRSTSRSSKANSVKMESDSLSESGSFTTKTSALTLQEKESSPLAKNAFALMMGKRTRGRPRKALSVSESPAEETTPVKSTTKGTKRKAAPAVETPAPKSTKSSRQSTPMSTRSRSRRGMRSYKEADSDEELLDDDEFEKKLAKEVVEDDVQDMEVDLDAEEIKRAQTLDLAKKEISNKKLGNPLMQLRLVCNSPHNFYNPWSNSDQPIDESIVTASGKMLLLDRLLPALFERGHKILIFSQFKTQLDILEEYCRELRSWDVCRIDGGVAQDDRRAQIEQFNTDPDVKIFLLSTRAGGQGINLASADTVILFDSDWNPQQDLQAQDRCHRIGQTRPVVVYRLATKGTVEEELLMSADAKRRLEKLVIKKGGFKTMGQKLDLREEGLDRETLRALLLKDGQVYKFSGDKEILSDEDLRVLCDRSDEAYASAAKGEGNADGWKVIETQAEGIRTAGEKKKR

SEQ ID NO: 8654 - protein, 1197 aa, Neurospora crassa
MASRRQLSEPFAYDSLSDEDLDLINSQATDEGISMSSSQQDLSFASSRGSNGTPKGKNNNNNKNTSSPRIFSGDADVVDLTASSPTTPSHPSSDKREQFHGGGMTVHGLGQNHASTPIPKFGQPTQLVSQFTPVNTNNNTKNAASHHGNGSRGGTSSHAIGGSKYNNLFNDRGKNRPEFHKDLYRSSGPLKANAPSKPEIKRNSMGMQLFSSLDVDPAPAPSPLQPGRGTASRGTAAAFGENVFYTDPDKAKEDLKALLEGGLEDEESEDEGAKAKTKGAVSESKKKEESIVSSTGHLPGLAVPLLPHQVEGVRWMINRELGPLKRGRVPKGGLLADDMGLGKTLQSISLIIGNRKPESSSAPGWKAHFKDISKATLVVAPLALIRQWEAELKDRVMPDLNIKVCVHHGPKRSTVPAELAKYDVVITTYQILVSEHDKSHPDPNKGAQAGCFGVHWFRVILDEAHSIKNRNTKAAKACCALRSEYRWCLTGTPMQNNLDELQSLIHFLRIAPYDNLTEWRAQIDTPMKQGKGHIAIQRLHSILRCFMKRRTKEVLTEKGALVAGGKEALAKAEENGEKAPEAAFKVTERKVVTIETEFSPAESAFYKALEERADQSLEKMMKGRTVNYANALVLLLRLRQACNHPRLAQTKLDKDRDALAVDSATAPTAGGKKKKNAYDSQSQTSSVDDLADMMGGMGIQARQCDMCLGEMTKKEIQEGQLRCQGCEDSLSQLMKEQESTQESVESKESKKHKKKKVSVVKEKVKVERKTRGRGRKVVVDSDDEEEGGEWEDEEETPKKDKKSRDNRKRVVDSDDEEDEGTWLVGESQRSALDLGVAGGTDDENAEGTGEDIDSNEEISEDSEDPEEDSFVVKDSDDDDDDDDESVNSDEIVGSGDEDDTFASVSKLSSQVVKQSESEESETAASSSEDSAISDSELEHSSETDSEAEYGTKRSPKGPVQISSKIHELIAILRREAPTHKFIVFSQFTSMLDLVEPFLRHHLPDIKHVRYDGKMSNDAREASLHSLRKDPRTRILLCSLKCGSLGLNLTAATRVIIVEPFWNPFVEEQAIDRVHRLTQTVDVVVYKLTVRGTVEARILELQEKKRLLAQTAVEGSTERGGNKKKKGQGLKLGLQEILDLFKHDGSRAIHGADNGESGYGEENAAAAAAGRTPVRRTAGAAANHTGTRREHEVFGRRW

SEQ ID NO: 8655 - protein, 846 aa, Neurospora crassa
MLPSGRSNPKRRRLESNESGESASVGYAYHYSDGWPHYPMLTAPVVVPALEDRENSFPSPSAALNSPALLSGIPARLDRNLPWGNVTPSSYLRVSLDSSFRFSGKAGAQDFSGTIVQGTTKNNTGDWTVFTDALLEESGIELSVICSKDPYHPSSAAHHKAFKQFEKALDCTLSITIYGPLDLFEEIGSFFQEHNVYLQDPLHCDRLVRYCNPHRLSSADLEKCIWTSDLGKPMTQLVELTNTVPTPELLDAITSAQDLPEADQPRAIRTKLARHQKQALTFMQRREEGWAFNGKHPDVWEYVEHRVGDGSFVNRISDSHQKEQPENFQGGIIADPMGLGKTLTMIALTASDLMWVSLARRGNNEFASVGQTLVIVPPPLLGTWEEQLTELITTNDAHQPTIILTTYHTVSAEWRNAGESARSGIFSRRWRRIILDEAHIIRNHNSQMAHAICSLDGDSRWAVTGTPIQNKLSDLATLLKFLRIYPYSDKRCFDADFTNLWKNGQANEALKRLKRLAGCLILRRPSTTIQLPERRDLLCPVEFYPAERELYQDIRTRTIERLDEFLYANNADTVRLPSYVNVLQQIEGMRMVCNLGLYYRSRHDFTAQDPSADTTWNNAMAQRALDLQLEMNPVRCKDCKASLDVAFSLLGDTPEVQGLQQALLSQCMKFVCPECVFRRGGAPPVCDHTPVCPFAPVSISAITAKEAPEPAAIEFEGRDLMSPHEMPSKIKSLILQLKNLACDTKRLTLTVASYAFLMEPHWNPTLEDQALARIHRMGQTREVTTARFFIRDSFEERVMEVQEKKRKLVTVLLAPHGQGEGEEEDVGSLQFKKKIEKGGKGVIKVS

SEQ ID NO: 8656 - protein, 1175 aa, Neurospora crassa
MDFTNEPLSKKRRFLGDQGDSDHVAGGPSSSPQFSAPPSSPPRKKLLQDPNSEVQPRVSKDADHNDDDDDDDDDDDEERPRFFTDDGTLTPHATKICAPWLNDMPKPDPRKGYLLKDVDTPIATPRDVAPPVVESPQLAFDKDTFEAFVGEKVASDILHVISKNCGNNIERAVNMYLDGTWKKLHRAPPVRVNSHSPLVVGGQSPKKSSTSQARSRSHAQAQPQPQSNTPTKVLPSMPDARYVGAFGVEGWATRSGTGLLRHGDSVKIERQKIQPPTVARKGQTKPGTPQSIPRVSAAAAKRVDVIVRFNDASGRELGRLAKDTANWVSTLIDQNICRFEGICVYAPERLRTNETVFLQLKCYMLRSAFLGRTLQLADNRAAGFHEKDETTEEKDLRLRQVALVRLFQEINIVPSRGNAAAAKDARKDLLEAADSAEKKAMDKAKAGDHNTNGLASPPEEAEEGQELEQDQLDALYKKAQSFDFSTPEAEPANTFAMTLRPYQKQSLYWMLAKEKNQRTEDRETSMHPLWEDSQSCITGKTIQMLSLIHSHRSEVAIKAREAGPTSVNNLPRLPTVSGQKTTIDAPCTTLVVAPMSLLAQWQSEAENASKEGTFKTMMYYGAEKNVDLVTMCCEANAANAPDVIITSYGVVLSEFTQLATKNGDRLSSRGLFSLNFFRVILDEAHNIKNRQAKTSRACYEIAAEHRWVLTGTPIVNRLEDLFSLVRFLRVEPWNNFSFWRTFITVPFESKNFVRALDVVQTVLEPLVMRRTKDMKTPDGQFLVPLPPKHIEIVDIELSEPERAVYDYVFNRAKRTLFDNMQAGTVMKAFTSIFAQILRLRQSCCHPVLVRNQEILADEEEANMAADVAAGLADDMDLQTLIERFTATTDDASKTNNNFGAHVLRQIRDEAVNECPICAEEPMIDQAVTGCWHSACKKCLLDYIKHQTDRNEVPRCFQCREHINIRDIFEVIRHDDDLETSSTPGASPEPRISLQRVGANDSSAKIVALISHLRTLRQEHPKMKSLVISQFTSFLSLISSALTRHKISFLRLDGSMSQKARAAVLTEFQSTNKFCVLLLSLKAGGVGLNLTSAKRVYMMDPWWSFAVEAQAIDRVHRMGQEDEVRVYRFIVKQSVEMRMLRVQERKKFIATSLGMMSDEEKKMQRIEDIKELLSSD

SEQ ID NO: 8657 - protein, 1173 aa, Neurospora crassa
MASRRQLSEPFAYDSLSDEDLDLINSQATDEGISMSSSQQDLSFASSRGSNGTPKGKNNNNNKNTSSPRIFSGDADVVDLTASSPTTPSHPSSDKREQFHGGGMTVHGLGQNHASTPIPKFGQPTQLVSQFTPVNTNNNTKNAASHHGNGSRGGTSSHAIGGSKYNNLFNDRGKNRPEFHKDLYRSSGPLKANAPSKPEIKRNSMGMQLFSSLDVDPAPAPSPLQPGRGTASRGTAAAFGENVFYTDPDKAKEDLKALLEGGLEDEESEDEGAKAKTKGAVSESKKKEESIVSSTGHLPGLAVPLLPHQVEGVRWMINRELGPLKRGRVPKGGLLADDMGWKAHFKDISKATLVVAPLALIRQWEAELKDRVMPDLNIKVCVHHGPKRSTVPAELAKYDVVITTYQILVSEHDKSHPDPNKGAQAGCFGVHWFRVILDEAHSIKNRNTKAAKACCALRSEYRWCLTGTPMQNNLDELQSLIHFLRIAPYDNLTEWRAQIDTPMKQGKGHIAIQRLHSILRCFMKRRTKEVLTEKGALVAGGKEALAKAEENGEKAPEAAFKVTERKVVTIETEFSPAESAFYKALEERADQSLEKMMKGRTVNYANALVLLLRLRQACNHPRLAQTKLDKDRDALAVDSATAPTAGGKKKKNAYDSQSQTSSVDDLADMMGGMGIQARQCDMCLGEMTKKEIQEGQLRCQGCEDSLSQLMKEQESTQESVESKESKKHKKKKVSVVKEKVKVERKTRGRGRKVVVDSDDEEEGGEWEDEEETPKKDKKSRDNRKRVVDSDDEEDEGTWLVGESQRSALDLGVAGGTDDENAEGTGEDIDSNEEISEDSEDPEEDSFVVKDSDDDDDDDDESVNSDEIVGSGDEDDTFASVSKLSSQVVKQSESEESETAASSSEDSAISDSELEHSSETDSEAEYGTKRSPKGPVQISSKIHELIAILRREAPTHKFIVFSQFTSMLDLVEPFLRHHLPDIKHVRYDGKMSNDAREASLHSLRKDPRTRILLCSLKCGSLGLNLTAATRVIIVEPFWNPFVEEQAIDRVHRLTQTVDVVVYKLTVRGTVEARILELQEKKRLLAQTAVEGSTERGGNKKKKGQGLKLGLQEILDLFKHDGSRAIHGADNGESGYGEENAAAAAAGRTPVRRTAGAAANHTGTRREHEVFGRRW

SEQ ID NO: 8658 - protein, 1139 aa, Neurospora crassa
MEQLSDSHPEDGGTRAYSAPARPNMSTDTRSTGEIRQQWLLSRGDEIKAEDPEDFIQSVRNRVFFGIRNTAKDTTVKQEDVASLDVNNIMPVHQQKARKNDIVNSAVGVGDDDDDDCMIIDEADVPEHVRMKANSKPFSTQVRVAPDVTGLEGKKVTVKVEEYDNGIDDHDNDNGAVSGDNLFVSQHSDRDGETDEFMMDEYAQLSDGSIASERRRRHGRRPIAGGKDGSKRSPKKRPKSGREVQHIDNEYEGDDDDDIEEMEYELQILVAEQNLLERRSAKGKLTPRCEMRLEEVDRKIESIRRRLGASVEPPSVDGDRDRDTPRNSRVLTSDTNKKRKGAYAEPGKARAKKPKPEPKMTAHKKKKQKEKAMQMITSMLGGEDPVIARNHMRILATFDHLPEEAKTVEGMEKHIRDVIEADDMLTPQEKKRIAGDLKQLKEARVAFGKKNYKQDGGTWKITGLKSRLHHYQFAGAGWMVNRERSGDVPGGFQCDDTGLGKTVMTLACIAGNPPWDRDEDPTRGGTLIVVPASAVSQWMEEIGKHTSRMTFDQYHSTRQHRMRQGSMNRMDIVVSSYQEVVKGFPSERSQESLLQKGLSLPEVSERMKEREGELFKVKWFRVILDECHAIKNHNTQTARACLALQGEYKWLLSATPLQNGLSELYPFLRFLKVPNIDSFRHFRKKYELQKPQQARGLPADLSALLSEIVLKRDITTVFLGRALFKIPITHPDLELWVNFSREETLIYRMVEGKFRKELNDKFMQRASMDTTADKFIKSYLTLALRLRQATAHPYLLESLMRDHFTPDDIQKLKDELCKLKTNQRYVQQIGRWCDGLVQQGVLRRQPYAGDDHDKFGEGDYGEEFDIAPQLESMQKAKMDMQSRAEICSPMGDPKNATFLAEADRKHTVNMTPSAKTTRLKDIILEWQKDAPDDKIIVFTHWILLGRILGRVLQQEKIDFLYLFGGMGPTVREDQIKAFQTNPRIKVLVSSLRVGGQSLNLAAANRVVILDAWWNNGMEKQAFGRVFRFGQKKESWFTRILAKNTIDKRIIDLQEDKLKAISKAIQTNDNTKHKLTDEEVGSLFGRTRRRTDGTLVIESDYEDDESDKGDEDQDATSGGEGESGNDSDSDSGSDSDDSDW

SEQ ID NO: 8659 - protein, 1111 aa, Neurospora crassa
MSWNPEALLNPKAASSAASSTSDLTSQSGASPSFQQPSFAHQIQSVPSSPTFQFTSPNDQTLNIDFSGLPYGATLHGHVRNTPTFPIFQNGFGSQVERLHNVTDRISVPQPKRRKTYNENDHLRTNTFGGTSSGLLADQFGQNGTPGASTPVAMMTRQTETVDLTEGDSETAQPRQQLDLTKDEEVCYGMIEGTTINCHRVPAPKPGMVSLLGDGYWPQIKILLRKRVDDTETNRIPAYDCTRVVFGYLDAKTSYCLGNLLTSAMGIRTDCRIPPRRKSGPNEKIGESISAAVPFELMLYGPRKLAIQIGNHLARHHLALLSPPRVEPGIKVFNPHAKENRPAPPVRANSLGGTNSYSLHHSATVRTVEEIRSEVMSVFDSLPKSESLEQMEPDPRITTELLKHQKQALYFMTEREKDLIQDYGDKLTRSTWQRRKDPRGVDFYYNVVTMQNQRERPPPALGGILADMMGLGKTLSILSLITKTMDQAAAWSLEAPVQPPKPPEKKQPNAARYFEVPKPQAMGLTPVRLNGKATLLVCPLSTVTNWEEQIKQHIKPDTLSYHIYHGPNRVKDVKKLAQYDLVITTYGSISSELNARAKNKAGIYPLEEIAWFRIVLDEAHMIREQNTLAFKSICRLQASRRWAVTGTPIQNKLEDLASLLAFLRVKPFDEKIKFLQYIIAPFKNADPEIVPKLRVLIDTITLRRLKDKINLPPRTDEIIRLDFTPEEQRVYDWFAKTAKERVSVLTGQAIGQERIIGGKTMIHILRSILQLRLICAHGKDLLNEEDLKELQGMTADTAIDIDSDDDSGQLVLSESKAYEMLYLMQEGNSDNCARCNTKLGSNEVVDVESERQEDIIGYMVKANCYHVYCNKCVDHIKNEACPTCSGMTRPGCIELHRARAMAEHESRTAKVENGDANQDLTAYSGPHTKTRALVAELLADKQKSEAAPHEPPYKSVVFSGWTSHLDLIELALEDAGITFTRLDGKMTRTARTAAMDKFREDPSVQVILVSIMAGGLGLNLTTASSVYVMEPQFNPAAEAQAVDRVHRLGQKRPVRTVRYIMANSFEEKMLRLQEKKKKLASLSMDGRDKGQVMDRTDAAKQRLMDLRSLFK

SEQ ID NO: 8660 - protein, 405 aa, Neurospora crassa
MSGALHVTIFHGEQKPRGYETLMDTDLVLTTYSTLASDYKRSGLLHRMEWYRVVLDEGTPIQNKLEDLSSLADFLRLPPYLAKNAFRKHVLEPLSGGGRCNSEPLRAYLRSYCLRRTDKCLDVPPSTSKIIYLALSDQEQWTYDAILSRTKWLLDDIVSGKDTGTLKLYNVLFTAILKMRMMCNHGTLNPLWASADYLTPQHGEVDTSCERCSSLENDVDFGDIQFCPNCRRPLQPGSHFVNAGESPDPTGLLGDAIADTIDINSSLQTDLFSTKLKAVRKQVLEAGTGTKHISERTRLIRTFQGDPQAFILIMSVGTGAVGLNLTAASHVHVVEPHWNPSVEAQAIARAVRMGQTKNVLVTRYIMKRTVEDTKKQTLAKLTFDTGDGVNDNLEDFKAVLGVKLD

SEQ ID NO: 8661 - protein, 1541 aa, Neurospora crassa
MPPKKKSQGQSRQPRSDWEANPENVAAFVDHVRSVGLDPAVSTTDAEQDIEVRPAKRPKLSRGVFKPSDAVCIDEHTVALPVRDTAAIPKHFSLNKQNIGDYVDVWVVNAKPDRRDPERGAWYLHLAPSKNSRRANKNKNAHICYALKTRAISSKLALMARVAKTQSFDPGSPGYLWTAVDIAIRQEGASVKIDVTLRLMWNTSTDVYQSKVQQGLKTQVLMAYHPNLLVSAQETIAWTPQHFYEAAHTPTPRISDGHLATAKVPSLETDLYPFQRRAVKWLLHREGVEWSGLPQPDGQPLVQPSKSGASSLLPAFFHQVKQLDGETFYISPLFGIVVKDITKLPSNDMVKGGLGKTVEVIALTLLHKRPPGPTVAYDAFLGRELQTTGATLIITPLPLLDQWLSELNRHAPTLKVVYYPGLKKAAKMKGVDLSSTQLAQQDVVITTYEVLRTEIWSAVDHPERSMRGKKQYERQTSPLVELGWWRVCIDEAQMVENWNSNTAVLARRIPRVHAWAITGTPVKDDIQKDLRGLLNFLRVEPYASDKEAWRALMSDKARFKSLFGSITMRHTKSMVRSEISIPSQKRHVITMPFSAVEEQHYRTVFRELVNNCGLDVEGNPIQEDWDPEDPFTQQGMRTALDQLRQLTLHPEVGNRNRKALGKRSGRPMRTVAEVLDAMLEQSDGAIRSDQRSLLLMQLKRGQILAGMDRVQDALTIWEDVRAKSVEMVAECRKQLEAELAKDPVVPSGAKEDSESDDDEDISSGLKDARRRLRFVLEIQHMAVFLCANGYYSSKTDDKLTVPDSDEFKRLDKLESEGYDLAKAIRKEILQESYGKARKLMDKLEECRQKQDFAVIPAVDIPEESGVECSHIIIALEGIYEALDRQADKLDEWREHVIQLLLKPLVDEDNTDVEATGQEYEESTKLQDEILAYVQVLKAAIADRQAVISGQQNGLVEHEVGVVLKMARDDMEVEAGHKPPESAKRILELFALRESVKPKFKEGDGHTSLRGIISKLRAVMTDLRHQEASGSKRARLELALAERLLKSTQAQHTDQGKAATAMEQEVENFTDILNARLDFYRQLQQVSDSVEEYTGATDEQALQRAIDEEERLKTKVATAESKHRYLLHLKQADASSDEERMCVICQSPFSIGVLTVCGHQFCKECITMWFTTHHNCPVCKRPLHRSNLHNITYKPQELKVHSEGHNTRDSNKQLAPRDQQPTSPSKSKKHTSIYTEFNPSKLAEIQNIDLENGPHYTTKVDTLLRHLLWLRQSDPGAKSIVFSQYQDFLHVLAQAFERYHIGYSSFYRSAVSSVASFREDPSIEVFLLHARAHASGLNLVNASHVFLCEPLLNTALELQAIARVDRIGQKQETTVWLYIVDGTVEQNVYELSVKRRLEHMERRATVVGGTADASSSSSTNTKTREEARDKEKESETLEDISLDAANAQEMQQAHLSKLMGKGSDGVVGEAVDQNDLWTCLFGGVKSGGRTPTTAESGGGVDGNNNEEAERSLVENPVTRGFLAGEAAEGRNRMRRDGDEAPN

SEQ ID NO: 8662 - protein, 800 aa, Podospora anserina
MIPNTPAANKENVGAPRSKFPTPQSLDRLRTPFKCPGSATRTVATDRPARKKRRIDYKGTDGDVDPDADKPYTNADRLALANRDANKFPVFQPKDKTTVFRKAFSVPLLNKDSAAYNPNRPPPTLGLRQGAVFVAKPLHDPSGEFAIVLYDPTVDDKPKDAPKPEEKVEEEKIVEPLEHKSLAEILGIKKKVVGEHPRVPVVIDPKLAKILRPHQIEGVKFMYKCVTGMVDEKAHGCIMADEMGLGKTLQCITLLWTLLKQSPDAGKTTIQKAIVACPASLVRNWANELVKWLGPDATTPFAIDGKASKEELTRQLRQWAIATGRAVTRPIIIVSYETLRLNCEELRNTEIGLILCDEGHRLKNNDNKLFTALNGLNVKRRVILSGTPIQNDLSEYFSLISFANPDLLGTHLEFRKRFEIPILRGRDSMASEAERKRGDECLAELATIVNKFVIRRTNDLLSKYLPIKYEHVVFCNLAPFQLDLYNYFLTSPDIQALLRGKGSQPLKAIGILKNLCNHPDLLKLPDDLPGSEQHYPDDYVPRDSRGRDRDIKPWYSGKMQVLDRMLARIRADTNDKIVLISNYTQTLDLFEKLCRSRAYPCLRLDGKMLVNKRQKLVDKFNDPNGDEFVFLLSSKAGGCGLNLIGANRLVLFDPDWNPAADQQALARVWRDGQKKDCFVYRFIATGTIEEKIFQRQSHKQSLSSCVVDSAEDVERHFSLDSLRELFQYRPDTKSDTHDTFKCKRCKPDGKQFIKAPAMLYGDTSTWNHFVNEGLKGIQDLLLRQEMGEREVSAVFQYISH

SEQ ID NO: 8663 - protein, 1252 aa, Leishmania major
MADDLASLQQRFGVFQDEEEMRMDVAARVVAQSSREALEDEERLKKSWRELEKAEHAVGKLQLELSEAQLAAAQESSGLLGDAQRNKSSGPATPSPRRVSDIRFQLNAAERELKRADAAVQKLQKEVDQRQAARLAEAKRLEQEDEAERAAADVTRVVRANSTTGRPVPLASSSSTIPPRANTSVNGGALAGGSLSASSPTVMTTTRVLYRAPTHLKGITQSDYSGGEVLPSLSRVQVTRADIRSKQRRYQDDSEMQRYVERVTKRQRLEAVAKEQRRLVALGTDGDAPSQSLSSSIEKLAETRVKAEGEQDGHAHQVKQEPGGDDVAGALTPAAAAAAKARAATKEAEGGERTRRLPRAGVKVETEEEEGAHDVIDVDALMEADDDAAVAAVVSRASTQLTGGYTQRSGKATPSTSLSSQQQQQQRERAGSASSTTVSASEEVVWEMEEATLLPGVRMDAAIYNRLLDYQQEGLLWLLTLHSRRTGGILGDEMGLGKTIQVAVMINALHHSGMLRGPVLIAAPMTVLRQWLAELHRWAPYVRSCVMHESSGSDTTRDSLLQSVQGTPAVVITTYAAMRVHCGLLHRTGFQYVILDEGHKISNPEAGATLAAKSFTTPHRLILSGSPIQNSLKELWCLFDFVRPGLLGTMSRFIDEFETPIAQSRNARASPLSLATAVECAKALQAHIAPYMLRRLKRQVNTSLPPKYERVLRVPLADKQLDQYLQVLSSPAVQRLFAQTAMFGSRNGGLDRDGRDSTGSLHVAGLRANMASRRHSSGVRLESFRLMNQLRQICNHADIYAVQQGADEEDRMMLARRGAAAKLSAISATRPGQHRSFRSNNPVDLLGSGKLNALLMMLKEWQSFGHRVLVFSQTRIMLDIIENMCEQQAYSYIRMDGATNSHYRQELMDRFNEDDSIFVALLTTRVGGIGVNLIGADRVVIYDPDWNPITDVQARERAWRIGQKREVCVYRLITSGSVEESILRRQLAKMYVTDKVLKDPELQRFFDVQDGFMESFLLGSEYANRVPVDKRYLLAAHHLNSVSAGNRDRARGRDRHAALGEYGNAVPGVDDDDDTDTDMSEGNMGVAGSKEEQPRKERDFGMLVPLKNEDGIDEVGADPDDTGGAEEDGSPVGIPGMGDRNKKTSKGKEVWRETQMLQKLVDCQDVSVAGHDRVAHHLARKKAEDMMRRVSSSALTTEAMREQQRQYSLLQAIGEKKAKDAADREEKARYYREEIAAAAAAAAAASQKRRHE

SEQ ID NO: 8664 - protein, 925 aa, Leishmania major
MEHDDLLDDLLSWTPSAPRGNVAKSSSCITTAATTSSSSTSPHVVSRQPRAGSLQETCVNTAAATTKAGNVSASHCHRNASDADDEQSAPCTASVSAETSPPPPPTSGPPFSLPPDVDARLYPHQRAGVQWLYSRHCKSRACLLADEMGLGKTVQVAAFLGQLYARQMIKTTILVVPPTLVPIWTAAFAEWGGASLSRVVEVIHNEPRKKRQARWRKLRYGLPCVLVTTYGVLRQDAADVSVTLVDYVVLDEAHLIKDPNTCVFKSALTLAARHKIALTGTPLMNTFDDMWSIFRFLDGSILDMDKSDFNAISATLLRGNERDASAAQREAASSELAKLQAAIRPFMLRREKKDVAAQVLSSSKEDVVVWVRLTDVQRQLYAAFLDSKEVASAREGAADVDLTEGTADEDGVGMQKSCLGGGGSSAAAAVSTNPLLLLTMLSQICSHPWLSLLDEAFAAALARNPYKAPVAEMGDIFSGAKLWVALQLLLHCVSEQRKTLVFSRSRRILRLLSFLLQEWRLTHTQVDGDTPSERRCAEVDRFNNDAGVWVCLLTTQVGGVGLTFNAASAVVLLDPSWNPSADAQAVDRVHRIGQRRDVVVFRLVTCDTVEEKVYRNQIFKRMAALQSMKGDGGSSGGEGRRPPTADAGGELYRYFTRVQLRNMFSMDDGAQRSTAEQLEVLHPGRVRAQLREELRRIDGVYDVSDNACVLTEPVDADAAGRDEAQLTHSPSASPERTWRAGSVSPPPSQASLSQQALTRVRSRSDGAGGDDDAPRRRRVDVEDTLATAHAATVGCGASADPGEALDVAARMTMLATSPVAVLRGTQHLSNSPSPSLLPVSCTTTTTALNQLEGSASASLAAPRPTEVTAGDDAEMVSSPFPLLGDSLEHANDAISAAAAAAAAVARGRASDDCSSADFASCRSSF

SEQ ID NO: 8665 - protein, 1422 aa, Plasmodium falciparum
MFVTISKVVMMLTRKRKTTWGSVHMDENTENYDKESNGFVHRDFNNGINKEDKDYEELDLKKLNVSSNDITKEGNNMNENMMNRKLNSSVEDGNDNNHDKNVHRNIGNDTHVSYDDKRKSYLDNNEENSEQMNDNMKKRKLNEISYDNNEEDEFRNKKDDSMEMNDKEKGSTNMSTINDNNNNHNDDSNNHNDDSNNHNDDSNNHNDDSNNHNDDNNNHNEDNNNHNDDNNNHNDDNNYNSEEKPNYLQEKLEQLLAQTKRYTEKLAGQRLKMNAQMKSSKKGRCLLTEKEEDFMLLKDANEEDEAIILKQPMNINGTMKPYQLEGLNWLYQLYRFKINGILADEMGLGKTLQTISLLCYLRFNKNIKKKSIIICPRSTLDNWYEEIKKWCTPMKAFKYYGNKDQRKELNRNLLHSDFDVLLTTYEIVIKDKSALYDIDWFFLVIDEAHRIKNEKSVLSSSVRFLRSENRLLITGTPLHNNLKELWSLLNFLMPKIFDNSEEFDNLFNISKISTNDNKQSEIITQLHTILKPFMLRRLKVEVEQSLPPKREIYIFVGMSKLQKKLYSDILSKNIDVLNAMTGSKNQMLNILMQLRKCCNHPYLFDGIEEPPYIEGNHLIETSGKMSLLDKLLPRLKKENSRVLLFSQMTRLLDIIDDYCRWKNYPYLRIDGSTPGDERQVRINQFNEPNSKYFIFLLSTRAGGIGINLTTADIVILFDSDYNPQMDIQAMDRAHRIGQKKRVIVYRFVTQNSVEEKIVERAAKKLKLDSLIIQKGKLNLNSAKENNKQELHDILNFGAPEVYKTQDISSISDEDIDIILADAEKRTIEIEKKLKNLENIFDLTNISLDGGLNMYNDLEKEASEESTDEEDSSGSGEETILEGSGNNDIVEENGVKKKKKKKKNINKIRRTIKKFLKNNKKNMTFLDLGERKSKWKVMNTACGRTNKKKMVLHGWRAEARGGHDFQFFNVEKLDELEKIEDKWNNYMINQEKINVLIEAQNEEKDYEKIVTFNEFLDKHAKNIYQIITLINPSLFDEHKDTKEEELLKMGTHSDVNSNDKDYKRSSFMSTDYNMKTTYLNNINSNNNNNNNINDNVGTSINTIDDQQYFKKKILSLFESGKKLQMIKFKDRNIKNCYTQVANFIKKNFPEKINNNDTNNNKSTTLKNKKLKKGKQTKNVNVEKDIASVDIEKIKLQKQELMKQGFAKWNKAEFNKLMSGLIIYGTNEVEYIYEKYFSNSKKSMEDIKAYLTVFFRKYDQIKGGVRLFDKIKRSDLQKKIIEEENDMITEFVEKQLSEGVDSIEKLQLPSNLRYDFMEKREVLNITEEVKTENEENVLSNEELAYYDRENKILLWLLYQQGVVQIKNIHILTPYYWPEAYNFFKYATTPFENVEYRCRLIVDAIAELYAKKENVPLNNKDKRRI

SEQ ID NO: 8666 - protein, 2110 aa, Plasmodium falciparum
MNEIKSESLLQTRPFKLGIEDIQNLGSSYFIENNEKLKKYNNEISSLKKELDILNEKMGKCTTTTKIVEPAKTPEFTFWYYELKEMKGFQDLVMYEVKKKKKHFKVLSHSCLKYLSNREKMKIKKQEEEEKRLKLYSKNISSYMDVFWKKIEKLVWEEKKRELQQTLNKKKEMRFKKFVKEAIKKIKDARHNNAHELFENKYVSMSSNNNSEIVNNNASSVDNGDKELKEDDLTDQEEEDYLLDEQMSSTDESENKEEEINMLDDEANLPIEELLKRMYGFKSGEDYINFMENEDDANEENVIETSHNDEKSGDNSIGEDDNNNDEKGGDNNIDEDDNNNDEKSGDNSIGEDDNNNDHKSGDNNIDEDDNNNDHKSEDNSIGEDDNNNDEKGGDNNIDENDNNSDHKSEDNNIDENDNNSDHQSDQEQFNHETKDDIIKNSSYEHIDNKNYYNKTGEDYKSDKENYSPTRFHNKLKKEKYDEYDTKLKIEKREEENKNYEKDEHEYESDNYDKEKINKKKELILLKNDIENDSDETSEHIKRDSRSSCQKQNCEKKRRIIKDEYNLRRTKIAKSKPSSDNNNSENDNNNDNNNDNNNDNNDDNNDDNNDDNNDDNNDDNNDDNNDDNNNEHKNDSDDNDDILTCNMDEKHLTKIPPIIKATLRDYQHAGLHWLLYLYKNNINGILADEMGLGKTLQCISLLSYLAYYFNIWGPHLVIVPTSILINWEIELKRFCPCFKILSYYGNQNERYKKRVGWFNKDSFHICISSYSTVVKDHLVFKRKRWKYIILDEAHNIKNFNTKRWNIILSLKRDNCLLITGTPLQNSLEELWSLLHFLMPNIFTSHLDFKEWFSDPLNLAIEKSKIHHSKELIDRLHTVIRPYILRRLKKNVEKEMPNKYEHIIKCKLTRRQQILYDEFINNKNVQNTLNTGNYIGLMNILIQLRKVCNHCDLFTNKYIQTPYYYMLSIRYFVPRFFILFEKNYYADFYLILFLHNEFTSLGGRDVTKETSPSSKSFDLAHILTKHNTNELYDNNHISELYDNNHISELYDNNHISELYDNNHISELYDNPMSHKNYKHNSNGYTYPNDPINNMNNNPSGFTKTSEQFGQIVSHERDNNYHMMDHNNMNNLLSKEMVNSLRNDDNSNNNFYKYSLTSNNNDSQTSIHDNKQCDYNKLCADTFNNINSIGNEEKRSLNVLNEQNNNNSKDNNNNIDNNNNIDNNNNIDNNNNIDNNNNIDNNNNNIDNNNNIDNHHNNNQHCNYNDNWPSDYPTNIINHRNAFLSILKLLNQSNPLNNDNNNNNNNNNGNNNIYNMNRYNSRNSRNSSLSNIFSSNTSKMNSFQLDFLYTNSFINQDALCKNSFFVNINIEDVHSYIYNSIYKEYIPKNILSFSDEFLTELNNNYDILSLYIDPYNRYKSYNEYLYKMKEEGTLTNQQSLGDINNKHIYHKSTSNENTHMKNRKTFIYKYNNMFKVINNDTQYQNIFTDDTNNSYYNSLEHNLWIKRNQIDERKKEEEEEQNKYYNVCMNNLYILRNERIPIFGKNFLDLIKKEFTKDKNIVYNYTNNVPIDYYSSVKEVWVEDICEKDNKKRKCKREKRWYKKIKKTNNPPEDSEVYRENSSDVEKYNCDVEKDNCDDEEKDNCDDEDMNSNLSSNVYGCIDISSQNFIHSRYHNPMMNMSYIIEFLFPNMEQFLKRHEKMIHNFTLINNPSVICKSHDIRINNNLLNYSNDKMNPIILQIKNATRVYHDAFLKQSIIFPLNKDISLGSGKLCALEKLLSKCKREGNKCLLFTQFIKMLDILEIFLNHLNYSFIRLDGSTKVEQRQKIVTKFNNDKSIFIFISSTRSGSIGINLTAANVVIFYDTDWNPSIDKQAMDRCHRIGQTKDVHVFRFVCEYTVEENIWKKQLQKRKLDNICINMGNFNNSNTHSKITDTDPTHNKDWFTNVDTIKEVFINKKNNDDDDDMYKDRLLHEQVENKDKMNVRFEKTLEHVEDKDDIRALNETKKETQNEISQNMQVSTNKKNIYIYINILYLNVNFFNKHPLGEFTTRNDFQDSYNLTSYCFNFLNENLTDSLKQQIDEMRMKIEIEMMNTGDENMSLSDLSNKSHNSE

SEQ ID NO: 8667 - protein, 1239 aa, Plasmodium falciparum
MRKYNGNVKRSRDDEYEENENVNGERTSITLVRATLLPILSIGKNEKTTLFHPFKNPLPGFVSDKTLYLKKTLGVKVRRTGWINLMKNSIPRRSDETEEQEKIEEVIKKHEPLILYKDENDKIEVDPILAQYLREHQREGVQFVFECLMNIKDDKISGCILADDMGLGKTLQSITVLYTLLKQGFHKKCAVRRCLILCPASLINNWNDEISKWIPNRCNVTCVNDNAKEKIVSKLEGFKYDIQSTVLICSYECFRINNEFLDKSSIDMIICDEAHRLKNDKTKTYTSIYNLTAKKRLLLSGTPIQNDLGEFYALISLCNPDLFDDINLFRKKFANPILIGRDKDATEKEQEIASERLTELSNITNKFILRRTNNLLSKVLPVKYLINIFIKLNPIQEALYVLFLKDKKILKNDNTNNKVNVLINIKKLEKICNHPLLLNVNDIKEIGQVTLWKLIEDVIFEMQTNMKICNRGNKRDNKNDSKSGCVLKVDKSMSSISNNNMKNGNDMNNTNNNTNNNTNNNTNNNTNNNINSNINNNINNNINSNINNNINSNMNNNTNLRCGSRGNQNDASGYVGNKRKPIELDYNKPVKRIIEECKRDIYRSYYNFSCKFLLLHFLLKNIKQNTNDKVVIVSNYTQTLDYMEILCKENMYKFVRLDGGINIKKRHKVINDFTHSADIFIFLLSSKSGGCGINLISSNRLILLDPDWNPANDKQALARVWREGQKKICYIYRLFCTGTIDEKVYQRQISKDGLSNMIVTTTNLSKDQMSDENVKKLFNYKMNTVSETHDNIECNRCNLNGVSPNIHKVAHVDSINKNKSKGKNDNNNNNNNNNSNSNGNGNNYKSDDDKNYIDGEHFAEQLEDFEEDDVNTWAHHQNIDTVPDNILIKAVKDAEEYKKNDMNSMPLLQKLTHDFVTFTMSCKIEYRDDLIKQKSEQAKMREKGASQTNGKSMKEMKLESQDGKKGKGHKNGKREEDEDEDEFDGDEEDNDEEDEFDDDDDEEEEENDDDNDEEDEFVDEEEDDRDESNESDDDVQEVGVHSGLDKIKNKKMENIIESDRDEPSDACRKKLNELVQYQRERKKREEEFLNKKREPLSDDDKEKVVCLKEEKSNIKGNIKSNTNNNTNNNTNNITNNITNNNINGSASTSTRHDNNIENNNMKKEEEANYGNNSHNKNKNEEKIKNGKDEPSKRITRNMSHRSLVELLSQDEDSKESLTMSEDIEEMSAENVSTDSSYFI

SEQ ID NO: 8668 - protein, 2719 aa, Plasmodium falciparum
MRIRKTWCTLCRENFEEGDECIQCKQCKKKFHRECLQAEGLMDNEQLKDIKNYVCYQCINEDDDIPENEDRCKICREKSANLILLLCDGCPNSYHVSCLGLAAEPESEKWYCPICKPDDHKNLDVRRMRKGFVLDNMNGEHVNSSTCYVCQRPGKLLGCDFCPNSFHPTCLPDLDFDNISDQWECPCCKNEDPLLNQGHKRWTKNEIQEIMKKRQRELGFWRSKIIKYRNRFLLAHRKDLQPFVNPRVFSNLTKTFKNDYFHTKGSSNNKKSNKYDNDKYNSKKDVDMDSKEFNEFISSLEDEAHQNACKFIESVFLSVYYPNGRKIERRPLVDNVQLKPHQEDGVEWLLKSFLTGGAILADEMGLGKTIQTLCFLSYLKCNKIDGPHLIVVPLSTVGNWLREIHRFTPHLTCIKICGSKNERTHAKEDRLAEKGLYDLYVTTYETVKNEEEFFVETIPKWQCIVLDEAHRIKNQSGAIRHSMDRVVGNMRLLLTGTPLQNNSAELFTLINFMFPDIFKNSEIIEQAFMNASQNNKNKSNNNNNNNNKDEKNNNNDDDDDGGGGGGGANTSGNNTSKVNVNIGNIDLKSAIKEEDLKSIRCLLDKIMLRRLKEQAITLPKKIFHDVWLPLGTLSAHWYKRLLDIRSMVEEKVSVKKLLGLVIKMRIICGHPKGIVSRPSQMEKLFAFFEEESEDIKEQVKNDALKLKNISGEEHIESSSKLIFIDKLLCQLHYENCKYVKNYASSYEKHKKEVAAYNYHKIQEQTNAQKKKREHSGKFKKIEALENSPLFMEIYNKGKFDLKPTSQKEDMLKSFMHSVPVDNECPYKKKRCIYDKVKEYVKNNSNIKHKGRARLISDNNKNNKNDDNSDDEDDDEEEDEVNYYNKRKDKKKKVISDDDDDDDDDENSNDDNKSEDNNNDDNNNDDNKDITKNDNNGNFSDNNNNNNNINDDQNDDNIFSLHDSSKINNNIKEFLKSEKMEMSNNTDKINEDSTVGVTDKGDNKLDDFDMLKREEKEKNDAYMKEEGEEYDEEDVITHKNGTQLNIDNNNNNNNNINNVTDLKLQTDEKKVVINIKNEMNDNDENGEKLGEAKMHKVLIFTQFQLVLDELEEYCKYRCWKYMRLDGSTNKLIRELDIREFNLSDSIYFIYLISTRAGGLGINLTAANHVIMYDEDWNPFIDLQAIDRAHRIGQKREVNVWKLMTEWTVEERMAFRREQKLKLDKLVVQTQDDEDMLDNFEEKLSSDEIRKLMLHGKAAIQNMDVESTNNFPLEFFIERGRQKLPIINGVDLEREEKCAIEEEINKKDDGDDILVSKNDEDDDDDDDNSVDAKYNNNNDDDNAIDIDEVMMDEAEELESRNNNTNNNNNNNDGTGGSGEMINGQFSSSNNQNNNNNNNNNNDISLWRSVRERKKPQILYTPEYWGRKQEVKQIKHEYRCFICNNTKNHKAIVKDRNGNDIEIDYGDMINCFRCPKTYHKLCEGIKDENVKKTWTCSWHECCLCFRKSSQCGNLLIHCATCPTSFCYNCFPPDYVRYYVGEEYYHNLRQRGVNFTPQNWVCFLCSKCKAVEEQKKRRKMTKEERENEKQLQKELRSQLHDSKQEELEAKKRKRAQQLERDKFIIENRKRIDALDQQYEDQLRKAYENVFPNNFVKELVNRIEHAKMLKQKGIVEDNNNNNNNNKETNKKKSTTFLHTKLPSKLLVLCENCKLPCHANYKYPGKCCYPPELDKSYYMSNTSFSQMGRDGFEKRVSEGKNDSCSSHIHFKDKVGEDSNNMKNITNIVDGNKIMNSSPHKGGTKCEPNEGSTTPSRNDGIKKDLMVTSTINNNNSNNNNNSNNNNNNNNSYNFNENKENSSSTNKLMSNKGIEYNKNDDEDYNNNESKDKIMKGVGTTFLSDGSMRFEKDSPENNMNENNNMNNNNNNEKDSPQNNNDNTSKSKTRKFLRAVCSKCGTVQLGKLAHFRKHCDKLTEEEKKEYDEKREKLKELINLLNKKKIKEEHTEEEYKNMSVFKFKSLYSNYQDKADDILEDCIRSMKWDILIADKKKIIKKEKEKENKKIYSKNDDDNNNNNNNNNKKNNNITSMSLKAKLTHFLSNQPLTISSDYSDTKDIIEIRSDLTDDMKEKINDELCTISGKRKKCIVKNIKKVKKKKGNDDNDENNNNSNNNVDGDKKNNNKSNTSSKKKDDKDLKKLNLLINPFHEKLIKDTHNANFIRDSFNEDFLNKAKEFLRVTKSNLINNGNNNNNNKNKKSSSNSKNINKNSSNTKNSSNTKSSSNTKSSSNTKNKNNKNNHNNSFLESATTAEDFLRGITTGNNNIFNLVSSSNSPYDKNKKLKDDEFEKSIIQNYLNKMKNSLKNSSHLDKNTIKEKLKELNYVNSRSNSNTKNNMNTNIINNNNNNNNNQHTISAQENSLRFAKEIFKNGAFDKNGNFKLYANKGNLCNTNKDIVHLLKSNEQIENMNKNSGYSINDFNLDIFNIDKNIKCEDLEKKLLNLCASTNLMNKKNIQHDNNKKEDNKNYMLDSKNKNKQFLFKKDNTQQQEAFLSNISKAKKESSNSRKRVVEDVNVDYDIKKITNTSENSGPNKVQEYILYRRNTSSVMSNVINNNDKSKNVRNDDEDDDDDEDDDEEDDEDKNESSNYNNNKKKKTNTSSRNSSNNNSSNKNKNNKSGNDIHQASNLLYQNLLNNPQSLLQHLNLEDVKNFLKAADRSNNDNLPEIN

SEQ ID NO: 8669 - protein, 1235 aa, Plasmodium falciparum
MDVFEFVDPLRKRKINNNILDFNKYVYKDKMEVGEEEIEHDEEKTKDDEIINMKKKKKKKKKKKLRRLLDSSSSDDNNENEEISSKKIKIRKLNSDNEDNKLKNNNNEKKKKEKVEDEKQSNDIEILDSYDEDDENQKAEYEYNLNTLYQCLYISIQIKNRIIDHFTSEKKDKKEELIKEFVKGSFRVSNFQANYEDFEKYVDTFHKLKCYQKCGVLWLYVLYKQNKNGILADEMGLGKTAQTCVFLDYMYKTGTIKNKTIIVAPTSLLKNWDNEINMWCPYLRNHKIIYYGSQSERRYLAYDIFSSKGSKNNKYFPSNNNDDEDDGVNNNNNNNNNDDGHNNIHLIITSINMLMGKNDVSYFRQIKKYDYLIFDEAHFLKNKNSLIYKKLQKKIVFNNKILLTGSPIQNKTQELTNLLLFLMPHIFTETNINNAMQAFIAMYEEEVQTRNKKKKMDEGTTPKLTTFVEEIMKKNETQSNNNNNNNNNNNNSNNNSNNSNNNSNNNNNNSNNNNNSSNNIMMDKCSDMCHKLTDDNNSMNNNYNIYDIKCDEEVTDGNIKDDNEKDNNVIVSDTNKSIIKNYLIQTIRDDLKQHVELKNKEIILLQLIIEPYILRRSKKHVFIDMPKKHSLIIKLPLNNTQLNLYKDEIFSKMQKTFKHLEFLETHSSKKELQKIYAILNKKEIKNEKNNTRVEKKEIQQNVDKENYQNGHCNNNTNNMESADHNVDVDIGHDNVHVHDDDDDDREMDEETINIEKTDEENKNSNIVIHKRDDDSNDMDEDNIKDDNNSNSNSHNNNNMCEDSTSPTKEVTLNKSKKNQENNKNNKEVRGKMINASIFILRRICNHPLLHKYYYTVEDIKKISKYFYYNTDQYVDLDLKTVENEFMKISDFDIHLSIKHLISQGDNKLNKYLITKEHILNSSKINHMLSLIKDIRKKKEKEALLYEFIYDDSDYMDHIQTIKSSQSINKNDTICKEENNINVNVFIKEEQNYHDIGKETKRHDDNNNNNINDGDENKFCFKENIKKPNDIYNEDMENSERTKDTNCEYNKKKKDEDDEEICLTSSTLSTSSVGTQNDAGHQIYVRLDGSTNTIERQKIIKRFSKDENIFVFLLSTKAGGVGLNLIAANHVILMDQDWNPHNDRQAEDRVHRLGQKNEVFIYRLCCKNTIEEAILKCNKAKLHLDQAFGGNNELLQTALIKDALNALPLLYKYYIYIIYIYIYIFIYFIFLKFLIL

SEQ ID NO: 8670 - protein, 1703 aa, Exophiala dermatitidis
  unsure (1)..(1703): unsure at all Xaa locations
MAASRFVTLQPVGQIYSYRTNRFRTGSIDLSRLLDKGSTQLIGNTAVAQLADIQKQNPDNLFALFGRVLPYLQSKSWETRTAAAKAIGGIVSNVPKFDPNADEAEIKDEVPKSEDGELKVEVKTEDKVQEADDLLQLATLDIKMILRHGKKLLGSAGKEYEYSMAGMTPAQRLHHQKQSLTARLGLGGEYMEEDLVTENDFAATSQHKLAQTPGPPRVDTKSAGQRTDSIGAPSPYSAMSPSENGQPFLEESGLSKRQLNQLKRKNKSAAKVGASKMRVVDLSGRRPSEPXQTPVSATPHPVKLNGQDESNGDSKQDYFSIKREXPDDNTALISEFKGDVVEEKPLIQPDEEHSHDWPFEVMCDFLSIDLFDPNWEVRHGAAMGLREVLAENDLANRRWLDDMACRLLCVLMLDRFGDYVSDTVVAPIRESIGQXLGALLTQLPDDTAVSVYNFLQQMINQSDTGLKQPIWEVCHGGMIGLRYFVAVRKDLLLQHNALIDGVVSAVIRGLAHPDDDVKSVSAATLVPVAGELTTIRPQSLGQLIGVVWDCLLDMQDDLSASTGAVMDLLATLCSYDATLEAMRKNAAEDPEQSFEMLVPRLYPFLRHTITSVRLAVLKALVTFLNLSNVNNMEWVGGRVTRLLFQNMXLERNEGVLRMSFEVWEALVAFMERQGMAKFAPNLDPHIMPMLKATIQPVGQSRSPIPMDASLLIKPSGTPMATSAPRQGSASDADQQPNQQPSHNTDGHMLHGEVDLVGMEVILRTRITCSRALGLLLGKQNEAAVASYWTSLLPIINSNHSSSRLFTGMILEELARNQSIKPTDTASCVAQLQSVLDDDGHHWYSDIVSSLQAARGQCQSLISAFQNNAHVSRDKLPAIAVVCQGENGAGPKAFSLADAEKIVTTRFDRLLKSLTPAQRVSGTQYLNDARTNAMTAVEEARKXKEGRDLAIKAAVASVLVRLGEIPKKPGQLIKCIMDSIKGEEFEELQARSASAVAALIDFYTRGAKKGPVDKLVSNLVKFTCVDTSETPEFGPNAKFEDIVLSLRKEEDRKDHPDAAKFEQEAKEARIMRRGAKRALDELAQSYGGELLEKLPVLKSLIENPIGELVEASRFSYFAGGSPCHNIVXNIGQIVPLEAGIXXPPGMPESLLQVRERERKFMAQMLDPKKVEPFQIXVAIKAELRSYQQEGVNWLAFLNKYNLHGVLCDDMGLGKTLQTLCIVASDHHMRAEEYAKTKAPDMRRLPSLIVCPPTLSGHWQQEIKQYAPFLSCVAYVGNPMERNSRLHLLEQADVVITSYDVCRNDNDVLAPITWNYCVLDEATHRFILSGTPIQNNVLELWSLFDFLMPGFLGTEKVFQDRFAKPIAASRNAKSSSKEQEAGALAIEALHKQVLPFLLRRLKEEVLNDLPPKILQNYYCDLSDLQKRLFEDFFKKERKTVENSIGAADKEAKQHIFQALQYMRKLCNSPALVVKEGTKQYETISKQLAASKSSLRDVAHAPKLTALRDLLVDCGIGVSNDSNEMSASNYVSQHRALIFCQMKEMLDMVQNEVLAKLLPSVQFLRLDGSVEATKRQNIVNQFNNDPSYDCADTVIFVEHDWNPQKDIQAMDRAHRIGXKKVVNVYRLITRGTLEEKIMXLQRFKIDVPLLLSIXKMLAWAVWRRIDSRTMASGVCSLSAYCSNALIPSGPDSVSXPCNPITSSMSG

SEQ ID NO: 8671 - protein, 1806 aa, Taeniopygia guttata
MNGHSDEESVGNSSRESSRSDDDSGSASASGSGSSSGSSSDGSSSQSGSSDSDCGSGSGTQSESESDTSREKKQIQSKPPKVDGSEFWKSSPSILAVQRSAVLKKQQQQKAASSDSVSEEDSSSSEDSADDSSSETKKKTHKDEDWQMSGSGSMSGTGSDSESEEDREKSSCEENESDYEPKNKVKSRKPPIRIKPKSGKKSAGPKKRQLDSSEDDDDDEEEEEDDDYDKRGSRRQATVNISYKEAEETKTDSDDLLEVCGEDVPQPEEDEFETIEKFMDSRVGRKGATGAATTIYAVEADGDPNAGFEKSKEPAEVQYLIKWKGWSHIHNTWETEETLKQQNVKGMKKLDNYKKKDQETKRWLKNASPEDVEYYNCQQELTDDLHKQYQIVERIIAHSNQKSAAGYPDYYCKWQGLPYSECSWEDGALIAKKFQARIDEYFSRNQSKTTPFKDCKVLKQRPRFVALKKQPSYIGGHESLGLRDYQLNGLNWLAHSWCKGNSCILADEMGLGKTIQTISFLNYLFHEHQLYGPFLLVVPLSTLTSWQREIQTRAPQMNAVVYLGDITSRNMIRTHEWMHPQTKRLKFNILLTTYEILLKDKSFLGGLNWAFIGVDEAHRLKNDDSLLYKTLIDFKSNHRLLITGTPLQNSLKELWSLLHFIMPEKFSSWEDFEEEHGKGREYGYASLHKELEPFLLRRVKKDVEKSLPAKVEQILRMEMSALQKQYYKWILTGNYKALSKGSKGSTSGFLNIMMELKKCCNHCYLIKPPDDNEFYNKQEALQHLIRSSGKLILLDKLLIRLRERGNRVLIFSQMVRMLDILAEYLKYRQFPFQRLDGSIKGELRKQALDHFNAEGSEDFCFLLSTRAGGLGINLASADTVVIFDSDWNPQNDLQAQARAHRIGQKKQVNIYRLVTKGSVEEDILERAKKKMVLDHLVIQRMDTTGKTVLHTGSTPSSSTPFNKEELSAILKFGAEELFKEPEGEEQEPQEMDIDEILKRAETRENEPGPLTVGDELLSQFKVANFSNMDEDDIELEPERNSRNWEEIIPEVQRRRIEEEERQKELEEIYMLPRMRNCAKQISFNGSEGRRSRSRRYSGSDSDSISERKRPKKRGRPRTIPRENIKGFSDAEIRRFIKSYKKFGGPLERLDAVARDAELVDKSETDLRRLGELVHNGCIKALKDNSSGQERAGGRLGKVKGPTFRISGVQVNAKLVISHEEELAPLHKSIPSDPEERKRYVIPCHTKAAHFDIDWGKEDDSNLLIGIYEYGYGSWEMIKMDPDLSLTQKILPDDPDKKPQAKQLQTRADYLIKLLNKDLARKEAQRLAGAGNSKRRKTRTKKNKVLKAAKLKEEIKSDSSPQPSEKSDEDDDENNKDEIVSVKHLHKKFKAEKENEEKPEPDTGIKKEAEEKRETKEKENKRDLKREKKEKEDKKELKEKRENKVKESTQKEKEVKEEKVNEIKSENKEKTKKIPLLDTPVHITASSEPIPISEESEELDQKTFSVCKERMRPVKAALKQLDRPEKGLSEREQLEHTRQCLIKIGDHITECLKEYTNPEQIKQWRKNLWIFVSKFTEFDARKLHKLYKHAIKKRQESQQHNDQNISGHVNTHVIRNPDVERLKENTNHDDSSRDSYSSDRHLSQYHDHHKDRHQGDAYKKNDSRKRPYSAFSNGKDHRDWDHYKQDRYYSDSKHRKLDDYRNRDHRSSLEGSIKDSRVHLDHRSHSDHRIHSDHRSSSEYSHHKSPRDYRYHSDWQMDHRASGSGPRSPLDQRSPYGSRSPLGHRSPFEHSSDHKSTPEHTWSSRKT

SEQ ID NO: 8672 - protein, 1786 aa, Taeniopygia guttata
MNGHSDEDVRNRSGESSQSDDDSGSASASESGSSSGSSSDGSRSQSSSSDSESGSESDTSREKKQVQAKLPPKLGGSEFWKSSPSILAVQRSAVLKKQQQQKAASSDSGSEEDSSNSEDSADDSSNEAKKTHRDEDWQMSGSGSVSGTSSDSESEEDREKSSCEDSESDYEPENKVKSRKPPSRIEPKSGKKIAGQKKRQLDSSDDDDYDKRGSRRQATVNVSYKEAEETKTDSDDLLEVCGEDVPQPEEDEFETIEKFMDSRIGRKGATGAATTIYAVEADGDPNTGFEKSKEPGEIQYLIKWKGWSHIHNTWETEETLKQQNVKGMKKLDNYKKKDQETKRWLKNASPEDVEYYNCQQELTDDLHKQYQIVERIIAHSNQKSAAGYPDYYCKWQGLPYSECSWEDGALIAKKFQTCIDEYFSRNQSKTTPFKDCKILKQRPRFVALKKQPSYIGGHEGLELRDYQLNGLNWLAHSWCKGNSCILADEMGLGKTIQTISFLNHLFHEHQLYGPFLLVVPLSTLTSWQREIQTWAPQMNAVVYLGDITSRNMIRTHEWMHPQTKRLKFNILLTTYEILLKDKSFLGGLNWVFIGVDEAHRLKNDDSLLYKTLIDFKSNHRLLITGTPLQNSLKKLWSLLHFIMPEKFSSWEDFEEEHGKGREFGYASLHKELEPFLLRRVKKDVEKSLPAKVEQILRMEMSALQKQYYKWILTRNYKALSKGSKGSTSGFLNIMMELKKCCNHCYLIKPPDDNEFYNKQEALQHLIRSSGKLILLDKLLIRLRECGNRVLIFSQMVRMLDILAEYLKYRQFPFQRLDGSIKGELRKQALDHFNAEGSEDFCFLLSTRAGGLGINLASADTVVIFDSDWNPQNDLQAQARAHRIGQKKQVNIYRLVTKASVEEDILERAKKKMVLDHLVIQRMDTTGKTVLHTGSTPSSSTPFNKEELSAILKFGAEELFKEPEGEEEEPQEMDIDEILKRAETRENEPGPLTVGDELLSQFKVANFSNMDEDDIELEPEQNLRNWEEIIPEVQRRRIEEEERQKELEEIYMLPRMRNCAKQISFNGSEGKHSRRRRYSGSDSDSVSERKRPKKRGRPRTIPRENIKGFSDAEIRRFIKSYKKFGGPLERLDAIARDAELVDKSEIDLRRLGELVHNGCIKALKDNSFGQERAGGRFGKVKGPTFRISGVQVNAKLVISHEEELAPLHKSIPADPEERKRYVIPCHTKAAHFDIDWGKEDDSNLLIGIYEYGYGSWEMIKMDPDLSLTQKILPDDPDKKPQAKQLQTRADYLIKLLNKDLARKEVQRLTGAGNSKRKKARSKKNRATKAAKIKEEIKSDSSPPSEKSDDDGYNEDEIVSVKCPHKKIKAEENEEKPEPNTGIKMEAVEKRETREKENKRHLKREKKEKEDKKEFKNIKEKRESKLKESTQKEKEVKEEKANELKSENKEKNKKVSLLDIPVHITATSETLPISEESEELDQRTFSVCKERMRPVKAALKQLDRPEKGLSEREQLEHTRQCLIKIGDHITECLKDYTNPEQIKQWRKNLWIFVSKFTEFDARKLHKLYKHAIKKRQESQQHSDQNISNNMNTHVIRNPGVERLKEKANHDDSSRDSSSDRHLSQYYDHHMDKHQEDAYNKNDLRKRFHSAFSNGKDHRDWDHFKQDSRYYSDGKHRKVDDHRNRDHRSNLEGSLKDSRPHSNHRSHSDHRIHSDHRSTSEYIHHKSSRDYRYHSDCQIDHRASGSGPRSPLDQRSPYGSRSPTGHRSPFEHSSDHKSTPEHTWSSWKT

SEQ ID NO: 8673 - protein, 695 aa, Encephalitozoon cuniculi
MFGLSLCVMDCRAEDYEKSFVERYLERTASVKIRELAKRAEDHRNKGEMDKARELEKEIEKIKSELVADKSIVSKTDCRREEVESKESIDFEWDGAEDDRDIKVFDAKRAKAVEKYCRHMGIEEDEFSEHIKKEGKECEGFSVPGFLWSSLFPYQQDGVRWMLRLYRDEKGGVLADDMGLGKTIQVIVFLGALLHSRVVSKALILCPATIVSQWMDEWKRFYPFVRIFFGFPNEDCEGVYLMSYEKFKAGVKNFLWDVLILDEGHRIKNKNAQITLSVKKARSRGRFVLSGTPIQNNLGELWSIFDFVNPGLLGSHTSFNEEFEEVIRRGGYRNASNLQVEKAYRHSLMLRSLIEPYILRRTKSQVSHKLPSKEDKIVFCSLTPAQIELYNRVLESKHIMKVLTGKANLLSGISMLRKVCNHPRLLFPRKLGVSEDCEEEASDEKNGEDEALELPGADVSYDLVSSSCKIKILVDLLKKWRSEGNKVLVFSQTIRMLDIIERCVRKYTYLRMDGRTPTSSRPGLVDRFNEDEDVFLFLLTTKVGGLGLNLTGASRIVIYDPDWNPSTDTQAKERAWRYGQKKGVEIYRFVCKDTIEEKVYQKQIFKDLLGKKVLSNPRLSRFFNKSCINELFSFTMTGDLVEVKTHEVHRCDEEGALKEVRDGDGEAFSRIKALNEKRVLSGSEVLEYIALREGE

SEQ ID NO: 8674 - protein, 823 aa, Encephalitozoon cuniculi
MNTKLLRKYRNFIGDNEFFRAFIPNYGEVVEGDEEPVEPYTFISSPRFVLYELRDYQIEGLNWLINMHENSINCILADEMGLGKTLQTIAFLGYIRYVKKERKRHLIILPKSTLANWRREFRKFMPNYKVRVFYSSRKEMRREAEEIMSSRWDACLTTYEMCINARSILNTVKWSYIVIDEAHRIKNEHSLLSKIVRIFSCDHRLLITGTPLQNNVHELWALLNFIVPEIFNDAEKFESYVMNIDEGDGEAIRRIRSVLQLFFLRREKIDVEMSLPPKKIVNLYSKLSPMQREWYRMLLKRDLSPLGSTRDPKGMLMNVVMQLRKCCNHPYLFPDAEPKPYTNDKHIIENSGKMIVLDKLLASLKAKGSRVLIFSQMSMMLDILEDYAMFREYEYCRIDGSTSYRDRTEAIDGFNAEGSEKFLFLLTTRAGGLGINLSTADTVILFDSDWNPQMDLQAQDRAHRIGQKKQVVVFRLISENTVEERIVYRSLQKLKLDDILLQGRYHRSSSVSQSELIDILANGMEITEDEGKDESIEDVIRRGEEKTREMNVKLCDFKITDTLNTNIDCYTWEGEDYNVKKIESFIENSRDGHGRSSRTSILFRARPRIIEYPEYQFYPKELQEIQRKEVKLYEEGKSLSQDEVLRKKELQSQGFDWTKKDFHLYIKAVEKVGRDDVEKIAMLLKHKDDVEAYHRVFWERVNELSDAEKIIGSINRSQRRMERKSRIREMIEGDLADINRRLGKSRSKLGDYNGLLLGLYRKYLDHPNWAECIRKDILRLSEYKFDYYLLSRTNTDIQKHVNHLIFTLAKSCSKIKDTKAVEA

SEQ ID NO: 8675 - protein, 1256 aa, Encephalitozoon cuniculi
MNRLEKFFTTLNTAQSKVLKGYTTDELVSQIKEYVDFTPYILKQTYRLLCGQASEDRRNGARILRSLMFQFKLVTDFKIEYKESSSIYLSSTGEQFNVQAPSIQEQKRMVRKIAKLEHVEANFLSDIDFKAGSGEAIKRHKVDERPIENVLDFFEQISDNLLSYEWYKRHGAFLAFAAMFSEIDNGGDIQIRVDSKLFSKIYEILVTDKFNDFVDDRTVAPVRDAAAYLLSRIYPLIGPNDIIEQLVGFLDSGDWQVQFSGLIALGYLKEFVEDKDGLCRKLVSLLSSPDEDIKLLSAELLCHFPITDSLDLVLEKCWKNIESEELISVSKTSNLSLLTKIYRENPELSIPPERLKDIFPCFTSPVPEVRTSILNMVKNLSEESIDFLVAEVVLIEEKDEIREMAIKLLKKRRDLPKNLILHFMNVIGGSLYEPYSEDDFVSYEDLYFTKSGINVVGKDEILKNRCLLFECIMKSGLPDLQSTIETTTSRTFISLYRSVQALVKDTPYTPANIEELEYYFDRCKDLKMAPLKEFKKKLSAPGIRSIHPMVDPLYSDYTRMVASIEFPGLERATALFEVETCKQFLHLFSKMITEYYDAEKISIDNFLLKAYEGLASGKDGFLSFFEVFNTRLLAHSFFHKIGSLENRLDFFSKTIHIYTKTSQIQKIGFVFDDALREKNITVINGFMRSLEFNEKFVRKALEDLDVELLDAVLMSGDHSFNPLFVKPLLRNISGNIDREASSKVLSKVIPTLGFSTNTKISKDLLEMIEREKKSLESLLDAGKIPEYHIKCPISVKLRDYQMEGVKWLNFLYSFSLNGILADDMGLGKTLQVLTFLCSEIYKTNRKVLVICPSSLTGHWKSEVKKFFPFVAAEIYKREDRDTYSILISSYETFRNDYLNFIEKDWFYVVVDEGHVLRNKQTILYSRMNMIRCSRKMVLTGTPVHNSVEDLISLFNFLMPNYIGPEKEYGSLNVKMSDSEIEKTHKRLDLLHRKVLPFILRRLKIDVLKDLPPKIIRDITVELGPVQEKLYREIDEKGGKESLGDAELEYGKVDQKNVGFKRTRDLFLAVSHIGHFKDSTEVSCKVKALEDIISLCGGEDLGSKILIFFQFKSTIDLVIKDIMKKYKFKYSRLDGSVPSAARTKIAEEFNTGTTQMLFLTTQVGGLGLNLTGADTVVMYEHDWNPFNDLQAMDRAHRIGQKRTVNVFRFIARNTLEEKVMNLQSFKMFVANSLVSQQNADIETMDTKDLLERFQVPG

SEQ ID NO: 8676 - protein, 1251 aa, Encephalitozoon cuniculi
MDSESESTASSVTSSSESSEKKVMPRKRGRPRKNDNSRQAQSHFNPMLYQAPLGYQYAPTIGPGIPHGFVPGVQHGFYNTFNFSHGFGYGHGYGPSAPLQGEETRTREMDGYREKNEGRSVYIPERRQKRNAAVVRRASAPESESSSDSYNEESEDGIEKLLKYDSESERYFVKFKHKSYLHCDWVPKSEIMASKVGAMKVKKFRATEVPFNPDFVKVDRILHEDYDGEKVFLVKWRGQAYELSTFETAESVTKCEGFEEELKKYRDRKKIRNMRVGIDWRPPRENFIKYEESPVFKGGNRLREYQLEGLNWLLNRWYYKQSCIMADEMGLGKTVQSVTFINTLFTKYDYCAPVLVVTPLSIIPHWEREFEAWTDLRVLKYHENRPGRALIAEYEFVLKKNNLEIRLFDVLITTYDTVMAEQEHLSQFHFSVGIFDEAHRLKNAKSKAATILRTLKFNHKVLLSGTPLQNNISELWSLLNFIDPMRFSSLPHFLGEFKMENINDVEKLQGLLRPLMLRRMKEDVEKSIPTKEETIIEVALTMIQKRFYRAILEKNIEFLTKGGKESAPNLLNVMMELRKCCIHPYLIKGAEEQILSGYLKKKRERSKAEGAENDITLTSEVLNEDEHQDGNSVISDIDEYYKIFIQSSGKLVLLDKLLGKLKDGHKVLIFSQMTRCLDLLAEYLAYRKYKYERIDGGARTENRQAAIDRFSDKTSDVFVFLLSTRAGGVGINLTAADTVIIFDSDWNPQNDLQAQARCHRIGQTSEVKVYRLVTENTYEREMFDKAGLKLGLDRAVLQKMTFEEQKSEKTRKKDAIETLLRKGAYGVLMETDDASSRKFCEEDIDQILERRTKIVKHSDGGNVFSKASFQVEEEIDDPDFWENLLSKRKSEESEGRIRRQMRRLAREGGLSSEDISEIDELLNTKLESEDENVFYENQCLLIFLGVLRFGPRSVGLEIPSLTHEDLKDGVEKAHILPQSPRFKDTDAYFRYLVKYTVDQFQSTKVRSDFSDGIEEFLVDNYDPSLFSKFGSVYKKYGERFLLRIQVVMILNSLLKTEDLAVEKVRGWTSDDDRALVSLTLKYGYDCYPETIRNKSVDDMNQRIRKIVSTLSRKKEVREDDNLFHKAIMIFGRVTDDNRESIVEFLGDKDIEGLEETINRILGEAKRHKLSSSEIECLDRMSWFNSLESMTKIPQPKRGMLPKNWNAKTLSELRGEILAKGLASAGERFGVSEDFIVKKFEALFPSGRPAQN

SEQ ID NO: 8677 - protein, 883 aa, Encephalitozoon cuniculi
MTGVDLEDILKVYERRGEALNIEKAANGTRHISKCVMDVPVALLNYPEVRHLRFLAKEKISQIINEMRSQRGEGDTDSERTAEWISVMRNIRKVHSAIVGYESARIAYSKKISIICARELRRGLSKTSRTNPILKSKRIYRELYGHIKKTERNMKDRFKKAEKEEMERKKREMEEREELRQKRKFEYLLSQTELFSHFILKKNRCGLSSAEEAERKEIGAGEYNGMKGYEAAMLQKERLREFGAERSTKKFKEGGEVGETTTRYVPQPSILKCTLKEYQLRGLNWLVSLYDKGINGILADDMGLGKTVQSISLLAHLYETEEVPGPFLVVTISSTLDNWAQEFARFLPSFRVCRFSGSPSERKELKKRFKNSDVVITTYQTAVSDEKMLKKIKWQYMILDEAQAIKSSMSRRWKTLLSFKARNRLLLTGTPIQNSMQELWALLHFIMPTLFDSLNEFSDWFSKEIETSAIMKKTVDEKSLQRLHAILKPFMLRRHKSDVIHELGQKTQIDLYCDLSYRQKVLYKEITRSCSSMEMENLLMQLKKVCNHPDLFKKLEPRCGLSLEVSDGIGDVVSFGRSKMDIKIPSLVAKDALEMFRKKEYEMIERINGLRRIVNGEGPNAWYLRGSLDFKYGGYVFRSVEEAGKAVLRNMGNPESSLLESMRRVIDEEAYRLQRHVYCISPVVATAPRLISNEADLPEIDLENRHIPLNTTIYVPPLNTFISDSGKLVVLDELLPKLKAEGHRLLMYFQMTRMIDLIEDYLVRKGYTYLRLDGSLKASARAEVIRDWQASDKFIFLLSTRAGGLGINLTAADTVVFYDSDWNPTADQQAMDRAHRLGQTRDVTVYRLITRGTVEEKVLESANRKDEIQKMVIHGNIFEGENF

SEQ ID NO: 8678 - protein, 556 aa, Encephalitozoon cuniculi
MEQERWGRAFEARLRGAGEGLDDRKEGEKMQPIKIRVYVNGDGDVVLRPSNKRLSTTLSKLDESVYDVKGNEWRISGRDYVAVKEELRRNKLVFDDIPKGVLRIARKEAGWQKFELIGPIYSMLLPFQREGVEHALNRGGRMIVADDMGLGKTIQALAVAYYYRAEWPLVIIAPASLLEDWADACRRFLGMEAMVMRRKEDFGQEIGVVSYEVASSHANVLACGAGVVIADECHYLKSLQTKRTKAIVPLLQKVSRALLLSGTPAVSRPLELYPIISAVDRTIFPRFAEYGARYCNGRKVGQWYDYKGCSNAEELHYVLRKFLMIRRTKDEVLGQLPPKFRRQVVLECTGRQDDPRKDLVGESVDTNVVMQYREAVGLKVDPVKQYLATMVEKGMKFVVFCHHTEMMESLEGFFAERNVPMIRIDGSVPSTSRHLLVKKFQENEEVMVALLSITACSTGLTLTAGRAVVFAELYWNPGVLLQAEDRIHRIGQKSSVDIIYLVAKGTIDEYVWPKLLSKLNVLESLGVGSNQLKNVGVSSQAAGQKTLCQFNIKRCN

SEQ ID NO: 8679 - protein, 1076 aa, Dugesia japonica
MAEPPLSSTDSDGSHESNDDSVIISNGKSQVNNNKTNKRNTRLNLKIPKLASSDSGNDLSSCNSSGKASKSLKRKPNYCSTSASESESDASLSDLYKKVTSKKKPSKKSKIEKSKTSKKEKSSKAEKKNKTSAQSNNEEEDEVETRKNIHKIMTNSKLSIATKTSAQLESDRRKRIEERQKEYNKDVPDEDILMTSSNITMVLEKDQDDNSIVEVDKLIVDNLKPHQMEAVQFLWDCVIRSVECLEKSQQVDSEDDKNASAVGGCVLAHCMGLGKTLSLIAFMHTMLTTSCLKLRTCLVVCPVNTALNWKKEWEMWMPKEKLVNIFEVCSTECKKSKVQVVQDWYHKGGVLIIGYEMYRLLATGDSRTVRRKIVKQKLNEALVEPGPDFVVCDEGHLLKNNKSAINKVITKIFTRRRIVLTGTPLQNKLLEYHTMVQFVKPNLLGTQKEFLNRFVNPINNGQHINSTPYDVSLMKKRSHILFKMLDGCVHRRDYSALVKYLPPKYEYVVKIRLSDIQVQLYRQYISICKDNKHSLFQDHLTFSRIWTRPFVICMHQEIMDKKMFFVDTDEDGDDSFINDTSDSDSKDADDKKPVKTSNGGDVINLISDDSDLDGSVRKKSKIEKREKSNSGSDSSAEEVVRNWGTTSRSAKKNELVDSDEEPIITGIKELKELKYMNPIDKHWWSNIIQPEHEHQIEISGKLSVLFQILRKASDIGDKIIIFSHSLLVLDIIEKYLQELHTIAEKIQEDLKKLNDSIDQSPTTAEEDIIYNSWIKGLDYDRMDGSTQAFVRADIQSRFNSFEDHRLRLFLISTRAGGMGVNLVAANRVIIFDVSWNPSHDVQAIFRSYRFGQNKPVYVYRFVSQGTMEEKIYERQVTKQSLSLRVVDEQQISRYFTEEDLRSLYKFEPDLYDPEKVRETPILPKDRFLAELIQELPQFIHGYHEHDSLLQNKTDEELTETERQDAWKEFEEEKIRGYRPFPMNPIQPKPAMDQDRMHQLQIMMLQQYPQYAALYAQNYNNLVKYVLSRKPDLNQIQLNNEVQHLFLQSLQKYYNSQATMMVTQPADTIAGSSQSMQ

SEQ ID NO: 8680 - protein, 1009 aa, Caenorhabditis elegans
MSVHESSNEINDEPMDTDSNIPESSGNDPSMEVDDEPESSDAADSFKRFERLLQKTENFSHCLSSGDAKLATGAPVDTKKRGRPSKKNGIDGDHRHRKTEQEEDEEMVADAIKSDDLVIFDKSPFYIENGEMRDYQVRGLNWLASLQHNKINGILADEMGLGKTLQTISMIGYMKHYKNKASPHLVIVPKSTLQNWANEFKKWCPSINAVVLIGDEAARNQVLRDVILPQKFDVCCTTYEMMLKVKTQLKKLNWRYIIIDEAHRIKNEKSKLSETVRELNSENRLLITGTPLQNNLHELWALLNFLLPDIFTSSDDFDSWFSNDAMSGNTDLVQRLHKVLQPFLLRRIKSDVEKSLLPKKEVKVYVGLSKMQREWYTKVLMKDIDIINGAGKVEKARLMNILMHLRKCVNHPYLFDGAEPGPPFTTDQHLVDNSGKMVVLDKLLMKFKEQGSRVLIFSQFSRMLDLLEDFCWWRHYEYCRLDGSTPHEDRSNAIEAYNAPDSKKFIFMLTTRAGGLGINLATADVVIIYDSDWNPQSDLQAMDRAHRIGQKKQVRVFRLITENTVDERIIEKAEAKLRLDNIVIQQGRMSEAQKTLGKGDMISMIRHGAEQVFAAKDSTISDDDIDTILEKAEVKTAELNEKMGKIDENNLRNMTFEDNAKFTVYQFEGENYKAKQADGMGHFWIEPPKRERKANYQVDLYYKEAMRAGNPTEKQSKAPRPKLPQVFDFQFYPRRLFELLDKEIYHYRKTIGYVAERPKDVPPKEAEKRQAEEQKLINNARPLTDKEQEEKAELLTQSVTDWTKREFQQFVRGNEKYGREDLESIAKEMERPLEEIQSYAKVFWERIEELQDSEKVLSQIEKGEARIQRKYAVKKALDAKIAKYKAPFQQLRISYGTNKGKTYTEEEDRFLVCETHRLGHDKENVFEELRQSVRMAPQFRFDWFLKSRTAMELQRRCNTLITLIEREMGEVVESKPVIVTAADKKKSVAKDLSKSSGTPTAKKVKATPK

SEQ ID NO: 8681 - protein, 971 aa, Caenorhabditis elegans
MEVDDEPESSDAADSFKRFERLLQKTENFSHLATGAPVDTKKRGRPSKKNGIDGDHRHRKTEQEEDEEMVADAIKSDDLVIFDKSPFYIENGEMRDYQVRGLNWLASLQHNKINGILADEMGLGKTLQTISMIGYMKHYKNKASPHLVIVPKSTLQNWANEFKKWCPSINAVVLIGDEAARNQVLRDVILPQKFDVCCTTYEMMLKVKTQLKKLNWRYIIIDEAHRIKNEKSKLSETVRELNSENRLLITGTPLQNNLHELWALLNFLLPDIFTSSDDFDSWFSNDAMSGNTDLVQRLHKVLQPFLLRRIKSDVEKSLLPKKEVKVYVGLSKMQREWYTKVLMKDIDIINGAGKVEKARLMNILMHLRKCVNHPYLFDGAEPGPPFTTDQHLVDNSGKMVVLDKLLMKFKEQGSRVLIFSQFSRMLDLLEDFCWWRHYEYCRLDGSTPHEDRSNAIEAYNAPDSKKFIFMLTTRAGGLGINLATADVVIIYDSDWNPQSDLQAMDRAHRIGQKKQVRVFRLITENTVDERIIEKAEAKLRLDNIVIQQGRMSEAQKTLGKGDMISMIRHGAEQVFAAKDSTISDDDIDTILEKAEVKTAELNEKMGKIDENNLRNMTFEDNAKFTVYQFEGENYKAKQADGMGHFWIEPPKRERKANYQVDLYYKEAMRAGNPTEKQSKAPRPKLPQVFDFQFYPRRLFELLDKEIYHYRKTIGYVAERPKDVPPKEAEKRQAEEQKLINNARPLTDKEQEEKAELLTQSVTDWTKREFQQFVRGNEKYGREDLESIAKEMERPLEEIQSYAKVFWERIEELQDSEKVLSQIEKGEARIQRKYAVKKALDAKIAKYKAPFQQLRISYGTNKGKTYTEEEDRFLVCETHRLGHDKENVFEELRQSVRMAPQFRFDWFLKSRTAMELQRRCNTLITLIEREMGEVVESKPVIVTAADKKKSVAKDLSKSSGTPTAKKVKATPK

SEQ ID NO: 8682 - protein, 1787 aa, Caenorhabditis elegans [sequence omitted]

SEQ ID NO: 8683 - protein, 1336 aa, Caenorhabditis elegans
MKTDRRYISVRKLLALIQEEKLTIIIPPRIPMPARYPPTEESLGDEPVDETVEDRAARYDDYMQVLANAYPLNTWDSNFMKIDDDIIRKEALHYRDQDMKNREMYLKENLHTFPEERQTKAKIEYLGLSLLDFQTELRKKVLATTVLVPPNDFLINPWSIRRTKYEYLQELKRHPDRAILEKRRKVTNFHFLQSLTKHAREFKEFHKRNMLNHTKVRKSMQQYITNENKRIAREEMKNEKNRIQKLIQEDEEGYRAMLDEKKDQRLVYLLEQTDDYIKSLCDLLKQQQNATAGSLATKSYIRKEYDGVAEEDKVKSILDKARNDDDEYENKTKMNIEDYYTTAHGVREEIKEQHFMMGGGNPSLKLKPYQIKGLEWMVSLFNNNLNGILADEMGLGKTIQTIAFITYLMEIKKTSGPFLVIVPLSTVPNWQNEFDKWAANVHLIAYKGPKETRKVFEPIIKSGKFNVLLTTFEYVIREKALLGKLRWKYMIIDEGHRLKNQHCKLTEMLNTRFQCQRRLLITGTPLQNKLPELWALLNFLLPSIFSSCSTFEQWFNAPFATTGEKVELTQEETMLIIRRLHKVLRPFLLRRLKKEVESELPDKMEFVVRCDMSALQKVLYKHMQKGLLLDGKTNTGSKSLRNTMIHLRKLCNHPFLFENVEESCRNFWDARFISAVDLYRVSGKLELLSRILPKLQATGHRVLMFFQMTSMMTIVEDFLAGGTIQYLRLDGSTKPDERGALLDKFNAPNSEYFLFMLSTRAGGLGLNLQTADTVIIFDSDWNPHQDMQAQDRAHRIGQKAEVRVFRLITANSVEEKILAAARYKLNVDEKVIQAGKFDNRSTGAERREILENIIKTENESEEDEEVPNDEDINDILSRSEEEFELFQKMDQERFENEQAQKAKPRLVGEDEIPRDILRAADETDYIEKAKEEGRVPYLEVMPGSRRTRREVDYSADTMSDDKFLEKLFDEDDTTSARTEEEPNPAQPGPSSVSISLESSCDTQKDIKVDDVPAPPLTFKVPRLTIKLGGDEKKRKHNRSESDSDDNSLKKEKKHRKEDHPKEKEKEKKKEKEQEKSTDSEKDLKRKIEAPIEKIRIKFSGEPSEKYRKINEEPPKKEHRDKGRKEEKSHKHRSDDDDSSPKKKKHRDSDESSEKKKKKHKHDSDSALKLREGSPLSVDKEKSPMKIRIGQGQPSISLAANEDKNHPPIKLKLNVKFNMPSQETDGSKKDKKEPHKEKEKDKEKEKEEDKGKEKEKHKDKDKDKEHKKKSREDETEEERRARKEAKRLKRQKEEQEDDAKLQEKLARKAAKKEQKRLEKEKSESSTGTVNLSAAGSA

SEQ ID NO: 8684 - protein, 1257 aa, Caenorhabditis elegans
MKIDDDIIRKEALHYRDQDMKNREMYLKENLHTFPEERQTKAKIEYLGLSLLDFQTELRKKVLATTVLVPPNDFLINPWSIRRTKYEYLQELKRHPDRAILEKRRKVTNFHFLQSLTKHAREFKEFHKRNMLNHTKVRKSMQQYITNENKRIAREEMKNEKNRIQKLIQEDEEGYRAMLDEKKDQRLVYLLEQTDDYIKSLCDLLKQQQNATAGSLATKSYIRKEYDGVAEEDKVKSILDKARNDDDEYENKTKMNIEDYYTTAHGVREEIKEQHFMMGGGNPSLKLKPYQIKGLEWMVSLFNNNLNGILADEMGLGKTIQTIAFITYLMEIKKTSGPFLVIVPLSTVPNWQNEFDKWAANVHLIAYKGPKETRKVFEPIIKSGKFNVLLTTFEYVIREKALLGKLRWKYMIIDEGHRLKNQHCKLTEMLNTRFQCQRRLLITGTPLQNKLPELWALLNFLLPSIFSSCSTFEQWFNAPFATTGEKVELTQEETMLIIRRLHKVLRPFLLRRLKKEVESELPDKMEFVVRCDMSALQKVLYKHMQKGLLLDGKTNTGSKSLRNTMIHLRKLCNHPFLFENVEESCRNFWDARFISAVDLYRVSGKLELLSRILPKLQATGHRVLMFFQMTSMMTIVEDFLAGGTIQYLRLDGSTKPDERGALLDKFNAPNSEYFLFMLSTRAGGLGLNLQTADTVIIFDSDWNPHQDMQAQDRAHRIGQKAEVRVFRLITANSVEEKILAAARYKLNVDEKVIQAGKFDNRSTGAERREILENIIKTENESEEDEEVPNDEDINDILSRSEEEFELFQKMDQERFENEQAQKAKPRLVGEDEIPRDILRAADETDYIEKAKEEGRVPYLEVMPGSRRTRREVDYSADTMSDDKFLEKLFDEDDTTSARTEEEPNPAQPGPSSVSISLESSCDTQKDIKVDDVPAPPLTFKVPRLTIKLGGDEKKRKHNRSESDSDDNSLKKEKKHRKEDHPKEKEKEKKKEKEQEKSTDSEKDLKRKIEAPIEKIRIKFSGEPSEKYRKINEEPPKKEHRDKGRKEEKSHKHRSDDDDSSPKKKKHRDSDESSEKKKKKHKHDSDSALKLREGSPLSVDKEKSPMKIRIGQGQPSISLAANEDKNHPPIKLKLNVKFNMPSQETDGSKKDKKEPHKEKEKDKEKEKEEDKGKEKEKHKDKDKDKEHKKKSREDETEEERRARKEAKRLKRQKEEQEDDAKLQEKLARKAAKKEQKRLEKEKSESSTGTVNLSAAGSA

SEQ ID NO: 8685 - protein, 1474 aa, Caenorhabditis elegans
MSGRPAFEQFTAQPPQPAGEVVAQQAGDGAQGQELTISKLENAITSMEEQGLQNDHRHAKAVLLKQKLQSGLPDAVPGQENGGNQQITPAQLNQLRAQVSAYRLLARNEQVPANLIADAVMLRPKVTTLLPEPYEYPGEAENGEKLPYDLMKIFNLHQIRCNRPTTISVPSGIDPVGMLKQRENMIQNRIGLRMKLLNNLPADIPDHMKLKAEIELRALRLVNLQTQVRSEVMACLKRDTTLETALNPYAYRRTKRQSLREARVTEKLEKQQKMEQERKRRQKHTDLMQAIIQHGKEFKEYHRNNLLKMAKSRKAVMTYHQNNERERKKDEIRNEKLRMQKLMQEDEEGYRALLDEKKDQRLVYLLQQTDEYVDSLCSLVRQHQNTEKKKKKEDKKIEKGNQMDEEARVHVRERSTGKALTGDQAPKTEEIEFWLETHPEYEIVPRDQLSDDEEEEEEEAPVEPEEEKDDQYAGMDEETKAKMILEKARNEEDEYDQKTKKQMADYYATAHKIKEKVVKQHTTMGGGDPNLLLKPYQIKGLEWMVSLYNNNLNGILADEMGLGKTIQTISLVTYLMEVKQNNGPYLVIVPLSTLSNWQNEFAKWAPSVTTIIYKGTKDARRRVEGQIRKGAFNVLMTTYEYVIKEKALLGKIRWKYMIIDEGHRLKNHNCKLTLMLNGFFHAQHRLLLTGTPLQNKLPELWALLNFLLPSIFSSCGTFEQWFNAPFATTGEKVELNQEETMLIIRRLHKVLRPFLLRRLKKEVESQLPDKTEYVIKCDQSALQKVIYRHMQKGLLLDAKMSSGARSLMNTVVHLRKLCNHPFLFPNIEDSCRAYWKVNEVNGTDLMRVAGKLELLDRILPKLKATGHRILMFFQMTSMMNIFEDFLNFRRYTYLRLDGSTKPDERGDLLTQFNAPNSDLFLFMLSTRAGGLGLNLQTADTVIIFDSDWNPHQDMQAQDRAHRIGQKKEVRVLRLITANSVEEKILAAARYKLNVDEKVIQAGKFDQRSTGAERKQMLEQIIQADGEEEEEEEVPDDETVNQMVARSEEEFNIFQSMDIDRRREEANQLHRKPRLLEEHEIPDDILKLSFDYEEMERAREEGREVVDQTPNQRRRRREVDYSSDLLSDEQFMKQVEEVEDENNQAVAERKKQRKRKMAGLDENDDSMDDVVLQHKKKKTDPELAEKINEMLDVILEYKNEDGELIADVFQTLPTRKELPDYYQVISKPMDFDRINKKIETGRYTVMEELNDDMNLLVNNAQTYNEEGSEIYVSSETIGKLWKEQYDKFMNPPKPVEEPVKKKEPSTPSTSSSRPSTSGTPSVSDLQRTQQATAQQMLMLMTHMQSLPPAQAQQFQQALMTQTGGNQALMLQYMQSAMLAQRAQASTKVTPKKDEKKETSSSVKTEEAKKDDEPSTSSASAPPPKKKKESEDSEDPMEEDEEEEIIGQKKEPASSRRKSRPTRRFSNEDEEEEDDE

SEQ ID NO: 8686 - protein, 1529 aa, Caenorhabditis elegans
MYNCRSPLKEIIKKTLNIKFSFQTKFLSDDEFLHQGISEPDQPSTSKELDEVVTKIEIFDEENGNCDDGIERQKKFLKVLRELVNLVAEKQWYARHGGAIAICQIASTSYDRLSYELIDTILYLLIHVLILDKFNDFISGRNATAPVREQCAQALVHMLRNTDEKRREVVLEIVVQMVRTPGEKNWNIRQSGLLILKYYFAIARNDGTEHQKTFNQCFNLVIQSLDDSVDDVTGCAVKTLASILSNKEIPQEEMSQLVEKVMSHVWKLLDLEAAKEQLRAGLDALCIDLLEIVELWLRWNQHVGISRESLLTICSTIDAAFPVRCEKIVQLLEADIERPQSNKLSAEDVFIIIKQLYRILLFAPPADSLLFLEKTFITFSKIFKCYRQDLLIENGLVSQKIGNWLGCLLLDHRNPQIDVFACDVDGISSNRSSPTELMCSEEMRFLGEKEKDKVYLTRKILCAKFLAIILEALYESDGEIQGQRIDIAVQLLFIPFFQSKSIMHNLGVSIIVNEWAALYRSGITAKTLEKPPPLTIIQLADGIVRGPGKQYDEMTTIVMGLTKDCNEFIEYCVVRGFDRTSAEARGESPEDVSKAAYSIVRPNLKTEKQRESIDSRYNTLCRSIENAKMNIKSNGIRINALLSSTLFYFGNAPEKLTPQIRPIVETMQTEENDAMASEVFRGAVPLLVMFSWSRNPRPYVKVFAKAFESFSGCPIRMPKLGASSPGALEPWTTTIISMRRIWGKETDDGFEESSGMISAESRNAELFLNILCQFNASQLAEFYCHFDLSEDVDLNTFLTRLELHNSLWNRVGSRLSDQSADKIFSLVPSEDPAIRYAFAKAIETFFKSSCGDTLSKCYNRLVVLSKDLDNVNSRLSAVEVFLRLCMMDTRYLNGWATLLAPVIFPLLADQCETVRDAAGEAFRRLIPVITLENPDFSIEGMSQELLAKKSEYSNFINVLGSPSSLPRVIRADIRGGFDTSMLREYQLEGITWIRFLRTYGLHGILADDMGLGKTLQTMCSIALSVDRDEMSEFHRCSLIVCPRTLVDHWCLEWNRFFPQRVPASKNLTRCHGAEICVIAYDELKTAYMMDRVWNYIVLDEGHVMRNSKLRAWKFASQLVGKSRLILSGTPVQNSPADLWSLFAWLMPGYLGSEKQFRSQFLKKIMKCRLPKANEADLKAGSAAISQLHKLVLPFVMRRLKTEVLKELPEKNVQDYECELTEDQKEIYRFVVDRCTSSQEDVGLSSLVTLITLRKLTDHTKLVHDTLAKIGAPQYILSKALAAKSGKMEALKQLLIECEICKNPDEEVEQPEDLGGLVASGHRALIFCQWKTSAKLVSDALKSGEFGSVVSHLVLDGSVPAGDRMKMVNRFNEDKTIDVLILTTHVGGVGLNLTGADTVIFLDHDWNPMKDLQAIDRAHRLGQTRNVNVYRLITQGTVEEKVMSLAKFKLNTAQALIGADNTSMMTMETGELMNMFTLDGDEAKKKPGGGEPAAKKSKKSTGAPEEVDLASMWDESQYDDFQVDSFLRNT

SEQ ID NO: 8687 - protein, 1829 aa, Caenorhabditis elegans [sequence omitted]

SEQ ID NO: 8688 - protein, 1785 aa, Caenorhabditis elegans
MSTKPEPENPDSGTPKTLSVDDDDIVVIEDQNTPKYREAALRRSNSSSSDFDEKWEPELDEEDFCENDADVLAEPISSKSRKKSRRSDSSEFVPSEESDDDEEYEVLEKSRKKGRKSGSSSRSSSDDFIESDDNEDYKSAGLLDDNDSKNFKARIDKLKPEATSELVDTRMVTSEEYGKSSKPWKVNAGVWNKLHKFQQEGVEWLQKKTDHRSGGILADEMGLGKTIQSVVFLRSIQETARTHYKTTGLDTALIVCHVSIIAQWIKELNQWFPKARVFLLHSHCSTGRQEDYVGSIFRKLQRRRKEYPDGAIILTTYSLFTKLKKPIVKHLWQVVILDEGHYIRNENTKCSIAMRKLMTTQRFILTGTPFQNRLSEFWKLVDFVHPGRLSDSATFHRNFTHIINAGANLNCSPEAAAKAYECLVALHIAVKPLILRRLQEDHKEVLQLPEKQEIVLSCELSKRQRRLYMEYGNSHQVNEIIERRLKAFVGINHLTNICNHPGIYRSLSPASPKFGSIKDSGKVEMTFKLFDDWFKSPTNRVILFTQRRTVITMMEYFLAEKGIKCVSLTGADSAAARPKIIKKFEDDVSIKVFLMTTRAGGLGLNLTCANKVIIFDPDWNPQADNQAKNRIYRMGQTNDVAIYRLVSNGTIEDLKFFKQVQKENLAARLLHNAEIDQFVPNNTLADLFRLKPKGLEGSEIGVYLDGEIAREGSKKQKRDKVEKKAAKKRMKNKLAGFEDKKLLLSLFDDDKLVAMREHSISLQNSSSMNRIEKMKMRKSIDDAVGSLLHTEGRLAHTWKQVFHKQLRKTLKKSINGDYFVEEEQLDSYWNTVHSGFRANDDQRELDRLVKLATDMLQFFNGVPGAKEDSIHRIFVKDSDRKDPTQMFFIQEIISTLAKYDDASDTWILRDKYRSADVLSPVKKKNKRRSDDNDEVDAKRARKSREWSDSSGPSNMTEKWTVYRDPINSTQNRDNKDTNGIASDDTNGDQEKWDSALKYRQAKAFWMRHTGQLNISARNANKNRANASERNEQRPDKNNDAIVIKPTNTSNDRKSLKRRPDALPDPPIEKRHKQTTVDSDDDVMIIERTPEKTSAGLSSALIVCPEAKLSEWMLAIRHQFDYARIFVLHKASTTGHETDYVEKIFQDLKETKKIPFGAVLLTTFAEFGKHEKAIVDHQWQLVYLDQGLFEMTRQMRNQIEGMKKLKTPNRFIFTDTSVRDRLEELWWNVDFVFPGRLSDYKTFQTNFQNVIEIGCRLDATPEEASTAYECIVALHVALKPLILSRLIKNPNDWFCRREISKKEVEHIKVRIFVKQYFEQTLFFQDIICPLSKRQRRCLKIYKRSDEVQGILRQSSAACVGLKKLTDICDHPGIHKGVTPETKKFGSIEDSGKVRIVFQLLDMWLGTPGAKVVIFTQRRQVAVMLEHFMKQKRIAYCSFLKAKNAYDRENVVNYFENTTDVQILLAPSIMFKLGMQLKKANKVIIFDPEWNPDSDVKHTREMSFLTKKVEDVTVVRLVSEGTVEDSSYFKKLWESGLASRLLSDPKFEPFVPRTTLEEFLTVRPKIKAGKNDMPVVKSHMKNRLLEYEDKQLLSSIIDTTRLDTIRTHFTSFQYHSTTSDRIKSRDVVNRAVRSIIQIDSRLARYWRQMYHQIVDEPTLDPPNPEFYVEPMQIDPYWEAVHPMVPRTSDREELNFLVAMAVDVRSHMLKCYGETEKKLRELFVRNADRSNPIRMFFIYDIFWTFAKFHENWQLWIIRPDLTVNPEEWGPEAMKTRWLRHWIDQYLCC

SEQ ID NO: 8689 - protein, 1461 aa, Caenorhabditis elegans
MWNQSESSSGSDAEPDEKTDEPVREEENPEGNSTSEDNDEKEKAADSPESSSDQSDDSDDASENSSSSEPDEPAPKKKNNNNRGMDAETRKLLENENYFRRSKRSKRQDDSPSDNSEESQSSEDDWDDRRKPRRTVTKKVVKQTKKAVSVVKRKSVKGNVNYAEKNSDDDIDDDDVLEWDEEPAVPAEGPAILTETVERVIKWRHGVPGATGSATTCYNIADKGDPNDQIPGDKTEQQFFVKWTGWSHLHNTWESENSLALMNAKGLKKVQNYVKKQKEVEMWKRSADKEYIEFFECEQQMAEELCEEYKKVERVVAHQTSRDRAADGSMATEYLIKWSGLPYSDCTWEDEKMVAPEQIKAYYHRIENLKSPNKNSNVLRKRPKFEKFESMPDFLKTDGESTHKLRDYQLEGLNWMVYAWCKGNSSILADEMGLGKTIQSISLLASLFHRYDLAGPYLVVVPLSTMAAWQKEFAQWAPEMNLVVYMGDVVSRDMIRQYEWFVGGTKKMKINAILTTYEILLKDKAFLSSIDWAALLVDEAHRLKNDESLLYKSLTQFRFNHKLLITGTPLQNSLKELWALLHFIMPEKFDCWEEFETAHNESNHKGISALHKKLEPFLLRRVKKDVEKSLPPKTEQILRVDMTAHQKQFYKWILTKNYRELSKGVKGSINGFVNLVMELKKCCNHASLTRQYDHIYDDAQGRLQQLLKSSGKLILLDKLLCRLKDKGHRVLIFSQMVMMLDILQEYLQLRRFPSQRLDGSMRADLRKQALDHYNAPGSTDFAFLLSTRAGGLGINLATADTVIIFDSDWNPQNDLQAMSRAHRIGQTKTVNIYRLVTKGSVEEEIVERAKRKLVLDHLVIQRMDTTGKTVLSKNATASGSVPFDKQELSAILKFGAVELFKEKEGEEQEPEVDIDRILMGAETREAEEEVMKENELLSSFKYANFAIDEEKDIAAATDEWAAIIPEEDRNRILEEERMKELAEMNLAPRQRKQPIPQVVEDDDGDDDEEEDDTGKKKKKKAVGNFTIPEIKRFIKSFRKFSMPLNRLEEIAQDAELEEHSTDEMKKLVESLSEACKKAADEFDSNEKNGDAGAAESEKKDIERKFKFHTCDVNLKQIERSHAELKPLHEILKSEETKTSFKPPANAKLQKGWDVDWSRPDDSALLLGVWKYGYGSWEAIKMDPTLGLADKIFIKDKTKKPQGKNLQVRVDYLLKLMSKDKVKTTEKKERKRKADDVPVGPEKKKRHTNNVPQEGEKKKKEKKEEKNSSSLKDQLALLSIDKSLYGGALEDSSAKPFLECVKLCMPVHKYMKKLKEAQEAKNQADEAKYLTRLGDSFLENLETLIKKKPKTNIRKWYNYLWIFLCKFTLREPGEMADRYRSITSDKHKNHHHHHHHKSKEEKPKEAKDHKERDREKDRERNRGERRMDHGEGTSKDHHREHHKDHHKDHHHREQHKEKNRRH

SEQ ID NO: 8690 - protein, 1465 aa, Caenorhabditis elegans
MWNQSESSSGSDAEPDEKTDEPVREEENPEGNSTSEDNDEKEKAADSPESSSDQSDDSDDASENSSSSEPDEPAPKKKNNNNRGMDAETRKLLENENYFRRSKRSKRQDDSPSDNSEESQSSEDDWDDRRKPRRTVTKKVVKQTKKAVSVVKRKSVKGNVNYAEKNSDDDIDDDDVLEWDEEPAVPAEGPAILTETVERVIKWRHGVPGATGSATTCYNIADKGDPNDQIPGDKTEQQFFVKWTGWSHLHNTWESENSLALMNAKGLKKVQNYVKKQKEVEMWKRSADKEYIEFFECEQQMAEELCEEYKKVERVVAHQTSRDRAADGSMATEYLIKWSGLPYSDCTWEDEKMVAPEQIKAYYHRIENLKSPNKNSNVLRKRPKFEKFESMPDFLKTDGESTHKLRDYQLEGLNWMVYAWCKGNSSILADEMGLGKTIQSISLLASLFHRYDLAGPYLVVVPLSTMAAWQKEFAQWAPEMNLVVYMGDVVSRDMIRQYEWFVGGTKKMKINAILTTYEILLKDKAFLSSIDWAALLVDEAHRLKNDESLLYKSLTQFRFNHKLLITGTPLQNSLKELWALLHFIMPEKFDCWEEFETAHNESNHKGISALHKKLEPFLLRRVKKDVEKSLPPKTEQILRVDMTAHQKQFYKWILTKNYRELSKGVKGSINGFVNLVMELKKCCNHASLTRQYDHIYDDAQGRLQQLLKSSGKLILLDKLLCRLKDKGHRVLIFSQMVMMLDILQEYLQLRRFPSQRLDGSMRADLRKQALDHYNAPGSTDFAFLLSTRAGGLGINLATADTVIIFDSDWNPQNDLQAMSRAHRIGQTKTVNIYRLVTKGSVEEEIVERAKRKLVLDHLVIQRMDTTGKTVLSKNATASGSVPFDKQELSAILKFGAVELFKEKEGEEQEPEVDIDRILMGAETREAEEEVMKENELLSSFKYANFAIDEEKDIAAATDEWAAIIPEEDRNRILEEERMKELAEMNLAPRQRKQPIPQVVEDDDGDDDEEEDDTGKKKKKKAVGNFTIPEIKRFIKSFRKFSMPLNRLEEIAQDAELEEHSTDEMKKLVESLSEACKKAADEFDSNEKNGDAGAAESEKKDIERKFKFHTCDVNLKQIERSHAELKPLHEILKSEETKTSFKPPANAKLQKGWDVDWSRPDDSALLLGVWKYGYGSWEAIKMDPTLGLADKIFIKDKTKKPQGKNLQVRVDYLLKLMSKDKVKTTEKKERKRKADDVPVGPEKKKRHTNNVPQEGEKKKKEKKEEKNSSSLKDQLALLSIDKSLYGGALEDSSAKPFLECVKLCMPVHKYMKKLKEAQEAKNQADEAKYLTRLGDSFLENLETLIKKKPKTNIRKWYNYLWIFLCKFTLREPGEMADRYRSITSDKHKNHHHHHHHKSKEEKPKEAKDHKERDREKDRERNRGERRMDHGEGTSKDHHREHHKDHHKDHHHREQHKVFIKKTTTFF

SEQ ID NO: 8691 - protein, 1933 aa, Caenorhabditis elegans
MPATPVRASSTRISRRTSSRSVADDQPSTSSAVAPPPSPIAIETDEDAVVEEEKKKKKTSDDLEIITPRTPVDRRIPYICSILLTENRSIRDKFGKAKYREAQQARSNNYSASRRAVLSSGPVRQEDHEEQIARAQRIQPVVDQIQRVEQIILNGSVEDILKDPRFAVMADLTKEPPPTPAPPPPIQKTMQPIEVKIEDSEGSNTAQPSVLPSCGGGETNVERAAKREAHVLARIAELRKNGLWSNSRLPKCVEPERNKTHWDYLLEEVKWMAVDFRTETNTKRKIAKVIAHAIAKQHRDKQIEIERAAEREIKEKRKMCAGIAKMVRDFWSSTDKVVDIRAKEVLESRLRKARNKHLMFVIGQVDEMSNIVQEGLVSSSKSPSIASDRDDKDEEFKAPGSDSESDDEQTIANAEKSQKKEDVRQEVDALQNEATVDMDDFLYTLPPEYLKAYGLTQEDLEEMKREKLEEQKARKEACGDNEEKMEIDELKSQILLHILVVLLLSESPSSDAQKPSTSSSDLTAEQLQDPTAEDGNGDGHGVLENVDYVKLNSQDSDERQQELANIAEEALKFQPKGYTLETTQVKTPVPFLIRGQLREYQMVGLDWMVTLYEKNLNGILADEMGLGKTIQTISLLAHMACSESIWGPHLIVVPTSVILNWEMEFKKWCPALKILTYFGTAKERAEKRKGWMKPNCFHVCITSYKTVTQDIRAFKQRAWQYLILDEAQNIKNWKSQRWQALLNVRARRRLLLTGTPLQNSLMELWSLMHFLMPTIFSSHDDFKDWFSNPLTGMMEGNMEFNAPLIGRLHKVLRPFILRRLKKEVEKQLPEKTEHIVNCSLSKRQRYLYDDFMSRRSTKENLKSGNMMSVLNIVMQLRKCCNHPNLFEPRPVVAPFVVEKLQLDVPARLFEISQQDPSSSSASQIPEIFNLSKIGYQSSVRSAKPLIEELEAMSTYPEPRAPEVGGFRFNRTAFVAKNPHTEESEDEGVMRSRVLLKIANFRVRDDVIQNQLMEQLNHFKMEIHTTKCSNRPQTSCIRSKTVVNTVPLTISTDRSGFHFNMANVGRGVVRLDDSARMSPPLKRQKLTGTATNWSDYVPRHVVEKMEESRKNQLEIVRRRFEMIRAPIIPLEMVALVREEIIAEFPRLAVEEDEVVQERLLEYCELLVQRFGMYVEPVLTDAWQCRPSSSGLPSYIRNNLSNIELNSRSLLLNTSTNFDTRMSISRALQFPELRLIEYDCGKLQTLAVLLRQLYLYKHRCLIFTQMSKMLDVLQTFLSHHGYQYFRLDGTTGVEQRQAMMERFNADPKVFCFILSTRSGGVGVNLTGADTVIFYDSDWNPTMDAQAQDRCHRIGQTRNVSIYRLISERTIEENILRKATQKRRLGELAIDEAGFTPEFFKQSDSIRDLFDGENVEVTAVADVATTMSEKEMEVAMAKCEDEADVNAAKIAVAEANVDNAEFDEKSLPPMSNLQGDEEADEKYMELIQQLKPIERYAINFLETQYKPEFEEECKEAEALIDQKREEWDKNLNDTAVIDLDDSDSLLLNDPSTSADFYQSSSLLDEVRDRRRRSSSLLQKAAQKPAKKPQNFQIRARSPSKRKSQAPSFDPYVSYAPHALASPPDSPRKRRSRGARSLGSGGGGGGGSRSVGRPARRSVKKEESDDDDEDYCQEEEVKRNPAEKVPPKRKRVVFVEPPEVKPPEPKKRVVVPAPSSSSSALTTLPQQGPLISLPKAVPVVPRPQQQAPPQLIKKHQQTLMPVKVLKISGGGGGTPGPSSVSPGPSILRRTVVPGIGAGGVGRLPLVRMPVRPPFPGSQAPAPPLRSGVAPTAPAAAPRQFVVPSSRVRVITTRTPVATTMVQQQQSPSPLMFPVRVVQRPGPSGPPPPGPPDRPGFGIYEKPRFSLGSRRSRGDSGPEDPAPPQPPPPTTSRPPPQA

SEQ ID NO: 8692 - protein, 2957 aa, Caenorhabditis elegans
MSQMADYTMMGGPPPQQSQQSQQGVPQRYPGQPMNPYEQQQQHHQMMMMQQQHQMQHMAPPPQQVPPQPAQPPPAKKARGKSKKAQAEAAAAAAAAAAAQMDPMASMAAMSNNPMMRQGGYPNQMAMYGGVPPPHYPSSNGPSQQGYRPGPVTNGPPPQGQYPPPPQAPQNYQQMYHQQRAQQQQAGQQQAQGPPGYGPYGYAPQASTGYPPPPSQQSPYAPQAGPPPQMRHQYPPHSQQQAPPGYWDGYQGYGGPPPSQQQQQQGGGPVTAPQSMQMAQQEQWGRVGTNDLMNVIAQVEKSSAECKARIQQLYNMQRSASADAEVQQLQHKLAQFQSDHYRYSQQLQHVQWQQQQQQQQAAAAAAAAAAAASAGGHHQGPPPPTSSQSNQIPSNPNSVPVHVNQPGSQVHITADKTRTLISVYHDGYGGAGSGASSTESKESIVPPEPTPSMQESPVPNAPQVKMEPEKPSPYQQQYNGMENGSGNPYAQQQQQHPMYAQYQQQQQQHAQHQQNMSGYPQQQQQPQHPHQHQQPASVPMQHHPQQHPSQHQTQPNQQQQQHPSGYGIGVSTAPASMEPSQSVDQSAPPSQAQIPATSTPSTSSQQQNAYPEFPDFPSSSGYQEPTVAPEAIPSPSVSDPIMPQSSQNDQELQAISDQQEILEDVPKEEPIIEEDEPKYEYSQETIPVEELKDEVEFKEDQQSTSNLLEDDTGIDNFVKNEEGAEAGYSNGTPLDQVEQNDYENIEKEEPQVSVDPEPVEVEAQQEPADTEEYPIPSVGTIEEPAEEPAEEPVEEPEPMDDSSPVDQSTPVKADDIENFAGVEETFGEEEEVQDEDDDEASSAKSSKDDIKEEEDDDTSTITKDMSEAPSETNDGFTEPSTPATPLMGATSSKKKSYRRPAVVVAKSRKKKSVDDSDDDDFYPQRGRGKKKGGGGKKKADPTDEAGVEGAKSDDEDDEFLMKIDTPAPDPNAMVVEKILNMRMGKVEKKVPETEVAEGSEENGEEKSEEKVKKEPKENGENGESVGNGESSKSKTESETNEIEEEEVEQFLIKWKGRSYVHCEWKTAAELLEIDKRVEAKIKRFKVKKMSSYIEDDEDFNSDFVIVDRVVDLITEDDGQEFVLIKWKSLGYEEVTWEPIEMIPADKVELWRERQVIDPAKIREKQRPEPEEWKKMSTSKVWKNGNSLREYQFEGVDWLLYCYYNAQNCILADEMGLGKTVQTITFLSRIYDYGIHGPFLVVVPLSTIQNWVREFETWTDMNAIVYHGSAYAREVLQQYEVFYDKRHCGAKNWKKNFVKIDALITTFETVVSDVEFLKKIPWRVCVIDEAHRLKNRNCKLLVNGLLAFRMEHRVLLTGTPLQNNIDELFSLLNFLHPQQFDNSATFLEQFGSCQTDDQVQKLQEILKPMMLRRLKEDVEKSLGPKEETIIEVQLSDMQKKFYRAILERNFSHLCKGTSAPSLMNVMMELRKCCNHPFLINGAEEAIMNDFRLAHPDWDEETLAHKALIQASGKVVLIEKLLPKLRKDGHKVLIFSQMVKVLDLLEEFLISMSYPFERIDGNVRGDLRQAAIDRFSKENSDRFVFLLCTRAGGLGINLTAADTVIIFDSDWNPQNDLQAQARCHRIGQKKLVKVYRLITSNTYEREMFDKASLKLGLDKAVLQSTTALKAEGTALSKKDVEELLKKGAYGSIMDEENESSKFNEEDIETILQRRTQTITLEAGQKGSLFAKATFNSSHNKGDDIDIDDPEFWTKWAEKAQVDVEKATATPDGRELIIEEPRKRTKRFEENKDEGDSDGSEESGNRKRGAAEKRKRRRGNDEDGDYSGSYRPDELATSKAEYFKVEKVLAQYGWGRWAEIKKYGELEISEQDIEHMSRTLLLHCIREFRGDDRIRQFVFNLIRPQGIQENQKLGAGSMYNQGWAGLPEFNPPSFALDSAFQRHVHRHANKLMVKIDMLKHLEIHLIGDERALVEDFNVKWTDIKLPEMPTISETFIEGWDSDCDKCFLIGCWRHGLDNFDAIRVDENLCFAEKNLAVWPGQTDFWLRFRRLLTSSQKSVHDPVYNKLNWTKREEQEFIRVVRSYGVKTNIGEGGNEDWTIFKTLSPILEKKTDEDCHEQLMCVLAMCQRAQGSNDLKPIDLKRAMSIDPMPTRKAIKMMNRISLMRKVHTMVQTLSELNLELCETTGMPSGWCMQHDKELMEICDQCGLDQLAANVLNKPAFTKIVRPSETTLLRRLLEIVATIESGKWCGVADVETVNDSDSEDKKDMAAVAAAQAQFLRLQQQQQQQQQAAAVAASSSASRKASRKRPNNDNDAKMRAMQQMLMGQGGSGAAEYASMIALMLMPQMMAASGGQNMTAAQQQALNQMLTMLIAGAVQQQQQAQPSTSKGASSSQSSAQANQAAQAQAAAVALAQVAAAASASTSSADAQAVAQQQQVLEALLAMSMNPAALAALTGTSSSTGTSTPSAPKKSKPAPQKESTSSATAAAAAASAQAAALAAAQQQQQQAQQAQQAAQQAQSAKTQEELLILRLLELAGVGMQELAKLNTMSKDARVPMIHKQTRESLPVSKRPPIRDLTVFVMSNPEWSIDIPLFNEMSGNGTGSGAAPSSKAASSRPTPAATPLAVATPKPSTPKVEKSSATPSAPETPSASATCNIKIGESLQFDDMISVFNRKTGELLAASKWPKATELSAWLDANPDYNVHANSALFAHLSLGGAHSDRIGDATPAVTASVPSTPTPSTSASAANAQLMALALAQQVQQAQQTPSTPTSSKSRSATAAAQAAAAQAAASQQDAITKQQLEMLQMQMMLQQYQQAAALQSMLYGGYGMPTTSTAASSSSTANVASMAAMAAAAQAASTPTTSKQASASTSTPSTSAVASAQTPSTSVPSTSSQAAAAAASSANSGEDINPLLLTALMQNPAILQSMMLSDPSILAALAAAQQQQQQQQPSAKKSKHP

SEQ ID NO: 8693 - protein, 818 aa, Caenorhabditis elegans
MPKKTFENLEDSHGKDVNIPVELPKRKREVTPENLPSTSSTAPTQKRKSLGYSGRTEEPKNIHKTFISPFSTSVSPSKQGLRRRKKALPAIEPPVSVEEASPLRFVNIDVFSRRMASESSDHDAMIAKLLSRKFSIPMEGYMLSGRSLGLGGNRRKCALFDPYHEGALILYAPEHLSEHAQLKEDKDRKVHVVADPVVGKILRPHQRDGVKFMWDCVTGINIPEFHGCIMADEMGLGKTLQCISLLWTLLRQSPDACPTVSKSIIVCPSSLVKNWDKEIKKWLGTRLNAMPVDSGKREQIIACLNSFMADSKMRCAIPVLIISYETFRLYANILHSGDVGIVICDEGHRLKNSENLTYQALSGLKCARRVLISGTPIQNDLLEYFSLVNFVNPGLLGTASEFRKKFENAILKGRDADASSEDQKKGEEKTKEMISLVEKCIIRRTSALLTKYLPVKYEHIICCKNSTLQETLYNKLIECEKQNRIVEKDKGATASALSFITHLKKLCNHPYLVYDEFQKPDNRFRNKCLSIFPESFNPKSFDPSFSGKMKVLDYILAVTRKTTDDKFVLVSNYTQTIDQFMELCKLRGYDFVRLDGSMSIKQRSKIVDTFNDPASTIFCFLLSSKAGGCGLNLIGANRLVMFDPDWNPANDDQAMARVWRDGQKKMCFIYRLLATGSIEEKMFQRQTHKKALSSCVVDAGEDVARHFSSEQLRELFKLESTVASDTHEKLKCKRCIQGVESVDPPTNADCASDLSNWFHSQKSARKVADNVLRAVFECGSISFVFHQKSHNVEVKKVQEKVEEVDEDYVPSEAEENDD

SEQ ID NO: 8694 - protein, 1038 aa, Caenorhabditis elegans
MSTTSDFQTGERVRVAHQGNPQSSSLQADMDAKKALLSQNLNNGHLTARPPRTTGPGIKYGEKKPKKQKGSDDDDEDYVDETMPSEDEEDFDNNEEDEDDDDYEEEGPRKRKAPSKKKLVYPRENYRREDSETPEPEMKRIRTLSDSSDDEWMTKPRLNGSESPIGNVMRTQMAKRSAASKRKIVIDDESEDDFINDEEISEKGSGKGSEKEESEGSGKDSETEEVTMKQGQSLKAAMAKAQKEQKKKAESDEDWEEDEDDMNADGDETPSDDSDIEERRAKRGETKNQKECREFFNKAKKEDLLQQARINDKIADFVLANRPFEIYGAMVAKMKGVTRGTNAIEAYMEFLEKRGILSRILDDCKDHAHTVTKDFERCTEGPLQLPLLKEGCTLHDYQLIGVKWLIMMYNKDLNAILGDEMGLGKTIQIVAFLSYLKQIGKTGPHLIVVPSSTIENWIGEFHKWCPSIQLLTYYGSQDERKHLRHRVKKQKDHIDVILTTYNMVTSKSDDKKFFKNFSLNYVIYDEGHMLKNCDSERYRGLMKVKGKKKILLTGTPLQNNLIELISLMYFVLSKVFNKYCEDITHLLQHFKQLGPALDTKNKALYQQDRIEEAKAILQPYILRRLKNQVLGSLPSKSEQIIEVEMKKPQKQLYDNIVEALQQSEESGDSYGSLMRLRQAANHPLLRRSEYTDQKLDKIAKMLCLREKAYADKKWQHVSEDLAWLSDIKIHQLCERFRCTSKFLLNEQLALKSGKCEQLDVMLPEIQKKGDKVLIFSQFTSMLDILEVYLNIRGYSYKRLDGQTPVLDRQEMINEFNLSKDLFVFLLSTRAGGLGINLTSANHIIIHDIDFNPYNDKQAEDRCHRMGQEKPVHVTRLVSKGTVEVGMLALAKKKLQLEKQVTDGVKGQLDEVHFIENFKFLLEEIEIYRKFRKFDLFKSPNIPEIQKKKSKNSDFFTGKKYALRELKEEEGGEQCGGRDLSKLLSSAISGRYDDVEDDSGDSKNGIDAEEAAKKEDEAVKEPVEKEQQKEEESQPSTSA

SEQ ID NO: 8695 - protein, 1091 aa, Caenorhabditis elegans
MSSPRRTRIMFDTSSDDSQSDEKIDDFICRSSPQRQSKESDDQEDSVVDESMKSVNSPIVNTPSSTASHCTNSFATSTPKSKSNASTRLGSSYGSSRSSSQNHESHDRSRSFVQYDENKPLTPISKKLAESTDLRSKAQLRERLLRKSLKQNAEDSSPTRAASGGGWGSSADVKKSPEVSTGLFETALSPIAKSDRRSSEYNSSTFLNVQKVATSTAINDIGGREEIVDESFPAPRTTAKQDDSDIIEVTPEKVVSNEKRKSGIAINLDDSDIIDVTPVKTTSSRPPEPQRPRLPTSPINSEYAKLSYKELLAKKNKVMGLISLSLDLPDGGRRVIKQFQELDDEVERRKEMGLAEEIVDDDEDDEIFVIEDDEPSHRQVAPKFPSGSVMTQNGLLPKRHIVDPLKAPQPDFNAMLEKDNKKMMSGKMTDEKYKRIQLVSDRVVRQLAEATHTIPDETELTDTPKGFKLELMPHQKAGLTWMRWRETQPQPGGILADDMGLGKTLSMISLIAHQKAARRARREDGNDDKDKEKRKVVKEQGLIPSNGTLIVAPASLIHQWDAEIDRRLDDSVLSTYMFHGTKKQRDIDARRLARYDVVITTFNLIANELIEKIRTKSKADDSSDGESDSNHTGIRRAVGKDDSVLAQICWSRVILDEAHTIKNRQSLASKAVCRLSAFSRWCLSGTPIHNNLWDLYSLVRFLRIRPFSDDKYWKESIMPMKPIMADRVNLLTKNLLLRRTKDQTCAVTNQKLVQLPPKNVEVHELELDGDEAQAYEIMMEAAKKFVKKLLQDSNDMKNHGFIPRRNRRAGKEGEVQNPFNFGPRDLAAGSNFEKMSCVLMLLLRLRQACVHFNITKTGVDMDAFSLIGGDNAEEANVDDLNELLEKTMNMTLGNGDNEERDKPRATTRIFDPDYLSCKIKNTLEIVENIMEKKEKVVIVSQWTSVLNLIEIHIKSSGFKYTSITGQVLVKDRQERVDSFNREKGGARVMLLSLAAGGVGLNLTGGNHLVMVDLHWNPALEQQAFDRIYRMGQKKDVFIHRLVTKGTIEQRVVMLQKDKVALASSVLDGNATRKMNKLTTADIKMLFGLNEK

SEQ ID NO: 8696 - protein, 751 aa, Caenorhabditis elegans
MSRVVLNVDSYEGNDTPSAEIARFVVLYGKASTRKHKIWEGDGLLVCFTDSCLLKSEDERDVICSSQNLSQNDPPPSYRRLLAPRAPPPAAPAPPQFRRKSLHLYSTNRIFSIEKPRQQSLWTRDSRDISDLIRNLEFNLFSIGLGEAPGKTVVVAEQFSPTIWDSERVYRRWLPRSKTAQQLANSCLIIVPSSLVNNWKAEFDKWWRLMRFPAVIALTANDITTYQSTIKLMPYLVISYDLAQRHVEKLKIIRFDVMVCDEGHKLKNLDGKLRKTLLSLEIPRRLILTGTPMQNDFEEFYSLLDFVRPSVFGSIVEFRKMCSDRPEQLNELIDECMLRRTAADVDLKHLPEKHEYILFCAASPIQKHVHSEICDYMTGDALSLIFFARQLANHPKLLLDNLREKTEKSKAHKHSPLLLAFDGAHMPRGGVKESGKLTALVDMIKCFRLLQECTVIVSNYIETLDMIQQLCEYLNFKVLRLDGKTQVPDRQKLVRTFNDHRDPSNIFLLSTKAGGVGLNLIGASRLVLFDSDWNPANDQQAMARIWRDGQVRPCHIYRLITTGTIEEKMLQRQIKKTGLGCVIDAIEVGDTIATFTDEDLKDIFTFTGSATECNTHDLCECPCDGCGMLENEMDEEDDGDDVVENDAEKIDKSGKIDKIDSDDDEEADDEELEADVTDEVVEDSQEPPEATKPAVAAAGLRTIASLAELSRWRHFSPRHADTWHHFMTNAGLSQVDTDVELTFAFYQESQY

SEQ ID NO: 8697 - protein, 687 aa, Caenorhabditis elegans
MVLTDEQRQAIAKKREEAIRRAAAYREREMQAAANATASTSSAAPPAPPKPVIPVMFSQNRQPMKPTMNNSTKQSTINNYIKQVQKPEPTSLIKPTIGVKLKLDIGDRIKIEFYPFHSAVIDLIKQVPSRNYDPAKRSWTVASSDHITISNILKNATAVKVELEPLPQNIIGLTNFKPKAAPSDLNTVMDPSLIERLFPYQKEGVIFALERDGRILLADEMGLGKSVQALTIARYYKADWPLLIVCPASVKGAWKKQLNTFFPIIHRIFIVDKSSDPLPDVCTSNTVAIMSYEQMVLKHDILKKEKYRTIIFDESHMLKDGKARRTKVATDLSKVALHVILLSGTPALSRPSELFTQIRLIDHKLFTNFHEFAIRYCDGKQGRFCFEAKGCTNSEELAAIMFKRLMIRRLKADVLKDLPEKRREVVYVSGPTIDARMDDLQKARADYEKVNSMERKHESLLEFYSLTGIVKAAAVCEHILENYFYPDAPPRKVLIFAHHQIVLDTIQVEVNKRKLGSIRIDGKTPSHRRTALCDSFQTDDNIRVAVLSITAAGVGITLTAASVVVFAEIHFNPGYLVQAEDRAHRVGQKDSVFVQYLIAKKTADDVMWNMVQQKLDVLGQVSLSSDTFRTADKMHLRFNDAAQPGIAEYLKKTPDTTIDEWEDPVEEKEDDDLEIICDSPAPKRIKN

SEQ ID NO: 8698 - protein, 690 aa, Caenorhabditis elegans
MVLTDEQRQAIAKKREEAIRRAAAYREREMQAAANATASTSSAAPPAPPKPVIPVMFSQNRQNFQPMKPTMNNSTKQSTINNYIKQVQKPEPTSLIKPTIGVKLKLDIGDRIKIEFYPFHSAVIDLIKQVPSRNYDPAKRSWTVASSDHITISNILKNATAVKVELEPLPQNIIGLTNFKPKAAPSDLNTVMDPSLIERLFPYQKEGVIFALERDGRILLADEMGLGKSVQALTIARYYKADWPLLIVCPASVKGAWKKQLNTFFPIIHRIFIVDKSSDPLPDVCTSNTVAIMSYEQMVLKHDILKKEKYRTIIFDESHMLKDGKARRTKVATDLSKVALHVILLSGTPALSRPSELFTQIRLIDHKLFTNFHEFAIRYCDGKQGRFCFEAKGCTNSEELAAIMFKRLMIRRLKADVLKDLPEKRREVVYVSGPTIDARMDDLQKARADYEKVNSMERKHESLLEFYSLTGIVKAAAVCEHILENYFYPDAPPRKVLIFAHHQIVLDTIQVEVNKRKLGSIRIDGKTPSHRRTALCDSFQTDDNIRVAVLSITAAGVGITLTAASVVVFAEIHFNPGYLVQAEDRAHRVGQKDSVFVQYLIAKKTADDVMWNMVQQKLDVLGQVSLSSDTFRTADKMHLRFNDAAQPGIAEYLKKTPDTTIDEWEDPVEEKEDDDLEIICDSPAPKRIKN

SEQ ID NO: 8699 - protein, 866 aa, Caenorhabditis elegans
MSEAETGEPNGFRSCYDKLRKAVGNIPMDASKSTKLHNLSSRKISEILPNLYLSGRTVSQNSELLKEKNITTVINVSDREVVNYKNNQKFIKNYRFYAMSDTASAKFDGIIEEAVRIIHDSRSKEEGVLVHCFLGVSRSATLVAFYLISALSINWRDAVDFIHHRRFSANPNFGFLHQLKVYSTTKAKEFRNQLISERCLRMRESDKDIIKKYLPLAQAAANATASTSSAAPPAPPKPVIPPMKPTMNNSTKQSTINNYIKQVQKPEPTSLIKPTIGVKLKLDIGDRIKIEFYPFHSAVIDLIKQVPSRNYDPAKRSWTVASSDHITISNILKNATAVKVELEPLPQNIIGLTNFKPKAAPSDLNTVMDPSLIERLFPYQKEGVIFALERDGRILLADEMGLGKSVQALTIARYYKADWPLLIVCPASVKGAWKKQLNTFFPIIHRIFIVDKSSDPLPDVCTSNTVAIMSYEQMVLKHDILKKEKYRTIIFDESHMLKDGKARRTKVATDLSKVALHVILLSGTPALSRPSELFTQIRLIDHKLFTNFHEFAIRYCDGKQGRFCFEAKGCTNSEELAAIMFKRLMIRRLKADVLKDLPEKRREVVYVSGPTIDARMDDLQKARADYEKVNSMERKHESLLEFYSLTGIVKAAAVCEHILENYFYPDAPPRKVLIFAHHQIVLDTIQVEVNKRKLGSIRIDGKTPSHRRTALCDSFQTDDNIRVAVLSITAAGVGITLTAASVVVFAEIHFNPGYLVQAEDRAHRVGQKDSVFVQYLIAKKTADDVMWNMVQQKLDVLGQVSLSSDTFRTADKMHLRFNDAAQPGIAEYLKKTPDTTIDEWEDPVEEKEDDDLEIICDSPAPKRIKN

SEQ ID NO: 8700 - protein, 686 aa, Caenorhabditis elegans
MVLTDEQRQAIAKKREEAIRRAAAYREREMAAANATASTSSAAPPAPPKPVIPVMFSQNRQPMKPTMNNSTKQSTINNYIKQVQKPEPTSLIKPTIGVKLKLDIGDRIKIEFYPFHSAVIDLIKQVPSRNYDPAKRSWTVASSDHITISNILKNATAVKVELEPLPQNIIGLTNFKPKAAPSDLNTVMDPSLIERLFPYQKEGVIFALERDGRILLADEMGLGKSVQALTIARYYKADWPLLIVCPASVKGAWKKQLNTFFPIIHRIFIVDKSSDPLPDVCTSNTVAIMSYEQMVLKHDILKKEKYRTIIFDESHMLKDGKARRTKVATDLSKVALHVILLSGTPALSRPSELFTQIRLIDHKLFTNFHEFAIRYCDGKQGRFCFEAKGCTNSEELAAIMFKRLMIRRLKADVLKDLPEKRREVVYVSGPTIDARMDDLQKARADYEKVNSMERKHESLLEFYSLTGIVKAAAVCEHILENYFYPDAPPRKVLIFAHHQIVLDTIQVEVNKRKLGSIRIDGKTPSHRRTALCDSFQTDDNIRVAVLSITAAGVGITLTAASVVVFAEIHFNPGYLVQAEDRAHRVGQKDSVFVQYLIAKKTADDVMWNMVQQKLDVLGQVSLSSDTFRTADKMHLRFNDAAQPGIAEYLKKTPDTTIDEWEDPVEEKEDDDLEIICDSPAPKRIKN

SEQ ID NO: 8701 - protein, 534 aa, Caenorhabditis elegans
MPKKTFENLEDSHGKDVNIPVELPKRKREVTPENLPSTSSTAPTQKRKSLGYSGRTEEPKNIHKTFISPFSTSVSPSKQGLRRRKKALPAIEPPVSVEEASPLRFVNIDVFSRRMASESSDHDAMIAKLLSRKFSIPMEGYMLSGRSLGLGGNRRKCALFDPYHEGALILYAPEHLSEHAQLKEDKDRKVHVVADPVVGKILRPHQRDGVKFMWDCVTGINIPEFHGCIMADEMGLGKTLQCISLLWTLLRQSPDACPTVSKSIIVCPSSLVKNWDKEIKKWLGTRLNAMPVDSGKREQIIACLNSFMADSKMRCAIPVLIISYETFRLYANILHSGDVGIVICDEGHRLKNSENLTYQALSGLKCARRVLISGTPIQNDLLEYFSLVNFVNPGLLGTASEFRKKFENAILKGRDADASSEDQKKGEEKTKEMISLVEKCIIRRTSALLTKYLPVKYEHIICCKNSTLQETLYNKLIECEKQNRIVEKDKGATASALSFITHLKKLCNHPYLVYDEFQKPDNRFRNSEFRISDL

SEQ ID NO: 8702 - protein, 1009 aa, Caenorhabditis elegans
MASFRKNHVIIDSSDSSEDEDRKERHSSSSEVDETASMRSTDSSEPPRTIIDASLNSMASTVYTSTPNSKQSISRTGSSTTYGSSKCSTDDHYRSRSFIDNSFEKPVTPITKKLQESDEPRAKQQLRERLLRKSIKQQSDQDLTGGSSRSGWGTGENSSLESSDLINSHFSPIAKTFRHASDLDDSMNTSPPPNRSTLPSVETSSGNSPQTPYPGSPEASPQPSPPKNTASELQKLSIKELEANKDKKLKLLKFSSNLPDNGARVKLQVDEITEEIERRIINGVTDTMVVDKTTAIPPPPQPKNLIAPIPQDFAAMLDKNGRKVMSGRMTEQKILKVNKISDRLMQQLADATHTIPAETDLTDTPDGLLVELMPHQKAGLRWLVWREGQPHSGGILADDMGLGKTLSMLSLIVHQKAARRARKESGDNAADKEKRRVAKEEGLYPSNGTLIIAPASLIHQWEAEINRRLESDLLSVFMFHGTKKQRQIEPKELARYDVVITTYTLAANELMEKKAAGSKKEEDSDDESENEENPRRPAGKNDSPLARVAWSRVILDEAHAIKNRLSQCSKAVCRLSSFSRWCLSGTPIHNNLWDLYSLVRFLRIPLFGDRKFWAESIMPMKTGMADRVNLLTKNLMLRRTKDQQCALTNKKIVNLKEKKIEIHELEMVGDEANGYAIMMEAAQKLVKQIVTNTDDIQKYGQIRRRRQRGNDDEFANPYNVGPRNLAGNSNFQNMSCILLLLMRLRQACVHFHITKSGMDLDAFKINGGDDEDADMKELENLMEKTMADLTIADSDNDEEGVDTNKEEPKQPPTRIFEPDFISCKMAKTLEVVREILEKKEKVVIVSQWTSVLNLVEKHIQAGGHNYTSITGQVLVKDRQERVDSFNQEKGGAQVMLLSLTAGGVGLNLIGGNHLIMVDLHWNPALEQQACDRIYRMGQKKEVFIHRLNISKFCRLIVKGTIEQRVMDLQEKKLALAASVLEGTATRKLNKLTTADIRMLFGLDGSSNAN

SEQ ID NO: 8703 - protein, 722 aa, Caenorhabditis elegans
MVVDKTTAIPPPPQPKNLIAPIPQDFAAMLDKNGRKVMSGRMTEQKILKVNKISDRLMQQLADATHTIPAETDLTDTPDGLLVELMPHQKAGLRWLVWREGQPHSGGILADDMGLGKTLSMLSLIVHQKAARRARKESGDNAADKEKRRVAKEEGLYPSNGTLIIAPASLIHQWEAEINRRLESDLLSVFMFHGTKKQRQIEPKELARYDVVITTYTLAANELMEKKAAGSKKEEDSDDESENEENPRRPAGKNDSPLARVAWSRVILDEAHAIKNRLSQCSKAVCRLSSFSRWCLSGTPIHNNLWDLYSLVRFLRIPLFGDRKFWAESIMPMKTGMADRVNLLTKNLMLRRTKDQQCALTNKKIVNLKEKKIEIHELEMVGDEANGYAIMMEAAQKLVKQIVTNTDDIQKYGQIRRRRQRGNDDEFANPYNVGPRNLAGNSNFQNMSCILLLLMRLRQACVHFHITKSGMDLDAFKINGGDDEDADMKELENLMEKTMADLTIADSDNDEEGVDTNKEEPKQPPTRIFEPDFISCKMAKTLEVVREILEKKEKVVIVSQWTSVLNLVEKHIQAGGHNYTSITGQVLVKDRQERVDSFNQEKGGAQVMLLSLTAGGVGLNLIGGNHLIMVDLHWNPALEQQACDRIYRMGQKKEVFIHRLNISKFCRLIVKGTIEQRVMDLQEKKLALAASVLEGTATRKLNKLTTADIRMLFGLDGSSNAN

SEQ ID NO: 8704 - protein, 1026 aa, Caenorhabditis elegans
MASFRKNHVIIDSSDSSEDEDRKVCSSLTFEFCFKIIEFQERHSSSSEVDETASMRSTDSSEPPRTIIDASLNSMASTVYTSTPNSKQSISRTGSSTTYGSSKCSTDDHYRSRSFIDNSFEKPVTPITKKLQESDEPRAKQQLRERLLRKSIKQQSDQDLTGGSSRSGWGTGENSSLESSDLINSHFSPIAKTFRHASDLDDSMNTSPPPNRSTLPSVETSSGNSPQTPYPGSPEASPQPSPPKNTASELQKLSIKELEANKDKKLKLLKFSSNLPDNGARVKLQVDEITEEIERRIINGVTDTMVVDKTTAIPPPPQPKNLIAPIPQDFAAMLDKNGRKVMSGRMTEQKILKVNKISDRLMQQLADATHTIPAETDLTDTPDGLLVELMPHQKAGLRWLVWREGQPHSGGILADDMGLGKTLSMLSLIVHQKAARRARKESGDNAADKEKRRVAKEEGLYPSNGTLIIAPASLIHQWEAEINRRLESDLLSVFMFHGTKKQRQIEPKELARYDVVITTYTLAANELMEKKAAGSKKEEDSDDESENEENPRRPAGKNDSPLARVAWSRVILDEAHAIKNRLSQCSKAVCRLSSFSRWCLSGTPIHNNLWDLYSLVRFLRIPLFGDRKFWAESIMPMKTGMADRVNLLTKNLMLRRTKDQQCALTNKKIVNLKEKKIEIHELEMVGDEANGYAIMMEAAQKLVKQIVTNTDDIQKYGQIRRRRQRGNDDEFANPYNVGPRNLAGNSNFQNMSCILLLLMRLRQACVHFHITKSGMDLDAFKINGGDDEDADMKELENLMEKTMADLTIADSDNDEEGVDTNKEEPKQPPTRIFEPDFISCKMAKTLEVVREILEKKEKVVIVSQWTSVLNLVEKHIQAGGHNYTSITGQVLVKDRQERVDSFNQEKGGAQVMLLSLTAGGVGLNLIGGNHLIMVDLHWNPALEQQACDRIYRMGQKKEVFIHRLNISKFCRLIVKGTIEQRVMDLQEKKLALAASVLEGTATRKLNKLTTADIRMLFGLDGSSNAN

SEQ ID NO: 8705 - protein, 518 aa, Caenorhabditis elegans
MNVSDPSKNEYSKEIRRTVSSEIIGQSRSPMTLENQPVSPMTKRRRLENMDRTITEQMVEDEIVATAISPPSQPKNVVVPIPQDFAAMLTNSWTKPIRGPMTEKKKLKINETFNKLTQQLADATHTIPAETDLTETPDGFLVDLMPHQKAGLCWLLWRESQPHSGGILGGDMGLGKTLSMISLIVHQKAARKTRKDAGDDAIAPESLVHHWEAEIARRLKQDLLSVLVYHGNRRHINPKDLKKHIELDYDLEDEHNPCSKLRPRVCPKADKNSSPLARIAWSYVILDEAHIIKNRNAQCSEAACKISAFSRWCLSGTPIHNNMRRKKIVHLMEKNIVIHKLEMVGQEAKGFAMMMEAALSLSPNGLLFCVSCKDIQEGGHGYTSITGEVAIKDRQERVDSFNQEKGGAQDMLLSLTAGGVGLNLIGGNHLIMVDLHWNPALEQQACDRIYRMGQKKEVHIHRLIVKETIEQRVMSLQEKKLALAASVLEGSATRGMNKLTNSDIRTLFGLDEEFELDT

SEQ ID NO: 8706 - protein, 1274 aa, Caenorhabditis elegans
MSEEIDENTMKEEQEEEERDEIEEKEEKPDAQQQELLNIRIPTQTKKSLKRKHIKTDFGAEDLDENVLEAQRLEKQRLERLEKIKPENDHIQQMESLFLAGASEGQLPQLDLQDDDFEEMFGFSVENDNKKYRYGDEEKPEPMFHLQEPSTSRGHVDVVDLTLDDSDDDCLITDVKSVMPQVVPGRRMRWAQAEKDRIDADQMDIQHNIEARRLKKMRSAKDLESTEKKEGRLLVNAGHPEEDPDIFVISHLTHVLQPHQLGGIRFMYDNTIESLGEYKKSDGFGCILAHSMGLGKTIQVITFSEIFLRATKAKKVLVIVPINTIQNWYSEYDKWIPKFSDTGDRIRSFEVFLLGDGVKTFDQRVNLIEQWDQTGGVMLVGYDMFRLLIKMTLPKKQKKGRPKLNLSGISSGFSKDSSEDQKLRDEELEFETGFTSGGRVRQEAYSLIRSALLEPGPDLVVCDEGHKIKNITAEISMTLGAINTKRRIVLTGYPLQNNLLEYFCMIDFVRPKYLGTRKSFIDRFEKPIKNGQCVDSSPDDVKIALQRTHVLVELVKGFVQRRTHHLLKKILPESKEYVLLLRKSQIQRQLYRNFVLWAKNEIAANNDAVFNPLMAFSACSKIWNHPDILYRLVEQKKRAEEDKKRVEQMKFAQLQQQQQQQQQQLQGMMMMGNNGMMPGFGAQFHPQQNGMMMQNGSWHPNNYQMPSPFNSIPSNPSTPTSSSTSKSAKKTKKPRGSKKAPKSDEEDEEVEKESRMKYDWTFELFEKYQEGVLENGYKIVISLEILDESTQIGEKILIFSQNLTALDMLEEILKKRQIRGKDGPGQRWEKNRNYLRLDGTTSGADREKLINRFNSEPGLSLFLISTRAGSLGINLVSANRCIIIDACWNPCHDAQAVCRVYRYGQQKKTFVYRLIMDNSMERSIFNRQISKHGLQQRVVDDAQVDANISQKELETLLMYDEAQDVNHDKWNTDDWDFGDPVLDSITKRMSQMFAGKPFLHETLIMESEQSLSEQEKREAQLLFDRERRMENYDPLSGLSSSNFYNNAPGSSMGMMGPPPVPMFNNNMQNSFNNHWQQSPNQLAPNFGSYPPQQFPQPMPNMSQFPPHGPSPQIPSIRPSPMPHTLRMNVSQFHHQGGGHTMTSFNNGYPNNNNGGAIGNPQQMLPPRDPSAFPGAVMSKIPSFSPAGAVQQLITDRQLVFPIVGHRDQLHQVQANTPIQLVVPKNGYYVKLRDGTILDAVGSVFENHARQLRDMYLSKNFNHDPQQVQEVIDLD

SEQ ID NO: 8707 - protein, 1359 aa, Caenorhabditis elegans
MRVGVSESEDSDGHVIEDEDLEMARQIENERKEKRAQKLKEKREREGKPPPKKRPAKKRKASSSEEDDDDEEESPRKSSKKSRKRAKSESESDESDEEEDRKKSKSKKKVDQKKKEKSKKKRTTSSSEDEDSDEEREQKSKKKSKKTKKQTSSESSEESEEERKVKKSKKNKEKSVKKRAETSEESDEDEKPSKKSKKGLKKKAKSESESESEDEKEVKKSKKKSKKVVKKESESEDEAPEKKKTEKRKRSKTSSEESSESEKSDEEEEEKESSPKPKKKKPLAVKKLSSDEESEESDVEVLPQKKKRGAVTLISDSEDEKDQKSESEASDVEEKVSKKKAKKQESSESGSDSSEGSITVNRKSKKKEKPEKKKKGIIMDSSKLQKETIDAERAEKERRKRLEKKQKEFNGIVLEEGEDLTEMLTGTSSQRKLKSVVLDPDSSTVDEESKKPVEVHNSLVRILKPHQAHGIQFMYDCACESLDRLDTEGSGGILAHCMGLGKTLQVITFLHTVLMHEKIGEKCKRVLVVVPKNVIINWFKEFQKWLVDNDEELDTIDVNELDSYKTIEDRRRALKAWHSSKTPSVMIIGYDLFRILTVEDDPKKKKPKNRNRRLEKAKEDFRKYLQNPGPDMVVCDEAHKLKNDDSALSKCMVKILTKRRICLTGTPLQNNLMEYHCMVNFVKPGLLGTKTEFANRFVNIINRGRTKDASPLEVSFMKRRCHVLYDHLKKCVDRKDYRVLTEAIPPKQEYVINVRQTERQCALYNAFLNDIVGDSGLSKRLLPDYHMFSRIWTHPYQLVLHEQRMERERVMREDAEEEADFIDDGDGSESESEGSFKSGSESDSGKSVVLSSDDEGSSKKKKNGNKPEIKKTAPQKKRKFLNSDDEDEEDGEDTAMAILQDGIRQSKRLAGEEADLRDTDTPPEYTGWFARLGLVKEEDRDDFALSNKLILLVEIIKKCEEIGDKLLVFSQSLESLTLIKRMLEYMAGTGQWFADGHEALNAEGEETWSWLEGEDYMTIDGSVQSGKRDAVQTSFNDPLNLRARLMLISTRAGSLGTNMVAANRVIIFDACWNPSHDTQSLFRVYRFGQTKPVYIYRFIAQGTMEERIYKRQVTKESTSMRVVDEAQIQRHYLGNDLTELYQFTPSTFDPDVEISCAPPKDRLLADVIHKNQHAVVDYIEHDTLFANVEDEKLTEQEMKDAWTDYEKDKSGMPVRAQYAAPPMPGFPNGMIVGQNVQALLQNRMNQGIRVDQMQHDILFKELQKMRIKDAGTAVKIVLLRNLLEQILPYIPDEMRGGMSEFNTHFIRLVHETDRKMETPADLLRKSLESFKTVIKMVKMIPTCREPLARMTRDYPYLFA

SEQ ID NO: 8708 - protein, 1359 aa, Caenorhabditis elegans
MRVGVSESEDSDGHVIEDEDLEMARQIENERKEKRAQKLKEKREREGKPPPKKRPAKKRKASSSEEDDDDEEESPRKSSKKSRKRAKSESESDESDEEEDRKKSKSKKKVDQKKKEKSKKKRTTSSSEDEDSDEEREQKSKKKSKKTKKQTSSESSEESEEERKVKKSKKNKEKSVKKRAETSEESDEDEKPSKKSKKGLKKKAKSESESESEDEKEVKKSKKKSKKVVKKESESEDEAPEKKKTEKRKRSKTSSEESSESEKSDEEEEEKESSPKPKKKKPLAVKKLSSDEESEESDVEVLPQKKKRGAVTLISDSEDEKDQKSESEASDVEEKVSKKKAKKQESSESGSDSSEGSITVNRKSKKKEKPEKKKKGIIMDSSKLQKETIDAERAEKERRKRLEKKQKEFNGIVLEEGEDLTEMLTGTSSQRKLKSVVLDPDSSTVDEESKKPVEVHNSLVRILKPHQAHGIQFMYDCAFESLDRLDTEGSGGILAHCMGLGKTLQVITFLHTVLMHEKIGEKCKRVLVVVPKNVIINWFKEFQKWLVDNDEELDTIDVNELDSYKTIEDRRRALKAWHSSKTPSVMIIGYDLFRILTVEDDPKKKKPKNRNRRLEKAKEDFRKYLQNPGPDMVVCDEAHKLKNDDSALSKCMVKILTKRRICLTGTPLQNNLMEYHCMVNFVKPGLLGTKTEFANRFVNIINRGRTKDASPLEVSFMKRRCHVLYDHLKKCVDRKDYRVLTEAIPPKQEYVINVRQTERQCALYNAFLNDIVGDSGLSKRLLPDYHMFSRIWTHPYQLVLHEQRMERERVMREDAEEEADFIDDGDGSESESEGSFKSGSESDSGKSVVLSSDDEGSSKKKKNGNKPEIKKTAPQKKRKFLNSDDEDEEDGEDTAMAILQDGIRQSKRLAGEEADLRDTDTPPEYTGWFARLGLVKEEDRDDFALSNKLILLVEIIKKCEEIGDKLLVFSQSLESLTLIKRMLEYMAGTGQWFADGHEALNAEGEETWSWLEGEDYMTIDGSVQSGKRDAVQTSFNDPLNLRARLMLISTRAGSLGTNMVAANRVIIFDACWNPSHDTQSLFRVYRFGQTKPVYIYRFIAQGTMEERIYKRQVTKESTSMRVVDEAQIQRHYLGNDLTELYQFTPSTFDPDVEISCAPPKDRLLADVIHKNQHAVVDYIEHDTLFANVEDEKLTEQEMKDAWTDYEKDKSGMPVRAQYAAPPMPGFPNGMIVGQNVQALLQNRMNQGIRVDQMQHDILFKELQKMRIKDAGTAVKIVLLRNLLEQILPYIPDEMRGGMSEFNTHFIRLVHETDRKMETPADLLRKSLESFKTVIKMVKMIPTCREPLARMTRDYPYLFA

SEQ ID NO: 8709 - protein, 951 aa, Nostoc punctiforme
MAILHSNWLLKSQKGCLFIWGETWRSPRVNFESNGSGDIPLNPLAMTSLELSEWLVSQKMAITNFIQQPQIAIATTGRTRKAATATEINLPTHSQIIALPTYIPEESAEGTSAIFPVHSASLRLETDSPQYLQPWLVEGFCLNPSEAVKFLAAVPLNAAKGEDAFLGGDLRFWSQVSRWSLDLISRCKFLPRIERQSDGAFAAKWQVLLDSAVDGTRLEKFSADMPLVCRTYQEGVGTGDWGLRTGEEFSQSLIPNSQSLLYVNFPTEPQELLLGFLNSTIDAQVRGMVGSQPPMEAKAMASLPSGVRQWLQGLTSTSGTVNADAIEVERLEAALKAWMMPLQYQLTLKTLFRTCFQLRSPEAGETDWTLAYFLQAADDPDFLVDAATIWNNPVERLVYENRTIEQPQETFLRGLGVASRLYPAIAPSFETEYPQSSRITPMQAYEFIKAVAWRLEDSGLGVILPPSLANREGWANRLGLKITAETPKKKQGRLGLQSLLNFQWQLAIGGQTISKAEFDKLVALNSPLVEINGEWVELRPQDIKTAQTFFTTRKDQMALSLEDALRFSTGDTQVIEKLPVVSFEASGALQELIGALNNNQAIAPLPTPVGFKGQLRPYQERGAAWLSFLERWGLGACLADDMGLGKTIQFIAFLLHLKEQDALENSTLLVCPTSVLGNWEREVNKFAPSLKILQYHGDKRPKGKAFLEAVKNHDLIVTSYSLLHRDIKSLQSVPWQIIVLDEAQNVKNPEAKQSKAVRQLEATFRIALTGTPVENRLQELWSILDFLNPGYLGNKQFFQRRFAMPIEKYGDTASLGQLRSLVQPFILRRLKSDREIIQDLPDKQEMTVFCGLTADQAALYQQVVEQSLVEIESAEGLQRRGMILALLIKLKQICNHPAQYLKQATLEQHNSAKLLRLEEMLEEVLAESDRALIFTQFAEWGKLLKPKSVEC

SEQ ID NO: 8710 - protein, 1403 aa, Nostoc punctiforme
MINLATDTTKLQIQLADKYFKLHPSIQKIIQLFSVIYAPIDKNSFVSCLSKIDALDENNKPWVTKTLSSQIDKLLKAGLLIQESRQGAECHPLLTEIATRHAVQTGQFETLVTAVEEKLPIRTHWNRDSRIFYNLRQCIREIRIGIYRQDLSFINQQIEAYQKYSDSEEKIVIEDIFEQIYNNPFDADWFNTLPQGLYESGISSILFNSALKLSASEDALMLLEEECSTPGKHCSDYLHLILTEQLLLQGCTQEAQESLGRISNEYQNNAAIFWGWLSFLRGDNEQAIKYYKDALKAIKKATGKRQIYFNTIGGLFFILALLKDGSAQSLREAEEYTSLMSRQSDHWLRFTYGRLKMVLQVHQGDITQKQFVVSGHISSVEEENSLQTLFCSLCLYWMDAESAKKRLLNLLEPLYRRSLASGYHWLAMETAELLSRLKPSSNYKQLAEALREDSNIQTIVDLIRPQEAWEMCLNALANLQKEPQTPGKPESELRLAWFITFYPSRCVLQPREQKVNAKGEWSKGRPIALKRLSSALSEFDYITPQDMRVCSCIEAYSDGYYGKVDYTFGEKAISALIGHPLVFWEDTLTIRVEIVKGEPELLVKKEKLGRLTLEFSPKLPESQNILHIKETPTRIKVIEITAEHRRIAEIIGIDNKLNVPAIAEKQVLAAINAVSGIVTVHSDIGGGSEGAEKVPAQTLPHIHLLPANAGLKISLLSRPFAQGGPYYRPGAGGETVIAEIDGKRLQTRRNLSEEKQLAKDAVAACATLTRTEEQDGEWIIEHLEDCLELLLELQELGNNVVIEWPQGEKLRVSHNADLKDFNLSIQRQQDWFAATGELKLNNDLVLDMQQLLELLEKTPSRFIPLGDGQFLALTQAFRKRLDELRMFSEKHSKGIRFHPLATLGLEDFVDEVGKVKADKHWKTHIQRLHEVKNLQPELPSTLQAELRDYQMEGFCWLARLAHWGVGACLADQMGLGKTLQALAVILRNAHEGPTLIIAPTSVCMNWVSEAQKFAPTLNIIQFSGANRQKLLDGLQPLDMLVCSYGLLQQEEVAQMLSQIQWQTIVLDEAQAIKNMTTKRSQAAMNLKSNFKLLTTGTPIENHLGELWNLFRFINPGLLGSFESFNQRFATPIEKYQDKLARNKLKKLIQPFLLRRTKNQVLEELPSRTEILLHVELSQEEKAFYEALRRQAISKLTESDAEAGKKHLQVLAEIMKLRRACCNPSLVMPGTELPSSKLQLFGEVLGELLENRHKALVFSQFVDHLHIIRDYLEQQGINYQYLDGSTSVAERKKRVDAFQAGSGDVFLISLKAGGTGLNLTAADYVIHTDPWWNPAVEDQASDRAHRIGQQRPVTIYRLVAKDTIEEKIVELHHHKRDLADSLLEGTEMSGKISTEALLQLISES

SEQ ID NO: 8711 - protein, 1403 aa, Nostoc punctiforme
MTKLANDTTNLQTKLANQYFDLDSSVQKVIQLLAIIYAPVDKNSLLSCLSKMGALDEKNKLWVTKTLSPQIDKLLKVGLLVQSGRQSPECHPLLTEIATRHAVQTGQFEIQVIAVESKFPIRTHWNHDSRIFYSLRQCIREIRIGIYRQDLNFINKQIEDYQKYADSEEKLVIENIFEQIFNNPFDADGFNTLPQGLYESGISSIFLNCALKLSVSEDALMMLSEQCSTGGKHCSDYLHLILTEQLLLQGCTQEAQESLERVSNEYQNNAAIFWGWLSFLRGENEQAIKYYTDALKAIKKATGKRQIYFNTMGGLFFILALLKDGSAQRLKEAEEYTNLMSRQGDHWLRFIYGRLKTVLQVHQGDITQKQFVLSAHISSVEEENSLQTLFCSLCLYWMDAEGAKKRLPKLLEPLYQRSFASGYHWLAMETAELLSRLKPSSKYQKEAEALREDSNIQTIVDLIRPQEAWEMCLNALANLQKQPQTSLKPESQLRLAWFITFYPSKCVLQPKEQKVNAKGEWSKGRPIALKRLSSGLAEFDYVTPQDMRVCSCIEVYSEGYYGKVDYTFGEKAISALIGHPLVFWEDMPNIRVEIVKGEPELLVKKEKLGRLTLEFSPKLPESQNILHIKETPTRIKVIEITTEHRRIAQIIGKDNKLNVPAFAEKQVLAAINAVSGIVTVHSDIGGGSEGAEEVPAQTLPHIHLLPANVGLKITLLSRPFTQGGPYFRPGTGGETVIAEIEGKRFQTRRNLSLEKQLAADAVAACPTLAQSEEQDGEWVIVDPESCLELLLELQALGNKVVMAWPEGEKLHISHNADLKDFNLSIQRQQDWFAATGELKLNNDLVLDMQQLLELLEKTPSRFIPLGDGQFLALTQAFRKRLDELRMFSEKHNKGIRFHPLATLGLEDFVDEVGKVKADKHWKTHREHLHEVKNLQPELPSTLQAELRDYQMEGFCWLARLAHWGVGACLADQMGLGKTLQALAVILRNAHEGPTLIIAPTSVCMNWVSEAQKFAPTLNIIQFSGANRQKLLDGLQPLDMLVCSYGLLQQEEVAQMLSVVHWQTIVLDEAQAIKNMTTKRSQAAMNLKSNFKLLTTGTPIENHLGELWNLFRFINPGLLGSFESFNQRFAVPIEKYQDKLARNKLKKLIQPFLLRRTKNQVLEELPSRTEILLHVELSREEKAFYEALRRQAISKLTESDADAGKKHLQVLAEIMKLRRACCNPSLVMPDTVLPSSKLQLFGEVLGELLENRHKALVFSQFVDHLHIIRDYLEQQGINYQYLDGSTSVAERKKRVDAFQAGSGDVFLISLKAGGTGLNLTAADYVIHTDPWWNPAVEDQASDRAHRIGQQRPVTIYRLVAKDTIEEKIVQLHHQKRDLADSLLEGTDMSGKISTEALLQLISQG

SEQ ID NO: 8712 - protein, 124 aa, Nostoc punctiforme
MIDRFQHDPQGPPIMILSLKAGGVGLNLTRANHVFHFDRWWNPAVENQATDRVFRIGQTRNVQVHKFVCTGTLEEKIHDMIESKKQLAEQVVGAGEEWLTELDTDQLRNLLILDRSAVIDDDAE

SEQ ID NO: 8713 - protein, 940 aa, Vibrio cholerae
MNSQGELILTPNMGQSASHESIQKVLGQLQSDNAVTLKVGDEIVLFSEEKLMAVKEVISNRVIPQQQVKAFLENPTAYIDASLVDLDLGFSIRVHGATVFKHAYFGETDESGIDWFGASPTSDLINPISKLTDRVRDKTTLEDVAKKIEDARQTGATVFDYEGQSYDISDPAAVEKVLNEIGHKISSPNTDLSSYGEAEDAETESEGSEIHVVDIDLNDEELSENSPKVEQLISDISWDGELNWENHKRTPFPHQDIGVRWILGVEQKSLSDSKVSGALLADDMGLGKTFMALSAIEHIYQRQQISGETKKPALIVAPLSLLENWKDEVDKTFKHSPFKDVVILQSSAELNEYRMGGVEIRGQSASDDCLEPKYSLKVGKYFGPSRLDLPERLVITTYQTLRDYQFSMCLIDWGIVVFDEAQNIKNPNALQTRAAKGLKADFKLVATGTPVENSLADFWCLMDTACPGHLGSYQEFRARYISPILKAAGDEVEEIRARLGRELRIAVGALMLRRIKEDNLKGLPLKHMYAGGEFENWKYLEELKSTMVGYQRDVYEGAISHQLENEESHALTTLMRLRDSSLHPRLSDGGRLDIPKNAKSARALYGESGKLVSLLETLDRVRSKQEKCIIFAVNKRLQSFLSVTLGQIYNLGPLSVINGDAKAVAKRKSVPTRKSMISDFEAKEGFNLIVMSPVAAGVGLTVVGANHVVHLERYWNPAKEAQATDRVYRIGQEKEVHIYIPLLHHPEFESFDVNLHRLLTQKTLLKDAVVTPEDVIPQPAGVGGVVSGDLIDKRITAAELDKLSWQQFEALCVELLAKITDSESAWLTNNGADHGADGVLLNNSGNILLQAKFTQRQYDGYKGIQEIHSAKPIYESAMRSSFGRLIFVTNSPLLAKRTHEIAATCGIEVLGRTQLLTYLEEYDITLKDILSRLGKDRLRV

SEQ ID NO: 8714 - protein, 507 aa, Vibrio cholerae
ALQTRAAKGLKADFKLVATGTPVENSLADFWCLMDTACPGHLGSYQEFRARYISPILKAAGDEVEEIRARLGRELRIAVGALMLRRIKEDNLKGLPLKHMYAGGEFENWKYLEELKSTMVGYQRDVYEGAISHQLENEESHALTTLMRLRDSSLHPRLSDGGRLDIPKNAKSARALYGESGKLVSLLETLDRVRSKQEKCIIFAVNKRLQSFLSVTLGQIYNLGPLSVINGDAKAVAKRKSVPTRKSMISDFEAKEGFNLIVMSPVAAGVGLTVVGANHVVHLERYWNPAKEAQATDRVYRIGQEKEVHIYIPLLHHPEFESFDVNLHRLLTQKTLLKDAVVTPEDVIPQPAGVGGVVSGDLIDKRITAAELDKLSWQQFEALCVELLAKITDSESAWLTNNGADHGADGVLLNNSGNILLQAKFTQRQYDGYKGIQEIHSAKPIYESAMRSSFGRLIFVTNSPLLAKRTHEIAATCGIEVLGRTQLLTYLEEYDITLKDILSRLGK

SEQ ID NO: 8715 - protein, 501 aa, Epiphyas postvittana nucleopolyhedrovirus
MDNLKFDVDEFFNADDDANTCTPAIVHKLDLLPHQKSGIGWMLQREKRGNPHGGVLADDMGLGKTLSVLLLIANNNNVNLKTLIVCPLSLLNHWCGESDKHNLNIKLCKFYNNKCDQSFDAYQVVVTTYDTLYNHHKLLKTKQRASSLLTRQWHRVVLDEAHVIKNCKTAVHAAASALCADNRWCITGTPIHNKHWDMYAIIKFLRCKPFNNAAVWKMLNRNNDTNHIKSVMSKIVLKRNKSEIALDIPENSVQYVYVTFNETEKQVYDILKSKSQKAFDVAVETDGKDLNSMQDVLSLLCRLRQMCCHPALTKCAHMFESHANIFEPTYASSKCQRVLELIQQVLNTDNDKIVLVSQWVEFLHIIAALLRRHEILILLYTGKQRVEERIAVENQFNAANSPYRVLLMSIKCGGVGLNLIGGNHIVVLEPHWNPQIELQAQNRIHRLGQKKQTYVYKMLHDEDNSVERYMKTRQDNKLTFVNKVFDRSIPDYEDIKKFFSL

SEQ ID NO: 8716 - protein, 1027 aa, Drosophila melanogaster
MSKTDTAAVEATEENSNETTSDAATSSSGEKEAEFDNKIEADRSRRFDFLLKQTEIFTHFMTNSAKSPTKPKGRPKKIKDKDKEKDVADHRHRKTEQEEDEELLAEDSATKEIFRFDASPAYIKSGEMRDYQIRGLNWMISLYENGINGILADEMGLGKTLQTISLLGYLKHFKNQAGPHIVIVPKSTLQNWVNEFKKWCPSLRAVCLIGDQDTRNTFIRDVLMPGEWDVCVTSYEMCIREKSVFKKFNWRYLVIDEAHRIKNEKSKLSEILREFKTANRLLITGTPLQNNLHELWALLNFLLPDVFNSSEDFDEWFNTNTCLGDDALITRLHAVLKPFLLRRLKAEVEKRLKPKKEMKIFVGLSKMQRDWYTKVLLKDIDVVNGAGKVEKMRLQNILMQLRKCTNHPYLFDGAEPGPPYTTDTHLVYNSGKMAILDKLLPKLQEQGSRVLIFSQMTRMLDILEDYCHWRNYNYCRLDGQTPHEDRNRQIQEFNMDNSAKFLFMLSTRAGGLGINLATADVVIIYDSDWNPQMDLQAMDRAHRIGQKKQVRVFRLITESTVEEKIVERAEVKLRLDKMVIQGGRLVDNRSNQLNKDEMLNIIRFGANQVFSSKETDITDEDIDVILERGEAKTAEQKAALDSLGESSLRTFTMDTNGEAGTSSVYQFEGEDWREKQKLNALGNWIEPPKRERKANYAVDAYFREALRVSEPKAPKAPRPPKQPIVQDFQFFPPRLFELLDQEIYYFRKTVGYKVPKNTELGSDATKVQREEQRKIDEAEPLTEEEIQEKENLLSQGFTAWTKRDFNQFIKANEKYGRDDIDNIAKDVEGKTPEEVIEYNAVFWERCTELQDIERIMGQIERGEGKIQRRLSIKKALDQKMSRYRAPFHQLRLQYGNNKGKNYTEIEDRFLVCMLHKLGFDKENVYEELRAAIRASPQFRFDWFIKSRTALELQRRCNTLITLIERENIELEEKERAEKKKKAPKGSVSAGSGSASSNTPAPAPQPKASQKRKSEVVATSSNSKKKKK

SEQ ID NO: 8717 - protein, 1027 aa, Drosophila melanogaster
MSKTDTAAVEATEENSNETTSDAATSSSGEKEAEFDNKIEADRSRRFDFLLKQTEIFTHFMTNSAKSPTKPKGRPKKIKDKDKEKDVADHRHRKTEQEEDEELLAEDSATKEIFRFDASPAYIKSGEMRDYQIRGLNWMISLYENGINGILADEMGLGKTLQTISLLGYLKHFKNQAGPHIVIVPKSTLQNWVNEFKKWCPSLRAVCLIGDQDTRNTFIRDVLMPGEWDVCVTSYEMCIREKSVFKKFNWRYLVIDEAHRIKNEKSKLSEILREFKTANRLLITGTPLQNNLHELWALLNFLLPDVFNSSEDFDEWFNTNTCLGDDALITRLHAVLKPFLLRRLKAEVEKRLKPKKEMKIFVGLSKMQRDWYTKVLLKDIDVVNGAGKVEKMRLQNILMQLRKCTNHPYLFDGAEPGPPYTTDTHLVYNSGKMAILDKLLPKLQEQGSRVLIFSQMTRMLDILEDYCHWRNYNYCRLDGQTPHEDRNRQIQEFNMDNSAKFLFMLSTRAGGLGINLATADVVIIYDSDWNPQMDLQAMDRAHRIGQKKQVRVFRLITESTVEEKIVERAEVKLRLDKMVIQGGRLVDNRSNQLNKDEMLNIIRFGANQVFSSKETDITDEDIDVILERGEAKTAEQKAALDSLGDSSLRTFTMDTNGEAGTSSVYQFEGEDWREKQKLNALGNWIEPPKRERKANYAVDAYFREALRVSEPKAPKAPRPPKQPIVQDFQFFPPRLFELLDQEIYYFRKTVGYKVPKNTELGSDATKVQREEQRKIDEAEPLTEEEIQEKENLLSQGFTAWTKRDFNQFIKANEKYGRDDIDNIAKDVEGKTPEEVIEYNAVFWERCTELQDIERIMGQIERGEGKIQRRLSIKKALDQKMSRYRAPFHQLRLQYGNNKGKNYTEIEDRFLVCMLHKLGFDKENVYEELRAAIRASPQFRFDWFIKSRTALELQRRCNTLITLIERENIELEEKERAEKKKKAPKGSVSAGSGSASSNTPAPAPQPKASQKRKSEVVATSSNSKKKKK

SEQ ID NO: 8718 - protein, 913 aa, Drosophila melanogaster
EFTPKLVMPLETLKQTPVSSEVINNCVYYGILTLALQQTVTTTNTRRCGRCNNSHCYYGPQGPWATATGEILSATNATAHIELKAHEAKEAEANECRIQRLGAACAIEKLCRIFGEQIIEKVAVFQHLMFGKVEQFVKEAYDWRLGSLLPDLGVCNELVSSMQLIETAAPHLHVALHPQMFALLPSLGFIVCHPLKAVRHMAARCIAVLAEIDACQTMQFVVHDLLPLLGKIEQLIERQGAIEAIERVVSRLQIKVVPYIVLLVVPLLGAMSDPDESVRLLSTHCFANLVQLMPLDGKTEQLKSDPLQARKTRDREFLDYLFNPKSIPNYKVPVPISVELRCYQQAGINWLWFLNKYNLHGILCDDMGLGKTLQTICILAGDHMHRQTANLANLPSLVICPPTLTGHWVYEVEKFLDQGSVLRPLHYYGFPVGREKLRSDIGTKCNLVVASYDTVRKDIDFFSGIHFNYCVLDEGHIIKNGKTKSSKAIKRLKANHRLILSGTPIQNNVLELWSLFDFLMPGFLGTEKQFVQRFSRPILSSRDAKSSAKEQEAGVLAMEALHRQVLPFLLRRVKEDVLKDLPPKITQDLLCELSPLQLRLYEDFSNKHLKDCLDKLGDSSSASMVTENLSAKTHIFQALRYLQNVCNHPKLVLRQSEELTKVTSQLALSNSSLDDIEHSAKLPALKQLLLDCGIGVQTESVSQHRALIFCQLKAMLDIVEQDLLRRHLPSVTYLRLDGSVPASQRQDIVNNFNSDPSIDVLLLTTMVGGLGLNLTGADTVIFVEHDWNPMKDLQAMDRAHRIGQKKVVNVYRLITRNSLEEKIMGLQKFKILTANTVVSAENASLQTMGTSQIFDLFNGGKDKGAESGSSAVQGTASGGMSMNTIIENLPELWSEHQYEEEYDLGNFVQALKK

SEQ ID NO: 8719 - protein, 673 aa, Drosophila melanogaster
AIEAIERVVSRLQIKVVPYIVLLVVPLLGAMSDPDESVRLLSTHCFANLVQLMPLDGKTEQLKSDPLQARKTRDREFLDYLFNPKSIPNYKVPVPISVELRCYQQAGINWLWFLNKYNLHGILCDDMGLGKTLQTICILAGDHMHRQTANLANLPSLVICPPTLTGHWVYEVEKFLDQGSVLRPLHYYGFPVGREKLRSDIGTKCNLVVASYDTVRKDIDFFSGIHFNYCVLDEGHIIKNGKTKSSKAIKRLKANHRLILSGTPIQNNVLELWSLFDFLMPGFLGTEKQFVQRFSRPILSSRDAKSSAKEQEAGVLAMEALHRQVLPFLLRRVKEDVLKDLPPKITQDLLCELSPLQLRLYEDFSNKHLKDCLDKLGDSSSASMVTENLSAKTHIFQALRYLQNVCNHPKLVLRQSEELTKVTSQLALSNSSLDDIEHSAKLPALKQLLLDCGIGVQTESVSQHRALIFCQLKAMLDIVEQDLLRRHLPSVTYLRLDGSVPASQRQDIVNNFNSDPSIDVLLLTTMVGGLGLNLTGADTVIFVEHDWNPMKDLQAMDRAHRIGQKKVVNVYRLITRNSLEEKIMGLQKFKILTANTVVSAENASLQTMGTSQIFDLFNGGKDKGAESGSSAVQGTASGGMSMNTIIENLPELWSEHQYEEEYDLGNFVQALKK

SEQ ID NO: 8720 - protein, 1221 aa, Drosophila melanogaster
STPGSTSRKRTPRIGDELGGNILAQSNASLKLYLGGSEATPLDVRDANFMRARISSSRALGALSHYLVQPAPGVVYTPQTESPTDCYTKVLLGHLNAHSAVQRIVCGLIIAFWALEDEPVRPGPPNLQEKLHQCVSEYVYYDEVAISLTRLLQEAQDFIATLKQNKIPINDFNNAKILTLDQIEAVATTLSENLRSYPLKPKVLDMLEERRRSLQASYQQTTSEQSAYHVSAQAALAGAICALHCLPDKLNPVVKPLMESIKREQCLQLQQLSAEFLVHLMDQVCDRNPSPNSKILNNLCTLLRSDPEFTPKLVMPLETLKQTPVSSEVINNCVYYGILTLALQQTVTTTNTRSGAGGATTPTATTAPRGPGRPPTGEILSATNATAHIELKAQQAKEAEAKQCRIQRLGAACAIEKLCRIFGEQIIEKVAVFQHLMFGKVEQFVKEAYDWRLGSLLPDLGVCNELVSSMQLIETAAPHLHVALHPQMFALLPSLGFIVCHPLKAVRHMAARCIAVLAEIDACQTMQFVVHDLLPLLGKIEQLIERQGAIEAIERVVSRLQIKVVPYIVLLVVPLLGAMSDPDESVRLLSTHCFANLVQLMPLDGKTEQLKSDPLQARKTRDREFLDYLFNPKSIPNYKVPVPISVELRCYQQAGINWLWFLNKYNLHGILCDDMGLGKTLQTICILAGDHMHRQTANLANLPSLVICPPTLTGHWVYEVEKFLDQGSVLRPLHYYGFPVGREKLRSDIGTKCNLVVASYDTVRKDIDFFSGIHFNYCVLDEGHIIKNGKTKSSKAIKRLKANHRLILSGTPIQNNVLELWSLFDFLMPGFLGTEKQFVQRFSRPILSSRDAKSSAKEQEAGVLAMEALHRQVLPFLLRRVKEDVLKDLPPKITQDLLCELSPLQLRLYEDFSNKHLKDCLDKLGDSSSASMVTENLSAKTHIFQALRYLQNVCNHPKLVLRQSEELTKVTSQLALSNSSLDDIEHSAKLPALKQLLLDCGIGVQTESVSQHRALIFCQLKAMLDIVEQDLLRRHLPSVTYLRLDGSVPASQRQDIVNNFNSDPSIDVLLLTTMVGGLGLNLTGADTVIFVEHDWNPMKDLQAMDRAHRIGQKKVVNVYRLITRNSLEEKIMGLQKFKILTANTVVSAENASLQTMGTSQIFDLFNGGKDKGAESGSSAVQGTASGGMSMNTIIENLPELWSEHQYEEEYDLGNFVQALKK

SEQ ID NO: 8721 - protein, 1929 aa, Drosophila melanogaster
MLIVFNIPCRLDRLFILLETGSTAATRQAAAKQIGEVQKLYPHELHALLNRLVGYLHSTSWETRIAAAQTVEAILKQVPPWQPEFQVLPKKERCATNTATAAAAAEEDSCQSSGSNSTTASERLLSFDEFDLQQILHKGARLIGSEGNEFDVQEEQPASGGGEEDRSLASRLSRQRAVLNDKLGLTTAAKLGVNLTDMITDEDVALNRSGSTYNVNAEKLPVEHLLNIKTAANGSGQAPLSCREMNRAKRKARQNTSGCSVTAVTPTCSRRNSNSNHSTGSNHSSNGTTGAAIEEPEKKKLKSTDRQEIFYSLNAAVPDATGTWVDAVSWPLENFCSRLFIDLFHAKWEVRHGAATALRELINQHAQGAGKAVLQTREQMDEAHSRWLEDAALRLLCVLCLDRFGDFVSDQVVAPVRETCAQVLGTLVKEMEASKVQRIVNILLQLIQHKNEWDVRHGGLLGLKYVFVVREELLPIYLPQSISNILIGLLDAVDDVGAVAAATLIPVSSWLPKLLNPAQVSSIVKMLWDLLLDQDELTSACNSFMGLLAAILCLPNAARWVEMEPMAILVPRLWPFLSHSTSSVRRSTLKTLMTLTSADRVKSEPKDENQVKEEADKEEMKLNFGVSDWKWELLQQALRHIYQRILVEPQADIQALARQVWSNLIQHADLGALLHAACPFVSSWICLSMQPPRLAFDAGVLIRAGGDVSTPGSTSRKRTPRIGDELGGNILAQSNASLKLYLGGSEATPLDVRDANFMRARISSSRALGALSHYLVQPAPGVVYTPQTESPTDCYTKVLLGHLNAHSAVQRIVCGLIIAFWALEDEPVRPGPPNLQEKLHQCVSEYVYYDEVAISLTRLLQEAQDFIATLKQNKIPINDFNNAKILTLDQIEAVATTLSENLRSYPLKPKVLDMLEERRRSLQASYQQTTSEQSAYHVSAQAALAGAICALHCLPDKLNPVVKPLMESIKREQCLQLQQLSAEFLVHLMDQVCDRNPSPNSKILNNLCTLLRSDPEFTPKLVMPLETLKQTPVSSEVINNCVYYGILTLALQQTVTTTNTRSGAGGATTPTATTAPRGPGRPPTGEILSATNATAHIELKAQQAKEAEAKQCRIQRLGAACAIEKLCRIFGEQIIEKVAVFQHLMFGKVEQFVKEAYDWRLGSLLPDLGVCNELVSSMQLIETAAPHLHVALHPQMFALLPSLGFIVCHPLKAVRHMAARCIAVLAEIDACQTMQFVVHDLLPLLGKIEQLIERQGAIEAIERVVSRLQIKVVPYIVLLVVPLLGAMSDPDESVRLLSTHCFANLVQLMPLDGKTEQLKSDPLQARKTRDREFLDYLFNPKSIPNYKVPVPISVELRCYQQAGINWLWFLNKYNLHGILCDDMGLGKTLQTICILAGDHMHRQTANLANLPSLVICPPTLTGHWVYEVEKFLDQGSVLRPLHYYGFPVGREKLRSDIGTKCNLVVASYDTVRKDIDFFSGIHFNYCVLDEGHIIKNGKTKSSKAIKRLKANHRLILSGTPIQNNVLELWSLFDFLMPGFLGTEKQFVQRFSRPILSSRDAKSSAKEQEAGVLAMEALHRQVLPFLLRRVKEDVLKDLPPKITQDLLCELSPLQLRLYEDFSNKHLKDCLDKLGDSSSASMVTENLSAKTHIFQALRYLQNVCNHPKLVLRQSEELTKVTSQLALSNSSLDDIEHSAKLPALKQLLLDCGIGVQTESVSQHRALIFCQLKAMLDIVEQDLLRRHLPSVTYLRLDGSVPASQRQDIVNNFNSDPSIDVLLLTTMVGGLGLNLTGADTVIFVEHDWNPMKDLQAMDRAHRIGQKKVVNVYRLITRNSLEEKIMGLQKFKILTANTVVSAENASLQTMGTSQIFDLFNGGKDKGAESGSSAVQGTASGGMSMNTIIENLPELWSEHQYEEEYDLGNFVQALKK

SEQ ID NO: 8722 - protein, 1638 aa, Drosophila melanogaster
MASPSPANSPMPPPQAPSPMAPPSQSPAPSPHSPYPHQQPGPLQGPPPPGHPGAYGHPMQHGPPGQGPPGHHMPPHHQGMIFSKGPHMGMQMPPTGPNMSPYQTHGMPPNAPTQPCIVSPGGPPGGPPPPERSSQENLHALQRAIDSMEEKGLQEDPRYSQLLAMRATSKHQHLNGNQVNLLRTQITAYRLLARNKPISMQMQQALQAAQQQPPPGPPIGPPGAPGGPPPGSQHAGQPPVPPQQQQQPPPSAGTPPQCSTPPASNPYGPPVPGQKMQVAPPPPHMQQGQPLPPQPPQVGGPPPIQQQQPPQQQQQQSQPPPPEPHQHQLPNGGKPLSMGPSGGQPLIPSSPMQPQVRGTLPGMPPGSQVPQPGGGPQRQVPPAGMPMPKPNRITTVAKPVGLDPITLLQERENRIAARISLRMQELQRLPATMSEDLRLQAAIELRALRVLNFQRQLRMEFVQCTRRDTTLETALNIKLYKRTKRQGLREARATEKLEKQQKLEAERKRRQKHLEFLAAVLQHGKDLREFHRNNKAQLARMNKAVMNHHANAEREQKKEQERIEKERMRRLMAEDEEGYRKLIDQKKDKRLAFLLSQTDEYISNLTQMVKQHKDDQMKKKEEEGKRLIQFKKELLMSGEYIGIDEGSIVADMRVHVVEQCTGKKLTGDDAPMLKHLHRWLNMHPGWYWIDDEEDSCGSNDDHKPKVEEQPTATEDATDKAQATGNDEDAKDLITKAKVEDDEYRTEEQTYYSIAHTIHEKVVEQASIMVNGTLKEYQIKGLEWLVSLYNNNLNGILADEMGLGKTIQTISLVTYLMDRKKVMGPYLIIVPLSTLPNWVLEFEKWAPAVGVVSYKGSPQGRRLLQNQMRATKFNVLLTTYEYVIKDKAVLAKIQWKYMIIDEGHRMKNHHCKLTQVLNTHYIAPYRLLLTGTPLQNKLPELWALLNFLLPSIFKSCSTFEQWFNAPFATTGEKVELNEEETILIIRRLHKVLRPFLLRRLKKEVEHQLPDKVEYIIKCDMSALQRVLYKHMQSKGVLLTDGSEKGKHGKGGAKALMNTIVQLRKLCNHPFMFQHIEEKYCDHTGGHGVVSGPDLYRVSGKFELLDRILPKLKATNHRVLLFCQMTQCMTIIEDYLGWRQFGYLRLDGTTKAEDRGELLRKFNAKGSDVFVFLLSTRAGGLGLNLQTADTVVIFDSDWNPHQDLQAQDRAHRIGQRNEVRVLRLMTVNSVEERILAAARYKLNMDEKVIQAGMFDQKSTGSERQQFLQTILHQDDNEEEEENEVPDDEMINMMIARSEEEIEIFKRMDAERKKEDEEIHPGRERLIDESELPDWLTKDDDEVERFHYQYDEDTILGRGSRQRKEVDYTDSLTEKEWLKAIDDGAEFDEEEEEDDSKRKRRKRKNRKEESDDDSLILKRRRRQNLDKRSKKQMHKIMSAVIKHNQDGRTLSEPFMKLPSRQRLPDYYEIIKRPVDIKKILQRIEDCKYADLNELEKDFMQLCQNAQIYNEEASLIYLDSIALQKVFVGARQRITAAADAAAVAAGDNTGEAHGNGGSDNSDNDDDDGGDDGSDDEEIATTSAAAVKMKLKLNKSLASAPATPTQSSSNVSSGAATTSKKQTRRKRSQKKYTISDDDDDDMD

SEQ ID NO: 8723 - protein, 1634 aa, Drosophila melanogaster
MASPSPANSPMPPPQAPSPMAPPSQSPAPSPHSPYPHQQPGPLQGPPPPGHPGAYGHPMQHGPPGQGPPGHHMPPHHQGMSPHMGMQMPPTGPNMSPYQTHGMPPNAPTQPCIVSPGGPPGGPPPPERSSQENLHALQRAIDSMEEKGLQEDPRYSQLLAMRATSKHQHLNGNQVNLLRTQITAYRLLARNKPISMQMQQALQAAQQQPPPGPPIGPPGAPGGPPPGSQHAGQPPVPPQQQQQPPPSAGTPPQCSTPPASNPYGPPVPGQKMQVAPPPPHMQQGQPLPPQPPQVGGPPPIQQQQPPQQQQQQSQPPPPEPHQHQLPNGGKPLSMGPSGGQPLIPSSPMQPQVRGTLPGMPPGSQVPQPGGGPQRQVPPAGMPMPKPNRITTVAKPVGLDPITLLQERENRIAARISLRMQELQRLPATMSEDLRLQAAIELRALRVLNFQRQLRMEFVQCTRRDTTLETALNIKLYKRTKRQGLREARATEKLEKQQKLEAERKRRQKHLEFLAAVLQHGKDLREFHRNNKAQLARMNKAVMNHHANAEREQKKEQERIEKERMRRLMAEDEEGYRKLIDQKKDKRLAFLLSQTDEYISNLTQMVKQHKDDQMKKKEEEGKRLIQFKKELLMSGEYIGIDEGSIVADMRVHVVEQCTGKKLTGDDAPMLKHLHRWLNMHPGWDWIDDEEDSCGSNDDHKPKVEEQPTATEDATDKAQATGNDEDAKDLITKAKVEDDEYRTEEQTYYSIAHTIHEKVVEQASIMVNGTLKEYQIKGLEWLVSLYNNNLNGILADEMGLGKTIQTISLVTYLMDRKKVMGPYLIIVPLSTLPNWVLEFEKWAPAVGVVSYKGSPQGRRLLQNQMRATKFNVLLTTYEYVIKDKAVLAKIQWKYMIIDEGHRMKNHHCKLTQVLNTHYIAPYRLLLTGTPLQNKLPELWALLNFLLPSIFKSCSTFEQWFNAPFATTGEKVELNEEETILIIRRLHKVLRPFLLRRLKKEVEHQLPDKVEYIIKCDMSALQRVLYKHMQSKGVLLTDGSEKGKHGKGGAKALMNTIVQLRKLCNHPFMFQHIEEKYCDHTGGHGVVSGPDLYRVSGKFELLDRILPKLKATNHRVLLFCQMTQCMTIIEDYLGWRQFGYLRLDGTTKAEDRGELLRKFNAKGSDVFVFLLSTRAGGLGLNLQTADTVVIFDSDWNPHQDLQAQDRAHRIGQRNEVRVLRLMTVNSVEERILAAARYKLNMDEKVIQAGMFDQKSTGSERQQFLQTILHQDDNEEEEENEVPDDEMINMMIARSEEEIEIFKRMDAERKKEDEEIHPGRERLIDESELPDWLTKDDDEVERFHYQYDEDTILGRGSRQRKEVDYTDSLTEKEWLKAIDDGAEFDEEEEEDDSKRKRRKRKNRKEESDDDSLILKRRRRQNLDKRSKKQMHKIMSAVIKHNQDGRTLSEPFMKLPSRQRLPDYYEIIKRPVDIKKILQRIEDCKYADLNELEKDFMQLCQNAQIYNEEASLIYLDSIALQKVFVGARQRITAAADAAAVAAGDNTGEAHGNGGSDNSDNDDDDGGDDGSDDEEIATTSAAAVKMKLKLNKSLASAPATPTQSSSNVSSGAATTSKKQTRRKRSQKKYTISDDDDDDMD

SEQ ID NO: 8724 - protein, 1638 aa, Drosophila melanogaster
MASPSPANSPMPPPQAPSPMAPPSQSPAPSPHSPYPHQQPGPLQGPPPPGHPGAYGHPMQHGPPGQGPPGHHMPPHHQGMIFSKGPHMGMQMPPTGPNMSPYQTHGMPPNAPTQPCIVSPGGPPGGPPPPERSSQENLHALQRAIDSMEEKGLQEDPRYSQLLAMRATSKHQHLNGNQVNLLRTQITAYRLLARNKPISMQMQQALQAAQQQPPPGPPIGPPGAPGGPPPGSQHAGQPPVPPQQQQQPPPSAGTPPQCSTPPASNPYGPPVPGQKMQVAPPPPHMQQGQPLPPQPPQVGGPPPIQQQQPPQQQQQQSQPPPPEPHQHQLPNGGKPLSMGPSGGQPLIPSSPMQPQVRGTLPGMPPGSQVPQPGGGPQRQVPPAGMPMPKPNRITTVAKPVGLDPITLLQERENRIAARISLRMQELQRLPATMSEDLRLQAAIELRALRVLNFQRQLRMEFVQCTRRDTTLETALNIKLYKRTKRQGLREARATEKLEKQQKLEAERKRRQKHLEFLAAVLQHGKDLREFHRNNKAQLARMNKAVMNHHANAEREQKKEQERIEKERMRRLMAEDEEGYRKLIDQKKDKRLAFLLSQTDEYISNLTQMVKQHKDDQMKKKEEEGKRLIQFKKELLMSGEYIGIDEGSIVADMRVHVVEQCTGKKLTGDDAPMLKHLHRWLNMHPGWDWIDDEEDSCGSNDDHKPKVEEQPTATEDATDKAQATGNDEDAKDLITKAKVEDDEYRTEEQTYYSIAHTIHEKVVEQASIMVNGTLKEYQIKGLEWLVSLYNNNLNGILADEMGLGKTIQTISLVTYLMDRKKVMGPYLIIVPLSTLPNWVLEFEKWAPAVGVVSYKGSPQGRRLLQNQMRATKFNVLLTTYEYVIKDKAVLAKIQWKYMIIDEGHRMKNHHCKLTQVLNTHYIAPYRLLLTGTPLQNKLPELWALLNFLLPSIFKSCSTFEQWFNAPFATTGEKVELNEEETILIIRRLHKVLRPFLLRRLKKEVEHQLPDKVEYIIKCDMSALQRVLYKHMQSKGVLLTDGSEKGKHGKGGAKALMNTIVQLRKLCNHPFMFQHIEEKYCDHTGGHGVVSGPDLYRVSGKFELLDRILPKLKATNHRVLLFCQMTQCMTIIEDYLGWRQFGYLRLDGTTKAEDRGELLRKFNAKGSDVFVFLLSTRAGGLGLNLQTADTVVIFDSDWNPHQDLQAQDRAHRIGQRNEVRVLRLMTVNSVEERILAAARYKLNMDEKVIQAGMFDQKSTGSERQQFLQTILHQDDNEEEEENEVPDDEMINMMIARSEEEIEIFKRMDAERKKEDEEIHPGRERLIDESELPDWLTKDDDEVERFHYQYDEDTILGRGSRQRKEVDYTDSLTEKEWLKAIDDGAEFDEEEEEDDSKRKRRKRKNRKEESDDDSLILKRRRRQNLDKRSKKQMHKIMSAVIKHNQDGRTLSEPFMKLPSRQRLPDYYEIIKRPVDIKKILQRIEDCKYADLNELEKDFMQLCQNAQIYNEEASLIYLDSIALQKVFVGARQRITAAADAAAVAAGDNTGEAHGNGGSDNSDNDDDDGGDDGSDDEEIATTSAAAVKMKLKLNKSLASAPATPTQSSSNVSSGAATTSKKQTRRKRSQKKYTISDDDDDDMD

SEQ ID NO: 8725 - protein, 1518 aa, Drosophila melanogaster
SNSMSSKRGADPDWKTPGKASKDKRPKTNAKKQKFRDEEYCKVCSDGGDLLCCDSCPSVYHRTCLSPPLKSIPKGDWICPRCIPLPGKAEKILSWRWALDRSVELRTSKGEKRREYFIKWHGMSYWHCEWIPEGQMLLHHASMVASFQRRSDMEEPSLEELDDQDGNLHERFYRYGIKPEWLLVQRVINHSEEPNGGTMYLVKWRELSYNDSSWERESDSIPGLNQAIALYKKLRSSNKGRQRDRPAPTIDLNKKYEDQPVFLKEAGLKLHPFQIEGVSWLRYSWGQGIPTILADEMGLGKTIQTVVFLYSLFKEGHCRGPFLISVPLSTLTNWERELELWAPELYCVTYVGGKTARAVIRKHEISFEEVTTKTMRENQTQYKFNVMLTSYEFISVDAAFLGCIDWAALVVDEAHRLRSNQSKFFRILSKYRIGYKLLLTGTPLQNNLEELFHLLNFLSSGKFNDLQTFQAEFTDVSKEEQVKRLHEILEPHMLRRLKADVLKSMPPKSEFIVRVELSSMQKKFYKHILTKNFKALNQKGGGRVCSLLNIMMDLRKCCNHPYLFPSAAEEATISPSGLYEMSSLTKASGKLDLLSKMLKQLKADNHRVLLFSQMTKMLNILEHFLEGEGYQYDRIDGSIKGDLRQKAIDRFNDPVSEHFVFLLSTRAGGLGINLATADTVIIFDSDWNPHNDVQAFSRAHRMGQKKKVMIYRFVTHNSVEERIMQVAKHKMMLTHLVVRPGMGGMTTNFSKDELEDILRFGTEDLFKDGKSEAIHYDDKAVADLLDRTNRGIEEKESWANEYLSSFKVASYATKEEEEEEETEIIKQDAENSDPAYWVKLLRHHYEQHQEDVGRSLGKGKRVRKQVNYTDGGVVAADTTRDDSNWQDNGSEYNSEYSAGSDEDGGDDDFDDQNGAERKAKRRLERRDDRPLPPLLARVGGNIEVLGFNARQRKSFLNAIMRYGMPPQDAFNSQWLVRDLRGKSERNFKAYVSLFMRHLCEPGADNAETFADGVPREGLSRQHVLTRIGVMSLIRKKVQEFEHINGYYSMPELILKPCEPVRSALKQDVAALEAPPTGGNVDKSATTSNSVTPATSAAPSPAPASEKGEDKDKDSEKEKDKTSAEKSEVKQEQEAEEDKKPGDVKQENPVEEAAGDTKPSDAEVKTEVAKTEPKEETKDPEVKEEPKTEEKEKEKVDDKKPIPPTTVIDDDDDDVMIVKEDGELEKPSASSPKDQKAVAAATSAATGATGKGAEDSLEVLKRKFMFNIADGGFTELHTLWLNEEKAAVPGREYEIWHRRHDYWLLAGIVTHGYGRWQDIQNDIRFAIINEPFKMDVGKGNFLEIKNKFLARRFKLLEQALVIEEQLRRAAYLNLAQDPSHPAMSLNARFAEVECLAESHQHLSKESLAGNKPANAVLHKVLNQLEELLSDMKSDVSRLPATLARIPPVAQRLQMSERSILSRLAATAGNASNAAQLMAQFPAGFQGTTLPAFTSGPAGNFANFRPQFSVPGQLSNNSGV

SEQ ID NO: 8726 - protein, 892 aa, Drosophila melanogaster [sequence omitted]

SEQ ID NO: 8727 - protein, 1982 aa, Drosophila melanogaster
MASEEENDDNFQEEEEAQEDNAPAAELSNDSDAPLKPNNDEDDDYDPEDSRRKKKGKKRKTRKGEEKGRKKKKRKKNESEEDSDFVQHDEEVEYPSTSKRARKRKEEKQAAKEKESASSGMPSVEDVCSAFSVCNVEIEYSEEELQSLTTYKAFMHHVRPILQKENPKIAAPKLVMLVAAKWREFCESNPHIQQEGGAAGSGGSAGQARSVTGDEPEEPRSSRSSRNEKPDDIYEEAVEEEEEEEEEEKKPRRKRSGRGKKGRRPSGKVPTLKIKLLGKRKRDSSDEEQDASGASERDSDLEFERMLQKSDDSADEKEAPVSSKADNSAPAAQDDGSGAPVVRKKAKTKIGNKFKKKNKLKKTKNFPEGEDGEHEHQDYCEVCQQGGEIILCDTCPRAYHLVCLEPELDEPPEGKWSCPHCEADGGAAEEEDDDEHQEFCRVCKDGGELLCCDSCPSAYHTFCLNPPLDTIPDGDWRCPRCSCPPLTGKAEKIITWRWAQRSNDDGPSTSKGSKNSNSRVREYFIKWHNMSYWHCEWVPEVQLDVHHPLMIRSFQRKYDMEEPPKFEESLDEADTRYKRIQRHKDKVGMKANDDAEVLEERFYKNGVKPEWLIVQRVINHRTARDGSTMYLVKWRELPYDKSTWEEEGDDIQGLRQAIDYYQDLRAVCTSETTQSRSKKSKKGRKSKLKVEDDEDRPVKHYTPPPEKPTTDLKKKYEDQPAFLEGTGMQLHPYQIEGINWLRYSWGQGIDTILADEMGLGKTIQTVTFLYSLYKEGHCRGPFLVAVPLSTLVNWEREFELWAPDFYCITYIGDKDSRAVIRENELSFEEGAIRGSKVSRLRTTQYKFNVLLTSYELISMDAACLGSIDWAVLVVDEAHRLKSNQSKFFRILNSYTIAYKLLLTGTPLQNNLEELFHLLNFLSRDKFNDLQAFQGEFADVSKEEQVKRLHEMLGPHMLRRLKTDVLKNMPSKSEFIVRVELSAMQKKFYKFILTKNYEALNSKSGGGSCSLINIMMDLKKCCNHPYLFPSAAEEATTAAGGLYEINSLTKAAGKLVLLSKMLKQLKAQNHRVLIFSQMTKMLDILEDFLEGEQYKYERIDGGITGTLRQEAIDRFNAPGAQQFVFLLSTRAGGLGINLATADTVIIYDSDWNPHNDIQAFSRAHRIGQANKVMIYRFVTRNSVEERVTQVAKRKMMLTHLVVRPGMGGKGANFTKQELDDILRFGTEDLFKEDDKEEAIHYDDKAVAELLDRTNRGIEEKESWANEYLSSFKVASYATKEEEEEEETEIIKQDAENSDPAYWVKLLRHHYEQHQEDVGRSLGKGKRVRKQVNYTDGGVVAADTTRDDSNWQDNGSEYNSEYSAGSDEDGGDDDFDDQNGAERKAKRRLERRDDRPLPPLLARVGGNIEVLGFNARQRKSFLNAIMRYGMPPQDAFNSQWLVRDLRGKSERNFKAYVSLFMRHLCEPGADNAETFADGVPREGLSRQHVLTRIGVMSLIRKKVQEFEHINGYYSMPELILKPCEPVRSALKQDVAALEAPPTGGNVDKSATTSNSVTPATSAAPSPAPASEKGEDKDKDSEKEKDKTSAEKSEVKQEQEAEEDKKPGDVKQENPVEEAAGDTKPSDAEVKTEVAKTEPKEETKDPEVKEEPKTEEKEKEKVDDKKPIPPTTVIDDDDDDVMIVKEDGELEKPSASSPKDQKAVAAATSAATGATGKGAEDSLEVLKRKFMFNIADGGFTELHTLWLNEEKAAVPGREYEIWHRRHDYWLLAGIVTHGYGRWQDIQNDIRFAIINEPFKMDVGKGNFLEIKNKFLARRFKLLEQALVIEEQLRRAAYLNLAQDPSHPAMSLNARFAEVECLAESHQHLSKESLAGNKPANAVLHKVLNQLEELLSDMKSDVSRLPATLARIPPVAQRLQMSERSILSRLAATAGNASNAAQLMAQFPAGFQGTTLPAFTSGPAGNFANFRPQFSVPGQLSNNSGV

SEQ ID NO: 8728 - protein, 1982 aa, Drosophila melanogaster
MASEEENDDNFQEEEEAQEDNAPAAELSNDSDAPLKPNNDEDDDYDPEDSRRKKKGKKRKTRKGEEKGRKKKKRKKNESEEDSDFVQHDEEVEYPSTSKRGRKRKEEKQAAKEKESASSGMPSVEDVCSAFSVCNVEIEYSEEELQSLTTYKAFMHHVRPILQKENPKIAAPKLVMLVAAKWREFCESNPHIQQEGGAAGSGGSAGQARSVTGDEPEEPRSSRSSRNEKPDDIYEEAVEEEEEEEEEEKKPRRKRSGRGKKGRRPSGKVPTLKIKLLGKRKRDSSDEEQDASGASERDSDLEFERMLQKSDDSADEKEAPVSSKADNSAPAAQDDGSGAPVVRKKAKTKIGNKFKKKNKLKKTKNFPEGEDGEHEHQDYCEVCQQGGEIILCDTCPRAYHLVCLEPELDEPPEGKWSCPHCEADGGAAEEEDDDEHQEFCRVCKDGGELLCCDSCPSAYHTFCLNPPLDTIPDGDWRCPRCSCPPLTGKAEKIITWRWAQRSNDDGPSTSKGSKNSNSRVREYFIKWHNMSYWHCEWVPEVQLDVHHPLMIRSFQRKYDMEEPPKFEESLDEADTRYKRIQRHKDKVGMKANDDAEVLEERFYKNGVKPEWLIVQRVINHRTARDGSTMYLVKWRELPYDKSTWEEEGDDIQGLRQAIDYYQDLRAVCTSETTQSRSKKSKKGRKSKLKVEDDEDRPVKHYTPPPEKPTTDLKKKYEDQPAFLEGTGMQLHPYQIEGINWLRYSWGQGIDTILADEMGLGKTIQTVTFLYSLYKEGHCRGPFLVAVPLSTLVNWEREFELWAPDFYCITYIGDKDSRAVIRENELSFEEGAIRGSKVSRLRTTQYKFNVLLTSYELISMDAACLGSIDWAVLVVDEAHRLKSNQSKFFRILNSYTIAYKLLLTGTPLQNNLEELFHLLNFLSRDKFNDLQAFQGEFADVSKEEQVKRLHEMLGPHMLRRLKTDVLKNMPSKSEFIVRVELSAMQKKFYKFILTKNYEALNSKSGGGSCSLINIMMDLKKCCNHPYLFPSAAEEATTAAGGLYEINSLTKAAGKLVLLSKMLKQLKAQNHRVLIFSQMTKMLDILEDFLEGEQYKYERIDGGITGTLRQEAIDRFNAPGAQQFVFLLSTRAGGLGINLATADTVIIYDSDWNPHNDIQAFSRAHRIGQANKVMIYRFVTRNSVEERVTQVAKRKMMLTHLVVRPGMGGKGANFTKQELDDILRFGTEDLFKEDDKEEAIHYDDKAVAELLDRTNRGIEEKESWANEYLSSFKVASYATKEEEEEEETEIIKQDAENSDPAYWVKLLRHHYEQHQEDVGRSLGKGKRVRKQVNYTDGGVVAADTTRDDSNWQDNGSEYNSEYSAGSDEDGGDDDFDDQNGAERKAKRRLERRDDRPLPPLLARVGGNIEVLGFNARQRKSFLNAIMRYGMPPQDAFNSQWLVRDLRGKSERNFKAYVSLFMRHLCEPGADNAETFADGVPREGLSRQHVLTRIGVMSLIRKKVQEFEHINGYYSMPELILKPCEPVRSALKQDVAALEAPPTGGNVDKSATTSNSVTPATSAAPSPAPASEKGEDKDKDSEKEKDKTSAEKSEVKQEQEAEEDKKPGDVKQENPVEEAAGDTKPSDAEVKTEVAKTEPKEETKDPEVKEEPKTEEKEKEKVDDKKPIPPTTVIDDDDDDVMIVKEDGELEKPSASSPKDQKAVAAATSAATGATGKGAEDSLEVLKRKFMFNIADGGFTELHTLWLNEEKAAVPGREYEIWHRRHDYWLLAGIVTHGYGRWQDIQNDIRFAIINEPFKMDVGKGNFLEIKNKFLARRFKLLEQALVIEEQLRRAAYLNLAQDPSHPAMSLNARFAEVECLAESHQHLSKESLAGNKPANAVLHKVLNQLEELLSDMKSDVSRLPATLARIPPVAQRLQMSERSILSRLAATAGNASNAAQLMAQFPAGFQGTTLPAFTSGPAGNFANFRPQFSVPGQLSNNSGV

SEQ ID NO: 8729 - protein, 5322 aa, Drosophila melanogaster
MDGNAQNMFHGNHQGDPYYRYDAAAAAAAAAAANPRAMGPPGGYPPRHRPPHPLQQQPQYPSYQPTAENLYGLGAADHQAAMGLGVGVGVGAGMGDLSGWGAAPSVPGQAAAYPGAGLGAYGHPQAAPPSQQQRQSNASAYRQHMPAYGQQDQQKLASYGAQQSMMAGYGSLAPQQQQQQQPPTPQQQQQAQQVQQQAQQQQQQQQQQSQQQARLPQHYPQAPGQHPLYPGVGAPTVQAGQPPTPQAYAHSPYGSPMQHQPSRGAPQHVGYGHTGLDQASAYGQHVPGGAPPGHHLSAQQQQAAQQLGAHQQQQLQSQQQQQAQQQQPHVSLMQQQQLPGAGLPPPHMGMPPSYGSHHQQQQQQQQTQQQQQQSAPPYMSSSKHQQAAAQLNSSPQYRAPFPQLSPQMSPRPPTMSPHPQMSPRPVGVSPAKPPPPQQQQQQTQAQQPQQVVSNQPSQHSIQGMVGLPSPRPQPPTSGAGGAGAKGPAPVAAPVNTLQALEQMVMPSQALGLPPMDYPSAYRSAVGPRMPASPQQQQQQHQQWGAAHGAQHLAALQQQQAQQQQQQVQQQQQAPPQQQQQAAMLQAQQQHHQQQLSMYGQPMGQQPQTAQQQVVPPVTSQPPVVAASQQQQQQQHQQQSLNDQLQHSINDIVGGGNSSGATGGAQNQHQQQPQLAAMSSPLHQQNLPNMHHLIQPTMETTQPTQQQQQTSQQQQQPQQPQATLTSPHHQQMQHQSPIHQQQQSPHHQQHLPSYNQSQQQFDPFANILGDNQPAASQQTMSPAHVSSPVPAQMQQQQHQTQQQPSQQVPQSQQQQVSQPQQQTQQQQPSTPSHHLSSILNETANSNDSSTLAVAANDSNNSSSNSSTNSIVNNQPTSVHDSNSQSSINSSSNNQQQLLMDNTNSHGGNSESAQNAGVDVGLFDNNSMSSNSAAVAAVASNAASAAAALLDSNSQSSNAEFEKNQSEGEGLGVVEGVIANETDLPQDENSVSKTQDITLSTELPTIQDDLQEKPTAEMEQTQLGQSLGDLSKSLLEEPKTVEESGEDKSQSAPGVAPPADPIIPVTQPPQQQMPPIGMPMHPIAPGYEAQAQGQGHMPPMMPPYGGAPGMYPPYPMLHQQEIAALQQQIQELYCMPPGHELQHQDKLMRMQERLNLLTQHEVNDQCAGGPQCLLFQNVPPMYGPPGNPLLNQQMVESPQVSSTTGRGRGKSANKPRKPRAKKGEKAQVGQQQDLMDISGNVAMGAANAVSSIPTTQLPVSEDCVTQGAGDTSVVGMLEYSEGMGDLSQDVHSANELDTSTDGSGKKKKPRKPRTPKDPNKPPRDRTPKAKKPKDPNDPNSTETPAAVKKRAGASKRRKQYGEDGAEQTGEGSEVEDNKPLVPKAGSADGEAETTSGGTGVDGESPDYDDIPVSKIPRGSNEDEKEAEAGDETVDSVPDSAGDPASTPSRRDRKRSTARSRRNANSEEGGSARKNRGSLSAKALKKRRNRGRIVPESDGEDDTLDRTPPPSPPPDSEMDSNKRRSSRNTQRKKYIDDVMLRFSDDENSLLVASPVKKDKKPSANASNSNAGSDVEKTEPQSGAEGDAAQEVGEEKSNLPLDESSQLEASSSTSAVAEKERQISTDAANAAMSSKPNYVYINTGDEDSMVVQLVLAMRMGKRELILDKPKEKAPEPKQDEEKSELDEATTDKPEGDEKFKTEGESKKDLTDSEETKLESSAMEVDSKEESEPDDSKKSDEDNKDKDKMEVDDEVGKSDKESKPEEQSETVKTEENSKAIEEDKSSTVLTADHAKEPETVLEKMEVDEKANDDQSAVSKAEGSDEKSTDDSNPEEATTEKNKESLEIEGEKERVKEGEESVKKENDEKTEADMENKPEPVFIDVEEYFVKYRNFSYLHCEWRTEEELLKGDRRVAAKIRRFQQKQSQQLNIFENIEDEPFNQDFTEVDRVLDMSVHTDETSGETTKHYLVKWKSLPYEDCTWELEEDVDNDKIEQYLRFNKIPQRSEWKSKKRPHPELWKKLEKTPVYKGGNSLRPYQLEGLNWLKFSWYNTHNCILADEMGLGKTIQSLTFVHSVYEYGIRGPFLVIAPLSTIPNWQREFEGWTDMNVVVYHGSVTSKQMIQDYEYYYKTESGKVLKEPIKFNVLITTFEMIVTDYMDLKAFNWRLCVIDEAHRLKNRNCKLLEGLRQLNLEHRVLLSGTPLQNNISELFSLLNFLEPSQFSSQEEFMSEFGSLRTEEEVNKLQALLKPMMLRRLKDDVEKSLAPKEETIIEVELTNIQKKYYRGILEQNFSFLKKGTTSANIPNLMNTMMELRKCCIHPYLLNGAEEQIQYDFKSQHGEDPESYYKNLILSAGKMVLIDKLLPKLKANGHRVLIFSQMVRCLDILEDYLVYRKYPFERIDGRIRGNLRQEAIDRYSKPGSDRFVFLLCTKAGGLGINLTAADTVIIYDSDWNPQNDLQAQARCHRIGQRKMVKIYRLLCRNTYEREMFDKASMKLGLDKAVLQSMNTQGSKDGNNKQLSKKEIEDLLKKGAYGAVMDDDNAGDKFCEEDIDSILKRRTQVITMESEKGSTFSKASFAASGNRSDITIDDPDFWTKWAKKVDIDPDACERDETEDLVLSEPRRRTQIKRYGHEDVMELNSEESSNENSDEEGGIGLRSRRRKEKRDRAREKKGNDEYIPRERDALAALGLEEIQYGNWAKSECFKVEKGLLSFGWGRWSELLELGQFKRGWRDVDVEDCARIILLYCLQVYKGDEKIKTFIWDLITPTEDGEVQKISRDHSGLHNLVPRGRNGGKSNKESTGVSTPAPGSASGSNSGNTTPAHKSSALDGSDKDSGGINASAVAAAVTSIHDPNHWSKKEKYDADAYLEGAYKKHLGRHANKVLLRVRMLYYIQHEVIGDFVQQIKDNTPISELPIRPPPTPDQVPSSWWNPICCDKSLLVGTYKHGCEMYRQMRADPNLCFVTHVGAGAAGDDLAVTSLPINEDDANSKHDDGDEVDDDGTTTTKDSDSTKLTGGDNKDSLLDPERPSSSGLDEEESVAGSYPPTVAAVEDATTMWPSMQDLNTRLRRVITAYQRNYKKEELKLQQKAKLQALVSSTPPLSVPTTPTLQSMQMQLQSGSGSGGSGIGSSAQHDASGRSLQALMQSQGASTSAAAAAAASSAGGSCSGSGQVGMGGAGVMPAMPTAADISLMLSILNTTDVNQLANLDINKLAMYLVSMNNKMERQGKMELAAKERESQRLQLIPKKWNRREEYEFLRVLTGYGVDLHVSTPMASSNGSSLSPDWTKFKQMAHLERKSDETLTDYYKVFVAMCKRQAGLKLSESERGLEGIIEEIEKEHAKLILDRLEVLAKLREVARNPMLEERLKLCTKNADTPDWWEPGRHDKELITAVLKHGLYRSETFIFNDPNFSFGESEKRFIRELEAQIQRTIKLEAFNAEKAEKLAAAEKDAATEKAAATEKAAAEKAASVKNEVIDLDDELMTNESVIKKESPVTPIKEEIKSEESPEKHDTADNLEDKNSDAEESTKIKGKEDFNPETTEKEALDESTNLNKDKSSTETLVPEIEDSKPSEDKMEVEELPVAENGEKEGSPEKCSDAEDKKFSEEKPSSPAVPDGKVSEMEADEAAPNTEENCSGDSESPEKECEDKVVEKVEEEKGENSYEKAEEQKEETEKLEKSSIESEPSEKSETVLEPEVAVPKKSTGDQDILDLVAGPSDPDDDEVMKEKEKAVEEECKKQAAELKARFPDLEVIQPATVKQQKLEKPKLEMCMIRWFKDFALERRIAHIVACVESGNWPVDSKYSAFATCKGATDLSIALHESIPHLSSLERRSTTPDVITITTDQGVTKHLQTSHMQQVASSASAASTSSGVPQVTQSKPSSSNSLPGLDAKSINAAVAAAVAAAAAGGNATSLSSLLPGMSLSAATGSSAGGVSGLSVPSAGSGVGKKRKRHIAIDVETERAKLHALLNSSTMAPKDWESEIANMEALSGSSGRGRGGNSSASSGMQPPPAHQHASLSRQSSGQFSKPAVPAMKTPPPSMGAPMDLSSSLPKMNMTEMLKSASSSGAIDLSEVQDFSMPSKKSSVHAALSSAFPSMGNKSKLDDTLNKLMKKNNCTIEEPVIGKEKKRKKLDEIVLGLSAAKEQKTFPDPSLPSSKKPQIPPSVSVTPANLQSSSNQQSNQKPFTITVTTVPGKSKSGSSNSGSGTGGSSSASGGGAGGSGLSALQNMAMGGLSSKDSLNALLAQTMATDPQTFLKQQQKMMQFLPPAQRKAYENMLAEMEQAMKISSKFSTNSPHDVKVNKWLSDMTSPLGDQLSIDYVGGGGASGSGSGNSRRSNRQQGNSQQSSSAAQLQKQQQQQQQQQQQQQQHSMPGPQNLTGEEPVPVINKQTGKRLGGNKAPQLKRLMQWLTENPNYEVDPKWLEQMQNPMSTPSPRPASMESGYGSSAVKSHGGRPLSNLSSTSSSSHTQQQSSAAQSQAGGNSGSSKKNSRQQTAASAALDQAALQFGSLAGLNPSLLANLPGLGAFDPKNPLAAFDPKNPLLSMSFGGMPGMGNIPGLGNLNNMNLFASLAGMGGLGNLAGMDTQSLAALMAAAGPTLGGLTGASGGAGSGKSQAQSQSSATSSSSSASKKKQQQQQQQAQNEAAQLAAAISASTGGSGASGGKNAAASASQLAAGFPFLFPNPSLLYPPMGLGGLNPYSLGSSGLGSAYDQLAQQYNLLNGATSSASNTSSTQSKSHQSQSKSSQSRNTTASANSAASLMNAMASMGGGASTVTTPSTSASGSGRGRQSSSRNQSQTTPTAADMAQLSSLLMPGADPHLLESLSRMSNMDLAQATRLMSSLGMPPLSGTPSSSGGGNTSTSKRSSQAANEANVQAKEQQKWLESLARGALPTDLAALQAFSQGKMPSTSGSNTGTSTSSSKSSKAAATAAAAQLPQIPGMSSDFPQAFLAEMAAQAMAAAGGSLPLSGPGSLASLAGLTGGSAGGGGSSASGSTSHSSSKRQREQDAFKQQMDYYTKTLGLGSGISLIPTSSAGGSSASSSAANAAAAAYAAALDAEQQHQQQQKALSKRARGDLHPTKEELAALAAGLPLNLGASMSSIEKSLRGGSSSSSSSTPAPMTAEQDKVTLTPLNASGGGSGSSSSSAAAAGLAANLPSQTTITIAPPISSGASTSSERSERSESRISLTITNAADAAKLPPPYEEADELIIQPILKKPTAANPGSSHGGSVDDLDTAENTSAANLSGSSSSSAAAAAAAAAEENRRSSNRLKRPRSGNEQGSGSVEGQPPEKRRELRSTRHTRSSADASTLNLSTGSESGAEERNE

SEQ ID NO: 8730 - protein, 1883 aa, Drosophila melanogaster
MSQALNESANSIGSDEQDDTREEANGTDHSGSGSGSGSSGSDSDSDSSSGNSSDGRSSPEPEDKSLSVAGFPPTAAAAQADSKTNGFTDDQEDSSSDGSSGSDSDSDAEGPSDQRNQSINNANTSSSLPKPEQNEEEDNETEAGQQQPASDASADESSDSSANVSPTSSSSSSEEEEEDYRPKRTRQARKPPTAAEKSKKAPAPKNKKKTWDSDESDESEDSDDEVSTAQKRKPAATTSRSKLAQQQQRRRVKPFSSEDSDDDDASKRCATRRKGAAVSYKEASEDEATDSEDLLEFEYDESQAATTAATAEEEEKCETIERILAQRAGKRGCTGNQTTIYAIEENGFDPHAGFDEKQTPDAETEAQFLIKWKGWSYIHNTWESEATLRDMKAKGMKKLDNFIKKEKEQAYWRRYAGPEDIDYFECQLELQHELLKSYNNVDRIIAKGSKPDDGTEEYLCKWQSLPYAESTWEDAALVLRKWQRCAEQFNDRESSKCTPSRHCRVIKYRPKFSRIKNQPEFLSSGLTLRDYQMDGLNWLLHSWCKENSVILADEMGLGKTIQTICFLYSLFKIHHLYGPFLCVVPLSTMTAWQREFDLWAPDMNVVTYLGDIKSRELIQQYEWQFESSKRLKFNCILTTYEIVLKDKQFLGTLQWAALLVDEAHRLKNDDSLLYKSLKEFDTNHRLLITGTPLQNSLKELWALLHFIMPDKFDTWENFEVQHGNAEDKGHTRLHQQLEPYILRRVKKDVEKSLPAKVEQILRVEMTSLQKQYYKWILTKNFDALRKGKRGSTSTFLNIVIELKKCCNHAALIRPSEFELMGLQQDEALQTLLKGSGKLVLLDKLLCRLKETGHRVLIFSQMVRMLDVLADYLQKRHFPFQRLDGSIKGEMRRQALDHFNAEGSQDFCFLLSTRAGGLGINLATADTVIIFDSDWNPQNDLQAQARAHRIGQKNQVNIYRLVTARSVEEQIVERAKQKMVLDHLVIQRMDTTGRTVLDKSGNGHSSNSNPFNKDDLSAILKFGAEELFKDEQEHDDDLVCDIDEILRRAETRNEDPEMPADDLLSAFKVASIAAFEEEPSDSVSKQDQNAAGEEDDSKDWDDIIPEGFRKAIDDQERAKEMEDLYLPPRRKTAANQNEGKRGAGKGGKGKQQADDSGGDSDYELGSDGSGDDGRPRKRGRPTMKEKITGFTDAELRRFIRSYKKFPAPLHRMEAIACDAELQEKPLAELKRLGEMLHDRCVQFLHEHKEEESKTAATDETPGAKQRRARATFSVKLGGVSFNAKKLLACEQELQPLNEIMPSMPEERQQWSFNIKTRAPVFDVDWGIEEDTKLLCGIYQYGIGSWEQMKLDPTLKLTDKILLNDTRKPQAKQLQTRAEYLLKIIKKNVELTKGGQRRQRRPRASRANDAKAASQSASSTIDAKPHDGEDAAGDARTVAESSNSQVDPSNASPHNAPATEQHGDPAKKAKKSKARSKKTSASDNNGNKPMHFTANNEPRALEVLGDLDPSIFNECKEKMRPVKKALKALDQPDVSLSDQDQLQHTRDCLLQIGKQIDVCLNPYAETEKKEWRSNLWYFVSKFTELDAKRLFKIYKHALKQKAGGDGEAKGKDKGSSGSPAKSKPNGVTTEEKEKERDRSGGKKKKKDKDKERSGQARYPETGIPTSGRYADPPLKRKRDENDADASSGLAGAPGGGIGDNLKSMSFKRLNMDRHEDRKKHHRGPDYYGGSGPPMGSGSYEGGSNSRSQGPTSPSTPRTGRGGYDPPPAPSGYTPEMERWQSRDRYSQDYKRDRYDGYGRSGGGQGIYHRERDRRPEKRRYPSGLPPHPYSSHYLPPNYYGLPNGAVPGLPPPSSVYRSDPRGYPVMPRDYPADYRRSDYERRTQT

SEQ ID NO: 8731 - protein, 1883 aa, Drosophila melanogaster
MSQALNESANSIGSDEQDDTREEANGTDHSGSGSGSGSSGSDSDSDSSSGNSSDGRSSPEPEDKSLSVAGFPPTAAAAQADSKTNGFTDDQEDSSSDGSSGSDSDSDAEGPSDQRNQSINNANTSSSLPKPEQNEEEDNETEAGQQQPASDASADESSDSSANVSPTSSSSSSEEEEEDYRPKRTRQARKPPTAAEKSKKAPAPKNKKKTWDSDESDESEDSDDEVSTAQKRKPAATTSRSKLAQQQQRRRVKPFSSEDSDDDDASKRCATRRKGAAVSYKEASEDEATDSEDLLEFEYDESQAATTAATAEEEEKCETIERILAQRAGKRGCTGNQTTIYAIEENGFDPHAGFDEKQTPDAETEAQFLIKWKGWSYIHNTWESEATLRDMKAKGMKKLDNFIKKEKEQAYWRRYAGPEDIDYFECQLELQHELLKSYNNVDRIIAKGSKPDDGTEEYLCKWQSLPYAESTWEDAALVLRKWQRCAEQFNDRESSKCTPSRHCRVIKYRPKFSRIKNQPEFLSSGLTLRDYQMDGLNWLLHSWCKENSVILADEMGLGKTIQTICFLYSLFKIHHLYGPFLCVVPLSTMTAWQREFDLWAPDMNVVTYLGDIKSRELIQQYEWQFESSKRLKFNCILTTYEIVLKDKQFLGTLQWAALLVDEAHRLKNDDSLLYKSLKEFDTNHRLLITGTPLQNSLKELWALLHFIMPDKFDTWENFEVQHGNAEDKGYTRLHQQLEPYILRRVKKDVEKSLPAKVEQILRVEMTSLQKQYYKWILTKNFDALRKGKRGSTSTFLNIVIELKKCCNHAALIRPSEFELMGLQQDEALQTLLKGSGKLVLLDKLLCRLKETGHRVLIFSQMVRMLDVLADYLQKRHFPFQRLDGSIKGEMRRQALDHFNAEGSQDFCFLLSTRAGGLGINLATADTVIIFDSDWNPQNDLQAQARAHRIGQKNQVNIYRLVTARSVEEQIVERAKQKMVLDHLVIQRMDTTGRTVLDKSGNGHSSNSNPFNKDDLSAILKFGAEELFKDEQEHDDDLVCDIDEILRRAETRNEDPEMPADDLLSAFKVASIAAFEEEPSDSVSKQDQNAAGEEDDSKDWDDIIPEGFRKAIDDQERAKEMEDLYLPPRRKTAANQNEGKRGAGKGGKGKQQADDSGGDSDYELGSDGSGDDGRPRKRGRPTMKEKITGFTDAELRRFIRSYKKFPAPLHRMEAIACDAELQEKPLAELKRLGEMLHDRCVQFLHEHKEEESKTAATDETPGAKQRRARATFSVKLGGVSFNAKKLLACEQELQPLNEIMPSMPEERQQWSFNIKTRAPVFDVDWGIEEDTKLLCGIYQYGIGSWEQMKLDPTLKLTDKILLNDTRKPQAKQLQTRAEYLLKIIKKNVELTKGGQRRQRRPRASRANDAKAASQSASSTIDAKPHDGEDAAGDARTVAESSNSQVDPSTASPHNAPATEQHGDPAKKAKKSKARSKKTSASDNNGNKPMHFTANNEPRALEVLGDLDPSIFNECKEKMRPVKKALKALDQPDVSLSDQDQLQHTRDCLLQIGKQIDVCLNPYAETEKKEWRSNLWYFVSKFTELDAKRLFKIYKHALKQKAGGDGEAKGKDKGSSGSPAKSKPNGVTTEEKEKERDRSGGKKKKKDKDKERSGQARYPETGIPTSGRYADPPLKRKRDENDADASSGLAGAPGGGIGDNLKSMSFKRLNMDRHEDRKKHHRGPDYYGGSGPPMGSGSYEGGSNSRRQGPTSPSTPRTGRGGYDPPPAPSGYTPEMERWQSRDRYSQDYKRDRYDGYGRSGGGQGSYHRERDRRPEKRRYPSGLPPHPYSSHYLPPNYYGLPNGAVPGLPPPSSVYRSDPRGYPVMPRDYPADYRRSDYERRTQT

SEQ ID NO: 8732 - protein, 1101 aa, Drosophila melanogaster
MDGLNWLLHSWCKENSVILADEMGLGKTIQTICFLYSLFKIHHLYGPFLCVVPLSTMTAWQREFDLWAPDMNVVTYLGDIKSRELIQQYEWQFESSKRLKFNCILTTYEIVLKDKQFLGTLQWAALLVDEAHRLKNDDSLLYKSLKEFDTNHRLLITGTPLQNSLKELWALLHFIMPDKFDTWENFEVQHGNAEDKGYTRLHQQLEPYILRRVKKDVEKSLPAKVEQILRVEMTSLQKQYYKWILTKNFDALRKGKRGSTSTFLNIVIELKKCCNHAALIRPSEFELMGLQQDEALQTLLKGSGKLVLLDKLLCRLKETGHRVLIFSQMVRMLDVLADYLQKRHFPFQRLDGSIKGEMRRQALDHFNAEGSQDFCFLLSTRAGGLGINLATADTVIIFDSDWNPQNDLQAQARAHRIGQKNQVNIYRLVTARSVEEQIVERAKQKMVLDHLVIQRMDTTGRTVLDKSGNGHSSNSNPFNKDDLSAILKFGAEELFKDEQEHDDDLVCDIDEILRRAETRNEDPEMPADDLLSAFKVASIAAFEEEPSDSVSKQDQNAAGEEDDSKDWDDIIPEGFRKAIDDQERAKEMEDLYLPPRRKTAANQNEGKRGAGKGGKGKQQADDSGGDSDYELGSDGSGDDGRPRKRGRPTMKEKITGFTDAELRRFIRSYKKFPAPLHRMEAIACDAELQEKPLAELKRLGEMLHDRCVQFLHEHKEEESKTAATDETPGAKQRRARATFSVKLGGVSFNAKKLLACEQELQPLNEIMPSMPEERQQWSFNIKTRAPVFDVDWGIEEDTKLLCGIYQYGIGSWEQMKLDPTLKLTDKILLNDTRKPQAKQLQTRAEYLLKIIKKNVELTKGGQRRQRRPRASRANDAKAASQSASSTIDAKPHDGEDAAGDARTVAESSNSQVDPSTASPHNAPATEQHGDPAKKAKKSKARSKKTSASDNNGNKPMHFTANNEPRALEVLGDLDPSIFNECKEKMRPVKKALKALDQPDVSLSDQDQLQHTRDCLLQIGKQIDVCLNPYAETEKKEWRSNLWYFVSKFTELDAKRLFKIYKHALKQKAGGDGEAKGKDKGSSGSPAKSKPNGVTTEKKKKK

SEQ ID NO: 8733 - protein, 788 aa, Drosophila melanogaster
EFNEMRRSLAPSQRGPLRPESRHSFTPPLLKKNKRSCQQELEREQELDRRRLGALRDASNTSELPLPIRFTANSEYELAIAKVLARKFKVPMDNYVPDYGGKRVLGVRRCISRRPLHDPMACNALVLFHPPAYTEHERMGMDPTKVLVHVVVDPLLSNILRPHQREGVRFMYECVEGKRGNFNGCIMADEMGLGKTLQCVTLVWTLLRQGPECKPTINKAIVVSPSSLVKNWEKEFTKWLHGRLLCLPMEGGTKENTIRALEQFSMTSARLGTPVLLISYETFRIYAEILCKYEVGMVICDEGHRLKNSDNLTYQALMGLKTKRRVLLSGTPIQNDLTEYYSLVNFVNPEMLGTAAVFKRNFESAILRGQNTDSTEQERQRAIEKTQELIGLVDQCIIRRTNQILTKYLPVKFEMVICAKLTAIQLELYTNFLKSDQVRRSLADCNEKASLTALADITTLKKICSHPDLIYEKLTAREKGFENSQNVLPSNYKPKDLNPELSGKFMLLDFMLAAIRAEGNDKVVLISNYTQTLDLFEQLARKRKYGFVRLDGTMSIKKRSKVVDRFNDPESDSFLFMLSSKAGGCGLNLIGANRLFMFDPDWNPANDEQAMARVWRDGQKKPCYIYRLVASGSIEEKILQRQTHKKSLSSTIIDNNESAEKHFTRDDLKDLFTFDANILSDTHDKLKCKRCVQNIQMKPPPEDTDCTSHLSQWYHCSNNRGLPDNILAQAWMDCKCVSFVFHHRSQAQEIVPSAEEEATDQPEEKPESRKRSSTPASDDSADEDFRGF

SEQ ID NO: 8734 - protein, 784 aa, Drosophila melanogaster
MRRSLAPSQRGPLRPESRHSFTPPLLKKNKRSCQQELEREQELDRRRLGALRDASNTSELPLPIRFTANSEYELAIAKVLARKFKVPMDNYVPDYGGKRVLGVRRCISRRPLHDPMACNALVLFHPPAYTEHERMGMDPTKVLVHVVVDPLLSNILRPHQREGVRFMYECVEGKRGNFNGCIMADEMGLGKTLQCVTLVWTLLRQGPECKPTINKAIVVSPSSLVKNWEKEFTKWLHGRLLCLPMEGGTKENTIRALEQFSMTSARLGTPVLLISYETFRIYAEILCKYEVGMVICDEGHRLKNSDNLTYQALMGLKTKRRVLLSGTPIQNDLTEYYSLVNFVNPEMLGTAAVFKRNFESAILRGQNTDSTEQERQRAIEKTQELIGLVDQCIIRRTNQILTKYLPVKFEMVICAKLTAIQLELYTNFLKSDQVRRSLADCNEKASLTALADITTLKKICSHPDLIYEKLTAREKGFENSQNVLPSNYKPKDLNPELSGKFMLLDFMLAAIRAEGNDKVVLISNYTQTLDLFEQLARKRKYGFVRLDGTMSIKKRSKVVDRFNDPESDSFLFMLSSKAGGCGLNLIGANRLFMFDPDWNPANDEQAMARVWRDGQKKPCYIYRLVASGSIEEKILQRQTHKKSLSSTIIDNNESAEKHFTRDDLKDLFTFDANILSDTHDKLKCKRCVQNIQMKPPPEDTDCTSHLSQWYHCSNNRGLPDNILAQAWMDCKCVSFVFHHRSQAQEIVPSAEEEATDQPEEKPESRKRSSTPASDDSADEDFRGF

SEQ ID NO: 8735 - protein, 784 aa, Drosophila melanogaster
MRRSLAPSQRGPLRPESRHSFTPPLLKKNKRSCQQELEREQELDRRRLGALRDASNTSELPLPIRFTANSEYELAIAKVLARKFKVPMDNYVPDYGGKRVLGVRRCISRRPLHDPMACNALVLFHPPAYTEHERMGMDPTKVLVHVVVDPLLSNILRPHQREGVRFMYECVEGKRGNFNGCIMADEMGLGKTLQCVTLVWTLLRQGPECKPTINKAIVVSPSSLVKNWEKEFTKWLHGRLLCLPMEGGTKENTIRALEQFSMTSARLGTPVLLISYETFRIYAEILCKYEVGMVICDEGHRLKNSDNLTYQALMGLKTKRRVLLSGTPIQNDLTEYYSLVNFVNPEMLGTAAVFKRNFESAILRGQNTDSTEQERQRAIEKTQELIGLVDQCIIRRTNQILTKYLPVKFEMVICAKLTAIQLELYTNFLKSDQVRRSLADCNEKASLTALADITTLKKICSHPDLIYEKLTAREKGFENSQNVLPSNYKPKDLNPELSGKFMLLDFMLAAIRAEGNDKVVLISNYTQTLDLFEQLARKRKYGFVRLDGTMSIKKRSKVVDRFNDPESDSFLFMLSSKAGGCGLNLIGANRLFMFDPDWNPANDEQAMARVWRDGQKKPCYIYRLVASGSIEEKILQRQTHKKSLSSTIIDNNESAEKHFTRDDLKDLFTFDANILSDTHDKLKCKRCVQNIQMKPPPEDTDCTSHLSQWYHCSNNRGLPDNILAQAWMDCKCVSFVFHHRSQAQEIVPSAEEEATDQPEENPESRKRSSTPASDDSADEDFRGF

SEQ ID NO: 8736 - protein, 628 aa, Drosophila melanogaster
RPHQREGVRFMYECVEGKRGNFNGCIMADEMGLGKTLQCVTLVWTLLRQGPECKPTINKAIVVSPSSLVKNWEKEFTKWLHGRLLCLPMEGGTKENTIRALEQFSMTSARLGTPVLLISYETFRIYAEILCKYEVGMVICDEGHRLKNSDNLTYQALMGLKTKRRVLLSGTPIQNDLTEYYSLVNFVNPEMLGTAAVFKRNFESAILRGQNTDSTEQERQRAIEKTQELIGLVDQCIIRRTNQILTKYLPVKFEMVICAKLTAIQLELYTNFLKSDQVRRSLADCNEKASLTALADITTLKKICSHPDLIYEKLTAREKGFENSQNVLPSNYKPKDLNPELSGKFMLLDFMLAAIRAEGNDKVVLISNYTQTLDLFEQLARKRKYGFVRLDGTMSIKKRSKVVDRFNDPESDSFLFMLSSKAGGCGLNLIGANRLFMFDPDWNPANDEQAMARVWRDGQKKPCYIYRLVASGSIEEKILQRQTHKKSLSSTIIDNNESAEKHFTRDDLKDLFTFDANILSDTHDKLKCKRCVQNIQMKPPPEDTDCTSHLSQWYHCSNNRGLPDNILAQAWMDCKCVSFVFHHRSQAQEIVPSAEEEATDQPEENPESRKRSSTPASDDSADEDFRGF

SEQ ID NO: 8737 - protein, 3201 aa, Drosophila melanogaster
MNEGNSAGGGHEGLSPAPPAVPDRVTPHSTEISVAPANSTSTTVRAAGSVGAALPATRHHQHIATQVKGIASSSSKQQKQLASAQLPVPLSPLPQQQQQTAEATAAAAAPAHSNVSVSSSTIEASVLPPQAKRQRLDDNEDRTSAASIVGPAESSNIVSSLLPASVASSSEVGGLSSTALQDLNALKKRILQQKLQILRNLKERHLENVSEYFYLQNGGSMMDYPAWRKKTPTPQFISYSNANRIDQLIHEDKPSTSAAAAAAQNQKYTTQQTDSVESSLVSGIGTGATKGAPLDGNISNSTVKTNTQSQVPSKIGSFTESTPAATESNSSTTVPGTATSGAATSTSATSAEASGNVLAVEAEIKIPAVGATPVAISTKLPAAVVQLTQQGGTPLLPCNTSAGSTALRRPQGQNNASSGSAAASGGGGSLTPTPLYTGNGPAALGGSGGLTPGTPTSGSLLSPALGGGSGTPNSAAQEFSFKAKQEVYVMQRISELQREGLWTERRLPKLQEPSRPKAHWDYLLEEMVWLAADFAQERKWKKNAAKKCAKMVQKYFQDKATAAQRAEKAQELQLKRVASFIAREVKSFWSNVEKLVEYKHQTKIEEKRKQALDQHLSFIVDQTEKFSQQLVEGMNKSVADTPSLNSSRLTSPKRESDDDFRPESGSEDDEETIAKAEEDAADVKEEVTALAKESEMDFDDFLNDLPPGYLENRDKLMKEEQSSAIKTETPDDSDDSEFEAKEASDDDENTISKQEEAEQEIDHKKEIDELEADNDLSVEQLLAKYKSEQPPSPKRRKLAPRDPELDSDDDSTAVDSTEESEDAATEDEEDLSTVKTDTDMEEQDEQEDGLKSLMADADATSGAAGSGSTAGASGNKDDMLNDAAALAESLQPKGNTLSSTNVVTPVPFLLKHSLREYQHIGLDWLVTMNERKLNGILADEMGLGKTIQTIALLAHLACAKGNWGPHLIVVPSSVMLNWEMEFKKWCPGFKILTYYGSQKERKLKRVGWTKPNAFHVCITSYKLVVQDQQSFRRKKWKYLILDEAQNIKNFKSQRWQLLLNFSTERRLLLTGTPLQNDLMELWSLMHFLMPYVFSSHREFKEWFSNPMTGMIEGNMEYNETLITRLHKVIRPFLLRRLKKEVEKQMPKKYEHVITCRLSNRQRYLYEDFMSRAKTRETLQTGNLLSVINVLMQLRKVCNHPNMFEARPTISPFQMDGITFHTPRLVCDIMEYDPFTQINLETLNLLLLHLEQTMTAYVSHKSRLLAPPRKLIEDIDTAPLPAPRCPNGKYRFHIRVRSAELAQRIKLNAVKVGASPAMRLEGSKIMPMRNLLPSGRVLKRVSASINPVNMALKPVVINSVVTTTSSSTTASSPTGALSVLSNSKLLGARSQINAPTPAKVAKTMQDGKPFFYLTPATNSGAAGARLTLTSKTTASASTTTSRTTVTASTTSGQQLIRDPIVKDLATHVKSTVQKQSIANGKTEPEEETEAEDPYKVQELIQMRKEQRLAALKRMAMINRRRTDATPIYGEDCREAIQRCMQATRSLKRSTWQTRGYANCCTAMAHRNGWSLNHLLKSFEERCADLKPVFANFVIYVPSGCAPRIRRYVQNLLLTHWQHEPRIENIVDQALRAKLALLHPIISEMTTKFPDPRLIQYDCGKLQTMDRLLRQLKVNGHRVLIFTQMTKMLDVLEAFLNYHGHIYLRLDGSTRVEQRQILMERFNGDKRIFCFILSTRSGGVGINLTGADTVIFYDSDWNPTMDAQAQDRCHRIGQTRDVHIYRLVSERTIEVNILKKANQKRMLSDMAIEGGNFTTTYFKSSTIKDLFTMEQSEQDESSQEKSENKDRIVATTTLSDTPSTVVETEKQSLRAFEHALAAAEDEQDVQATKTAKAEVAADLAEFDENIPIATEDPNAEGGPQVELSKADLEMQNLVKQLSPIERYAMRFVEETGAAWTAEQLRAAEAELEAQKREWEANRLAAMHKEEELLKQETEAEEMLTYSRKDSSNQVWISRNTMEQMPMWCPPTPPQDNDNDIYIDYSLSFMYELEPIAETDLPPVYVRKEHKRSRTDAGYDGSRRPNKMRREDNYVPPRSLFDRPTPQLARLRRELKSQRFRGSFKPNMPIPGLKPQLPTKPLTEPEAMAEWCVFEDMAILHVLGNLQGLPCSLMLLSPGQTPNWDLVSEMVNFCSKTYRSARQCPWRYETHIQPREEGKVVESPKKQKKLKPTLRTEYLKSPLRYLRTTQLYVSDNNASFYKTMRSRFDSIKTAYLKKAPPPKRQFSAPSLMNPKHMEVLQEFGILNYDQPVSPQNIAAMKANKIREKQRGQQMSQPPVGVGVVQQMQQQSQQQQQSQQQQQPAPPPLPQQQQPQQVVQQVQQQQQQQQQQQVVQQQLPTVSNVQQTLPVQQTVELVQQQPTTTTTVAVPAAGGQLQQLQIQHLTSSNVSPGQQTAILLHQPQQQLRTHPGQGGQSNTQQLVKTIVGTSSSLTAGQLQQLAQQSAVASGGQSSVSVVLTTPVQSLPSVVQPQIGSGAQIVSISSQTLPVNSSPQLGSIVQTQSLPQVVSVSTLPTVGTVLTTTANQPQQQHQTTAVTTLNTTMLRGQRIVSTAAGNTLQQRTTAGGQSIVSMPNLGQGASPSQFQTQLRLAAVPTSPATQTTQLVTTKGIPVSALQQGGKTTVIPVTQQSGGAHIQLYRQRSLKVLQTTTQAVPSGSAGATGATANLVQAGGTIIQASNMATHVTSQKVAVSGMPGTSTTVQAGNVVSSVQMHGQARTQFIKQMAAGKQQLQRQVVSADGTTTTTAAGDMLLVKRHNILAAQKAQQASGALFTTTTGQQQQQQQQQGQLPVAGQPQQVTQHQIASLVKASTAAAASGSSVNAGGVTVSATNPTVQAGSVNMTLPQLKPGSQIKVTMPNQMRHLQMQQQLTMPRKISRMTQLVSASGQPTATNIITTTGPQQQQQGVTVSGGGTLPTVASQQQQQQHQQKVGGGNSVQAQLLHIQNTKGLSNSVTMQQIQQVMRSGQQGTLATTNLVLGKTSVGRVIPVSVASQANQRQTIQVVSAASAQALAAGNLRTHVAGPSIASTLKVAAPGSAGGQTTQQTLIAALQHNQRQNASPVRLQTTAGGNLLAVVQQQQQQQHTSIAGPTAGPAEVMTITQTTTTLPTVGSLQQQQQQQQQQGGISQPTTQQVRKLVQKKILIRSEKE

SEQ ID NO: 8738 - protein, 2497 aa, Drosophila melanogaster
MNEGNSAGGGHEGLSPAPPAVPDRVTPHSTEISVAPANSTSTTVRAAGSVGAALPATRHHQHIATQVKGIASSSSKQQKQLASAQLPVPLSPLPQQQQQTAEATAAAAAPAHSNVSVSSSTIEASVLPPQAKRQRLDDNEDRTSAASIVGPAESSNIVSSLLPASVASSSEVGGLSSTALQDLNALKKRILQQKLQILRNLKERHLENVSEYFYLQNGGSMMDYPAWRKKTPTPQFISYSNANRIDQLIHEDKPSTSAAAAAAQNQKYTTQQTDSVESSLVSGIGTGATKGAPLDGNISNSTVKTNTQSQVPSKIGSFTESTPAATESNSSTTVPGTATSGAATSTSATSAEASGNVLAVEAEIKIPAVGATPVAISTKLPAAVVQLTQQGGTPLLPCNTSAGSTALRRPQGQNNASSGSAAASGGGGSLTPTPLYTGNGPAALGGSGGLTPGTPTSGSLLSPALGGGSGTPNSAAQEFSFKAKQEVYVMQRISELQREGLWTERRLPKLQEPSRPKAHWDYLLEEMVWLAADFAQERKWKKNAAKKCAKMVQKYFQDKATAAQRAEKAQELQLKRVASFIAREVKSFWSNVEKLVEYKHQTKIEEKRKQALDQHLSFIVDQTEKFSQQLVEGMNKSVADTPSLNSSRLTSPKRESDDDFRPESGSEDDEETIAKAEEDAADVKEEVTALAKESEMDFDDFLNDLPPGYLENRDKLMKEEQSSAIKTETPDDSDDSEFEAKEASDDDENTISKQEEAEQEIDHKKEIDELEADNDLSVEQLLAKYKSEQPPSPKRRKLAPRDPELDSDDDSTAVDSTEESEDAATEDEEDLSTVKTDTDMEEQDEQEDGLKSLMADADATSGAAGSGSTAGASGNKDDMLNDAAALAESLQPKGNTLSSTNVVTPVPFLLKHSLREYQHIGLDWLVTMNERKLNGILADEMGLGKTIQTIALLAHLACAKGNWGPHLIVVPSSVMLNWEMEFKKWCPGFKILTYYGSQKERKLKRVGWTKPNAFHVCITSYKLVVQDQQSFRRKKWKYLILDEAQNIKNFKSQRWQLLLNFSTERRLLLTGTPLQNDLMELWSLMHFLMPYVFSSHREFKEWFSNPMTGMIEGNMEYNETLITRLHKVIRPFLLRRLKKEVEKQMPKKYEHVITCRLSNRQRYLYEDFMSRAKTRETLQTGNLLSVINVLMQLRKVCNHPNMFEARPTISPFQMDGITFHTPRLVCDIMEYDPFTQINLETLNLLLLHLEQTMTAYVSHKSRLLAPPRKLIEDIDTAPLPAPRCPNGKYRFHIRVRSAELAQRIKLNAVKVGASPAMRLEGSKIMPMRNLLPSGRVLKRVSASINPVNMALKPVVINSVVTTTSSSTTASSPTGALSVLSNSKLLGARSQINAPTPAKVAKTMQDGKPFFYLTPATNSGAAGARLTLTSKTTASASTTTSRTTVTASTTSGQQLIRDPIVKDLATHVKSTVQKQSIANGKTEPEEETEAEDPYKVQELIQMRKEQRLAALKRMAMINRRRTDATPIYGEDCREAIQRCMQATRSLKRSTWQTRGYANCCTAMAHRNGWSLNHLLKSFEERCADLKPVFANFVIYVPSGCAPRIRRYVQNLLLTHWQHEPRIENIVDQALRAKLALLHPIISEMTTKFPDPRLIQYDCGKLQTMDRLLRQLKVNGHRVLIFTQMTKMLDVLEAFLNYHGHIYLRLDGSTRVEQRQILMERFNGDKRIFCFILSTRSGGVGINLTGADTVIFYDSDWNPTMDAQAQDRCHRIGQTRDVHIYRLVSERTIEVNILKKANQKRMLSDMAIEGGNFTTTYFKSSTIKDLFTMEQSEQDESSQEKSENKDRIVATTTLSDTPSTVVETEKQSLRAFEHALAAAEDEQDVQATKTAKAEVAADLAEFDENIPIATEDPNAEGGPQVELSKADLEMQNLVKQLSPIERYAMRFVEETGAAWTAEQLRAAEAELEAQKREWEANRLAAMHKEEELLKQETEAEEMLTYSRKDSSNQVNTKTDSNSNKRRLVRENRRNSAQKLSRSVSSHSTGSNNKNSKSATTRGNSQNSLNQTVPVGSGISRVNRTGAGVSSSSRGKSNSTKSTGKGTDAAPQVRRQTRLHSLGAVNMASARTPATRKTTRTALAASAAASTLEDASLIVEERPKRQSANIAMSKMMKTPFNQNVPSTISIKTTPPKRGRRDSVAAAATRSKLLERRATIAAPLKHMDDDSDQDEEDQEEQESEEDTEGEEANATVDDDEEGEEELASLDEETIQTGSQTNDEEDDDEEEVGEEEMVDIDTEDSEADVKSSSTYGTAADGKPEEAESLDGWDAHDQVQDTTMTSSTYYNVSEESDTDEHHDSKAEAKEPPQNSDKSDESEAVGHTPRTRSRGTVKINLWTLDVSPVANALNKSSANRSLKKAPRTESTPKESQSEPRRKITQPKLPKKEETNNKSNSNIGTLHRWISKSPRVMLRSTPGTATSASSSAAVSGVSGGNASSSGTAR

SEQ ID NO: 8739 - protein, 2497 aa, Drosophila melanogaster
MNEGNSAGGGHEGLSPAPPAVPDRVTPHSTEISVAPANSTSTTVRAAGSVGAALPATRHHQHIATQVKGIASSSSKQQKQLASAQLPVPLSPLPQQQQQTAEATAAAAAPAHSNVSVSSSTIEASVLPPQAKRQRLDDNEDRTSAASIVGPAESSNIVSSLLPASVASSSEVGGLSSTALQDLNALKKRILQQKLQILRNLKERHLENVSEYFYLQNGGSMMDYPAWRKKTPTPQFISYSNANRIDQLIHEDKPSTSAAAAAAQNQKYTTQQTDSVESSLVSGIGTGATKGAPLDGNISNSTVKTNTQSQVPSKIGSFTESTPAATESNSSTTVPGTATSGAATSTSATSAEASGNVLAVEAEIKIPAVGATPVAISTKLPAAVVQLTQQGGTPLLPCNTSAGSTALRRPQGQNNASSGSAAASGGGGSLTPTPLYTGNGPAALGGSGGLTPGTPTSGSLLSPALGGGSGTPNSAAQEFSFKAKQEVYVMQRISELQREGLWTERRLPKLQEPSRPKAHWDYLLEEMVWLAADFAQERKWKKNAAKKCAKMVQKYFQDKATAAQRAEKAQELQLKRVASFIAREVKSFWSNVEKLVEYKHQTKIEEKRKQALDQHLSFIVDQTEKFSQQLVEGMNKSVADTPSLNSSRLTSPKRESDDDFRPESGSEDDEETIAKAEEDAADVKEEVTALAKESEMDFDDFLNDLPPGYLENRDKLMKEEQSSAIKTETPDDSDDSEFEAKEASDDDENTISKQEEAEQEIDHKKEIDELEADNDLSVEQLLAKYKSEQPPSPKRRKLAPRDPELDSDDDSTAVDSTEESEDAATEDEEDLSTVKTDTDMEEQDEQEDGLKSLMADADATSGAAGSGSTAGASGNKDDMLNDAAALAESLQPKGNTLSSTNVVTPVPFLLKHSLREYQHIGLDWLVTMNERKLNGILADEMGLGKTIQTIALLAHLACAKGNWGPHLIVVPSSVMLNWEMEFKKWCPGFKILTYYGSQKERKLKRVGWTKPNAFHVCITSYKLVVQDQQSFRRKKWKYLILDEAQNIKNFKSQRWQLLLNFSTERRLLLTGTPLQNDLMELWSLMHFLMPYVFSSHREFKEWFSNPMTGMIEGNMEYNETLITRLHKVIRPFLLRRLKKEVEKQMPKKYEHVITCRLSNRQRYLYEDFMSRAKTRETLQTGNLLSVINVLMQLRKVCNHPNMFEARPTISPFQMDGITFHTPRLVCDIMEYDPFTQINLETLNLLLLHLEQTMTAYVSHKSRLLAPPRKLIEDIDTAPLPAPRCPNGKYRFHIRVRSAELAQRIKLNAVKVGASPAMRLEGSKIMPMRNLLPSGRVLKRVSASINPVNMALKPVVINSVVTTTSSSTTASSPTGALSVLSNSKLLGARSQINAPTPAKVAKTMQDGKPFFYLTPATNSGAAGARLTLTSKTTASASTTTSRTTVTASTTSGQQLIRDPIVKDLATHVKSTVQKQSIANGKTEPEEETEAEDPYKVQELIQMRKEQRLAALKRMAMINRRRTDATPIYGEDCREAIQRCMQATRSLKRSTWQTRGYANCCTAMAHRNGWSLNHLLKSFEERCADLKPVFANFVIYVPSVCAPRIRRYVQNLSSTHWQHEQRIENIVDQALRPKLALLHPIISEMTTKFPDPRLIQYDCGKLQTMDRLLRQLKVNGHRVLIFTQMTKMLDVLEAFLNYHGHIYLRLDGSTRVEQRQILMERFNGDKRIFCFILSTRSGGVGINLTGADTVIFYDSDWNPTMDAQAQDRCHRIGQTRDVHIYRLVSERTIEVNILKKANQKRMLSDMAIEGGNFTTTYFKSSTIKDLFTMEQSEQDESSQEKSENKDRIVATTTLSDTPSTVVETEKQSLRAFEHALAAAEDEQDVQATKTAKAEVAADLAEFDENIPIATEDPNAEGGPQVELSKADLEMQNLVKQLSPIERYAMRFVEETGAAWTAEQLRAAEAELEAQKREWEANRLAAMHKEEELLKQETEAEEMLTYSRKDSSNQVNTKTDSNSNKRRLVRENRRNSAQKLSRSVSSHSTGSNNKNSKSATTRGNSQNSLNQTVPVGSGISRVNRTGAGVSSSSRGKSNSTKSTGKGTDAAPQVRRQTRLHSLGAVNMASARTPPTRKTTRTALAASAAASTLEDASLIVEERPKRQSANIAMSKMMKTPFKQNVPSNISIKTTPPKRGRRDSVAAAATRSKLLERRATIAAPLKHMDDESDQDEEEQEEQESEEDTEGEEANATVDDDEEGEEELASLDEETIQTGSQTNDEEDDDEEEVGEEGMVDIDTEDSEADVKSSSTYGTAADGKPEEAESLDGWDAHDQVQDTTMTSSTYYNVSEESDTDEHHDSKAEAKEPPQNSDKSDESEAVGHTPRTRSRGTVKINLWTLDVSPVANALNKSSANRSLKKAPRTESTPKESQSEPRRKITQPKLPKKEETNNKSNSNIGTLHRWISKSPRVMLRSTPVTAASASSSAAVSGVSGGNASSSGTAR

SEQ ID NO: 8740 - protein, 3198 aa, Drosophila melanogaster
MNEGNSAGGGHEGLSPAPPAVPDRVTPHSTEISVAPANSTSTTVRAAGSVGAALPATRHHQHIATQVKGIASSSSKQQKQLASAQLPVPLSPLPQQQQQTAEATAAAAAPAHSNVSVSSSTIEASVLPPQAKRQRLDDNEDRTSAASIVGPAESSNIVSSLLPASVASSSEVGGLSSTALQDLNALKKRILQQKLQILRNLKERHLENVSEYFYLQNGGSMMDYPAWRKKTPTPQFISYSNANRIDQLIHEDKPSTSAAAAAAQNQKYTTQQTDSVESSLVSGIGTGATKGAPLDGNISNSTVKTNTQSQVPSKIGSFTESTPAATESNSSTTVPGTATSGAATSTSATSAEASGNVLAVEAEIKIPAVGATPVAISTKLPAAVVQLTQQGGTPLLPCNTSAGSTALRRPQGQNNASSGSAAASGGGGSLTPTPLYTGNGPAALGGSGGLTPGTPTSGSLLSPALGGGSGTPNSAAQEFSFKAKQEVYVMQRISELQREGLWTERRLPKLQEPSRPKAHWDYLLEEMVWLAADFAQERKWKKNAAKKCAKMVQKYFQDKATAAQRAEKAQELQLKRVASFIAREVKSFWSNVEKLVEYKHQTKIEEKRKQALDQHLSFIVDQTEKFSQQLVEGMNKSVADTPSLNSSRLTSPKRESDDDFRPESGSEDDEETIAKAEEDAADVKEEVTALAKESEMDFDDFLNDLPPGYLENRDKLMKEEQSSAIKTETPDDSDDSEFEAKEASDDDENTISKQEEAEQEIDHKKEIDELEADNDLSVEQLLAKYKSEQPPSPKRRKLAPRDPELDSDDDSTAVDSTEESEDAATEDEEDLSTVKTDTDMEEQDEQEDGLKSLMADADATSGAAGSGSTAGASGNKDDMLNDAAALAESLQPKGNTLSSTNVVTPVPFLLKHSLREYQHIGLDWLVTMNERKLNGILADEMGLGKTIQTIALLAHLACAKGNWGPHLIVVPSSVMLNWEMEFKKWCPGFKILTYYGSQKERKLKRVGWTKPNAFHVCITSYKLVVQDQQSFRRKKWKYLILDEAQNIKNFKSQRWQLLLNFSTERRLLLTGTPLQNDLMELWSLMHFLMPYVFSSHREFKEWFSNPMTGMIEGNMEYNETLITRLHKVIRPFLLRRLKKEVEKQMPKKYEHVITCRLSNRQRYLYEDFMSRAKTRETLQTGNLLSVINVLMQLRKVCNHPNMFEARPTISPFQMDGITFHTPRLVCDIMEYDPFTQINLETLNLLLLHLEQTMTAYVSHKSRLLAPPRKLIEDIDTAPLPAPRCPNGKYRFHIRVRSAELAQRIKLNAVKVGASPAMRLEGSKIMPMRNLLPSGRVLKRVSASINPVNMALKPVVINSVVTTTSSSTTASSPTGALSVLSNSKLLGARSQINAPTPAKVAKTMQDGKPFFYLTPATNSGAAGARLTLTSKTTASASTTTSRTTVTASTTSGQQLIRDPIVKDLATHVKSTVQKQSIANGKTEPEEETEAEDPYKVQELIQMRKEQRLAALKRMAMINRRRTDATPIYGEDCREAIQRCMQATRSLKRSTWQTRGYANCCTAMAHRNGWSLNHLLKSFEERCADLKPVFANFVIYVPSVCAPRIRRYVQNLSSTHWQHEQRIENIVDQALRPKLALLHPIISEMTTKFPDPRLIQYDCGKLQTMDRLLRQLKVNGHRVLIFTQMTKMLDVLEAFLNYHGHIYLRLDGSTRVEQRQILMERFNGDKRIFCFILSTRSGGVGINLTGADTVIFYDSDWNPTMDAQAQDRCHRIGQTRDVHIYRLVSERTIEVNILKKANQKRMLSDMAIEGGNFTTTYFKSSTIKDLFTMEQSEQDESSQEKSENKDRIVATTTLSDTPSTVVETEKQSLRAFEHALAAAEDEQDVQATKTAKAEVAADLAEFDENIPIATEDPNAEGGPQVELSKADLEMQNLVKQLSPIERYAMRFVEETGAAWTAEQLRAAEAELEAQKREWEANRLAAMHKEEELLKQETEAEEMLTYSRKDSSNQVWISRNTMEQMPMWCPPTPPQDNDNDIYIDYSLSFMYELEPIAETDLPPVYVRKEHKRSRTDAGYDGSRRPNKMRREDNYVPPRSLFDRPTPQLARLRRELKSQRFRGSFKPNMPIPGLKPQLPTKPLTEPEAMAEWCVFEDMAILHVLVNLQGLPCSLMLLSPGQTPNWDLVSEMVNFCSKTYRSARQCRWRYETHIQPREEGKVVESPKKQKKLKPTLRTEYLKSPLRYLRTTQLYVSDNNASFYKTMRSRFDSIKTAYLKKAPPPKRQFSAPSLMNPKHMEVLQEFGILNYDQPVSPQNIAAMKANKIREKQRGQQMSQPPVGVGVVQQMQQQSQQQQQPAPPPLPQQQQPQQVVQQVQQQQQQQQQQQQQQVVQQQLPTVSNVQQTLPVQQTVELVQQQPTTTTTVAVPAAGGQLQQLQIQHLTSSNVSPGQQTAILLHQPQQQLRTHPGQGGQSNTQQLVKTIVGTSSSLTAGQLQQLAQQSAVASGGQSSVSVVLTTPVQTLPSVVQPQIGSGAQIVSISSQTLPVNSSPQLGSIVQTQSLPQVVSVSTLPTVGTVLTTTANQPQQQHQTTAVTTLNTTMLRGQRIVSTAAGNTLQQRTTAGGQSIVSMPNLGQGASPSQFQTQLRLAAVPTSPATQTTQLVTTKGIPVSALQQGGKTTVIPVTQQSGGAHIQLYRQRSLKVLQTTTQAVPSGSAGATGATANLVQAGGTIIQASNMATHVTSQKVAVSGMPGTSTTVQAGNVVSSVQMHGQARTQFIKQMAAGKQQLQRQVVSADGTTTTTAAGDMLLVKRHNILAAQKAQQASGALFTTTTGQQQQQQQQQGQLPVAGQPQQVTQHQIASLVKASTAAAASGSSVNAGGVTVSATNPTVQAGSVNMTLPQLKPGSQIKVTMPNQMRHLQMQQQLTMPRKISRMTQLVSASGQPTATNIITTTGPQQQQQGVTVSGGGTLPTVASQQQQQQHQQKVGGGNSVQAQLLHIQNTKGLSNSVTMQQIQQVMRSGQQGTLATTNLVLGKTSVGRVIPVSVASQANQRQTIQVVSAASAQALAAGNLRTHVAGPSIASTLKVAAPGSAGGQTTQQTLIAALQHNQRQNASPVRLQTTAGGNLLAVVQQQQQQQHTSIAGPTAGPAEVMTITQTTTTLPTVGSLQQQQQQQQQQGGISQPTTQQVRKLVQKKILIRSEKE

SEQ ID NO: 8741 - protein, 3183 aa, Drosophila melanogaster
MNEGNSAGGGHEGLSPAPPAVPDRVTPHSTEISVAPANSTSTTVRAAGSVGAALPATRHHQHIATQVKGIASSSSKQQKQLASAQLPVPLSPLPQQQQQTAEATAAAAAPAHSNVSVSSSTIEASVLPPQAKRQRLDDNEDRTSAASIVGPAESSNIVSSLLPASVASSSEVGGLSSTALQDLNALKKRILQQKLQILRNLKERHLENVSEYFYLQNGGSMMDYPAWRKKTPTPQFISYSNANRIDQLIHEDKPSTSAAAAAAQNQKYTTQQTDSVESSLVSGIGTGATKGAPLDGNISNSTVKTNTQSQVPSKIGSFTESTPAATESNSSTTVPGTATSGAATSTSATSAEASGNVLAVEAEIKIPAVGATPVAISTKLPAAVVQLTQQGGTPLLPCNTSAGSTALRRPQGQNNASSGSAAASGGGGSLTPTPLYTGNGPAALGGSGGLTPGTPTSGSLLSPALGGGSGTPNSAAQEFSFKAKQEVYVMQRISELQREGLWTERRLPKLQEPSRPKAHWDYLLEEMVWLAADFAQERKWKKNAAKKCAKMVQKYFQDKATAAQRAEKAQELQLKRVASFIAREVKSFWSNVEKLVEYKHQTKIEEKRKQALDQHLSFIVDQTEKFSQQLVEGMNKSVADTPSLNSSRLTSPKRESDDDFRPESGSEDDEETIAKAEEDAADVKEEVTALAKESEMDFDDFLNDLPPGYLENRDKLMKEEQSSAIKTETPDDSDDSEFEAKEASDDDENTISKQEEAEQEIDHKKEIDELEADNDLSVEQLLAKYKSEQPPSPKRRKLAPRDPELDSDDDSTAVDSTEESEDAATEDEEDLSTVKTDTDMEEQDEQEDGLKSLMADADATSGAAGSGSTAGASGNKDDMLNDAAALAESLQPKGNTLSSTNVVTPVPFLLKHSLREYQHIGLDWLVTMNERKLNGILADEMGLGKTIQTIALLAHLACAKGNWGPHLIVVPSSVMLNWEMEFKKWCPGFKILTYYGSQKERKLKRVGWTKPNAFHVCITSYKLVVQDQQSFRRKKWKYLILDEAQNIKNFKSQRWQLLLNFSTERRLLLTGTPLQNDLMELWSLMHFLMPYVFSSHREFKEWFSNPMTGMIEGNMEYNETLITRLHKVIRPFLLRRLKKEVEKQMPKKYEHVITCRLSNRQRYLYEDFMSRAKTRETLQTGNLLSVINVLMQLRKVCNHPNMFEARPTISPFQMDGITFHTPRLVCDIMEYDPFTQINLETLNLLLLHLEQTMTAYVSHKSRLLAPPRKLIEDIDTAPLPAPRCPNGKYRFHIRVRSAELAQRIKLNAVKVGASPAMRLEGSKIMPMRNLLPSGRVLKRVSASINPVNMALKPVVINSVVTTTSSSTTASSPTGALSVLSNSKLLGARSQINAPTPAKVAKTMQDGKPFFYLTPATNSGAAGARLTLTSKTTASASTTTSRTTVTASTTSGQQLIRDPIVKDLATHVKSTVQKQSIANGKTEPEEETEAEDPYKVQELIQMRKEQRLAALKRMAMINRRRTDATPIYGEDCREAIQRCMQATRSLKRSTWQTRGYANCCTAMAHRNGWSLNHLLKSFEERCADLKPVFANFVIYVPSVCAPRIRRYVQNLSSTHWQHEQRIENIVDQALRPKLALLHPIISEMTTKFPDPRLIQYDCGKLQTMDRLLRQLKVNGHRVLIFTQMTKMLDVLEAFLNYHGHIYLRLDGSTRVEQRQILMERFNGDKRIFCFILSTRSGGVGINLTGADTVIFYDSDWNPTMDAQAQDRCHRIGQTRDVHIYRLVSERTIEVNILKKANQKRMLSDMAIEGGNFTTTYFKSSTIKDLFTMEQSEQDESSQEKSENKDRIVATTTLSDTPSTVVETEKQSLRAFEHALAAAEDEQDVQATKTAKAEVAADLAEFDENIPIATEDPNAEGGPQVELSKADLEMQNLVKQLSPIERYAMRFVEETGAAWTAEQLRAAEAELEAQKREWEANRLAAMHKEEELLKQETEAEEMLTYSRKDSSNQVWISRNTMEQMPMWCPPTPPQDNDNDIYIDYSLSFMYELEPIAETDLPPVYVRKEHKRSRTDAGYDGSRRPNKMRREDNYVPPRSLFDRPTPQLARLRRELKSQRFRGSFKPNMPIPGLKPQLPTKPLTEPEAMAEWCVFEDMAILHVLVNLQGLPCSLMLLSPGQTPNWDLVSEMVNFCSKTYRSARQCRWRYETHIQPREEGKVVESPKKQKKLKPTLRTEYLKSPLRYLRTTQLYVSDNNASFYKTMRSRFDSIKTAYLKKAPPPKRQFSAPSLMNPKHMEVLQEFGILNYDQPVSPQNIAAMKANKIREKQRGQQMSQPPVGVGVVQQMQQQSQQQQQPAPPPLPQQQQPQQVVQQVQQQQQQQQQQQQQQVVQQQLPTVSNVQQTLPVQQTVELVQQQPTTTTTVAVPAAGGQLQQLQIQHLTSSNVSPGQQTAILLHQPQQQLRTHPGQGGQSNTQQLVKTIVGTSSSLTAGQLQQLAQQSAVASGGQSSVSVVLTTPVQTLPSVVQPQIGSGAQIVSISSQTLPVNSSPQLGSIVQTQSLPQVVSVSTLPTVGTVLTTTANQPQQQHQTTAVTTLNTTMLRGQRIVSTAAGNTLQQRTTAGGQSIVSMPNLGQGASPSQFQTQLRLAAVPTSPATQTTQLVTTKGIPVSALQQGGKTTVIPVTQQSGGAHIQLYRQRSLKVLQTTTQAVPSGSAGATGATANLVQAGGTIIQASNMATHVTSQKVAVSGMPGTSTTVQAGNVVSSVQMHGQARTQFIKQMAAGKQQLQRQVVSADGTTTTTAAGDMLLVKRHNILAAQKAQQASGALFTTTTGQQQQQQQQQGQLPVAGQPQQVTQHQIASLVKASTAAAASGSSVNAGGVTVSATNPTVQAGSVNMTLPQLKPGSQIKVTMPNQMRHLQMQQQLTMPRKISRMTQLVSASGQPTATNIITTTGPQQQQQGVTVSGGGTLPTVASQQQQQQHQQKVGGGNSVQAQLLHIQNTKGLSNSVTMQQIQQVMRSGQQGTLATTNLVLGKTSVGRVIPVSVASQANQRQTIQVVSAASAQALAAGNLRTHVAGPSIASTLKVAAPGSAGGQTTQQTLIAALQHNQRQNASPVRLQTTAGGNLLAVVQQQQQQQHTSIAGPTAGPAEVMTITQTTTTLPTVGSLQQQQQQQQQQGGISQPTTQQP

SEQ ID NO: 8742 - protein, 1207 aa, Drosophila melanogaster
MEEQDEQEDGLKSLMADADATSGAAGSGSTAGASGNKDDMLNDAAALAESLQPKGNTLSSTNVVTPVPFLLKHSLREYQHIGLDWLVTMNERKLNGILADEMGLGKTIQTIALLAHLACAKGNWGPHLIVVPSSVMLNWEMEFKKWCPGFKILTYYGSQKERKLKRVGWTKPNAFHVCITSYKLVVQDQQSFRRKKWKYLILDEAQNIKNFKSQRWQLLLNFSTERRLLLTGTPLQNDLMELWSLMHFLMPYVFSSHREFKEWFSNPMTGMIEGNMEYNETLITRLHKVIRPFLLRRLKKEVEKQMPKKYEHVITCRLSNRQRYLYEDFMSRAKTRETLQTGNLLSVINVLMQLRKVCNHPNMFEARPTISPFQMDGITFHTPRLVCDIMEYDPFTQINLETLNLLLLHLEQTMTAYVSHKSRLLAPPRKLIEDIDTAPLPAPRCPNGKYRFHIRVRSAELAQRIKLNAVKVGASPAMRLEGSKIMPMRNLLPSGRVLKRVSASINPVNMALKPVVINSVVTTTSSSTTASSPTGALSVLSNSKLLGARSQINAPTPAKVAKTMQDGKPFFYLTPATNSGAAGARLTLTSKTTASASTTTSRTTVTASTTSGQQLIRDPIVKDLATHVKSTVQKQSIANGKTEPEEETEAEDPYKVQELIQMRKEQRLAALKRMAMINRRRTDATPIYGEDCREAIQRCMQATRSLKRSTWQTRGYANCCTAMAHRNGWSLNHLLKSFEERCADLKPVFANFVIYVPSVCAPRIRRYVQNLSSTHWQHEQRIENIVDQALRPKLALLHPIISEMTTKFPDPRLIQYDCGKLQTMDRLLRQLKVNGHRVLIFTQMTKMLDVLEAFLNYHGHIYLRLDGSTRVEQRQILMERFNGDKRIFCFILSTRSGGVGINLTGADTVIFYDSDWNPTMDAQAQDRCHRIGQTRDVHIYRLVSERTIEVNILKKANQKRMLSDMAIEGGNFTTTYFKSSTIKDLFTMEQSEQDESSQEKSENKDRIVATTTLSDTPSTVVETEKQSLRAFEHALAAAEDEQDVQATKTAKAEVAADLAEFDENIPIATEDPNAEGGPQVELSKADLEMQNLVKQLSPIERYAMRFVEETGAAWTAEQLRAAEAELEAQKREWEANRLAAMHKEEELLKQETEAEEMLTYSRKDSSNQVWISRNTMEQMPMWCPPTPPQDNDNDIYIDYSLSFMYEL

SEQ ID NO: 8743 - protein, 1638 aa, Drosophila melanogaster
MEAKPVPAPQPRPRAMAEPLHIQRLEAALNMRPFMNMAKRSLRKPLSSDEETDDEHVVKREHDVQDSDDSSTVGVVRMKQSSKRKSRLLASKEERQSVKAQLYNFNDLTSDREWLYDLLLSDTESDDPTITEDEYVQQLLREHVREQRQRKNYYKKAANAQYAYYGSGLLSNHDIFAERQLATAGVRKRRRRTKQEILMARLAEAQAGPKPPKQRRRGRKKRDNMGSPESGEVPPSELGKYTFGDTLPNNEDDDEDGGEVDYKRELASLALDYPEEEEIEEEVDVEGGTEGQVTKVRRKRKNPAALAARRRRIWQIMSKKESGRLQRIKSNNHKEMLANCKRVAGMCAKVVRQRAINSQRIMKETVWRAKRLTREMLAYWKRYERVERDQRRKQEREAEEQRKQDVELIEVKRQQRKLNFLITQTELYAHFMSKKLGQGSEEDQLRILSQLDEETNARLAAQDDYDAGEMKLLAQENAEAAMQRDLDKTRAFDVFAKKKEKEEEEQAQESVEDIKPEPRPEMKDLPQPKMFKGTLKGYQIKGMTWLANIYDQGISGILADEMGLGKTVQSIAFLCHIAEHYGVWGPFLVISPASTLHNWQQEMSRFVPDFKVVPYWGSPAERKILRQFWDQKHLHTRDASFHVVITSYQLVVSDYKYFNRIKWQYMVLDEAQAIKSAASQRWKLLLGFSCRNRLLLSGTPIQNSMAELWALLHFIMPTLFDSHDEFNEWFSKDIESHAENKTGIDEKQISRLHMILKPFMLRRIKKDVENELSDKIEIMVYCPLTIRQKLLYRALKQKIRIEDLLHLTSGSTTTSSSSSASNLMNLVMQFRKVCNHPELFERRDARSPFFMRCAEYTIPRLIHEEGLIHRMLPSRKHLLYNRFNIFKSEYIQRSLFEDVNVNSCFGFTRLCDLSVGDMVEVTLNGLIDFLLHYRRVLEKYPLLAYRRFWWKKQPDSRYQLLEPMLENKLALDYMPPNSVLKNFIFTAMTANESSVYAFGDYFTYNMQETIEHRVIRSKILKKKTSLIEEMEDVSKQKLEIESVEVQTKSNAKSDVKVTTLLLLPEFPHRPRKPRKYVCEPLSMPRILYDLGQKVQAVHRYLYCDSRSAAWSQIRHNQCENSQGRELVSSGLALCKPHGGWSSIVVPDKETLITDAGKLFVLDNLLTRLKANGHRVLIYSQMTKMIDLLEEYMWHRKHRYMRLDGSSKISARRDMVADFQTRADIFVFLLSTRAGGLGINLTAADTVIFYDSDWNPTVDQQAMDRAHRLGQTKQVTVYRLICKGTIEERILQRAREKSEIQRMVISGGNFKPDTLKPKEVVSLLLDDEEIEMKYRQEAKLQSSSPIPAATQSERKRRHPQKDVNMGGTTIAATSATQNPDDDVPSCSSAAKRIKLETEEDFIDVGITSSASSVGTDSNHPTLSQETYVPGATCVQQTEIDSENEALVVDGDSPTMLGQNESMNFLDDLSGISPMRRRHHPRGTRRGRPRGSTRRGGGHGSIPRVLTPTQAATPAVPATASQAAAAGTGAAAGTSSPLPQQEVSGGGDNAGVPLHEEEYRTSPSGQSPGVSCKRGPGRPRSKTATPISRGTRGAPRARRPMGPLLVPLGRSPDDTPPSSSPATSRAPSPLSGSHGAVGPE

SEQ ID NO: 8744 - protein, 1638 aa, Drosophila melanogaster
MEAKPVPAPQPRPRAMAEPLHIQRLEAALNMRPFMNMAKRSLRKPLSSDEETDDEHVVKREHDVQDSDDSSTVGVVRMKQSSKRKSRLLASKEERQSVKAQLYNFNDLTSDREWLYDLLLSDTESDDPTITEDEYVQQLLREHVREQRQRKNYYKKAANAQYAYYGSGLLSNHDIFAERQLATAGVRKRRRRTKQEILMARLAEAQAGPKPPKQRRRGRKKRDNMGSPESGEVPPSELGKYTFGDTLPNNEDDDEDGGEVDYKRELASLALDYPEEEEIEEEVDVEGGTEGQVTKVRRKRKNPAALAARRRRIWQIMSKKESGRLQRIKSNNHKEMLANCKRVAGMCAKVVRQRAINSQRIMKETVWRAKRLTREMLAYWKRYERVERDQRRKQEREAEEQRKQDVELIEVKRQQRKLNFLITQTELYAHFMSKKLGQGSEEDQLRILSQLDEETNARLAAQDDYDAGEMKLLAQENAEAAMQRDLDKTRAFDVFAKKKEKEEEEQAQESVEDIKPEPRPEMKDLPQPKMFKGTLKGYQIKGMTWLANIYDQGISGILADEMGLGKTVQSIAFLCHIAEHYGVWGPFLVISPASTLHNWQQEMSRFVPDFKVVPYWGSPAERKILRQFWDQKHLHTRDASFHVVITSYQLVVSDYKYFNRIKWQYMVLDEAQAIKSAASQRWKLLLGFSCRNRLLLSGTPIQNSMAELWALLHFIMPTLFDSHDEFNEWFSKDIESHAENKTGIDEKQISRLHMILKPFMLRRIKKDVENELSDKIEIMVYCPLTIRQKLLYRALKQKIRIEDLLHLTSGSTTTSSSSSASNLMNLVMQFRKVCNHPELFERRDARSPFFMRCAEYTIPRLIHEEGLIHRMLPSRKHLLYNRFNIFKSEYIQRSLFEDVNVNSCFGFTRLCDLSVGDMVEVTLNGLIDFLLHYRRVLEKYPLLAYRRFWWKKQPDSRYQLLEPMLENKLALDYMPPNSVLKNFIFTAMTANESSVYAFGDYFTYNMQETIEHRVIRSKILKKKTSLIEEMEDVSKQKLEIESVEVQTKSNAKSDVKVTTLLLLPEFPHRPRKPRKYVCEPLSMPRILYDLGQKVQAVHRYLYCDSRSAAWSQIRHNQCENSQGRELVSSGLALCKPHGGWSSIVVPDKETLITDAGKLFVLDNLLTRLKANGHRVLIYSQMTKMIDLLEEYMWHRKHRYMRLDGSSKISARRDMVADFQTRADIFVFLLSTRAGGLGINLTAADTVIFYDSDWNPTVDQQAMDRAHRLGQTKQVTVYRLICKGTIEERILQRAREKSEIQRMVISGGNFKPDTLKPKEVVSLLLDDEEIEMKYRQEAKLQSSSPIPAATQSERKRRHPQKDVNMGGTTIAATSATQNPDDDVPSCSSAAKRIKLETEEDFIDVGITSSASSVGTDSNHPTLSQETYVPGATCVQQTEIDSENEALVVDGDSPTMLGQNESMNFLDDLSGISPMRRRHHPRGTRRGRPRGSTRRGGGHGSIPRVLTPTQAATPAVPATASQAAAAGTGAAAGTSSPLPQQEVSGGGDNAGVPLHEEEYRTSPSGQSPGVSCKRGPGRPRSKTATPISRGTRGAPRARRPMGPLLVPLGRSPDDTPPSSSPATSRAPSPSAGSHGAVGPE

SEQ ID NO: 8745 - protein, 844 aa, Drosophila melanogaster
MSDSTVAASASASASSSAKSSLSDLRQFRINKNASSVVASPSRTERVPGKKRIQVMADSDSDGNDSQTPKKTKLELTVKEKEERYMAAAKISPHFDTMAIQESLSRTNWDVAASVRYLRENCKPKGHNGPLAKSKLKPRSNGISGGNFSDNDHSDDDDVKQSKDQVYDSDDSDSEMSTKMTGQRKKVFQFMNEASLIELQSVKTLSEKKALAIIDVRPFSDWSDLRQKLESIRMSGDLLNYAQELINKQNTVAAILSKCNNMVSRLEKAISNGAGIVEQPKLLSSGLQLADYQIIGLNWLTVMHKQEMNGILADEMGLGKTIQVIAFLAYLKENGLSQAAHLIVVPSSTLDNWEAEISRWCPELVVEKYHGSQDERRRMRGRFAKDGFTGFDVLLTTYHIVGSTPEERKMFRVCKLDYVIFDEAHMLKNMTTQRYANLITINARMRILLTGTPLQNNLLELISLLCFVMPKFFAKSIEDIKSLFAKKGKSDGDQDEVSQFQETQIQRAKRIMKPFVLRRLKKDVLKNLPKKLSLVEKVPMSSQQKIYYHELVDYYSNNKGEVCSSSERAGIAIMMEMRRIANHPLLMRHYFTDANLRGFSKRLANASSFKKTNEQYIFEELAVMSDFQVYQMMNKHEFYDVKIPDNLICDSGKFLYLDTLLPKLKAEGHRVLLFSQFTMMLDIVEEYLRIRKFGFCRLDGATAVNVRQDLITDFNGDDSIFVFLLSTKAGGVGINLTAADTCVIHDIDFNPYNDKQAEDRCHRMGQQRPVTIYRLISESTIEEGILMAAEEKLKLEKDITSNEKGEVHEQRCVVKLLTTALGLDKDQEEQLNNSLNNSIASPAK

SEQ ID NO: 8746 - protein, 627 aa, Drosophila melanogaster
MSSKRGADPDWKTPGKASKDKRPKTNAKKQKFRDEEYCKVCSDGGDLLCCDSCPSVYHRTCLSPPLKSIPKGDWICPRCIPLPGKAEKILSWRWALDRSVELRTSKGEKRREYFIKWHGMSYWHCEWIPEGQMLLHHASMVASFQRRSDMEEPSLEELDDQDGNLHERFYRYGIKPEWLLVQRVINHSEEPNGGTMYLVKWRELSYNDSSWERESDSIPGLNQAIALYKKLRSSNKGRQRDRPAPTIDLNKKYEDQPVFLKEAGLKLHPFQIEGVSWLRYSWGQGIPTILADEMGLGKTIQTVVFLYSLFKEGHCRGPFLISVPLSTLTNWERELELWAPELYCVTYVGGKTARAVIRKHEISFEEVTTKTMRENQTQYKFNVMLTSYEFISVDAAFLGCIDWAALVVDEAHRLRSNQSKFFRILSKYRIGYKLLLTGTPLQNNLEELFHLLNFLSSGKFNDLQTFQAEFTDVSKEEQVKRLHEILEPHMLRRLKADVLKSMPPKSEFIVRVELSSMQKKFYKHILTKNFKALNQKGGGRVCSLLNIMMDLRKCCNHPYLFPSAAEEATISPSGLYEMSSLTKASGKLDLLSKMLKQLKADNHRVLLFSQMTKMLNVLEHFLEGEGY

SEQ ID NO: 8747 - protein, 664 aa, Drosophila melanogaster
MSDSTVAASASASASSSAKSSLSDLRQFRINKNASSVVASPSRTERVPGKKRIQVMADSDSDGNDSQTPKKTKLELTVKEKEERYMAAAKISPHFDTMAIQESLSRTNWDVAASVRYLRENCKPKGHNGPLAKSKLKPRSNGISGGNFSDNDHSDDDDVKQSKDQVYDSDDSDSEMSTKMTGQRKKVFQFMNEASLIELQSVKTLSEKKALAIIDVRPFSDWSDLRQKLESIRMSGDLLNYAQELINKQNTVAAILSKCNNMVSRLEKAISNGAGIVEQPKLLSSGLQLADYQIIGLNWLTVMHKQEMNGILADEMGLGKTIQVIAFLAYLKENGLSQAAHLIVVPSSTLDNWEAEISRWCPELVVEKYHGSQDERRRMRGRFAKDGFTGFDVLLTTYHIVGSTPEERKMFRVCKLDYVIFDEAHMLKNMTTQRYANLITINARMRILLTGTPLQNNLLELISLLCFVMPKFFAKSIEDIKSLFAKKGKSDGDQDEVSQFQETQIQRAKRIMKPFVLRRLKKDVLKNLPKKLSLVEKVPMSSQQKIYYHELVDYYSNNKGEVCSSSERAGIAIMMEMRRIANHPLLMRHYFTDANLRGFSKRLANASSFKKTNEQYIFEELAVMSDFQVYQMMNKHVSDYQRGCPMTMTKFVHLSGVLRRENTR

SEQ ID NO: 8748 - protein, 1095 aa, Drosophila melanogaster
MQDGKPFFYLTPATNSGAAGARLTLTSKTTASASTTTSRTTVTASTTSGQQLIRDPIVKDLATHVKSTVQKQSIANGKTEPEEETEAEDPYKVQELIQMRKEQRLAALKRMAMINRRRTDATPIYGEDCREAIQRCMQATRSLKRSTWQTRGYANCCTAMAHRNGWSLNHLLKSFEERCADLKPVFANFVIYVPSVCAPRIRRYVQNLSSTHWQHEQRIENIVDQALRPKLALLHPIISEMTTKFPDPRLIQYDCGKLQTMDRLLRQLKVNGHRVLIFTQMTKMLDVLEAFLNYHGHIYLRLDGSTRVEQRQILMERFNGDKRIFCFILSTRSGGVGINLTGADTVIFYDSDWNPTMDAQAQDRCHRIGQTRDVHIYRLVSERTIEVNILKKANQKRMLSDMAIEGGNFTTTYFKSSTIKDLFTMEQSEQDESSQEKSENKDRIVATTTLSDTPSTVVETEKQSLRAFEHALAAAEDEQDVQATKTAKAEVAADLAEFDENIPIATEDPNAEGGPQVELSKADLEMQNLVKQLSPIERYAMRFVEETGAAWTAEQLRAAEAELEAQKREWEANRLAAMHKEEELLKQETEAEEMLTYSRKDSSNQVNTKTDSNSNKRRLVRENRRNSAQKLSRSVSSHSTGSNNKNSKSATTRGNSQNSLNQTVPVGSGISRVNRTGAGVSSSSRGKSNSTKSTGKGTDAAPQVRRQTRLHSLGAVNMASARTPPTRKTTRTALAASAAASTLEDASLIVEERPKRQSANIAMSKMMKTPFKQNVPSNISIKTTPPKRGRRDSVAAAATRSKLLERRATIAAPLKHMDDESDQDEEEQEEQESEEDTEGEEANATVDDDEEGEEELASLDEETIQTGSQTNDEEDDDEEEVGEEGMVDIDTEDSEADVKSSSTYGTAADGKPEEAESLDGWDAHDQVQDTTMTSSTYYNVSEESDTDEHHDSKAEAKEPPQNSDKSDESEAVGHTPRTRSRGTVKINLWTLDVSPVANALNKSSANRSLKKAPRTESTPKESQSEPRRKITQPKLPKKEETNNKSNSNIGTLHRWISKSPRVMLRSTPVTAASASSSAAVSGVSGGNASSSGTAR

SEQ ID NO: 8749 - protein, 974 aa, Drosophila melanogaster
MSSENSEYYSDKEEDSVVNNSSLGRSRKSSRLSKSSRLSKSSRPSSAGVVIDETQSEEEESQSSETAESEKSDESDNSQNSQESEDSEDDSVRPSARNTKRKPLGIPSDSEDEEDELEQRALSPSTRMSITGVRPQDLSDDDSEIEYSDEVQEGPTEAPTAEAVVPGYTTQFAGNIQNDLHSTIGAADSEVLDDSSGSDVLILSNKETPIEILSSTDDDATTNKENMSGPPFERPSKSLSPRSSAGASVVKTSKNLSQPTIQAVLKQKTSPAAPRRSRIKSEDQKVVSQVVYDEEMRKLAEKRVQVSDAEKLFEKVAHKLPDKGSQIMKRIDTLRRELAMDEQWISALRVQQSNVPAVRVVKPTLNPPRAPSIDTLDWDELSEAVNEIKPVYTGAQGMATFNNQKALTLESLKDLHVSLEDLPGPEVLAEDPVGLKVSLMNHQKHALAWMSWRERKLPRGGILADDMGLGKTLTMISSVLACKNGQEMSEGKDESSDSDSEDDKNKKRKSVTGWKSKGRKDTRRGGTLVVCPASLLRQWESEVESKVSRQKLTVCVHHGNNRETKGKYLRDYDIVVTTYQIVAREHKSLSAVFGVKWRRIILDEAHVVRNHKSQSSLAVCDLRGKYRWALTGTPIQNKELDVYALLKFLRCSPFDDLHTWKKWIDNKSAGGQNRLNLLMKSLMLRRTKAQLQSDGKLNSLPNKELRLIEISLDKEEMNVYQTVMTYSRTLFAQFLHQRAERETDFNYRSDANKPTYNQIKDPNGAYYKMHEKFARMAGSKKEVKSHDILVLLLRLRQICCHPGLIDAMLDGEESQTMGDHSSDSDTPEIDLLAQLNKLAITDTSTDGQQSVANAGDDGPPLLPDEARIAKASKNLLKRSNPVFNLHRPSSKINMVIQILKTSILKSSDDKAIVVSQWTSVLDILRDHLSKDGVATLSLNGTIPVKNRQTLLMSSTIATIRSAFSCFPLLLAVWV

SEQ ID NO: 8750 - protein, 835 aa, Drosophila melanogaster
MSGPPFERPSKSLSPRSSAGASVVKTSKNLSQPTIQAVLKQKTSPAAPRRSRIKSEDQKVVSQVVYDEEMRKLAEKRVQVSDAEKLFEKVAHKLPDKGSQIMKRIDTLRRELAMDEQWISALRVQQSNVPAVRVVKPTLNPPRAPSIDTLDWDELSEAVNEIKPVYTGAQGMATFNNQKALTLESLKDLHVSLEDLPGPEVLAEDPVGLKVSLMNHQKHALAWMSWRERKLPRGGILADDMGLGKTLTMISSVLACKNGQEMSEGKDESSDSDSEDDKNKKRKSVTGWKSKGRKDTRRGGTLVVCPASLLRQWESEVESKVSRQKLTVCVHHGNNRETKGKYLRDYDIVVTTYQIVAREHKSLSAVFGVKWRRIILDEAHVVRNHKSQSSLAVCDLRGKYRWALTGTPIQNKELDVYALLKFLRCSPFDDLHTWKKWIDNKSAGGQNRLNLLMKSLMLRRTKAQLQSDGKLNSLPNKELRLIEISLDKEEMNVYQTVMTYSRTLFAQFLHQRAERETDFNYRSDANKPTYNQIKDPNGAYYKMHEKFARMAGSKKEVKSHDILVLLLRLRQICCHPGLIDAMLDGEESQTMGDHSSDSDTPEIDLLAQLNKLAITDTSTDGQQSVANAGDDGPPLLPDEARIAKASKNLLKRSNPVFNLHRPSSKINMVIQILKTSILKSSDDKAIVVSQWTSVLDILRDHLSKDGVATLSLNGTIPVKNRQDIVNEFNDRNNQKRVLLLSLTAGGVGLNLIGANHLLLLDLHWSPQLEAQAQDRIYRVGQKKNVIIYKFMCVDTVEQRIKGLQDKKLDLADGVLTGAKVSSKLTIDDLKGLFGM

SEQ ID NO: 8751 - protein, 1061 aa, Drosophila melanogaster
MSSENSEYYSDKEEDSVVNNSSLGRSRKSSRLSKSSRLSKSSRPSSAGVVIDETQSEEEESQSSETAESEKSDESDNSQNSQESEDSEDDSVRPSARNTKRKPLGIPSDSEDEEDELEQRALSPSTRMSITGVRPQDLSDDDSEIEYSDEVQEGPTEAPTAEAVVPGYTTQFAGNIQNDLHSTIGAADSEVLDDSSGSDVLILSNKETPIEILSSTDDDATTNKENMSGPPFERPSKSLSPRSSAGASVVKTSKNLSQPTIQAVLKQKTSPAAPRRSRIKSEDQKVVSQVVYDEEMRKLAEKRVQVSDAEKLFEKVAHKLPDKGSQIMKRIDTLRRELAMDEQWISALRVQQSNVPAVRVVKPTLNPPRAPSIDTLDWDELSEAVNEIKPVYTGAQGMATFNNQKALTLESLKDLHVSLEDLPGPEVLAEDPVGLKVSLMNHQKHALAWMSWRERKLPRGGILADDMGLGKTLTMISSVLACKNGQEMSEGKDESSDSDSEDDKNKKRKSVTGWKSKGRKDTRRGGTLVVCPASLLRQWESEVESKVSRQKLTVCVHHGNNRETKGKYLRDYDIVVTTYQIVAREHKSLSAVFGVKWRRIILDEAHVVRNHKSQSSLAVCDLRGKYRWALTGTPIQNKELDVYALLKFLRCSPFDDLHTWKKWIDNKSAGGQNRLNLLMKSLMLRRTKAQLQSDGKLNSLPNKELRLIEISLDKEEMNVYQTVMTYSRTLFAQFLHQRAERETDFNYRSDANKPTYNQIKDPNGAYYKMHEKFARMAGSKKEVKSHDILVLLLRLRQICCHPGLIDAMLDGEESQTMGDHSSDSDTPEIDLLAQLNKLAITDTSTDGQQSVANAGDDGPPLLPDEARIAKASKNLLKRSNPVFNLHRPSSKINMVIQILKTSILKSSDDKAIVVSQWTSVLDILRDHLSKDGVATLSLNGTIPVKKPSDIVNEFNDRNNQKRVLLLSLTAGGVGLNLIGANHLLLLDLHWNPQLEAQAQDRIYRVGQKKNVIIYKFMCVDTVEQRIKGLQDKKLDLADGVLTGAKVSSKLTIDDLKGLFGM

SEQ ID NO: 8752 - protein, 755 aa, Drosophila melanogaster
MSTCSSSEIAEKKRIALAKLQAKKSQLLASAPATNGKSTTSATGATQHANNGKSNPNQPQAKSPLNFYRSPTGEQKKINRSGPTPGDNKSSSFLNALKAIKQTSNRELSRGAAHPYQRPNGGNERNKPTLSLSSDKEKPVAVLLGNSITCNLYLISTHRFAAQTSGYHEQLVTVFKNMPTKCYDGQTRIWSFDLSDYQSLKTHAADLKPYVHMNGIPKKVLDLCGQPPVVPERSVLASIEPKLADQLMPFQQDGVCFAIAQKGRIMICDEMGLGKTYQALAVADYFKDDWPLLVCTTASTRDSWAKHIMDLLPKVPIHYVQVLNNNQLYVGEAKVLITSYNMMERHEDKLMQRKFGFIIFDESHTLKNSKAKCTTTAKRLTDQAKRVVLLSGTPALSRPLELFTQLQMIDGKFMNFMEFTTRYCDGKQSTFGWDANGQSNLEELKVILHLKYMLRRTKVEVLPQLAEKNRETVVLDPALVWTNAETKETLDAFNKELKTAKGRATEEILLRFYARTAEVKTRAVCAYLKTLVKEQKKFIIFAHHRVMMDAISDFLSGLKVHYIRIDGQTRSDHRSDSVDTFQKKSSCKVALLSLKACNSGITLTAAEIIVFAELDWNPSTLAQAESRAHRIGQTKPVICRYLIAHNTADDIIWNMLKNKQEVLSKVGIFAENLQKATHTAAPTSSHKIEEYFSPSTSTSLEPERNSIKQYFSTIPAKEPPEQNNNTEMTKVNKAESDIAAFFNDDDDEAFLELDI

SEQ ID NO: 8753 - protein, 1061 aa, Drosophila melanogaster
MSSENSEYYSDKEEDSVVNNSSLGRSRKSSRLSKSSRLSKSSRPSSAGVVIDETQSEEEESQSSETAESEKSDESDNSQNSQESEDSEDDSVRPSARNTKRKPLGIPSDSEDEEDELEQRALSPSTRMSITGVRPQDLSDDDSEIEYSDEVQEGPTEAPTAEAVVPRYTTQFAGNIQNDLHSTIGAADSEVLDDSSGSDVLILSNKETPIEILSSTDDDATTNKENMSGPPFERPSKSLSPRSSAGASVVKTSKNLSQPTIQAVLKQKTSPAAPRRSRIKSEDQKVVSQVVYDEEMRKLAEKRVQVSDAEKLFEKVAHKLPDKGSQIMKRIDTLRRELAMDEQWISALRVQQSNVPAVRVVKPTLNPPRAPSIDTLDWDELSEAVNEIKPVYTGAQGMATFNNQKALTLESLKDLHVSLEDLPGPEVLAEDPVGLKVSLMNHQKHALAWMSWRERKLPRGGILADDMGLGKTLTMISSVLACKNGQEMSEGKDESSDSDSEDDKNKKRKSVTGWKSKGRKDTRRGGTLVVCPASLLRQWESEVESKVSRQKLTVCVHHGNNRETKGKYLRDYDIVVTTYQIVAREHKSLSAVFGVKWRRIILDEAHVVRNHKSQSSLAVCDLRGKYRWALTGTPIQNKELDVYALLKFLRCSPFDDLHTWKKWIDNKSAGGQNRLNLLMKSLMLRRTKAQLQSDGKLNSLPNKELRLIEISLDKEEMNVYQTVMTYSRTLFAQFLHQRAERETDFNYRSDANKPTYNQIKDPNGAYYKMHEKFARMAGSKKEVKSHDILVLLLRLRQICCHPGLIDAMLDGEESQTMGDHSSDSDTPEIDLLAQLNKLAITDTSTDGQQSVANAGDDGPPLLPDEARIAKASKNLLKRSNPVFNLHRPSSKINMVIQILKTSILKSSDDKAIVVSQWTSVLDILRDHLSKDGVATLSLNGTIPVKNRQDIVNEFNDRNNQKRVLLLSLTAGGVGLNLIGANHLLLLDLHWNPQLEAQAQDRIYRVGQKKNVIIYKFMCVDTVEQRIKGLQDKKLDLADGVLTGAKVSSKLTIDDLKGLFGM

SEQ ID NO: 8754 - protein, 1534 aa, Drosophila melanogaster
MEESNPNYDVNQRLQKPEGWPHVNEFHPSMMYPDDPRRYFHNASTDPQHQPQQHPQQQPEQHPEQHPQHPLHSQQQPQQHPQQQPQQHPQQQTQQPPQLQPQQHPQAQIQPPIPVPISTPMEGTMEVPVKMPEYCPETSQPVEPDRVINPLAEVAKNTVPYGHKRKNSAGEDQAANKKLSMAAAEEKKNSHLRKNIRDVMNENNLDTTTLAAQREESERLARVAGQQKSMREIQKQVVHKQIFRILQLDESEGIESCAVANPVEHHPPVDFPEEEIASDTFDDSNSSSLSGGSIEDVLHKGASVQPSEVVTIDDSSDDDCILLSEEEEEEDDEDLNESDDATNSGMHVKDIYNVPDENGQVVVNMAHPEGEETLYLAPQIAKVIKPHQIGGVRFLYDNIIESTRRYNKSSGFGCILAHSMGLGKTLQVVSFCDIFLRHTSAKTVLCVMPINTLQNWLSEFNMWIPRYSTDSNVRPRNFDIFVLNDQQKTLTARAKVILNWVHDGGVLLIGYELFRLLALKLVKTRKRKGSVIRPDGMDSSSDLMNLVYEALVKPGPDLVICDEGHRIKNSHAGISLALKEIRTRRRIVLTGYPLQNNLLEYWCMVDFVRPNYLGTRTEFCNMFERPIQNGQCVDSTPDDIKLMRYRAHVLHSLLLGFVQRRSHTVLQLTLPQKYEYVILVKMTAFQRKLYDTFMTDVVRTKAFPNPLKAFAVCCKIWNHPDVLYNFLKKCETDLDLEIDEEVTKGAATPIVEPSADSSLSLASPLEKKINGSGDPINSIETPSFYDEKPEPLNYGSFGSEGKNNYWMDSSILPKPGCVEVIKQTDTNMSSNFESITGSSEIVDLDTNEIKTVETTIQAPCSNNQLDNGCNAGKPSEWNAAGSKNSSGVAAAEPFKKLLKSKQRNEEFSCSWAVDLMKNYVSGLISNSPKMEIFFCILKESLNLGDRILYGQTKPCFVYRIVMDRCLEKKIYDRQIKKQGMSDRIVDECNPEAHLSMKDITNLCQDYDSDEDTVEEVNKSTGDLSKPGSPSEEGSKPGSANMSPNASNKSNNGPTKPLDDQNTPKSPNGASHSPIKTEKNDGQEHAVHVDGIINTILDMHRHCVTKEPFMHESLLVDQKDRKLSQAEKRQAHRSYELEKKAAVNQRFTYAPAKMNYKIVNNDGTVITKPMNQQIKTNTSSSTGGRSTRWIPADVWQRQGMTAQEMTLPLDVVIPTNSADKANIILKAGQRVMVLKSAKGIYMQLDSGKIIAIRTTAKTEPEKTNKDDVIDITDDGDTDTTKPQSPEEDVKDLTADDEPRVVKNKESNPATTSRPEMPAKDRKSTENVQHFKSQTQPNTTLATTTNQHQLPSDLTYSQPQQSHQQPQQQASQQQPAQQPPPPAYKHQNHLPAAGEGYSNANSIQPNVPLPPHPGAPNSSEAPPPADSSYFQPKPFQHTYPPQYYDYYDNKHKSAPPGSGYHINNYTSYGNLNFAPYHSNLHPPASYIGAPSSYVNSNVFPRQHWSSVVNSSPASSESMRQPSYIGSTYPVNEWSSQ

SEQ ID NO: 8755 - protein, 965 aa, Drosophila melanogaster
MESSSPSDTTEIHKQSCSIQDQSSVPVPDSSGEINNWMEPEPVDSLELSGGKNLEHAMPLLLTYLDLSPTEYADNESAIFVSASEYNEKKAQIDQLVQKILTMEQQQRQLEENASETKELCDLKLHLEKLNARLEALGEFLDTLRLREDQQEIKIEDNSELVDHTEQPKWSNLYSGLNRYRQKANHTAAQFYQHKSNIIDSLKTLYEPIQPRPAIDDLEKQPALLLVRLLKHQQSCLKWMQFRERQKISGGILADDMGLGKTLSMIALILASEETKNRKREEKKKALTLKWTQEFNRVYCKEIRKISMFDDEEESGKEEEQYEPPEKRTCHVKTKKINQFRILDDDDNDAGDKAVVEDEQKDLLAKTPEPEVFSSDEEEEHLSNGRYPSANTLVVCPMSVMCQWAHEVASKVAQNAIRVLTFHGPNRHEIGIEAFRSYDLVITSYNLVVNELKRYGNTSPLFAVYWNRVILDEAHIIRNSKTNCCNSVCQLRAHCHWALTGTPVQNRGVDVFALLRFVNVPNFQDLQQWKKNLNESMLGHRRLNFIIKPLMLRRTKQKLQASGDMPALPSLKIELICVQLSKTEMAVYQILSAISKKIFTQFLLQREKGNSDLNYYSLERTPQFIAGHMSDERYNEIYERFLKSLGYNPGEKILGIYILVLLLRLRQFCCHPGLMIGMLRGALTAEDVQNVKVDASDVEGQLKMDVLAELDKFDETDSEDDCCDEEDSTRRDGNFKLEVIKDEIKEENVPWDSGDDLPTASSFEDQLDSARALKLLNPQNPIFQFIRPSAKLKMVIDKLEELLTGTNDKIIVTSQWVSYLAIVRKRLQDLSWETLDFNGQLTAKEREIVLRDFNANNEKRVLLLSLTAGGVGLNLNVANHMLIVDLHWNPQLERQAQDRIYRYGQTKPTFIYRYMCQDTVEQRIKSLQDCKLEIAKVVLPEEGGEVTKCVGGGLNLAELKKLFEM

SEQ ID NO: 8756 - protein, 1311 aa, Drosophila melanogaster
MGKKNPNARHTDAATPLTTDDSNSSSVSRRESATESKSASESESSPPRSNTKQSRTHKNVKASGKATVSSSSDSDQAVANSSANDEEKEPVCKIRIVPLEKLLASPKTKERPSRGSQQKNVTINDSSDEEPLKGSKLVLPARKSRNKNASIIELSDSEEVDEEEESLLVAIPLPKEAQQTKPEKNSSKASKESIEKRQKAQKEATTSSARAIRSVNGTRRGSLSSERSSRASSSRAESPPRPKRCVVRLKRVSLPKTKPAQKPKKMSSDSEEAATTSKKSRQRRSKSESEADSDYEAPAAEEEEEEERKSSGDEEEAANSSDSEVMPQRKRRRKKSESDKGSSDFEPEEKQKKKGRKRIKKTSSGESDGDGDDDKQKNKRKHIRKIIKTKDLDLTTKEAAKEEDDRRKRIEDRQKLYNRIFVKSESVEINELVLDFDEESKKALLQVDKGLLKKLKPHQVAGVKFMWDACFETLKESQEKPGSGCILAHCMGLGKTLQVVTLSHTLLVNTRRTGVDRVLIISPLSTVNNWAREFTSWMKFANRNDIEVYDISRYKDKPTRIFKLNEWFNEGGVCILGYDMYRILANEKAKGLRKKQREQLMQALVDPGPDLVVCDEGHLLKNEKTSISKAVTRMRTKRRIVLTGTPLQNNLREYYCMIQFVKPNLLGTYKEYMNRFVNPITNGQYTDSTERDLRLMKHRSHILHKLLEGCIQRRDYSVLAPYLPPKHEYVVYTTLSELQQKLYGYYMTTHREQSGGDVVGKGARLFQDFQDLRRIWTHPMNLRVNSDNVIAKRLLSNDDSDMEGFICDETDEDEAASNSSDSCETFKSDASMSGLAASSGKVKKRKTRNGNAGGGDSDSDLEMLGGLGGGSSVQKDDPSEWWKPFVEERELNNVHHSPKLLILLRLLQQCEAIGDKLLVFSQSLQSLDVIEHFLSLVDSNTKNYEFEGDVGDFKGCWTSGKDYFRLDGSCSVEQREAMCKQFNNITNLRARLFLISTRAGGLGINLVAANRVVIFDVSWNPSHDTQSIFRVYRFGQIKPCYIYRLIAMGTMEQKVYERQVAKQATAKRVIDEQQISRHYNQTDLMELYSYELKPSTEREMPILPKDRLFAEILTEHEKLIFKYHEHDSLLEQEEHENLTEEERKSAWAEYEAEKTRTVQASQYMSYDRNAFGNQVMGQFGNASGSVTSNKIFGFRSDILLQLLNMKISKDHQELNQNQVIQLVPTYLQQLYNEMNNGDPTMYKDLLNLHSNIVHPSGMYMNPLLYANQNPNAAGYNQGTGGVPPMAGGSVAHGPPAAPAPGFEPDKVYEID

SEQ ID NO: 8757 - protein, 655 aa, Drosophila melanogaster
MIQFVKPNLLGTYKEYMNRFVNPITNGQYTDSTERDLRLMKHRSHILHKLLEGCIQRRDYSVLAPYLPPKHEYVVYTTLSELQQKLYGYYMTTHREQSGGDVVGKGARLFQDFQDLRRIWTHPMNLRVNSDNVIAKRLLSNDDSDMEGFICDETDEDEAASNSSDSCETFKSDASMSGLAASSGKVKKRKTRNGNAGGGDSDSDLEMLGGLGGGSSVQKDDPSEWWKPFVEERELNNVHHSPKLLILLRLLQQCEAIGDKLLVFSQSLQSLDVIEHFLSLVDSNTKNYEFEGDVGDFKGCWTSGKDYFRLDGSCSVEQREAMCKQFNNITNLRARLFLISTRAGGLGINLVAANRVVIFDVSWNPSHDTQSIFRVYRFGQIKPCYIYRLIAMGTMEQKVYERQVAKQATAKRVIDEQQISRHYNQTDLMELYSYELKPSTEREMPILPKDRLFAEILTEHEKLIFKYHEHDSLLEQEEHENLTEEERKSAWAEYEAEKTRTVQASQYMSYDRNAFGNQVMGQFGNASGSVTSNKIFGFRSDILLQLLNMKISKDHQELNQNQVIQLVPTYLQQLYNEMNNGDPTMYKDLLNLHSNIVHPSGMYMNPLLYANQNPNAAGYNQGTGGVPPMAGGSVAHGPPAAPAPGFEPDKVYEID

SEQ ID NO: 8758 - protein, 1311 aa, Drosophila melanogaster
  unsure (1)..(1311): unsure at all Xaa locations
MGKKNPNARHTDAATPLTTDDSNSSSVSRRESATESKSASESESSPPRSNTKQSRTHKNVKASGKATVSSSSDSDQAVANSSANDEEKEPVCKIRIVPLEKLLASPKTKERPSRGSQQKNVTINDSSDEEPLKGSKLVLPARKSRNKNASIIELSDSEEVDEEEESLLVAIPLPKEAQQTKPEKNSSKASKESIEKRQKAQKEATTSSARAIRSVNGTRRGSLSSERSSRASSSRAESPPRPKRCVVRLKRVSLPKTKPAQKPKKMSSDSEEAATTSKKSRQRRSKSESEADSDYEAPAAEEEEEEERKSSGDEEEAANSSDSEVMPQRKRRRKKSESDKGSSDFEPEEKQKKKGRKRIKKTSSGESDGDGDDDKQKNKRKHIRKIIKTKDLDLTTKEAAKEEDDRRKRIEDRQKLYNRIFVKSESVEINELVLDFDEESKKALLQVDKGLLKKLKPHQVAGVKFMWDACFETLKESQEKPGSGCILAHCMGLGKTLQVVTLSHTLLVNTRRTGVDRVLIISPLSTVNNWAREFTSWMKFANRNDIEVYDISRYKDKPTRIFKLNEWFNEGGVCILGYDMYRILANEKAKGLRKKQREQLMQALVDPGPDLVVCDEGHLLKNEKTSISKAVTRMRTKRRIVLTGTPLQNNLREYYCMIQFVKPNLLGTYKEYMNRFVNPITNGQYTDSTERDLRLMKHRSHILHKLLEGCIQRRDYSVLAPYLPPKHEYVVYTTLSELQQKLYGYYMTTHREQSGGDVVGKGARLFQDFQDLRRIWTHPMNLRVTSDNVIAKRLLSXDDSDMEGFICDETDEDEAASNSSDSCETFKSDASMSGLAASSGKVKKRKTRNGNAGGGDSDSDLEMLGGLGGGSSVQKDDPSEWWKPFVEERELNNVHHSPKLLILLRLLQQCEAIGDKLLVFSQSLQSLDVIEHFLSLVDSNTKNYEFEGDVGDFKGCWTSGKDYFRLDGSCSVEQREAMCKQFNNITNLRARLFLISTRAGGLGINLVAANRVVIFDVSWNPSHDTQSIFRVYRFGQIKPCYIYRLIAMGTMEQKVYERQVAKQATAKRVIDEQQISRHYNQTDLMELYSYELKPSTEREMPILPKDRLFAEILTEHEKLIFKYHEHDSLLEQEEHENLTEEERKSAWAEYEAEKTRTVQASQYMSYDRNAFGNQVMGQFGNASGSVTSNKIFGFRSDILLQLLNMKISKDHQELNQNQVIQLVPTYLQQLYNEMNNGDPTMYKDLLNLHSNIVHPSGMYMNPLLYANQNPNAAGYNQGTGGVPPMAGGSVAHGPPAAPAPGFEPDKVYEID

SEQ ID NO: 8759 - protein, 1285 aa, Drosophila melanogaster
VIAHLFVRIVISQITMDGVVLCEIADEVPPESPEDPTEFRYGKRRWVFKDNLVEHKEEILICIEKCQNARTRKLKFRSIRQESGSCILVLSHEQTHVRAREIEMEVGEQVLPLFFKDFRGSLEFEVAQQEKEHKRPLKTYVTTKLYDALYEKHRQTVHVELERSLDLPKRFQSQLRKYQQRTVSWMLGREQQITQVPANFIVLHAIDGITRVFKHKYCLQFYPFEEEIPKISLPPGGILADEMGLGKTVEFLAMLLMNPRPQDSYRNDYWHQRLEEFSDEVPLKRSRISKKDEVFCICTKKHGKRVQCTKCRRWQHEMCMTISDTSNVPHLCPSCWSELVKSGERLVESGATIIVSPNAIKMQWFEEIHKHISPSLKVLLYFGLHSTFWVSPFDLAQYDVVLTDYTILRNEIYHTTDFKSDRQMRHQQRYMRPNSPLLMVNWWRVCLDEAQMVESSTSAAAEMVRMLPAINRWAVTGTIDELPPLLEFVGRPEVCRPPDAWQTVDKAFQLNYKCEPLLELLEHSLWRTCKSKVEHELGIPPQTEVVHRLELSNVESLYYREEHLKCHEQFLAAVAKHTRHNADNSSCLASISPQLLRIILKPFLRIRQTCSVPVVFNSNVSSTDYLHPQDLLARLKSNNENECKTELRTWASSYNGLAAIYFIKNDFPQAIKYYNLLLKLANEYNEQNISVDSVLQIHAIYNLLQASSLAPAEHKLTELEHKKYQAQMSRLEWKYLEDNTRVLESALSSYNENLEKVSELEKRFEGSTLDLLSTMVNHKTSLHDAIWNKVRDDFFRQNISVERLENVNSMAGMLYFMDIWHNKLQNLKSTLIAEFEFLKGVMQQACEAIKTGVLLSMEIINFIENVTVCHLTDILDANKDKPVKPKKHRYCRLCLIRDSLNQFECLLFAKKLDEKATVTEGLENPSMEISFIKSIFAFLRSKQDFSEWKEECQSKLELLSCLQDLVKFQIKYWIEVEYMVKAFDELEMCKMRILLTDDPEEQSNYRILACQLDEQLQFNQYNLQTSQLNFTRLCGRLKYLKHLKEDSADKPCPICQTQDDVRYVMMVCGHFVCQHCLDSMRRKNGRAGVTKCPLCRQDSPQLYYSVRPGAHKSIIGDFSTKISSVVELVLKIKGENEQEKIIVFSQWQAILIEIARALSLNGIQFRNKCTNKDFDDFKNPLSNVTCLLMPLSKGSKGLNLIEATHVFLVEPILNPGDERQAIGRIHRFGQKRPTKVHRFIVNGTVEENILSLITSADDTTTLSTHWDLENMTLDSLKKLFILKEE

SEQ ID NO: 8760 - protein, 1350 aa, Plasmodium yoelii yoelii
  unsure (1)..(1350): unsure at all Xaa locations
MFRNVRDYFKGNNNDGEENEERERLNCVKNNINDENNINDEHGVASYNCQNEFSSNDKNVSIENLNNENKNNNINNSINFLESNNWNSNDEKFELNKEKQCYNEIDGNELKRRKINENEKVEKVENENGENENENGENENENGENENEKVENENGKGENEISEEMSEEKVNYLQEKLEQLLAETKRYTEKLSGQRVQINLQNKKDKNRRCAMTEKEEDYVLLKEADDDDDTFIIKQPQNISGTMKPYQIEGLNWLYQLYRHKINGILADEMGLGKTLQTISLLCYLRFNKNIKRKNIIICPRSTLDNWYEEIKKWCSEMKPFKYYGSKEQRKELNKTVLHSDYDVLLTTYEIVIKDKSALYDIDWFFLVIDEAHRIKNDKSVLSSSVRFLKSENRLLITGTPLHNNLKELWSLLNFLMPKIFDNSEEFDNLFNISKISTNDNKQSEIITQLHTILKPFMLRRLKVEVEQSLPPKREIYIFVGMSKLQKKLYSDILSKNIDVINAMTGSKNQMLNILMQLRKCCNHPYLFDGIEEPPYIEGNHLIETSGKMSLLDKLLPRLKKENSRVLLFSQMTRLLDIIDDYCRWKKYEYLRIDGSTVGDERQIRINKFNEPNSKYFIFLLSTRAGGIGINLTTADIVILFDSDYNPQMDIQAMDRAHRIGQKKRVIVYRFVTQNSVEEKIVERAAKKLKLDSLIIQKGKLNLNNKENXXQELHDILNFGAPEVYKTQDISSISDEDIDIILADAEKRTIEIEKKLKNLENIFDLTNISLDGGLNMYNNLEKEESDNSSDEDGSDEDDDEDDDDEEDENESEGGDGNNLDNQIGEDGIVDENXKKKKKKKKKKKKKLNKSSTIKKFLKNNKKHMIFLDLGERKSKWKVMNTACTKTNKKKAILYGWKAEARGGHDFQFFNNEKLDELEKIEEKWNNYHINQQKIKEIIESQTEKEDFEKIINIHEFLTHHAKNIYNLINLINPNILNDSNIGDSIEEKDVSKDIDEDGNEGYKKSGEFNGIVNIYSKSNVGSSETRNNDSKNSGSKDMDNEFYKNKIIKLLETKKKLNMIKFREKNVKNCYEYMINFIKKNLVPNSNGDVGTANNNNKKNKNKKVKKDINDDISTIDIEEIKIEKQKLLKQGFAKWNKAEFNKLMSALIIHGCDNLDYIYEKYFLNSKKSMEDIKSYLKVFFRKYDQVKGGIRLFEKIRNSDLQKQIIQEENDMIANYVEKQLSNGVDTIDKLELPPNFRYENVYIQPESVNTTGGTNDVPEKVSEEEILYFERENKILLWLLYQEGVVQTKSIHILTPYYWAETYNFFKYATTPLENIEYRCRLIVDAIMELNKKNVKSSNSKERRRG

SEQ ID NO: 8761 - protein, 2541 aa, Plasmodium yoelii yoelii
MHGNFYPYMTNGFYGMSSTNCFKPTSTNIPNNNNTNTTNNNNTSMNSFNQINGSFPYDNTIRSGVGPSAPPGGVNNAISSNSNNNNNNNSNFVNNLNSVNYGDNINCNSINNILNKDSENLDKSSQIKSLSNNMNVNNLNMGHHVNNTAITSGTNNNSNNNGINSNVKDNMTKMANNNFKGIGSICNNIPPYRINSDQQLDKQHNSIDDNNNNNNNNTRYHPMNMYNRMEYVIVITSNLLGDNKTNASISKIRKGNNKDGVIGDNNGNSNGLINNDSDGYKQYKNEVDGNHNKMKDGTDGMIKDPKLNDSVNSNGNNSYAMFPNYNLKYPMNMNMFNNINHFNMNNKNGINNIGGVSNMNVEGGNYQSFNLINNMSDLNSAYNNMNKLPNVNNYNMMNIYSDNRYNNNNTNIPVGVNNNIINMNNYNNMNYMNMRLLNSRNIPNNMNNSDLNTNYMTDGMGNRIVNHDMNNNMNDGNLNNGNKYVRKTGIGKQYVNNNVTSGSMKKKNETQKDKKKKRKKKNENNIPESDDEEDNDLYINSYVKKSAPKNSNGNKSWLQYDSLDDKYTEKMKRNEKNDIFVSPNIGAVGGRTNLRERKRVYNYAQIDNYYETDEEDKKVDEEKNLLRQEKQSMGGIDRVIHHRKIKDWDIINSIKNNPFLFINRKKPEQGENANGDANENANENGDTNGDSKKNENLIGSTEMSSDSLNATETAGTDGAPDVSCHKILGGVENNEDPALDDFYEEEDIVDVNEVEFLVKWIGKSHIHNFFCTYEYLRYFNGVKKVDNYIKKIRLSFQKRKYMTADEIEQEKIYSEIKKQIEMDSIHAERIITHRKCEITNEQLFLVKWTSCAYDQCTEETKQTLLDHNFGKLIDEYFDRESKIYGPKALSSIWNRGPLTATKFDPYNETPSYLHGKKLRAYQLTGLNWMVSRMKRNLSVLLADEMGLGKTVQTIAVVGHMLYKEKLIGPYLVLVPQSTVDNWLNEFKNWLPQANVVCYHGNAVSRELIRTYELKKVYVQNRGYRYKFDVCITTPSILNSVSDVELLKRIPWQLMVVDEAHQLKNRQSKRFIELKQFMAESKLLLSGTPLHNNLEELWTLLHFLNPQQYTYYEAFQKKYNEIENTSLIGEAKQKQLMQLQHELHEVILRRVKKDVEKSLPNKVERILRVELSPIQIEYYKNILTKNYEQLAKASGGAKNSLQNICMELKKVCNHPFLCCEPIDKDEYRERLVYSSGKICLLEKLLIRLKERGNRVLIFSQMVKMLNILSEYLTLRGFKHQRLDGTMTKEMRKKAMNHFNSKNSDDFVFLLSTKAGGLGINLTSADTVIIYDSDWNPQNDLQAGARAHRIGQTKTVQIYRLVTKDSIEQTILERAKVKMVLDTLVVQGLNKKQNDNVNFIGGEGSNSSNGFTREELSKILKFGSQKLWEKNSSKYSPQDGEDGKNIIKGVDVDLDKILEEAEANENTNNANKDINSELNSLQNGAASNFFNTNTNLFGNGVSGNGVNNIGGGIADDLLSSYNNITEFKYEPPENLKSNILYNDSTKQGELDVEENDKDFWDKTIPLEERLKLKKMKEEELLVHGPRKTRTRDARYNQGLYYDGGAHNNNSEGDDSDEFTIKYTDKYNKNLNKKKRKRRTSTHITEKDKFRLYRSLLKFGNPTLRLDDIQFDSKLMKVDRNVILTELNIIVDTCKEIVEKVAKEGNNTNGQQPGLATQNVKTDNDDQTEYNNEECNTTNANSVNVKSNDMGVEVKEENDQQAEDINDENDKNKRGKRGVRTTATPSTGENVEATEVSKKEEANNNDNDNNSGGGDGGGFFSKFMKFTKGSTGAKREDEIEGKGIKAKTEDDGVKDELDDDIVKDELNDESDNNNKTKGERGRKIDAYTFYIGTNKANALDLCHRLQLFKSLHDFIKEQNNDNEYSFRLPLKPPQTNPNNEIVNNDNVVDSVVENVEVNNKSVVKNDKIKNKKDEVEGAGATTTTADVEEEATLNLTTTSETKQEGKTSNECEATESSMVVVGGNPSDDYLKLKLPNYIFDHLRDLSTKDVKAWTKEDDENLIKGIYIYGFGSFNEICVDVNLNLEHMKNIKWDKIKMRCIKILKMIEEYTSNNKEGTPGKKRRRARGKNKNHDEIKEEYDNGNNNTSIKSEGTGGINKSNSINGRHSINNYGRRSSERVKAIYSQEDKENGGILKKRVVSSRKGERDNKNNSTHLGSNGTSSKLENVYDINNKGGENTLLSSSTLDKRRRRGISSKSSNVTLKNEKTNSKCIIESSECSSSNEQKSNGSDDDDDEEEDDEINTNIVKRSGRSGSNRSSRMNSYENYKLTRRRSTRTRRGGGNDSIVGSECVNSIDPDGDDEYHNDSNDRKKLKKKKKKKKKLTDEEIIEIIKNSNLREMDQHSINKLTKKPLKKYKKLLKIVKKVLSSKTNELGQAEEQVSDDIRKKTDELIFYIGNYIGKFFDHCVDSECKDILNNSGWEYISNFVNETSENLKEKYEKFKSSNLKDSDNADITEENIISFFYSKKCSGLLCPEDDPDDVMDE

SEQ ID NO: 8762 - protein, 1529 aa, Plasmodium yoelii yoelii
  unsure (1)..(1529): unsure at all Xaa locations
MIKNLDAEHLDAENLGAENLGAENLGAEHLDAEHLDAENLNDNSTNCNIHISQDDEKDPFLNRPVQENSQNSQNVQNSQDSQNCENTNEADQFDNITIIGKSKMSKSSHRIETNIDHKFEKDKELDISKYIYLSEHLRIQKDKQIFMSVELNKYINDNIELIKSLGNYNKSPKNIINHFFDIGMKIRLLLRRDKIKKQKKKIEKNGKLKKNDKFCNIPNLYEQDSNCSDSSYLLSESSNEDEQKVVKNIKDCQKIKTEKNDLRDIKNLEKNKNVYFRYIDSIYTKYAMISNMNISYFQNIQNIINKNSSDKNITDKVETEMNDIRTFFLNQENTKAIEKNQQILRNDVINSMFGFNIISDTQCIKIPIKYINSEYKKNEEKKNEEKKNEKINDTIHYSESISKNSDNEQHPFLSKLRNVKKEEKKKKKKXTQKIKTVIAQKNKTVIAQKNKTIIFQKKYVNIYFELQKKNYKMNGKIKNLKQYILLDNWKGFKNHNIYVNMIDREKKENEKLFATLCYDQINYINEKKEIILKREEKERLKLLRENNMDEYIKLIKNVKNKRIQELLDVTDKFLNDMSHSVLYQKGKTNIISSDFSKEPINMREKYYDVAHTIKNKIIKQPSILIGGNLMKYQLDGLEWLVSLYNNNLNGILADEMGLGKTVQTISLFAYLKELKMEENCENNINDEMNNQIGKNIIIVPLSTLPNWVNEFEKWCPTLKVIIYKGNKNERKNINKNLLENNYDICLTTFDIIIKEKNILGKISWNYIIIDEGHRIKNDNSKLHSILSLFISKYRILLTGTPLQNNMKELWALLNFLLPKIFSSSTDFQQWFSFPLSNEQTVYETMTEEEELLIINRLHTILLPFMLRRLKKDVLEFLPKKYEYNIYVQLSLYQKLLYKQIENKNFKQINSDGTLNNKTFQNTIMQLRKIVNHPFLFTHDYDINDFVIKSSGKFEVLDRMLPKLIKFKHKILLFCQMTKVMDIISDYFELRKYKYHRLDGSVSLSDRRDIIDSFNQNKFVKNSDNSSQNKNDSLLLDPASKLDDTMIFILSTRSGSLGLNLQAADTVIIFDSDFNPHQDIQAMCRCHRIGQKNVVKVFRFITLSSVEELIFQKAKDKLNINDKVIQAGLFNKIYNDNDRQKKLKNIIKKNQKYDPTLHPTNPIMLNEYMSRSPEELEYFTNFDRDYFGEELFSQLQSIRQNETQKAQFRYMSEDDEEEKEEMDENGQEMDENGQEMDENGQEMDENGQEMDENGQEMDENGQEMDENGQEMDENGQEKGQKNGQKNGQEKGQKNAERVCDASGTDFVCDTDVAGEIERILIESKKLVCESELPVHLFCEDIVETNEINFKRTRKVINSNLIYEEGLTEDQFCKLIDPTPPQICSQNNIESPVEIQDSMENEQSHKLDLLEKQTFDIGRQNCNDNKEKEKEIMGNKIHEYIDKKILILNKTRDDNISSLENNYLEENERKDELENQDKPSDVEKEENIIKKRKGEEIYINNFEQNYSQLSGPSDMLDEKENKKRKKNGGQI

SEQ ID NO: 8763 - protein, 1732 aa, Plasmodium yoelii yoelii
MYEIKKKKKHFKTLSNSCMKYLSNKEKIKLKKQEEEEKKLKIHSKNISSYMDVFWKKIEKLVWEEKKRELQKTLNKNKEMRFKKFVKGAIKKIKNARHNAHELFENNMNYLPCSNNNSENNANSNNENEENEENEENDENEENEENEENEENEENEENEENEENEENEENEEDPECASNNTDNDTKNNINAPPNRPIDSAPKNDNKLSSSKPNHSNEDKELGEEDLTDQEDEDILLDEEMESMDESEEKEVNLLDDEANVPIEELLKKIYGFKSGEEYINLMQNEEEDEGTDTDVDDQVSTQNDSTNPTQNSKKRKLSDAGESDRELKTAKVDEADAGKVEEAKVEKVDEAEVAKANEAEVAKVDEILECNMDEKHLTKIPPFIKATLRDYQHAGLHWLLYLYKNNINGILADEMGLGKTLQCISLLGYLAYYLNIWGPHLIIVPTSILINWEIELKRFCPCFKILSYYGNQNERYKKRIGWFNNDSFHICISSYSTIVKDHIIFKRKNWKYIILDEAHNIKNFNTKRWNIILSLKRDNCLLITGTPLQNSLEELWSLLHFLMPNIFTSHLDFKEWFSDPLNLAIQKSKIYDSKELIDRLHTVIRPYILRRLKKNVEKEMPNKYEHIIKCKLTRRQKILYDEFINNKKVQNTLTSGNYMGLMNILIQLRKVCNHCDLFTNKYIQTPYYYILPIQYNIPKFCLLFENNYYKDFYLILFLHNEFVSLGGIAKDVRPKQKQNHIYTDSNIQMHTKNNDLTILDSQQFKKNMTNIETLNEINQTKEFTNKCLIEEINSEGSFNLINKFDKNLNYISTDSRDTNYAQNKISFFNNENEKMEEQNSFKSSTWFKEVNKIKDNEHFDYLNYYKNILTNLNKNKEIKRDSQIITNNENDNGKQYLRSNSMQMWNTYPIKYETMQDESMQDENMQDETMQDLCTYVNNEIYKENIPKDLLTYSNEFVNELNNNYDILSIYIDPQNKYKTYDEYLYAMEYDTTLYNTTLQNDNLRGNKQIISNYRGSSNRGRPPRGSHVGRPSRGGHAGRPSRGGHAGRPSRGSHVGRPSRGSHVGSSFRGDIGNQSSRTSINETAEQSNANNNNDSSGHNNKNNDSSSHNNSSGHNNNNVQNEDNDTIVRSVETGNFLKKKYLYRYNMKVLNREMQYKNFFTDETNQSYLNSLEHNLWIRKKKEEEINKMKIEKEKKKQLISNYHFIKNSRIPIFGSNLLHLLKTEFLKDQNIVYNHANNIIINNTSMKEVYSEDIPSRNYYNYMDTNIKKENNDDTIENIMNYNINRCKSNECASIVLERLFPTMEYFLKLYEKLIQNFIVINSPSVICSSPNILINSNSKRDDDDDDNDNDKEICKVQNYSHISKIEDLIKKIKKATRVYHNAFLKQSIIFPLNKDISLGSGKLFALEKLLSKCKKEGNKCLLFTQFIKMLDILEIFLNHLNYSFIRLDGSTKVEQRQKIVTKFNNDKSYFIFISSTRSGSIGINLTAANVVIFYDTDWNPSIDKQAMDRCHRIGQTKDVHVFRFVCEYTVEENIWKKQLQKRKLDNICINMGNFNSQNNRNNNTSLQDHNEMNKDWFSNVDTIKEIFINKQNNDDDDDIYQDRLLHEQLENPEKTNVRFEKTLEHIEDKDDINALHVTKRERQHELSQDMHEFANKNDFQEAYTLTSYCFNFLNENLTDSLKQQIDEMKMRIEIEMMNAKEDENNSLDNLSNPSDELENYEQVRNEPT

SEQ ID NO: 8764 - protein, 1163 aa, Plasmodium yoelii yoelii
CITKILFSDDGNYIISSSLDNTVCLWNVNTFLHINTYKGNDSHVYLWDTLSNKILNRISVNAKLHKDEKLLICSKNNSVNIYDFRERDFKKKNTPLQVLNDAKDLISDIFVDDFEIYSCSIDNSLRLYDIRMGKMMSYNMQSSILSMDITNDRNYVCTYLIDNTIKLVEKNSGTVLGLYKGDINNNHRRNIKFDIKNKKTGWINLMKNSIPRRSDETGDENDKVEDIIRKFDPLVLYEDENSKIEVDPILAQYLREHQREGVQFVFECLMNLKDEKISGCILADDMGLGKTLQSISVLYTLLKQGYNKKAAVRRCLILCPASLINNWNDEINKWLPNRCTVTCVNDSAKEKIVSKLEGFKYDLKSTILICSYECFRINNDSIDKSAIDMIICDEAHRLKNDKTKTYTSIYKLSAKKRLLLSGTPIQNDLGEFFALISLCNPDLFDDTNSFRKKFANPILIGRDKDATEKEQQIASERLAELSTITNKFILRRTNNLLSKVLPVKYLINIFIKLNPIQEALYVLFLKDKKLLKPDNSNNKVNVLINIKKLEKICNHPLLLNANDIKDIGHIPVVKLIEDVIAENVKGRGNKLSNKNSVNSSANNSTENINATLNNNNNCSKDGDYLRERRKAVELDYDKSVKKLIEECKRDVYRCYYNLSSKFQLLHFLLKTIKQETNDKVVIVSNYTQTLDYMEILCRENYYKFVRLDGGISIKKRHKVISDFTNTDDIFIFLLSSKSGGCGINLISSNRLILLDPDWNPANDKQALARVWREGQKKICYIYRLFCTGTIDEKVYQRQISKDGLSSMIVTNTNLSKDQLSDENVKKLFNYKNNTICETHDNIECNRCNFKDNTEVYSEQLEDFEEEDVNTWAHHLNIDTVPDAVLIKAVKEATECKINHMNTLPILKKLKHEFVTFSMSCKIEFRDDLIKQKANKNNTSYQPIAISEKKEPTKAKRAKPKEDSEYSDSTNDEEEEEEDEEEDEEEEDEEEEENEDEYEEEDEEEDEEEEDQKRRMKTKECTKRLREIMGYQKEKELIKKQNNSNEIEKREEKEEEEEEEEEEDLISRDNSFSHKIENSKNEKKKQDNINNVFELNNQEKSTKLKMNEKNGCDDLNSVRVTRNMTQKNLMELLSQDDESKPEVLISQDEDMSVENISTDSSCFV

SEQ ID NO: 8765 - protein, 1312 aa, Plasmodium yoelii yoelii
MRIRKTWCTLCRENFEDGDDCICCKQCKKKFHRECLQAEGLIDSEQLKDVKNYICYQCMNEEDDTPENEDRCKICREKSSNLILLLCDGCPNSYHVSCLGLQTEPESEKWYCPVCKPEEHKNLDIRRMRKGFAIDNMNGDHVNSSSCYVCQRPGKLLGCDFCPNSFHPTCLPDLDFDNISDQWECPCCKNEDPLLNQGHKRWTKNEIQEIMKKRQKELNFWRSRIIKYRNRFLLAHRKDLQPFVNPKVFANLTKTFKNDFYASKCNNSNKKGGKNDSGKGTKITSINNNSSNNGKKSLNLDSKEFDEYISSLEEEANQNANKFIESVFLSVYHPNGKKIERRPLVDNVQLKPHQEDGVEWLLKSFLTGGAILADEMGLGKTIQTLCFLSYLKCNKIDGPNLIVVPLSTVGNWLREIHRFTPHLTCIKICGSKNERTHAKEDRLAEKGLYDLYVTTYETVKNEEEFFVETIPKWQCIVLDEAHRIKNQGGAIRHSMDRVVGNMRLLLTGTPLQNNSAELFTLINFMFPDIFKNSEIIEQAFINTPSTSGNSNNNNENNGNSGNSGNGGNGGNSSSNYKLNVNIGNIDLKSSIKEEDLKAIRCLLDKIMLRRLKEQAITLPRKIFHDIWLPLGSLSAHWYKRLLDIRSMVEEKVSVKKLLGLVIKMRIICGHPKGIVSRPSQMEKLFGFFEEESEEIKEEVKKDAIKLKNISGEEHIESSSKLIFIDKLLCQLHYENCKYVKNYASNFDKHKKEVAIYHYHKMQEQNQSQKKKREHSGKLKKTEALENSPLFMEIYNKGKLELKPTSKDEDKLKSFMHTVSIDNECPYKKKRCIYDKIKEMVKNKNNAKFNQNNLYSLKNPSKDFSEFHYKENAEPSDDENKTKNGNKTDEDEDEDAEEEEEEEEEENEETGDDECNNYSEKNKKNKKNLKQVFPDEDSNDEKVEKVEKDENVENVEKVEKVEKVEKDENVEKIEKDEKIEQGENKDSEEKTRGLDNLRNESGGINSKNIVTLGKNCKIINIKEFFKSGKEATNGEGKASVSPTEQVSKNENLEKVEADYIKKEYEGDTISTIHLNKSDTEEKMMQIGEIKDEKNEEIEKNNNNNNNNNTISVKKEVTIKLPFTRSNSNNEEGENASKTEAKMHKVLIFTQFQLVLDELEEYCKYRCWKYMRLDGSTNKLIRELDIREFNLSDSIYFIYLISTRAGGLGINLTAANHVIMYDEDWNPFIDLQAIDRAHRIGQKREVNVWKLMTEWTVEERMAFRREQKLKLDKLVVQTQEDEDMLDTFEEKLSSDEIRKLMLHGKAAIQNMDVE

SEQ ID NO: 8766 - protein, 818 aa, Plasmodium yoelii yoelii
MGGKKGSIDLNSYSDSNYVHTSSEDDKKEDSESVLAKDGGKNNRKRRKTIGSCAITKRENIDEINNKIKKEKKEQKEKKNSSKISEQCIKKRKTYSIENSKNSNGEHFSIRSSPRLAAKSSGGLSAKLSGGLSSKGSGRLSSKGSGGLSSKGSGRLRAKSSDDSSVNYLGSQIEDSSESFYEENENSSDTVMSYDSIIIEKNKIKKKNMKKKGSDIFDESILHLIEWNRIILDEAHRIKNRIASTSQSIFNLKCSGYRWCLTGTPLQNRIGELYSLIRFLEFYPYAYYFCSKKDCKCSLINFEMKDNKYCNICDHTRMSHFNYFNKRILKPIQSFGYNGEGINSMFYLKNEILDEILLRRTKNEREKDIKLKPLVVTIRKDKLSNEEKDFYESLYKKTTTQFDKYVKSNTVLHNYAHIFDLLSRLRQAADHPYLILFGNSFLSDPSGKFIKKNSTIIPAISNDFVCGICLENVPRKNNVNTKCNHHFHKNCLKQYIESFEIENKGNEDNENFSITKYKTYNIVSNCSDSEKCDNANMIVFGSDDKNGDKNGGRNNLGLNRNYKSLSVVKFKDRENSQFVSLTNNIENIKDHPLGCPVCYVPLTVDFTAFENEEDKMDDEEIIVCKEEVTHINKSFINRINTDEYQTSTKIEAIFEEVQNVIYNTDDKCLIFSQYCSMLDLIEYHLKKNNIICSKLLGYMSMVSRNNILYNFNNDKQLRVLLISLKAGGEGLNLQVANRIFIVDPWWNPAAELQAIQRAHRIGQTKTVYAIRFIIENTVEEKIIQLQNKKQLVFDCTIGNSGSAMQKLTKEDLAFLFHA

SEQ ID NO: 8767 - protein, 1472 aa, Plasmodium yoelii yoelii
  unsure (1)..(1472): unsure at all Xaa locations
KNNNNNNNNNTISVKKEVTIKLPFTRSNSNNEEGENASKTEAKMHKVLIFTQFQLVLDELEEYCKYRCWKYMRLDGSTNKLIRELDIREFNLSDSIYFIYLISTRAGGLGINLTAANHVIMYDEDWNPFIDLQAIDRAHRIGQKREVNVWKLMTEWTVEERMAFRREQKLKLDKLVVQTQEDEDMLDTFEEKLSSDEIRKLMLHGKAAIQNMDVESTLDLPLEFFIDRGRRKLPIINGIDLEKEEKNTIEQEIKNIKEIGNQLNTNDEENIYVQKENYISDDDGKDNNNNYYDNGIDMDEMLVEETEELLDQGQNNNGLGSFYEDGNNDPNSTNTDAIKQDKEQNGSNNSGTGLISQYSSNNNGGDSTLWRSVRERKKPQNMYTPEYWGRKQEVKQIKHEGRCFICNNTKNYKTIVKDRNNNDIEIDYGDMINCFRCPKTYHKLCEGIKDEVVKKTWTCSWHECCLCFRKSSQCGNLLIHCATCPTSFCYSCFPPDYTRYYVGEEYYHNLRQRGVNFNAQNWVCFLCSKCKAVEEQKKRRKMTKEERENEKQLQKELRSQLHGSKQEEIETKKRKKAQQLERDKFIIENRKRIDALDKKYETQLRNAYENLFPPKFIKELINRIEQAKLLKQKGGTTPDDENNTSKELLSKNQNSKDSDNNNNNNSSSTPKDSINKKKSTTFLHTKLPNKILVLCENCKLPCHANYKYPGNCCYPLELDKSYFYANSSFSQSANNKENKNINGDNIRSGANGSSFGQYQGSSTTLVDKEGSTQKNNFKDDNMNEIGQNGNQIKDEEDEEEDEKEENDKNDKNDKNDKKLSIINEEDEEEKEMNTTGQSNFNNDENSANNNNQKSFHENSNENKNEGNINDNEQCGESPNNNQDNSGKAKTRRFLRAVCSKCGTVQLGKLAHFRKHCDKLTEEEKKEYDDKREKLKQLIELLNTKNIPDEHTEEEYKNMSIFKFKSLYSNFQDKADNILEDCIREMKWDMLISTKKKTVKKEKESKKNNNNNXNGGNGGMGNSSGNSSSRGKSNGEKDGEKRGGNNNISSKSNIAQLLYKNALINSLNKEGKEFIEIISDNMTPEMKELLSRELSSMKGKRKKVINKNTIKSKKIKGNNNEGWDEENNYTIDDVMLNRHNNDKLNELKKISSNNNNNNLNIYHDRLNKDNQNEHFTLDSFNDDFLHKAKEFLRITKKKIINNGFSESTNIGNVLNSGEKDHNTDIEKSIIQNYIKKMKNSLKNNQINSKIINDLNFNKQHHINSYDHRSSSNSRIDVYKNCFDRNNKYHIQGSHSNYRINRGGSGERIKFDVANDHNNSNNNNNNRIFAPKSGIGNKNFHFSDINDFSVDIFNIDKNVKHKDDPVDYDIKKITNTSENTGTNKVHEYILYRKKKSNSKSHHGYDDGNSSNYSGMGKQDNIHNKYDNIENINKSGKINMETQMNIKRSSNSSSDRIKQLNLNDVKSFLINAERN

SEQ ID NO: 8768 - protein, 986 aa, Plasmodium yoelii yoelii
MDVCEFVDPIRKRKITNNLIDFDKYVYKEKSDKCEKKENTEYVVKKKKKKKLRRVLDSSNSDNSDQENIKKECKNEKKKKNDNNDNDDNDNNDDDQFLGKSYDNNSIINDNEIEEKKEYERNLKKLYNCLLGSIKIKNKIIKYFTQNVREKRQDIIKEFVKGSFRINNYDANFDDFEKNVDTFHKLKNYQKCGIYWLYILYKEKKNGILADEMGLGKTAQTCVFLDYMYKTKKLQNKTIIVAPTSLLKNWDNEIDMWCPYLKNYKIIYYGNQNERKYLAYDIFTNKKKDNNNSIHLIITSINMLTGKNDAAYFRQIRKYDYLIFDEAHFLKNKNSLIYKKLQKKITFSNKILLTGSPIQNKTQELTNLLLFLMPHIFTEHNINSAMDAFLKLYQEVIEKKNKSDNTENTTNNNKLKNQQLMDIYEIESECDEEKKNKIKNNKDDNTGYSVTEANGNLNDSEKDDEDEDKNADAEADAEAEADADSDGEEYMCPNTRDIIKEYLDNTIKYHEKNVDIKNKEIILLQLIIEPYILRRSKKHVFIDMPKKHSIIIKLPLNNTQLNLYKDEILSKLQHTHKHLEFLETNSSKEEMEKLKSILGNKGEKEITNLKNNEYNNNIIDHKNFENMKDNYDEDDDKIDEETINIEKEEENDEENKESKIVINKRDDEEVIKNSQSISTSLQNNKNNTKEERGKMINASIFILRRICNHPLLHKYYYSIDDIKKISKYFYNNTDQYLDLDLKTVENEFMKISDFDIHLSIKHLISQGDNNLNKYLIDKKHILNSTKIHHMLTLIKNIKQKKEKVLIFSQFTTFLDIIEESLLYEFIYDEHDYADHSNFVDKTQNGNISESPNKYNNNDGGDNDNDKNYQFVKRTSFNKPDDDTYVRSPSAMSTSSQLSEKRFQNNVYVRLDGSTNTIERQQIIKEFSENDNVFIFLLSTKAGGVGLNLIAANHVILMDQDWNPHNDRQAEDRVHRLGKSFSQKNKK

SEQ ID NO: 8769 - protein, 1412 aa, Plasmodium yoelii yoelii
MSKLVIMYTLLLQKFEVIGDIRIYNNDKIDEIKSFNKDGELIRGKGVYFEYYLGCIETDSIILSSEICDVKNDKDVSISYEITPKSTKRSFSPMYNLKINDSYISSNDYIKIIGRNIQNKTQTGKKKVPQKKQKKENNNDSSTVRYDTLSQKNNNFNEILSSDKKYVEMNKYKCEVLKDINEGYPCIRLKHNNRDISKLKSHLSKTLSVLLVLNAIRIEIKLEKVSLCDFKFGGSLKTFVHVILYPDSFKIDVHKYHEYNSLIKYSVNNLFKELKIAPLRLAKNISSDSFDDLNTKIVTGKNLTKNNDNFSNKYESSSTINTNNAFYLDFALKGGTQAKEYEEILDTASENEVEEKNEDTTNMVFAEEKYRGGYLLEDFKEIYPNSVYFKPTLKAYQAEGIWWMYLKENPPEYLKENIFKGEKTKEIDLDQIIRSKSTCSEIHVYNDLYVDKEVDVYNDVYVDKEVDVYADKEVDVYVDKDVHVNRDVYVDKEINVNRDVYIDKEVNVNKYMHNCEIYLLDMKTESGSSNSNIKIKDENSENDEENGRMNEINNKKKLVKTEEYNNDDDNDIRNKEPLNPMWEEHAFIPNIKIYEEGKLIFVLKYFYVNKITGCLSLTYPQYVPQFRGGILADEMGLGKTIQSIGLIAHDIYQNKLHIKNNNVENKNNITYLIENTIKGFDYNKGGTLIIAPLALIYQWKQEIDKHTKEGFISSYIYYANSKDINSDLLSKYSVVLTTYSTLVSEYKNTCNQNLSNNPTIKGKSNATNVSKSEYVIENKFSYTKWAKEKQEQNEKPEPVNKLEGSNNGEEKGNEIKKRKLNSFFMKPSLNNGKNSILPSTGDKKTNKVLNSMKEYPLYKITWRRIIIDEAHVIKNKNSIQSVAVWKLRGERKWCLTGTPIQNSLYDIFPLLRFLGIKPYGNIEWWSKEIADYVNRNKLNIALDIVRKISSPILLRRTKNSKTREGYNIITLPKKNVHVLKLKFSLEEEDFYRAIFYRSKTKFDTYMHDGNVLSHYSHVLQLLLRLRQCCSHPLLLFSKPFFEEWNDEDIINGMYEENSKITESATDSATEKSNICVKLSNMKVEDTLKSETVKNEILKKDTLIYNFLQKSSNSNKLSNDYVEEIEMLKNGTAMQCVICLEDSVYPLISKCLHIMCKKCADLYFNLTQIAEKKCPGCDNYISLKSLKTLQQNKSPLDDFLKKMKKDNFVYSTKLRILFDHIKEDIKNELHVVVFSQWIGFLKIIEKLLTLHEIPNKIYDGSLTFEQRKNTLYWFNIQKGKIYQPGIGFCQSTCDIPIENKSGKVLLCSLKAGGVGLNLTVSSKVYLMDLWWNPAIEDQAFERIHRIGQLKDVNIYKFVLEKTVEERILQIHQSKQYTANQCLAQVGNKINTDVNLVTQKLGMDDFILMFKDWN

SEQ ID NO: 8770 - protein, 1099 aa, Prochlorococcus marinus str. MIT 9313
MIGCGTPAWMVAVDRQCTPAPRNPTHTFCVAAMSLLHATWLPAIRTPTSSGRPALLVWADTWRVATPAGPAATPALHPFTLSPDDLRAWLIERDLLPDEIIDATACLTLPSRTVKPRNKTKNVSTESDEAKDNKTSWTGLPLQAGEPIPKQTEWWPWQVQGLAVEPAAATAWLSKLPLSGNHPDLADELRWWSHLQRWALSMIARGRWLPQVELSKGEGYPHRARWTPLLNREDDRRRLEDLAAQLPLVATCALPWREPTGRRSNRMTRLRPEAMRAANPVASCRPRSGRLRVASLLEELLDAQLRTGFEASEQGLDPLLTAWQEALGSDSGVINLPDEEAERLATASNHWREGVAGNVAPARACLELFTPGEGEDLWELRFSLQAEADPTIKVPAAAAWAAGPKVLQLGEIRVEHPGEVLLEGMGRALTVFAPIERGLDSATPEAMQLTPAEAFVLVRTAATQLRDVGVGVELPASLSGGLASRLGLAIKAELSERSRGFTLGETLDWSWELMIGGVTLTLRELERLASKRSPLVNHKGAWIELRPNDLKHAEHFCSVNPGISLDDALRLTATDGDTLMRLPVHRFEAGPRLQAVLEQYHQQKAPDPLPAPEGFCGQLRPYQERGLGWLAFLHRFDQGACLADDMGLGKTIQLLAFLQHLKAEQELKRPVLLIAPTSVLTNWKREALAFTPELNVREHYGPRRPSTPAALKKALKGLDLVLTSYGLLQRDSELLETVDWQGVVIDEAQAIKNPNAKQSQAARDMGRPDKNNRFRIALTGTPVENRVSELWALMDFLNPRVLGEEDFFRQRYRLPIERYGDMSSLRDLKGRVGPFILRRLKTDKAIISDLPEKVELSEWVGLSKEQAALYRNTVDETLEAIARAPRGQRHGKVLGLLTRLKQICNHPALALKEQTVAKGFMDRSAKLLRLEEILEEVIEAGDRALLFTQFAEWGHLLKAYLQQRWRFEVPFLHGSTSKTERQAMVDRFQEDPRGPQLFLLSLKAGGVGLNLTRASHVFHVDRWWNPAVENQATDRAYRIGQTSRVMVHKFITSGSVEEKIDRMIREKSRLAEDIIGSGEDWLGGLGVSQLRELVALEDS

SEQ ID NO: 8771 - protein, 542 aa, Prochlorococcus marinus str. MIT 9313
MKFTPKSSSSCYLGLTAAGLVKVTFPFDAVTQAQLRKVRPRGIWRGTRQGWEFPLVAAQHLQRQFGSRFLVQDDLAQWLSWFEQPLPPMPPHRDLVSYADLEVVLTDGRRPLPHQCSGARWLLARRGAVLADEMGLGKTLTSLLAARAMVRCADVRVMVVAPVGLHDHWRIEAASLDLPVCIHSWARLPRELPAAGTLLLVDEAHFGQSIKSRRTQALLRLARHPRLRAIWLLTGTPMKNGRPDQLYPLLAAIDHPLARDQRKFEERFCQGYWRDQGGQRRWLSRGASDLDALGKLTRPLVLHRRKQTLLGLPPKRRQEHRVVLTESESRGFDHRLALVTDNYRHRVQQGLVRSDAESLAVLTALRQIAAEFKLPAVETVVAALLAEGQAVVLFSSFVGPLLLLQQRLGGELLTGRQRPGQRQEAVNRFQSGMSSLLLATYAVGGLGYTLHRARHVVLLERHWTPGDVDQAEDRCHRLGMDGGLTSHWFQLGFADQLVDSLIASKAERIEVLLGSRRVGLKRQPLPVMLRCCMQESLRTVSS

SEQ ID NO: 8772 - protein, 1026 aa, Danio rerio
MSTFLRAVRDNIPEKDKSELTENDLKKWGLGAIHLRPYQLDGVKWLSLCMKNQQGCILGDEMGLGKTCQTISLLAYARGSLKMNGPFLVLCPLAVLENWRQELERFCPSLSVICYTGDKEKRAELQQNLKSDPRFHVLLTTYEMCLKDARYLKSWKWKILVVDEAHRLKNQESLLHQTLKEFTVGFRVLLTGTPIQNNLQEVYSLLTFIQPSVFLPEAVEDFVNAYADIQTEPALVDELHQVLQPFLLRRVKAEVAAELPKKTELVVFHGLSALQKRYYKAILMRDLDAFRTDQSTKTRLLNVLMQLRKCVDHPYLFDGVEPEPFEMGEHLVEASGKLSLLDSMLAYLQEGGHHVLLFSQMTRMLDILQDYLEYRGYSYERLDGSVRGEERNLAIKNFSTKDVFIFLLSTKAGGVGMNLTAADTVIFVDGDFNPQNDLQAAARAHRIGQTRPVKVIRLLGRDTIEEIIYSRAVSKLRLTDTVIEEGRFSLLDQAQSAASGLQLSEILKFGVDKLLSSEESSVQDVDLQLILGQSRDGQWLTDEEHAKLNESNEEEDEDMEGQNHMYYFEGKDYSKDPSAEDEKTFELLLEKQFAEMEDAEKEGRALRNKAGVSLSGPLINPARKKRPLTEAELEERRQKRQAAAAKRAKLQEERKKQQEELNYKKKMAWWDSCGYRSLCLPRVDSEGEDMEPDEDDHVSFSSTDSDHTAIRYVLGDVTHPQADREDAIIVHCVDDSGHWGRGGLFTALGLRSDEPRKQYELAGDMKDLELGNVLLFPVDDKQSRLCGRDYLALIVAQQRDKANKLSGIRLTALDEGLKKIYKAAKQKKASVHLPRIGHSTKGFNWYGTERLIRKHLATRGIFTSIYYYRRGSSHATVSSTASTTTPSSSKPAASSPSESPHSSSPPANREGLTKSAELSTTSHEGPGAPGLADFMRGVHVYFYNMAATEKKKLTRYLITYDGDEEDLMSSHVTHIVGEVESPVHKQELQDLLHQYPQALLVKKNWLESCFASQRKVSVSKYVIRLT

SEQ ID NO: 8773 - protein, 738 aa, Danio rerio
MRRSLAPSQVAKRKQGPDSDDEEDWEPDMEPQSKRDCREKYISPYRKPLTPLTNRPVCADGNEHEAFIRKILSKPFKIPIPNYTGVLGLRALGLRRAGVRKALHDPFEDGALVLYEPPAISAHDLIKADKEKLPVHVVVDPVLSKVLRPHQREGVKFLWDCVTGRRIENSYGCIMADEMGLGKTLQCITLIWTLLKQSPDCKPEIDKVIVVSPSSLVRNWYNEVGKWLGGRVQPVAIDGGSKDEIDSKLVNFISQQGMRIPTPILIISYETFRLHAEVLHKGKVGLVICDEGHRLKNSDNQTYLALNSMNAQRRVLISGTPIQNDLLEYFSLVHFVNSGILGTAQEFKKRFEIPILKGRDADASDKDRAAGEQKLQELISIVNRCLIRRTSDILSKYLPVKIEQVVCCNLTPLQKELYKLFLKQAKPVESLQTGKISVSSLSSITSLKKLCNHPALIYEKCLTGEEGFDGALDLFPQNYSTKAVEPQLSGKMLVLDYILAMTRTTTSDKVVLVSNYTQTLDLFEKLCRNRRYLYVRLDGTMSIKKRAKIVERFNNPSSPEFIFMLSSKAGGCGLNLIGANRLVMFDPDWNPANDEQAMARVWRDGQKKTCYIYRLLSTGTIEEKILQRQAHKKALSSCVVDEEQDVERHFSLGELRELFSLNEKTLSDTHDRFRCRRCVNGRQVRPPPDDSDCTCDLSNWHHCADKRGLRDPVLQASWDAAVSFVFHQRSHEDQRGVV

SEQ ID NO: 8774 - protein, 505 aa, Rachiplusia ou multiple nucleopolyhedrovirus
MDNYKLQLQEFFDQAPDNDDPNFEHQTPNLLAHQKKGIQWMINREKNGRPNGGVLADDMGLGKTLSVLMLIAKNNCLQLKTLIVCPLSLINHWVTENKKHNLNFNMLKYYKSLDADTFEHYHIVVTTYDVLLAHFKLIKQNKQSSLFSNRWHRVVLDEAHIIKNCKTGVHNAACALTATNRWCITGTPIHNKHWDMYSMINFLQCRPFNNPKVWKMLNKNNDSTNRIKSIIKKIVLKRDKSEISSNIPKHTVEYVHVNFNEEEKTLYDKLKCESEEAYVKAVAARETENALSRLQQMQHVLWLILKLRQICCHPYLAMHDKNILETNGCFKMDYMSSKCKRVLDLVDNILNTSDDKIILVSQWVEYLKIFENFFKQKNIATLMYTGQLKVEDRILAETTFNDATNTHRILLLSIKCGGVGLNLIGGNHIVMLEPHWNPQIELQAQDRISRMGQTKNTHVYKMLNVEDNSIEKYIKQRQDKKIAFVNTVFEETLLNYEDIKKFFNL

SEQ ID NO: 8775 - protein, 1163 aa, Chlamydia trachomatis
MLNFRKLRRDFTANILQDGKELFAQGAVVSAKILSMNGETVCISAQIRGSYDNVYECEIEVDRAESDTVDSNCDCSYNYDCQHIVALLFYLEQYFNEMVVTYSKEADLSSNEEVSKELQETFVVAATREEERRDREHQKEILREYNHAANVLSENPFFLPLEYSEKDSAELAVLFVPQKNEGEVFSPNQPIEFQLVLRLPGRSKPFYISNIKTFLEGVLYQEPIVFSGRRFFFTLQSFSASDRKLIDLLIRYARYATGSSEEKLLKSAFLTPASLGMILSKMFEHQMAESGGSQLGERECFQGIFCGNLEEPLLWSVSPAKMKFHLDYFDTPYKALLMKPLIVVDEEELQPEQAVLLESNYPGIIHKNVYHHFLPQIKRAHLRTFAGLRDIAIPEALFGSFCENALPVFRNYAELSNVEALNVFSTLPYTEELQGVCDISYLDGELEARLFFLYDGQKVPATSFSLQYQEVRTFVRPDGILARNLVEERKILEEVFSGFVYDERDGAFHVKSEKKIVEFMTETIPNNQHRITFNCPETLSDQFIYDETVFDLTFRAGEDINYYEAELKVHGLLKGISLDLLWDCVSAKKRFLELPKKGGQLKKARRGKASASKLPCILVLDLEKIAPVIQIFNEIGFQVLDDFVEKCPLWSLSGISPESFKDLPVNFSMTEDLAEIQKQIRGEVDFEFQEVPSQIQATLRGYQKEGVHWLERLRKMHLNGILADDMGLGKTLQTIIAVTQSRLEKGGGCSLIICPTSLVYNWKEEFRKFNPEFKTLVVDGIPSQRRKQLASLEEYDVAITSYNLLQKDIDIYKDFLFDYVVLDEAHHIKNRTTRNAKSVKMIRACHRLILTGTPIENSLEELWSLFDFLMPGLLSSYDRFVGKYIRIGNYMGNKADNVEALRRKVAPFILRRMKEDVLEDLPPVSEILYHCHLTESQRELYQSYAASARQELSRLVKQEGFERIHIHVLATLTRLKQICCHPAIFAKDTPEPGDSAKYDMLMDLLSSLVDSGHKTVVFSQYTKMLGIIRQDLEAKGIPFVYLDGSTKNRLEIVQQFNEDPGLLVFLVSLKAGGTGLNLVGADTVIHYDMWWNPAVENQATDRVHRIGQSRSVSSYKLVTLNTIEEKILSLQNRKKGLVKKVINSDDEVVSKLTWEEVLELLQI

SEQ ID NO: 8776 - protein, 1199 aa, Chlamydia trachomatis
MILNSLSMFRHQATRFLQDNRDSIAVSFSKNTYKITIPDEDSPDGEWISTLSFNDEERLSFAACSCPDGDCCEHLLTATLAAYDPTEGALLHVKFKSSFWWGLFYQLFLSKAPLHAPGDKVYTIQSQQLSVSLQCLSAEALTYWLPIVHASPEPQTISKETFSQSALYRIARELFMFSQKGASLVIQENPQGFPSLFSLQWEGIALSIEVLDVDTLKALFPLLEFSQTSLYSGEPYLLHNVHVVPEQARIYFTKEYPPLPKSIKEYQETVLGPIKYFAEAKKCTSIPKTLSLPIHIIPALDRSFREHLLSQLCYETEERPIHYAIHFLRDASLSFSAYLETPGDLSEGHIIYPGFCYIPNKGLLAVSGLLSPESSFTIRSDHIENFLDEYGPFIKEPGFETFSNQSPVGSLSYNVTEQGVLLFHYDTGNAADIELRFGKWTYYSRQGFFLNSRLDLALQDGLTIEAPQVADFILTHEVALKSIPNFFAAQPPLKSIRFEVHKEKKGSGIYLQPIFEGLEHESCRLFGQFLYRENVGFSLLPAALQMLCQIPTEIPADQVAEFLLQFSKDDRMVFSDPQLALPERVELNILAIHRPHPSSPLHLKIEIKTNIGSIPLGTVLQALKGKKDFLFSKAGFLNLDNCLFVFLKQFLSSQRYDIQENTLITMVTDIFKLDALAPMITDPNIQASEEDLAYFSQLKSACLPPIPVNLFSTDHKLRPYQNSGLLWLWFLYNHRLSGLLCDEMGLGKTHQATALLDIVAQTAKNPKFLVVCPTSVLPHWEHVLASHLPQASLFSFHGPHKPKTLPDCDILITSYGTLRQNYALFYKVSFTVAVFDEIHTAKNKSSQIHKILCRLDAQMKLGLTGTPVENNLIEFKGLLDIILPNYLPSDALFKRLFTHKNASETDEDIISSKDLLLKLTRPFILRRTKKLVLPELPEKVESLIPCRLSPEQSQLYSSTLKKEKCQIQQLEKEEDPASVNYLHVFALLNQLKQICDHPAVYFKDPESYKNHSSGKWAAFVKLLNDSLASGYKVVVFSQYIQMIRIIALYLEEHAIEYALVQGKSQNRKEEIDRFSNDPNCRVFIGSLLAAGTGINLTAGNVVIMYDRWWNPAKENQALDRVHRIGQKNTVFIYKLVTEDTLEEHIHYLIEKKMRLLNQVTTTQDSNILHVLNREDLITILSYKDEHMLSEEVQEDSGDS

SEQ ID NO: 8777 - protein, 954 aa, Mycobacterium tuberculosis CDC1551
MLLPSLRSAPLDSPELIRLAPRPAARTDPMLLAWTVPVVDLDPTAALAAFDQPAPDVRYGASVDYLAELAVFARELVERGRVLPQLRRDTHGAAACWRPVLQGRDVVAMTSLVSAMPPVCRAEVGGHDPHELATSALDAMVDAAVRAALSPMDLLPPRRGRSKRHRAVEAWLTALTCPDGRFDAEPDELDALAEALRPWDDVGIGTVGPARATFRLSEVETENEETPAGSLWRLEFLLQSTQDPSLLVPAEQAWNDDGSLRRWLDRPQELLLTELGRASRIFPELVPALRTACPSGLELDADGAYRFLSGTAAVLDEAGFGVLLPSWWDRRRKLGLVLSAYTPVDGVVGKASKFGREQLVEFRWELAVGDDPLSEEEIAALTETKSPLIRLRGQWVALDTEQLRRGLEFLERKPTGRKTTAEILALAASHPDDVDTPLEVTAVRADGWLGDLLAGAAAASLQPLDPPDGFTATLRPYQQRGLAWLAFLSSLGLGSCLADDMGLGKTVQLLALETLESVQRHQDRGVGPTLLLCPMSLVGNWQQEAARFAPNLRVYAHHGGARLHGEALRDHLERTDLVVSTYTTATRDIDELAEYEWNRVVLDEAQAVKNSLSRAAKAVRRLRAAHRVALTGTPMENRLAELWSIMDFLNPGLLGSSERFRTRYAIPIERHGHTEPAERLRASTRPYILRRLKTDPAIIDDLPEKIEIKQYCQLTTEQASLYQAVVADMMEKIENTEGIERRGNVLAAMAKLKQVCNHPAQLLHDRSPVGRRSGKVIRLEEILEEILAEGDRVLCFTQFTEFAELLVPHLAARFGRAARDIAYLHGGTPRKRRDEMVARFQSGDGPPIFLLSLKAGGTGLNLTAANHVVHLDRWWNPAVENQATDRAFRIGQRRTVQVRKFICTGTLEEKIDEMIEEKKALADLVVTDGEGWLTELSTRDLREVFALSEGAVGE

SEQ ID NO: 8778 - protein, 1013 aa, Mycobacterium tuberculosis H37Rv
MLVLHGFWSNSGGMRLWAEDSDLLVKSPSQALRSARPHPFAAPADLIAGIHPGKPATAVLLLPSLRSAPLDSPELIRLAPRPAARTDPMLLAWTVPVVDLDPTAALAAFDQPAPDVRYGASVDYLAELAVFARELVERGRVLPQLRRDTHGAAACWRPVLQGRDVVAMTSLVSAMPPVCRAEVGGHDPHELATSALDAMVDAAVRAALSPMDLLPPRRGRSKRHRAVEAWLTALTCPDGRFDAEPDELDALAEALRPWDDVGIGTVGPARATFRLSEVETENEETPAGSLWRLEFLLQSTQDPSLLVPAEQAWNDDGSLRRWLDRPQELLLTELGRASRIFPELVPALRTACPSGLELDADGAYRFLSGTAAVLDEAGFGVLLPSWWDRRRKLGLVLSAYTPVDGVVGKASKFGREQLVEFRWELAVGDDPLSEEEIAALTETKSPLIRLRGQWVALDTEQMRRGLEFLERKPTGRKTTAEILALAASHPDDVDTPLEVTAVRADGWLGDLLAGAAAASLQPLDPPDGFTATLRPYQQRGLAWLAFLSSLGLGSCLADDMGLGKTVQLLALETLESVQRHQDRGVGPTLLLCPMSLVGNWPQEAARFAPNLRVYAHHGGARLHGEALRDHLERTDLVVSTYTTATRDIDELAEYEWNRVVLDEAQAVKNSLSRAAKAVRRLRAAHRVALTGTPMENRLAELWSIMDFLNPGLLGSSERFRTRYAIPIERHGHTEPAERLRASTRPYILRRLKTDPAIIDDLPEKIEIKQYCQLTTEQASLYQAVVADMMEKIENTEGIERRGNVLAAMAKLKQVCNHPAQLLHDRSPVGRRSGKVIRLEEILEEILAEGDRVLCFTQFTEFAELLVPHLAARFGRAARDIAYLHGGTPRKRRDEMVARFQSGDGPPIFLLSLKAGGTGLNLTAANHVVHLDRWWNPAVENQATDRAFRIGQRRTVQVRKFICTGTLEEKIDEMIEEKKALADLVVTDGEGWLTELSTRDLREVFALSEGAVGE

SEQ ID NO: 8779 - protein, 1046 aa, Xenopus laevis
MSAESTEQQPDTVVKEEKEGKDPMEVDSGDGKKQEQDGEAVKEEAMEDGEPDDDDDDDSLNKSKEGNEMDPAYEKKRKTDRSNRFDYLLKQTELFAHFIQPAAQKTPTSPLKMKPGRPRLKKDEKQDLLSAGDNRHRRTEQEEDEELLTESSKTTNVCTRFEDSPAYVKSGKLRDYQVRGLNWLISLYENGINGILADEMGLGKTLQTISLLGYMKHYRSIPGPHMVLVPKSTLHNWMAEFKRWVPSLCAVCLIGDKDHRAAFVRDVLLPGEWDVCVTSYEMLIREKSVFKKFNWRYLVIDEAHRIKNEKSKLSEIVREFKTTNRLLLTGTPLQNNLHELWALLNFLLPDVFNSSEDFDSWFDTNNCLGDQKLVERLHMVLKPFLLRRIKADVEKSLKPKKEIKIYVGLSKMQREWYTKILMKDIDILNSSGKTDKMRLLNILMQLRKCCNHPYLFDGAEPGPPYTTDLHLATNSGKMMVLDKLLPKLKEQDSRILIFSQMTRVLDILEDYCMWRNYEYCRLDGQTPHEERQESIIAYNAPGSTKFIFMLSTRAGGLGINLATADVVIIYDSDWNPQVDLQAMDRAHRIGQTKTVRVFRFITDNTVEERIVERAEMKLRLDSIVIQQGRLVDQNLNKLGKDEMLQMIRHGATHVFASKDSEITDEDINAILERGEKKTAEMNEKLSNMGESSLRNFPPDTESSVYNFEGEDYREKQKMAFTQWIEPPKRERKANYAVDAYFREDLRVSEPKVPKAPRPPKQPNVRSFQFFPPRLFELLEKEILYYRKTIGYKVPRNPDLPNSAQVQKEEQLKIDEAEPLNDEELEEKEKLLTQGFTNWNKRDFNQFIKANEKWGRDDIENIAREVEGKTPEEVIEYSAVFWERCNELQDIEKTMAQIERGEARIQRRISIKKALDTKIGRYKAPFHQLRISYGTNKGKNYTEEEDRFLICMLHKLGFDKENVYDELRQCIRNSPQFRFDWFLKSRTAMELQRRCNTLITLIERENLELEEKEKAEKKKRGPRPSSAQKRKVDGTPDGRGRKKKLKL

SEQ ID NO: 8780 - protein, 1893 aa, Xenopus laevis
MASGLGPSSPGSDGEIEVMLNSSIHQDDDLNEDLSEVETPKIKKKKKPKKAKESKSTKVKRQKKEDVDDSSGEGNDYGDNDGGPIRSDSEGSDYTPGKKKKKKMTPKREKKSKVKRDEDDDDDDDDDDSKEPKSSGQLLDDWGMEDIDHVFTEDDYRTLTNYKAFSQFVRPLIAAKNPKIAVSKMMMVLGAKWREFSTNNPLKGSSGASVAAAAAAAVAVVESMVASTEVIVPPPPPPPPPVVEVPLRKAKTKEGKGPNARKKPKVVRPPETKKTPKAKKVAPLKIKLGGFGSKRKRSSSEEEDIDADSDYDEGSMNSLSVSDGSTSKSSRSRKKLKATKKKKKEEEGAAAGADGYETDHQDYCEVCQQGGEIILCDTCPRAYHMVCLDPDMDKAPEGKWSCPHCEKEGVQWEAKEDNSELDDDLDDAVGDPEEEDHHMEFCRVCKDGGELLCCDVCPSSYHIHCLNPPLPEIPNGEWLCPRCTCPPLKGKIQKILTWKWGQPPPPTPVSRPADSDPDAAPLKPLEGRPEREFFVKWHAMSYLHCSWVTELQLELHCQVMFRNYQRKNDMDEPPAGDYGVDEEEKSRKRKNKDPKYLEMEEKFYRYGIKPEWMMIHRVLNHSVDKKGYVHYLIKWRDLAYDQASWEAEESDIQDYDIYKQGYWNHRELMCGDEGRPGKKVKKVKLRKLDRPPDTPAVDPTVKYDRQPDYLDATGGTLHPYQLEGLNWLRFSWAQGTDTILADEMGLGKTVQTAVFLYSLYKEGHSKGPFLVSAPLSTIINWEREFEMWAPDMYVVTYVGDKDSRAVIRENEFSFEGNAIRGGKKASRMKKEASVKFHVLLTSYELITIDTAVLGSIDWACLVVDEAHRLKNNQSKFFRVLNGYPLQHKLLLTGTPLQNNLEELFHLLNFLTPERFNNLEGFLEEFADIAKEDQIKKLHDMLGPHMLRRLKADVFKNMPSKTELIVRVELSPMQKKYYKFILTRNFEALNTRGGGNQVSLLNVVMDLKKCCNHPYLFPVAAMEAPKMPNGMYDGSALIKGAGKLFLLQKMLRKLKDDGHRVLIFSQMTKMLDLLEDFMEHEGYKYERIDGGITGNMRQEAIDRFNAPGAQQFCFLLSTRAGGLGINLATADTVVIYDSDWNPHNDIQAFSRAHRIGQNRKVMIYRFVTRASVEERITQVAKKKMMLTHLVVRPGLGSKTGSMSKQELDDILKFGTEELFKDEATEGGENKEGEDISVIHYDDKAIARLLDRNQDETEEPELQLGMNEYLSSFKVAQYVVREEEMGDEEEVVREIIKQEESVDPDYWEKLLRHHYEQQQEDLARNLGKGKRIRKQVNYNDGSQEDRDWQDDQSDNQSDYSVASEEGDEDFDERSEAARRPNRKGLRNDKDKPLPPLLARVGGNIEVLGFNARQRKAFLNAIMRYGMPPQDAFTTQWLVRDLRGKSEKEFKAYVSLFMRHLCEPGADGAETFADGVPREGLSRQHVLTRIGVMSLIRKKVQEFEHVNGRWSMPELAEAEENKMASKIDSPSPKTPTSSTPGDTQPNTPAPPASNEDSTKSEEVPVKEETTDNEVKPTEENNETTQPTPDTQSPAAQTEEKKEEPVQQERTSPPPPPPPPPPAPEPMETDQKPEPEKVDEVITLDDKKDDVQEVTLQNGETPKETAEEKTKKASAAAAKQRFMFNIADGGFTELHSLWQNEERAATVTKKTYEIWHRRHDYWLLSGIITHGYARWQDIQNDVRYAILNEPFKGEVNRGNFLEIKNKFLARRFKLLEQALVIEEQLRRAAYLNMSEDPSHPSMALNTRFAEVECLAESHQHLSKESMAGNKPANAVLHKVLKQLEELLSDMKADVTRLPATIARIPPVAVRLQMSERNILSRLASRGGEPQPQQITQQ

SEQ ID NO: 8781 - protein, 159 aa, Chlamydophila abortus
GILADDMGLGKTLQAIIAITQSKLEKGKGCSLIVCPTSLVYNWKEEFRKFNPEFKAVIIDGVPSHRRRQLATLSDYDVAITSYNLLQKDIDVYKDFVFDYVVLDEAHHIKNRTTRNAKSVKMIRSGHRLILTGTPIENSLEELWSLFDFLMPGLLSSYD

SEQ ID NO: 8782 - protein, 1181 aa, Chlamydia muridarum
MQTGTSNRSVNPLCFRGEMLNFRKLRRDFTANILQDGKELFTQGAVVSAKILSMNSETVCISAQIRGSYDNVYECEIEVDRAESDTIDSNCDCSYNYDCQHIVALLFYLEQYFNEMVVTYSKEAGLSSNEEVSKELQETFVVAATREEERRDREHQKEILREYNHAANVLSENPFFLPLEYSEKDSAELAVLFVPQKNEKEVFSPNQPIEFQLVLRLPGRSKPFYISNIKTFLEGVLYQEPIVFSGRRFFFTLQSFSASDRKLIDLLIRYARYATGNAEEKLLKSAFLTPASLGMILSKMLEHQMAESGGVKLGERECFQGIFCGNLEEPLFWSVSPAKMKFHLDYFDTPYKALLMKPLVVVDEEEIQPEHAVLLESNCPGIIHKNVYHHFLPQIKRAHIRTFAGLRDVAIPEALFGSFCENALPVFRDYAELSNIEALNVFSTLPYTEELRGVCDISYLDGELEAKLFFLYDGQRVPATSFSLQYQDVRAFVRPDGILARNLVEERKILEEVFAGFIYDERDGAFHVKSEKKIVEFMTETIPNNQHRITFNCPETLSDQFIYDETVFDLTFRAGADINYYEAELKVHGLLKGISLDLLWDCISAKKRFLELPKKGCQLKKARRGKAQASKLPCILVLDLEKIAPVIQIFNEIGFQVLDDFVEKCPLWSLSGISSASFKNLPVNFSMTEDLAEIQKQIRGEVDFEFQEVPSQIQATLRSYQKDGVHWLERLRKMHLNGILADDMGLGKTLQTIIAVTQSRLEKGGGCSLIICPTSLVYNWKEEFRKFNPEFKTLVIDGIPSQRRKQLSSLEEYDVAITSYNLLQKDIDIYKDFLFDYVVLDEAHHIKNRTTRNAKSVKMIRACHRLILTGTPIENSLEELWSLFDFLMPGLLSSYDRFVGKYIRIGNYMGNKADNVEALRRKVAPFILRRMKEDVLEDLPPVSEILYHCHLTESQRELYQSYAASARQELSRLVKQEGFERIHIHVLATLTRLKQICCHPAIFAKDTPEPGDSAKYDMLMDLLGSLVDSGHKTVVFSQYTKMLGIIKQDLEAKGVPFVYLDGSTKNRLEIVQQFNEDPSLLVFLVSLKAGGTGLNLVGADTVIHYDMWWNPAVENQATDRVHRIGQSRSVSSYKLVTLNTIEEKILSLQNRKKGLVKKVINSDDEVVSKLTWEEVLELLQI

SEQ ID NO: 8783 - protein, 1202 aa, Chlamydia muridarum
MILMILNSLSMFRRQATRFLQDNRESIAVSFFKNTYKITIPDEDSPDGEWISTLSFNEEERLSFAACSCPDGDCCEHLLIATLAAYTPTEGALLHTKFEASFWWRLFCKLFLSKASLQAPGEKIYTVKSEQISVSIQCLSAESLTSWLPIVHNSPEPQKITEETFPQSALYRIARELFLYTQKGASLIVQENPQGFPSLFSFQWAGISLTIEILDVDTLKELFPLLELSQTSLYNGDSYLLRDVHVVPEQAKIYFTKEYPPLSKSIREYQATNLGSIEYFAGAHKCTAIPQKLSLPIHIIPALDHSFREQLLSQLCYETEERPIHYDIHFFRDASLSFSAYLETPGDLAEGHIIYPGFCYIPNKGLLAVSGLLSPESTFTIRADHIESFLDEYGALIKEPGFETFSNKSPTGTLSYSVTEQGVLLFHYDTGNSSDIELNFGKWTYYSRQGFFLNSRLDLALQDGLTIEAPHVADFILKHEVALKSIPNFFAPQPPLKTIRFEVHKEKKGVGIYLKPIFEGLEQESCRLFGQFLYRENIGFSLLPASLQMVCQIPTEVPANQVTEFLLQFSKDDRMIFPDPQLALPEQVQLNILSIQRPHPSSPLHLKLEIKTNIGSISLGTVLQALKGKKEFLFSKAGFLNLDNCLFVFLKQFLSSQRYDIQESTLITMVTDIFKLDALAPLITDPNIDASEEDLAYFSQLKSACLPPIPMNLFSTDHKLRPYQNSGLLWLWFLYNHRLSGLLCDEMGLGKTHQATALLDIVAQTAKNPKFLVVCPTSVLPHWELVLASHLPKATLFSFHGPHKPKTLPDCDIIITSYGTLRQNYALFYKVSFTVAVFDEIHMAKNKSSQIHKILCRLDAQMKLGLTGTPVENNLIEFKGLLDIILPNYLPSDGLFKRLFTHKNSSETDENIVSSKDLLLKLTRPFILRRTKKLVLPELPDKVESLIPCQLSPEQAQLYASTLKKEKCQIQQLEKEDDPAAVNYLHVFALLNQLKQICDHPAIYFKDPESYKNYASGKWAAFVKLLNDSLASGYKVVVFSQYIQMIRIISLYLEEQNIQYALVQGKSQNRKEEIDRFSNDPNCRVFIGSLLAAGTGINLTAGNVVIMYDRWWNPAKENQALDRVHRIGQKNTVFIYKLVTEDTLEEHIHYLIEKKMRLLNQVTTTQDSNILHVLNREDLITILSYKDEHGLSDEVQEDSGDS

SEQ ID NO: 8784 - protein, 1063 aa, SYNECHOCOCCUS SP. WH 8102
MSLLHATWLPAIRTSGSSGQPALLIWADTWRVATPEGPGLTPALHPFTLEPDDLKAWLQERDLLPGGSIDATACLTLPSRTVKPRKSRSKTAEPAPEEPIWTGLPMQAGEPIPKQTEWWPWQVQGLAVEPSAATEWLSRLPLSGRNPDLADELRWWSHLQRWALSLVARGRWIPQMELSKGEGYPHRARWVPLLNREEDRRRLEDLAASLPLVATCALPWREPMGRRSNRMTRLRPEAMRAANPVACCRPRSGRLRVATLLEDLVDAQLRKDFEPSTDGLDPLLTLWQDALGSETGVIEIGDEQAERLASASFHWREGIAGDFAAARTCLELQTPAEGEELWELRFGLQAESDPSLKLPAAAAWASGADQLQLGEVTVEQPGEVLLEGLGRALTVFPPIERGLETATPDTMQLTPAEAFVLVRTAARQLRDAGVGVDLPPSLSGGLASRLGLAIKAELPERSSGFSLGESLDWSWDLMIGGVTLTLRELERLSGKRSPLVRHKGAWIELRPNDLRNAERFCGANPELSLDDALRITATEGDLLMRLPVHRFEAGPRLQAVLEQYHQQKAPDPLPAPEGFCGQLRPYQERGLGWLAFLNRFDQGACLADDMGLGKTIQLLAFLQHLKAEQELKRPVLLVAPTSVLTNWRREAEAFTPELAVREHYGPRRPSTPAALKKALKDVDLVLTSYGLLQRDSELLESQDWQGVVIDEAQAIKNPSAKQSQAARDLARPAKGNRFRIALTGTPVENRVSELWALMDFLSPKVLGEEDFFRQRYRMPIERYGDMASLRDLKARVGPFILRRLKTDKTIISDLPEKVELSEWVGLSKEQKSLYSKTVEDTLDAIARAPRGQRHGQVLGLLTRLKQICNHPALALSENAVDDGFLGRSAKLQRLEEILDEVIEAGDRALLFTQFAEWGHLLQSWMQQRWKADVPFLHGGTRKNERQAMVDRFQEDPRGPQLFLLSLKAGGVGLNLTRASHVFHIDRWWNPAVENQATDRAYRIGQTNRVMVHKFITSGSVEEKIDRMIREKSRLAEDVIGSGEDWLGCLAGDQLRNLVALEDT

SEQ ID NO: 8785 - protein, 539 aa, SYNECHOCOCCUS SP. WH 8102
MGDLISDSGSLSCGLDLSAAGLIRVVCPFDAVTQAQLRRIRPRGSWMGPSRGWEFPLAAAAALIQGFGTRFPVTPQLQQWLDWCHHPLPPLPPHRDLVAAADLTMALRDGRRPLPHQRSGARWLLARRGAVLADEMGLGKTLTALLAARAMVRCAELRVMVVAPVGLHAHWRREAETVDLQPELVSWARLPAELPPAGTLLVVDEAHFAQSLQANRTAALLRLARHPRLRAIWMLTGTPMKNGRPAQLYPLLAAMDHPIARDQRQFEERYCQGHWREQRGQRRWQASGATQLEELRRLTRPLILHRRKAQVLELPPKQRREHPIALSDAESLGFDHRIDLLVDDFRRRALKGEVRSDAEPLAVLTALRRVAAEFKLPAAETLVRTLLQAGEAVVLFSGFVEPLQLLQQRLGGALLTGRQRPVERQQAVDCFQQGGEDLLLATFGTGALGFTLHRARHVVLLERPWTPGDVAQAEDRCHRLGMEDEVLTCHWLQLGPADQLVDGLVASKAERIEILLGPRRLTLERQSLPLMVRRCLQVA

SEQ ID NO: 8786 - protein, 995 aa, Bacillus halodurans
MIPNIIVHGGWFKDHFFIWGEEQASSSSGRIVRFEYPFLYSPFELRLALFRHDPHSFYGSFLQHGQAVLEVPLAERAFHSPAGTTTIYQAEPSMKSFRFPVEGIMLSADELFDYGSFLSKLGSSSSDEWVLADDFHFWLHFFLYIRQSIRNGAFSPSAQGTWVLNNPHWKAWAEAMPEVCLALTENAPLIQTTEEEPVHEQLQAIGEHLTDKWIRRLLQTDKGKDRFLSYVQSLHPSVKRTLEQMGPYGEGPTEETHSEKVDRDHFLEAVGVKPQAPFQCAFVLKEPITGKTDWTLSLCVVDKVNPSIIVEMEELSQGQHPWRMNPVPLLKERLPAVTDRLPLLQSIKLSSPVIKLSNEEAYHLFTTYDEYLKELGFRLIVPRWLTQRRPLKVKLKMDAHALHSEVEPLLNWQSVASFQYELAIGDNRVSLEEFQTFVDENRPFLQLNGEWIAWDPSLAKKLRAYLNKLEHGQTTYLDAWRLEQSEEGSFQEAVEWELEWSAEIEQKIKQLFQQNVPLRPAPASLQATLRPYQEEGASWLIHLRETGFGGCLADDMGLGKTVQTISYILYVLEHGQQNKKPFLLFCPTSLITNWVHECKTFAPSLNVYVHHGQQRHQENETAWREADIVISSYSLAYKDLDQWKDIEWNGLILDEAQQIKNVDTKQRQAVKSIRAAHRIALTGTPIENRLKELWSIMDVLNPSYLKSLTHFTRTFIKPIEREKDEARLQELQQLIQPLLLRRKKSDEALALQLPEKREHVHRVSLSVEQAALYQAVVDNMVHQLGDVTHMERRALILKTLTKLKQICNHPAHFLKDKNVDAHQSEKWELLLTLSEQIMDRQEKMLIFTQFKEMGHLMQDAFQSQIGTPIPFLHGSLSRQQRQEAVERFQNDRELPIFILSLKAGGVGLNLTAANHVIHYDRWWNPAVENQATDRAYRIGQTADVTVHKLMTEGTLEERIHQMLESKQALAEQILTAGENQLTELTDDELLALIRL

SEQ ID NO: 8787 - protein, 566 aa, Bacillus halodurans
MDIQIQYSTDWKEEFLKRLEDGGPWSNWEMGKLAYEAANYQVIPEFHGLQAPKHLPQLQPFPHQMEVAQTVIEQMNGKAILADEVGLGKTIEAGLILKEYMIRGLAKKVLILVPASLVSQWAYELSSKFYIPAIPQKKAYVWEQYDVVVASIDTAKRQPHRDIVLNQHYDLVIIDEAHKLKNPKTKNYAFIKSLKRKYCLLLTATPVQNKLEEIFNLVSLLKPGHLGDLESFEKEYRANKRAPKNEDKLKELVNKVMVRNRREETGIEWTKRIVQTVPITFSEGERAFYHAITKLKQQPDVMTNSFSLLTLQREICSSREAAFMTLKNMITKLEQEGRTSPILESLIEQVGTIEGHAKAEKALELIQQINDKVIIFTEYRATQLYLQWYLKQHGISSVPFRGGFKRGKKDWMRQLFENRAQVLIATEAGGEGINLQFCHHIINYDLPWNPMRIEQRIGRIHRLGQTEDVRIYNFAVKDTIEEQILTLLYEKIQLFERVVGELDDILTKMNVGSIEEHIRDIFVHSDSEGEMKIKLDHLSAIMNDVANEKEEDHATGATASVSDALL

SEQ ID NO: 8788 - protein, 577 aa, Bacillus halodurans
MNIIPVSKQQKLHLTKELSPLKNIKLKLQSQAIQLQKGFDRLICLDEVYLEPRPWQYETAIKVLRDMQGSAILADEVGLGKTIEAGLIIKELLVRGLINSVLILVPAPLVEQWRDEMNDKFKIQLTDLKEEGWEEQNLLISSMPYLVRSKKRQEIINKRTFDLLVVDEAHCLKNHRTQTYKFVYTIQKNNTLLMSATPIQNDMRELFNLVNILKPGFLKSRKKFREQFIVNRYTPKNIEALRDLLNKVMIRHRRSDTLVELPRRVIRNVEIELTEIERNFHNGVIDFCRDTYKKYMEGDIQIGWDKTRVHLIVLILLSLLKQNCSSPQASLSTLRTKMFPRLDGVDKKNCLDLIQLGERITAPSKAIELLKLLKQSDEQAIVYSEYRVTIDLLSELLEEHDFTVTTYHGRLSSREKQQSIERFKNKEAQVFISSESGGQGLNLQFCRRLINFDLPWNPMRIEQRIGRVHRFGQVNDVEIYTMPTKGAIDEYLLYTLTSKVNLFEVVIGELDTILSYMKNNDESFELRIGKIILESKNSAEVEEQLRSISDEFLTAKQELDQDVDQATKILNTIGVGT

SEQ ID NO: 8789 - protein, 965 aa, Dichelobacter nodosus
MESLWQYSTVHNSACKVIEEQTLWGQTVCRVWLPNQDAVVRVPRSALRPLNADLQPEIEAGRIAYVAAAAKVAEVLEGSTSATEGYVLLAPMESNVIPLPHQIHALSRAISGDRVRYLLADEVGLGKTIEAGLVMRELKLRGLVRRTLVVSPKGIATQWVAEMQTHFNEQFQLVLGDDIGTLQRLAPGADHRSSAWSMFDQVIVSLDSVKPMDKRRGWTAERVAEYNRSRFEDLITAGWDLVIVDEAHRLGGSTDQVARYKLGKGLAEAAPYVLLLSATPHQGKTDAFHRLMNLLDDDAFPDMDSVSRERVASYVIRTEKRKAIDADGKPLFKPRRTQMAPVAWESRHQLQQLLYEAVTDYVREGYNQALREKKRHIGFLMILMQRLVVSSTRAIRTTLERRLAALKDGEQQASLRLAELENGADGLESPDDEIAELYDMDGQELLDELLKSHVSALQSEGSHVETLLDAAVRCEQAGPDAKAEALIEWIYKLQAEENEPDLKVLIFTEFVPTQQMLKEFLEARGISVVTLNGSMAMEERGAAQDAFRKSHRVLVSTDAGGEGLNLQFAHVIINYDIPWNPMRLEQRIGRVDRIGQPKTVQAINFVFEDSVEFRVREVLEQKLSVIFDEFGIDKTGDVLDSAQAGELFEDVFASAILNPDGIETSVDHTVARIRDEIQQVRESSAIYGISEEPDVQTAERLRSHPLPHWVERMTVGYLNSHGGAASRKRSWWDLNWPDGQEHRKAVFSAREADRLTDATLLNLENSRIRGLALNLPQVAAGQPLPCVTVSGLPASISGLWGLFEIRLQAGMHQKTQLLRIPMVRRGYVSVFLSEEGKLFLPTARHIWDALQTAEAEVQATLGQDDSITAHERLQIAAEQAGQELFDALQQAHLASVNREEERGMVAFTSRRKAIERVGLPEVRQYRLARCAAEENEWRHELQSARQIVPEIRSLLMLRIIKGGAQ

SEQ ID NO: 8790 - protein, 211 aa, Struthio camelus
SFLNYLFHEHQLYGPFLLVVPLSTLTSWQREIQTWAPQMNAVVYLGDITSRNMIRTHEWMHPQTKRLKFNILLTTYEILLKDKSFLGGLNWAFIGVDEAHRLKNDDSLLYKTLIDFKSNHRLLITGTPLQNSLKELWSLLHFIMPEKFSSWEDFEEEHGKGREFGYASLHKELEPFLLRRVKKDVEKSLPAKVEQILRMEMSALQKQYYKW

SEQ ID NO: 8791 - protein, 1568 aa, Gallus gallus
MSTPTDPGAMPHPGPSPGPGPSPGPILGPSPGPGPSPGSVHSMMGPSPGPPSVPHQMPAMGATDYPQEGMHQMHKSIDGLHEKGMVEDVHCGSMKTMRPPHPGMGPPQSPMDQHSQGYMSPHPSPLGAPEHVSSPMSGGGPTPPQMTPSQPGPIIPGDPQVMNQPNRGPSPFSPVQLHQLRAQILAYKMLARGQPLPENLQLAVQGKRTLPGIQQQEPPSAFNRQSGIGMHPMSGAATGPGPAAGIPGHTAAITSKTWNEGQTPDMSVSSAPQKLPAPSPSGRPSPAPTAAQPAAAMPGPSVPQPPPGQPSPIVQLQQKQNRISPIQKPQGLDPVEILQEREYRLQARIAHRIQELENLPGSLPPDLRTKATVELKALRLLNFQRQLRQEVVACMRRDTTLETALNSKAYKRSKRQTLREARMTEKLEKQQKIEQERKRRQKHQEYLNSILQHAKDFKEYHRSVAGKIQKLSKAVATWHANTEREQKKETERIEKERMRRLMAEDEEGYRKLIDQKKDRRLAYLLQQTDEYVANLTNLVWEHKQAQAAKEKKKRRRRKKKAEENAEGMASGLGPDGEPIDESSQMSDLPVKVTHTETGKVLLGPEAPKASQLDAWLEMNPGYEVAPRSDSEDESGSEYEEEDDEEESSRLEADEKILLDPNSEEVSEKDAKQIIETAKQDVDDEYSMQYSARGSQSYYTVAHAITERVEKQSSLLINGTLKHYQLQGLEWMVSLYNNNLNGILADEMGLGKTIQTIALITYLMEHKRLNGPYLIIVPLSTLSNWTYEFDKWAPSVVKISYKGTPAMRRSLVPQLRSGKFNVLLTTYEYIIKDKHILAKIRWKYMIVDEGHRMKNHHCKLTQVLNTHYVAPRRILLTGTPLQNKLPELWALLNFLLPTIFKSCSTFEQWFNAPFAMTGERVDLNEEETILIIRRLHKVLRPFLLRRLKKEVESQLPEKVEYVIKCDMSALQKILYRHMQAKGILLTDGSEKDKKGKGGAKTLMNTIMQLRKICNHPYMFQHIEESFAEHLGYSNGVINGAELYRASGKFELLDRILPKLRATNHRVLLFCQMTSLMTIMEDYFAFRNFLYLRLDGTTKSEDRAALLKKFNEPGSQYFIFLLSTRAGGLGLNLQAADTVIIFDSDWNPHQDLQAQDRAHRIGQQNEVRVLRLCTVNSVEEKILAAAKYKLNVDQKVIQAGMFDQKSSSHERRAFLQAILEHEEENEEEDEVPDDETLNQMIARREEEFDLFMRMDMDRRREDARNPKRKPRLMEEDELPSWIIKDDAEVERLTCEEEEEKIFGRGSRQRRDVDYSDALTEKQWLRAIEDGNLEEMEEEVRLKKRKRRRNVDKDSGKEDGEKAKKRRGRPPAEKLSPNPPKLTKQMNAIIDTVINYKDSSGRQLSEVFIQLPSRKELPEYYELIRKPVDFKKIKERIRNHKYRSLGDLEKDVMLLCHNAQTFNLEGSQIYEDSIVLQSVFKSARQKIAKEEESEDESNDDEDEDDEEESESESKSVKVKIKLNKKDEKSREKGKGKKRQSRAKAKPVVSDDDSDEDQDENDQSEASGSDDE

SEQ ID NO: 8792 - protein, 1630 aa, Gallus gallus
MSTPDPPLGGTPRPGPSPGPGPSPGAMLGPSPGPSPGSEHSMMGPSPGPPTAGHPLPPQGPGAYAQDNMHQMHKPMDSMHEKGMAEDPRYGQMKGMGMRPGAHAGMGPPPSPMDQHSQGYPSPLGGSEHASSPVPANGPSSGPQLPSGPSGVPMDGADPQALGQQNRGPTPFNQNQLHQLRAQIMAYKMLARGQPLPDHLQMAVQGKRPMPGMQQQMPTLPPPSVSGTGAVQGPVQGPGPGPTPPNYNRPHGIGGANMPPPGPSGVPPGMSGQPPGGPPKPWPEGPMANAAAPTSAPQKLIPPQTTGRPSPAPPAVPPAVSPVCPPQTQSPGQPAQPAPMVQLHQKQNRITPIQKPRGLDPVEILQEREYRLQARIAHRIQELENLPGSLAGDLRTKATIELKALRLLNFQRQLRQEVVVCMRRDTALETALNAKAYKRSKRQSLREARITEKLEKQQKIEQERKRRQKHQEYLNSILQHAKDFKEYHRSVTGKIQKLTKAVATYHANTEREQKKENERIEKERMRRLMAEDEEGYRKLIDQKKDKRLAYLLQQTDEYVANLTELVRQHKAAQVAKEKKKKKKKKKAENAEGQTAAIGPDGEPLDETSQMSDLPVKVIHVESGKILTGTDAPKAGQLEAWLEMNPGYEVAPRSDSEESGSEEEEEEEEEEQPQPAQPTLPVEEKKKIPDPDSDDVSEVDARHIIENAKQDVDDEYGVSQALARGLQSYYAVAHAVTERVDKQSTLMVNGVLKQYQIKGLEWLVSLYNNNLNGILADEMGLGKTIQTIALITYLMEHKRINGPFLIIVPLSTLSNWAYEFDKWAPSVVKVSYKGSPAARRAFVPQLRSGKFNVLLTTYEYIIKDKHILAKIRWKYMIVDEGHRMKNHHCKLTQVLNTHYVAPRRLLLTGTPLQNKLPELWALLNFLLPTIFKSCSTFEQWFNAPFAMTGEKVDLNEEETILIIRRLHKVLRPFLLRRLKKEVEAQLPEKVEYVIKCDMSALQRVLYRHMQAKGVLLTDGSEKDKKGKGGTKTLMNTIMQLRKICNHPYMFQHIEESFSEHLGFTGGIVQGLDLYRASGKFELLDRILPKLRATNHKVLLFCQMTSLMTIMEDYFAYRGFKYLRLDGTTKAEDRGMLLKTFNEPGSEYFIFLLSTRAGGLGLNLQSADTVIIFDSDWNPHQDLQAQDRAHRIGQQNEVRVLRLCTVNSVEEKILAAAKYKLNVDQKVIQAGMFDQKSSSHERRAFLQAILEHEEQDESRCGAASSLCLTAEPEEPPLKEEDEVPDDETVNQMIARHEEEFDLFMRMDLDRRREEARNPKRKPRLMEEDELPSWIIKDDAEVERLTCEEEEEKMFGRGSRHRKEVDYSDSLTEKQWLKAIEEGTLEEIEEEVRQKKSSRKRKRDAEGPPAPPVSTRSREKDEDSKKQKKRGRPPAEKLSPNPPNLTKKMKKIVDAVIKYKDSSSGRQLSEVFIQLPSRKELPEYYELIRKPVDFKKIKERIRNHKYRSLNDLEKDVMLLCQNAQTFNLEVSLIYEDSIVLQSVFTSVRQKIEKEEESEGEDSEEEEEGEEEGSESEARSVKVKIKLGRKEKAQERLKGRRRASRGSRAKPVVSDDDSDEEQEEERSGSGTEED

SEQ ID NO: 8793 - protein, 1808 aa, Gallus gallus
MNGHSDEESVRNSSGESSRSDDDSGSASGSGSGSSSGSSSDGSSSQSGSSDSESGSESGSQSESESDTSREKKQVQAKPPKADGSEFWKSSPSILAVQRSAVLKKQQQQQKAASSDSGSEEDSSSSEDSADDSSSETKKKKHKDEDWQMSGSGSVSGTGSDSESAEDGDKSSCEESESDYEPKNKVKSRKPPSRIKPKSGKKSTGQKKRQLDSSEEEEDDDEDYDKRGSRRQATVNVSYKEAEETKTDSDDLLEVCGEDVPQTEEDEFETIEKFMDSRIGRKGATGASTTIYAVEADGDPNAGFEKSKELGEIQYLIKWKGWSHIHNTWETEETLKQQNVKGMNKLDNYKKKDQETKRWLKNASPEDVEYYNCQQELTDDLHKQYQIVERIIAHSNQKSAAGYPDYYCKWQGLPYSECSWEDGALIAKKFQARIDEYFSRNQSKTTPFKDCKVLKQRPRFVALKKQPSYIGGHESLELRDYQLNGLNWLAHSWCKGNSCILADEMGLGKTIQTISFLNYLFHEHQLYGPFLLRVPLSTLTSWQREIQTWAPQMNAVVYLGDITSRNMIRTHEWMHPQTKRLKFNILLTTYEILLKDKSFLGGLNWAFIGVDEAHRLKNDDSLLYRTLIDFKSNHRLLITGTPLQNSLKELWSLLHFIMPEKFSSWEDFEEEHGKGREYGYASLHKELEPFLLRRVKKDVEKSLPAKVEQILRMEMSALQKQYYKWILTRNYKALSKGSKGSTSGFLNIMMELKKCCNHCYLIKPPDDNEFYNKQEALQHLIRSSGKLILLDKLLIRLRERGNRVLIFSQMVRMLDILAEYLKYRQFPFQRLDGSIKGELRKQALDHFNAEGSEDFCFLLSTRAGGLGINLASADTVVIFDSDWNPQNDLQAQARAHRIGQKKQVNIYRLVTKGSVEEDILERAKKKMVLDHLVIQRMDTTGKTVLHTGSTPSSSTPFNKEELSAILKFGAEELFKEPEGEEQEPQEMDIDEILKRAETRENEPGPLTVGDELLSQFKVANFSNMDEDDIELEPERNSRNWEEIIPESQRRRIEEEERQKELEEIYMLPRMRNCAKQISFNGSEGRRSRSRRYSGSDSDSITERKRPKKRGRPRTIPRENIKGFSDAEIRRFIKSYKKFGGPLERLDAVARDAELVDKSETDLRRLGELVHNGCIKALKDNSSGQERAGGRLGKVKGPTFRISGVQVNAKLVISHEEELAPLHKSIPSDPEERKRYVIPCHTKAAHFDIDWGKEDDSNLLVGIYEYGYGSWEMIKMDPDLSLTQKILPDDPDKKPQAKQLQTRADYLIKLLNKDLARKEAQRLAGAGNSKRRKTRNKKNKMKASKIKEEIKSDSSPQPSEKSDEDDEEEDNKDEIVSVKHLHKKIKTEKENEEKPEPDIGIKKEAEEKRETKEKENKRELKREKKEKEDKKELKEKDNKEKRENKVKESTQKEKEVKEEKVNEMKSENKEKSKKIPLLDTPVHITATSEPVPISEESEELHQKTFSVCKERMRPVKAALKQLDRPEKGLSEREQLEHTRQCLIKIGDHITECLKEYTNPEQIKQWRKNLWIFVSKFTEFDARKLHKLYKHAIKKRQESQQHNDQNISSNVNTHVIRNPDVERLKETTNHDDSSRDSYSSDRHLSQYHDHHKDRHQGDAYKKSDSRKRPYSAFSNGKDHRDWDHYKQDSRYYSDSKHRKLDDHRSRDHRSNLEGNLKDSRGHSDHRSHSDHRIHSDHRSTSEYSHHKSSRDYRYHSDWQMDHRASGSGPRSPLDQRSPYGSRSPLGHRSPFEHSSDHKSTPEHTWSSRKT

SEQ ID NO: 8794 - protein, 981 aa, Gallus gallus
IQYLIKWKGWSHIHNTWESEETLKQQNVKGMKKLDNYKKKCQETKRWLKNASPEDVEYYNCQQEFTDDLHKQYQVVERIIAHSNQKSAAGYPDYYCKWQGLPYSECSWEDGALIAKKFQACIDEYFSRNQSKTTPFKDCKILKQRPRFVALKKQPSYIGGRDCLELRDYQLNGLNWLAHSWCKGNSCILADEMGLGKTIQTISFLNYLFHEHELYGPFLLVVPLSTLTSWQREIQTWAPQMNAVVYLGDITSRNMIRTHEWMHPQTKRLKFNILLTTYEILLKDKSFLGGLNRVFIGIDEAHRLKNDDSLLYKTLIDFKSNHRLLITGTPLQNSLKELWSLLHFIMPEKFSSWEDFEEEHGKGREFGYASLHKELEPFLLRRVKKDVEKSSPAKVEQILRMEMSALQKQYYKWILTRNYKALSKGSKGSTSGFLNIMMELKKCCNHCYLIKPPDDNEFYNKQEALQHLIRSSGKLILLDKLLIRLRERGNRVLIFSQMVRMLDILAEYLKYRQFPFQRLDGSIKGELRKQALDHFNAEGSEDFCFLLSTRAGGLGINLASADTVVIFDSDWNPQNDLQAQARAHRIGPKKQVNIYRLVTKGSVEEDILERAKKKMVLDHLVIQRMDTTGKTVLHTGSTPSSSTPFNKEELSAILKFGAEELFKEPEGEEEEPQEMDIDEILKRAETRENESGLLTVGDELLSQFKVANFSNMDEDDIELEPEQNLRNWEEIIPEVQWRRIEEEERQKELEEIYMLPRMRNCAKQISFNGNEGRCSRSRRYSGSDSDSISERKRPKKRGRPRTIPRENIKGFSDAEIRRFIKSYKKFGGPLERLDAIARDAELVDKSETDLRRLGELVHNGCIKALNDNDFGQGRTGGRFGKVKGPTFRIAGVQVNAKLVISHEEELAPLHKSIPSDPEERKRYVIPYHTKAAHFDIDWGKEDDSNLLIGIYEYGYGSWEMIKMDPDLSLTQKILPDDPDKK

SEQ ID NO: 8795 - protein, 918 aa, Gallus gallus
MRRSAAPSQVLGNVAKKPRFIPPGKSNALCPKIETEETDQDVKLKEIGEKHGNASLFSEMFSENQSENFTQSVESSGKVKSTKAWNSTSKCSKLEMKTQSAPKADAMHLPTSGMAKEAAAQEEPDCLTKYFSVMWCKASKKKHKKWEGDAILITKGKSVILKDMEGKDIGRGTGYKSKELDSLEEGQTLMIGGKEIEVMGVISADDFSSGRCFQAGIATHDTVPTALPQTTMKQFCKPIKSACQPSTKENILLNPQSCKPRHNPNDTNSLVMPRPNASHQCMFNKAGLPVVDVVVDPYIANNLRPHQREGIVFLYECVMGMRVSGRFGAILADEMGLGKTLQCISLVWTLLRQGVYGCKPVLKRALIVTPGSLVKNWKKEFQKWLGSERIKVFTVDQDHKVEEFISSPLYSVMIISYEMLLRSLDQIQAIEFNLLICDEGHRLKNSSIKTTTALTNLSCERRIILTGTPIQNDLQEFYALIEFVNPGVLGSLSTYRKIYEEPIVRSREPSATKEEKDLGEKRAAELTRLTGLFILRRTQEVINKFLPPKKENIIFCQPTALQLELYRKLLSSRVISSCLQGRLENSPHLICIGALKKLCNHPCLLFKALKEKCCDPKSDEHVESSLYEGLTDVFPQDYTSDTFSEIDSGKLQVLVKLLAAIRELSSSERVVLVSNYTQTLNVLLETCKCYGYSYTRLDGNTPVSQRQQIVDSFNSKFSPAFIFLLSSKAGGVGLNLVGASHLILYDIDWNPATDIQAMARVWRDGQKCTVHIYRLLTTGTIEEKIYQRQISKQDLSGAVVDLSKTSEHIHFSVEELRNLFTLHENSSCVTHDLLECDCMGNKDHQNPSSKKPSVSRCCQLRQDQGKHNSKKPLSMSQLMQWKHFSGQHQALPDPFLERIKENVSFIFQNVTNATSPTQ

SEQ ID NO: 8796 - protein, 733 aa, Gallus gallus
LAKRKAGGEEEDGEWRPPATQKRQKAGSEAESADCYRSPFRKPLTQLTNRPLCLDSSQHEAFIRSILSKPFKVPIPNYKGPTGLRALGIKRAGLRSPLHDPFEEGALVLYEPPLLSAHEQLKIDKDKVPVHVVVDPVLSRVLRPHQREGVKFLWDCVTSRRIPGSHGCIMADEMGLGKTLQCITLMWTLLRQSPDCKPEIEKAMVVSPSSLVRNWYNEVEKWLGGRIQPLAIDGGSKEEIDRKLVGSMNQRGLRVPSPILIISYETFRLHAEALQKGSVGLVICDEGHRLKNSENQTYQALNSLNTPRRVLISGTPIQNDLLEYFSLVHFVNSGILGTAQEFKRHFELPILKGRDADASEAERQKGEERLKELISIVNRCLIRRTSDILSKYLPVKIEQVVCCRLTPLQAELYKNFLKQAKPVEELKEGKINVSSLSSITSLKKLCNHPALIYDKCVEEEEGFMGALDLFPAGYSTKSVEPQLSGKMLVLDYILAVTKSTSNDKVVLVSNYTQTLDLFEKLCRNRRYLYVRLDGTMSIKKRAKVVERFNSPSSPEFIFMLSSKAGGCGLNLIGANRLVMFDPDWNPANDEQAMARVWRDGQKKTCYIYRLLSTGTIEEKIFQRQTHKKALSSCVVDEEQDVERHFSLGELKELFSLNETTISDTHDKIKCRRCVNGHQVRPPPEGSDCTSDLSQWNHCADKRGLQDSVLKAAWDAAVTFTFHHHSHEEQRGIP

SEQ ID NO: 8797 - protein, 560 aa, Gallus gallus
MELKKCCNHCYLIKPPDDNEFYNKQEALQHLIRSSGKLILLDKLLIRLRERGNRVLIFSQMVRMLDILAEYLKYRQFPFQRLDGSIKGELRKQALDHFNAEGSEDFCFLLSTRAGGLGINLASADTVVIFDSDWNPQNDLQAQARAHRIGQKKQVNIYRLVTKGSVEEDILERAKKKMVLDHLVIQRMDTTGKTVLHTGSTPSSSTPFNKEELSAILKFGAEELFKEPEGEEQEPQEMDIDEILKRAETRENEPGPLTVGDELLSQFKVANFSNMDEDDIELEPERNSRNWEEIIPESQRRRIEEEERQKELEEIYMLPRMRNCAKQISFNGSEGRRSRSRRYSGSDSDSITERKRPKKRGRPRTIPRENIKGFSDAEIRRFIKSYKKFGGPLERLDAVARDAELVDKSETDLRRLGELVHNGCIKALKDNSSGQERAGGRLGKVKGPTFRISGVQVNAKLVISHEEELAPLHKSIPSDPEERKRYVIPCHTKAAHFDIDWGKEDDSNLLVGIYEYAYGSWQCKVNGSRSQLNTEILPDDPDRTPRQNSYRPVQTTSLNY

SEQ ID NO: 8798 - protein, 675 aa, Macaca fascicularis
MRIFREGLREHAAPYFQQLRQTTAPRLLQFPELRLVQFDSGKLEALAILLQKLKSEGRRVLILSQMILMLDILEMFLNFHYLTYVRIDENASSEQRQELMRSFNRDRRIFCAILSTHSRTTGINLVEADTVVFYDNDLNPVMDAKAQEWCDRIGRCKDIHIYRLVSGNSIEEKLLKNGTKDLIREVAAQGNDYSMAFLTQRTIQELFEVYSPMDDAGFPVKAEEFVVLSQEPSVTETIAPKIARPFIEALKSIEYLEEDAQKSAEEGVPGPHTDALSSDSENMPCDEEPSQLEELADFMEQLTPIEKYALNYLELFHASTEQEKARDSEDAVMTAVRAWEFWNLKTLQEREARLRLEQEEAELLTYTREDAYSMEYVYEDVDGQAEVMPLWTPPTPPQDDSDIYLDSVMCLMYEATPIPEAKLPPVYVRKERKRHKTDPSAAGRKKKQRHGESVVPPRSLFDRATPGLLKIRREGKEQKKNILLKQQVPFAKPLPTFAKPTAEPGQDNPEWLISEDWALLQAVKQLLELPLNLTIVSPAHTPNWDLVSDVVNSCSRIYRSSKQCRNRYENVIIPREEGKSKNNRPLRTSQIYAQDENATHTQLYTSHFDLMKMTAGKRSPPIKPLLGMNPFQKNPKHASVLAERYFSSHDTFVTVWKDFIPVSSKFSEFSKSLCT

SEQ ID NO: 8799 - protein, 1052 aa, Homo sapiens
MSSAAEPPPPPPPESAPSKPAASIASGGSNSSNKGGPEGVAAQAVASAASAGPADAEMEEIFDDASPGKQKEIQEPDPTYEEKMQTDRANRFEYLLKQTELFAHFIQPAAQKTPTSPLKMKPGRPRIKKDEKQNLLSVGDYRHRRTEQEEDEELLTESSKATNVCTRFEDSPSYVKWGKLRDYQVRGLNWLISLYENGINGILADEMGLGKTLQTISLLGYMKHYRNIPGPHMVLVPKSTLHNWMSEFKRWVPTLRSVCLIGDKEQRAAFVRDVLLPGEWDVCVTSYEMLIKEKSVFKKFNWRYLVIDEAHRIKNEKSKLSEIVREFKTTNRLLLTGTPLQNNLHELWSLLNFLLPDVFNSADDFDSWFDTNNCLGDQKLVERLHMVLRPFLLRRIKADVEKSLPPKKEVKIYVGLSKMQREWYTRILMKDIDILNSAGKMDKMRLLNILMQLRKCCNHPYLFDGAEPGPPYTTDMHLVTNSGKMVVLDKLLPKLKEQGSRVLIFSQMTRVLDILEDYCMWRNYEYCRLDGQTPHDERQDSINAYNEPNSTKFVFMLSTRAGGLGINLATADVVILYDSDWNPQVDLQAMDRAHRIGQTKTVRVFRFITDNTVEERIVERAEMKLRLDSIVIQQGRLVDQNLNKIGKDEMLQMIRHGATHVFASKESEITDEDIDGILERGAKKTAEMNEKLSKMGESSLRNFTMDTESSVYNFEGEDYREKQKIAFTEWIEPPKRERKANYAVDAYFREALRVSEPKAPKAPRPPKQPNVQDFQFFPPRLFELLEKEILFYRKTIGYKVPRNPELPNAAQAQKEEQLKIDEAESLNDEELEEKEKLLTQGFTNWNKRDFNQFIKANEKWGRDDIENIAREVEGKTPEEVIEYSAVFWERCNELQDIEKIMAQIERGEARIQRRISIKKALDTKIGRYKAPFHQLRISYGTNKGKNYTEEEDRFLICMLHKLGFDKENVYDELRQCIRNSPQFRFDWFLKSRTAMELQRRCNTLITLIERENMELEEKEKAEKKKRGPKPSTQKRKMDGAPDGRGRKKKLKL

SEQ ID NO: 8800 - protein, 1052 aa, Homo sapiens
MSSAAEPPPPPPPESAPSKPAASIASGGSNSSNKGGPEGVAAQAVASAVSAGPADAEMEEIFDDASPGKQKEIQEPDPTYEEKMQTDRANRFEYLLKQTELFAHFIQPAAQKTPTSPLKMKPGRPRIKKDEKQNLLSVGDYRHRRTEQEEDEELLTESSKATNVCTRFEDSPSYVKWGKLRDYQVRGLNWLISLYENGINGILADEMGLGKTLQTISLLGYMKHYRNIPGPHMVLVPKSTLHNWMSEFKRWVPTLRSVCLIGDKEQRAAFVRDVLLPGEWDVCVTSYEMLIKEKSVFKKFNWRYLVIDEAHRIKNEKSKLSEIVREFKTTNRLLLTGTPLQNNLHELWSLLNFLLPDVFNSADDFDSWFDTNNCLGDQKLVERLHMVLRPFLLRRIKADVEKSLPPKKEVKIYVGLSKMQREWYTRILMKDIDILNSAGKMDKMRLLNILMQLRKCCNHPYLFDGAEPGPPYTTDMHLVTNSGKMVVLDKLLPKLKEQGSRVLIFSQMTRVLDILEDYCMWRNYEYCRLDGQTPHDERQDSINAYNEPNSTKFVFMLSTRAGGLGINLATADVVILYDSDWNPQVDLQAMDRAHRIGQTKTVRVFRFITDNTVEERIVERAEMKLRLDSIVIQQGRLVDQNLNKIGKDEMLQMIRHGATHVFASKESEITDEDIDGILERGAKKTAEMNEKLSKMGESSLRNFTMDTESSVYNFEGEDYREKQKIAFTEWIEPPKRERKANYAVDAYFREALRVSEPKAPKAPRPPKQPNVQDFQFFPPRLFELLEKEILFYRKTIGYKVPRNPELPNAAQAQKEEQLKIDEAESLNDEELEEKEKLLTQGFTNWNKRDFNQFIKANEKWGRDDIENIAREVEGKTPEEVIEYSAVFWERCNELQDIEKIMAQIERGEARIQRRISIKKALDTKIGRYKAPFHQLRISYGTNKGKNYTEEEDRFLICMLHKLGFDKENVYDELRQCIRNSPQFRFDWFLKSRTAMELQRRCNTLITLIERENMELEEKEKAEKKKRGPKPSTQKRKMDGAPDGRGRKKKLKL

SEQ ID NO: 8801 - protein, 680 aa, Homo sapiens
ACVMEQLDVGIVPYIVLLVVPVLGRMSDQTDSVRFMATQCFATLIRLMPLEAGIPDPPNMSAELIQLKAKERHFLEQLLDGKKLENYKIPVPINAELRKYQQDGVNWLAFLNKYKLHGILCDDMGLGKTLQSICILAGDHCHRAQEYARSKLAECMPLPSLVVCPPTLTGHWVDEVGKFCSREYLNPLHYTGPPTERIRLQHQVKRHNLIVASYDVVRNDIDFFRNIKFNYCILDEGHVIKNGKTKLSKAVKQLTANYRIILSGTPIQNNVLELWSLFDFLMPGFLGTERQFAARYGKPILASRDARSSSREQEAGVLAMDALHRQVLPFLLRRMKEDVLQDLPPKIIQDYYCTLSPLQVQLYEDFAKSRAKCDVDETVSSATLSEETEKPKLKATGHVFQALQYLRKLCNHPALVLTPQHPEFKTTAEKLAVQNSSLHDIQHAPKLSALKQLLLDCGLGNGSTSESGTESVVAQHRILIFCQLKSMLDIVEHDLLKPHLPSVTYLRLDGSIPPGQRHSIVSRFNNDPSIDVLLLTTHVGGLGLNLTGADTVVFVEHDWNPMRDLQAMDRAHRIGQKRVVNVYRLITRGTLEEKIMGLQKFKMNIANTVISQENSSLQSMGTDQLLDLFTLDKDGKAEKADTSTSGKASMKSILENLSDLWDQEQYDSEYSLENFMHSLK

SEQ ID NO: 8802 - protein, 1849 aa, Homo sapiens
MAVSRLDRLFILLDTGTTPVTRKAAAQQLGEVVKLHPHELNNLLSKVLIYLRSANWDTRIAAGQAVEAIVKNVPEWNPVPRTRQEPTSESSMEDSPTTERLNFDRFDICRLLQHGASLLGSAGAEFEVQDEKSGEVDPKERIARQRKLLQKKLGLNMGEAIGMSTEELFNDEDLDYTPTSASFVNKQPTLQAAELIDSEFRAGMSNRQKNKAKRMAKLFAKQRSRDAVETNEKSNDSTDGEPEEKRRKIANVVINQSANDSKVLIDNIPDSSSLIEETNEWPLESFCEELCNDLFNPSWEVRHGAGTGLREILKAHGKSGGKMGDSTLEEMIQQHQEWLEDLVIRLLCVFALDRFGDFVSDEVVAPVRETCAQTLGVVLKHMNETGVHKTVDVLLKLLTQEQWEVRHGGLLGIKYALAVRQDVINTLLPKVLTRIIEGLQDLDDDVRAVAAASLVPVVESLVYLQTQKVPFIINTLWDALLELDDLTASTNSIMTLLSSLLTYPQVQQCSIQQSLTVLVPRVWPFLHHTISSVRRAALETLFTLLSTQDQNSSSWLIPILPDMLRHIFQFCVLESSQEILDLIHKVWMELLSKASVQYVVAAACPWMGAWLCLMMQPSHLPIDLNMLLEVKARAKEKTGGKVRQGQSQNKEVLQEYIAGADTIMEDPATRDFVVMRARMMAAKLLGALCCCICDPGVNVVTQEIKPAESLGQLLLFHLNSKSALQRISVALVICEWAALQKECKAVTLAVQPRLLDILSEHLYYDEIAVPFTRMQNECKQLISSLADVHIEVGNRVNNNVLTIDQASDLVTTVFNEATSSFDLNPQVLQQLDSKRQQVQMTVTETNQEWQVLQLRVHTFAACAVVSLQQLPEKLNPIIKPLMETIKKEENTLVQNYAAQCIAKLLQQCTTRTPCPNSKIIKNLCSSLCVDPYLTPCVTCPVPTQSGQENSKGSTSEKDGMHHTVTKHRGIITLYRHQKAAFAITSRRGPTPKAVKAQIADLPAGSSGNILVELDEAQKPYLVQRRGAEFALTTIVKHFGGEMAVKLPHLWDAMVGPLRNTIDINNFDGKSLLDKGDSPAQELVNSLQVFETAAASMDSELHPLLVQHLPHLYMCLQYPSTAVRHMAARCVGVMSKIATMETMNIFLEKVLPWLGAIDDSVKQEGAIEALACVMEQLDVGIVPYIVLLVVPVLGRMSDQTDSVRFMATQCFATLIRLMPLEAGIPDPPNMSAELIQLKAKERHFLEQLLDGKKLENYKIPVPINAELRKYQQDGVNWLAFLNKYKLHGILCDDMGLGKTLQSICILAGDHCHRAQEYARSKLAECMPLPSLVVCPPTLTGHWVDEVGKFCSREYLNPLHYTGPPTERIRLQHQVKRHNLIVASYDVVRNDIDFFRNIKFNYCILDEGHVIKNGKTKLSKAVKQLTANYRIILSGTPIQNNVLELWSLFDFLMPGFLGTERQFAARYGKPILASRDARSSSREQEAGVLAMDALHRQVLPFLLRRMKEDVLQDLPPKIIQDYYCTLSPLQVQLYEDFAKSRAKCDVDETVSSATLSEETEKPKLKATGHVFQALQYLRKLCNHPALVLTPQHPEFKTTAEKLAVQNSSLHDIQHAPKLSALKQLLLDCGLGNGSTSESGTESVVAQHRILIFCQLKSMLDIVEHDLLKPHLPSVTYLRLDGSIPPGQRHSIVSRFNNDPSIDVLLLTTHVGGLGLNLTGADTVVFVEHDWNPMRDLQAMDRAHRIGQKRVVNVYRLITRGTLEEKIMGLQKFKMNIANTVISQENSSLQSMGTDQLLDLFTLDKDGKAEKADTSTSGKASMKSILENLSDLWDQEQYDSEYSLENFMHSLK

SEQ ID NO: 8803 - protein, 1493 aa, Homo sapiens
MPNEGIPHSSQTQEQDCLQSQPVSNNEEMAIKQESGGDGEVEEYLSFRSVGDGLSTSAVGCASAAPRRGPALLHIDRHQIQAVEPSAQALELQGLGVDVYDQDVLEQGVLQQVDNAIHEASRASQLVDVEKEYRSVLDDLTSCTTSLRQINKIIEQLSPQAATSRDINRKLDSVKRQKYNKEQQLKKITAKQKHLQAILGGAEVKIELDHASLEEDAEPGPSSLGSMLMPVQETAWEELIRTGQMTPFGTQIPQKQEKKPRKIMLNEASGFEKYLADQAKLSFERKKQGCNKRAARKAPAPVTPPAPVQNKNKPNKKARVLSKKEERLKKHIKKLQKRALQFQGKVGLPKARRPWESDMRPEAEGDSEGEESEYFPTEEEEEEEDDEVEGAEADLSGDGTDYELKPLPKGGKRQKKVPVQEIDDDFFPSSGEEAEAASVGEGGGGGRKVGRYRDDGDEDYYKQRLRRWNKLRLQDKEKRLKLEDDSEESDAEFDEGFKVPGFLFKKLFKYQQTGVRWLWELHCQQAGGILGDEMGLGKTIQIIAFLAGLSYSKIRTRGSNYRFEGLGPTVIVCPTTVMHQWVKEFHTWWPPFRVAILHETGSYTHKKEKLIRDVAHCHGILITSYSYIRLMQDDISRYDWHYVILDEGHKIRNPNAAVTLACKQFRTPHRIILSGSPMQNNLRELWSLFDFIFPGKLGTLPVFMEQFSVPITMGGYSNASPVQVKTAYKCACVLRDTINPYLLRRMKSDVKMSLSLPDKNEQVLFCRLTDEQHKVYQNFVDSKEVYRILNGEMQIFSGLIALRKICNHPDLFSGGPKNLKGLPDDELEEDQFGYWKRSGKMIVVESLLKIWHKQGQRVLLFSQSRQMLDILEVFLRAQKYTYLKMDGTTTIASRQPLITRYNEDTSIFVFLLTTRVGGLGVNLTGANRVVIYDPDWNPSTDTQARERAWRIGQKKQVTVYRLLTAGTIEEKIYHRQIFKQFLTNRVLKDPKQRRFFKSNDLYELFTLTSPDASQSTETSAIFAGTGSDVQTPKCHLKRRIQPAFGADHDVPKRKKFPASNISVNDATSSEEKSEAKGAEVNAVTSNRSDPLKDDPHMSSNVTSNDRLGEETNAVSGPEELSVISGNGECSNSSGTGKTSMPSGDESIDEKLGLSYKRERPSQAQTEAFWENKQMENNFYKHKSKTKHHSVAEEETLEKHLRPKQKPKNSKHCRDAKFEGTRIPHLVKKRRYQKQDSENKSEAKEQSNDDYVLEKLFKKSVGVHSVMKHDAIMDGASPDYVLVEAEANRVAQDALKALRLSRQRCLGAVSGVPTWTGHRGISGAPAGKKSRFGKKRNSNFSVQHPSSTSPTEKCQDGIMKKEGKDNVPEHFSGRAEDADSSSGPLASSSLLAKMRARNHLILPERLESESGHLQEASALLPTTEHDDLLVEMRNFIAFQAHTDGQASTREILQEFESKLSASQSCVFRELLRNLCTFHRTSGGEGIWKLKPEYC

SEQ ID NO: 8804 - protein, 1954 aa, Homo sapiens
MRGPVGTEEELPRLFAEEMENEDEMSEEEDGGLEAFDDFFPVEPVSLPKKKKPKKLKENKCKGKRKKKEGSNDELSENEEDLEEKSESEGSDYSPNKKKKKKLKDKKEKKAKRKKKDEDEDDNDDGCLKEPKSSGQLMAEWGLDDVDYLFSEEDYHTLTNYKAFSQFLRPLIAKKNPKIPMSKMMTVLGAKWREFSANNPFKGSSAAAAAAAVAAAVETVTISPPLAVSPPQVPQPVPIRKAKTKEGKGPGVRKKIKGSKDGKKKGKGKKTAGLKFRFGGISNKRKKGSSSEEDEREESDFDSASIHSASVRSECSAALGKKSKRRRKKKRIDDGDGYETDHQDYCEVCQQGGEIILCDTCPRAYHLVCLDPELEKAPEGKWSCPHCEKEGIQWEPKDDDDEEEEGGCEEEEDDHMEFCRVCKDGGELLCCDACPSSYHLHCLNPPLPEIPNGEWLCPRCTCPPLKGKVQRILHWRWTEPPAPFMVGLPGPDVEPSLPPPKPLEGIPEREFFVKWAGLSYWHCSWVKELQLELYHTVMYRNYQRKNDMDEPPPFDYGSGDEDGKSEKRKNKDPLYAKMEERFYRYGIKPEWMMIHRILNHSFDKKGDVHYLIKWKDLPYDQCTWEIDDIDIPYYDNLKQAYWGHRELMLGEDTRLPKRLLKKGKKLRDDKQEKPPDTPIVDPTVKFDKQPWYIDSTGGTLHPYQLEGLNWLRFSWAQGTDTILADEMGLGKTVQTIVFLYSLYKEGHSKGPYLVSAPLSTIINWEREFEMWAPDFYVVTYTGDKESRSVIRENEFSFEDNAIRSGKKVFRMKKEVQIKFHVLLTSYELITIDQAILGSIEWACLVVDEAHRLKNNQSKFFRVLNSYKIDYKLLLTGTPLQNNLEELFHLLNFLTPERFNNLEGFLEEFADISKEDQIKKLHDLLGPHMLRRLKADVFKNMPAKTELIVRVELSQMQKKYYKFILTRNFEALNSKGGGNQVSLLNIMMDLKKCCNHPYLFPVAAVEAPVLPNGSYDGSSLVKSSGKLMLLQKMLKKLRDEGHRVLIFSQMTKMLDLLEDFLEYEGYKYERIDGGITGGLRQEAIDRFNAPGAQQFCFLLSTRAGGLGINLATADTVIIYDSDWNPHNDIQAFSRAHRIGQNKKVMIYRFVTRASVEERITQVAKRKMMLTHLVVRPGLGSKSGSMTKQELDDILKFGTEELFKDDVEGMMSQGQRPVTPIPDVQSSKGGNLAASAKKKHGSTPPGDNKDVEDSSVIHYDDAAISKLLDRNQDATDDTELQNMNEYLSSFKVAQYVVREEDGVEEVEREIIKQEENVDPDYWEKLLRHHYEQQQEDLARNLGKGKRIRKQVNYNDASQEDQEWQDELSDNQSEYSIGSEDEDEDFEERPEGQSGRRQSRRQLKSDRDKPLPPLLARVGGNIEVLGFNARQRKAFLNAIMRWGMPPQDAFNSHWLVRDLRGKSEKEFRAYVSLFMRHLCEPGADGAETFADGVPREGLSRQHVLTRIGVMSLVRKKVQEFEHVNGKYSTPDLIPEGPEGKKSGEVISSDPNTPVPASPAHLLPAPLGLPDKMEAQLGYMDEKDPGAQKPRQPLEVQALPAALDRVESEDKHESPASKERAREERPEETEKAPPSPEQLPREEVLPEKEKILDKLELSLIHSRGDSSELRPDDTKAEEKEPIETQQNGDKEEDDEGKKEDKKGKFKFMFNIADGGFTELHTLWQNEERAAVSSGKIYDIWHRRHDYWLLAGIVTHGYARWQDIQNDPRYMILNEPFKSEVHKGNYLEMKNKFLARRFKLLEQALVIEEQLRRAAYLNMTQDPNHPAMALNARLAEVECLAESHQHLSKESLAGNKPANAVLHKVLNQLEELLSDMKADVTRLPSMLSRIPPVAARLQMSERSILSRLTNRAGDPTIQQGAFGSSQMYSNNFGPNFRGPGPGGIVNYNQMPLGPYVTDI

SEQ ID NO: 8805 - protein, 1388 aa, Homo sapiens
KRKNKDPLYAKMEERFYRYGIKPEWMMIHRILNHSFDKKGDVHYLIKWKDLPYDQCTWEIDDIDIPYYDNLKQAYWGHRELMLGEDTRLPKRLLKKGKKLRDDKQEKPPDTPIVDPTVKFDKQPWYIDSTGGTLHPYQLEGLNWLRFSWAQGTDTILADEMGLGKTVQTIVFLYSLYKEGHSKGPYLVSAPLSTIINWEREFEMWAPDFYVVTYTGDKESRSVIRENEFSFEDNAIRSGKKVFRMKKEVQIKFHVLLTSYELITIDQAILGSIEWACLVVDEAHRLKNNQSKFFRVLNSYKIDYKLLLTGTPLQNNLEELFHLLNFLTPERFNNLEGFLEEFADISKEDQIKKLHDLLGPHMLRRLKADVFKNMPAKTELIVRVELSQMQKKYYKFILTRNFEALNSKGGGNQVSLLNIMMDLKKCCNHPYLFPVAAVEAPVLPNGSYDGSSLVKSSGKLMLLQKMLKKLRDEGHRVLIFSQMTKMLDLLEDFLEYEGYKYERIDGGITGGLRQEAIDRFNAPGAQQFCFLLSTRAGGLGINLATADTVIIYDSDWNPHNDIQAFSRAHRIGQNKKVMIYRFVTRASVEERITQVAKRKMMLTHLVVRPGLGSKSGSMTKQELDDILKFGTEELFKDDVEGMMSQGQRPVTPIPDVQSSKGGNLAASAKKKHGSTPPGDNKDVEDSSVIHYDDAAISKLLDRNQDATDDTELQNMNEYLSSFKVAQYVVREEDGVEEVEREIIKQEENVDPDYWEKLLRHHYEQQQEDLARNLGKGKRIRKQVNYNDASQEDQEWQDELSDNQSEYSIGSEDEDEDFEERPEGQSGRRQSRRQLKSDRDKPLPPLLARVGGNIEVLGFNARQRKAFLNAIMRWGMPPQDAFNSHWLVRDLRGKSEKEFRAYVSLFMRHLCEPGADGAETFADGVPREGLSRQHVLTRIGVMSLVRKKVQEFEHVNGKYSTPDLIPEGPEGKKPGEVISSDPNTPVPASPAHLLPAPLGLPDKMEAQLGYMDEKDPGAQKPRQPLEVQALPAALDRVESEDKHESPASKERAREERPEETEKAPPSPEQLPREEVLPEKEKILDKLELSLIHSRGDSSELRPDDTKAEEKEPIETQQNGDKEEDDEGKKEDKKGKFKFMFNIADGGFTELHTLWQNEERAAVSSGKIYDIWHRRHDYWLLAGIVTHGYARWQDIQNDPRYMILNEPFKSEVHKGNYLEMKNKFLARRFKLLEQALVIEEQLRRAAYLNMTQDPNHPAMALNARLAEVECLAESHQHLSKESLAGNKPANAVLHKVLNQLEELLSDMKADVTRLPSMLSRIPPVAARLQMSERSILSRLTNRAGDPTIQQGAFGSSQMYSNNFGPNFRGPGPGGIVNYNQMPLGPYVTDI

SEQ ID NO: 8806 - protein, 769 aa, Homo sapiens
MEQDTAAVAATVAAADATATIVVIEDEQPGPSTSQEEGAAAAATEATAATEKGEKKKEKNVSSFQLKLAAKAPKSEKEMDPEYEEKMKADRAKRFEFLLKQTELFAHFIQPSAQKSPTSPLNMKLGRPRIKKDEKQSLISAGDYRHRRTEQEEDEELLSESRKTSNVCIRFEVSPSYVKGGPLRDYQIRGLNWLISLYENGVNGILADEMGLGKTLQTIALLGYLKHYRNIPGPHMVLVPKSTLHNWMNEFKRWVPSLRVICFVGDKDARAAFIRDEMMPGEWDVCVTSYEMVIKEKSVFKKFHWRYLVIDEAHRIKNEKSKLSEIVREFKSTNRLLLTGTPLQNNLHELWALLNFLLPDVFNSADDFDSWFDTKNCLGDQKLVERLHAVLKPFLLRRIKTDVEKSLPPKKEIKIYLGLSKMQREWYTKILMKDIDVLNSSGKMDKMRLLNILMQLRKCCNHPYLFDGAEPGPPYTTDEHIVSNSGKMVVLDKLLAKLKEQGSRVLIFSQMTRLLDILEDYCMWRGYEYCRLDGQTPHEEREDKFLEVEFLGQREAIEAFNAPNSSKFIFMLSTRAGGLGINLASADVVILYDSDWNPQVDLQAMDRAHRIGQKKPVRVFRLITDNTVEERIVERAEIKLRLDSIVIQQGRLIDQQSNKLAKEEMLQMIRHGATHVFASKESELTDEDITTILERGEKKTAEMNERLQKMGESSLRNFRMDIEQSLYKFEGEDYREKQKLGMVEWIEPPKRERKANYAVDAYFREALRV

SEQ ID NO: 8807 - protein, 1054 aa, Homo sapiens
MEQDTAAVAATVAAADATATIVVIEDEQPGPSTSQEEGAAAAATEATAATEKGEKKKEKNVSSFQLKLAAKAPKSEKEMDPEYEEKMKADRAKRFEFLLKQTELFAHFIQPSAQKSPTSPLNMKLGRPRIKKDEKQSLISAGDYRHRRTEQEEDEELLSESRKTSNVCIRFEVSPSYVKGGPLRDYQIRGLNWLISLYENGVNGILADEMGLGKTLQTIALLGYLKHYRNIPGPHMVLVPKSTLHNWMNEFKRWVPSLRVICFVGDKDARAAFIRDEMMPGEWDVCVTSYEMVIKEKSVFKKFHWRYLVIDEAHRIKNEKSKLSEIVREFKSTNRLLLTGTPLQNNLHELWALLNFLLPDVFNSADDFDSWFDTKNCLGDQKLVERLHAVLKPFLLRRIKTDVEKSLPPKKEIKIYLGLSKMQREWYTKILMKDIDVLNSSGKMDKMRLLNILMQLRKCCNHPYLFDGAEPGPPYTTDEHIVSNSGKMVVLDKLLAKLKEQGSRVLIFSQMTRLLDILEDYCMWRGYEYCRLDGQTPHEEREDKFLEVEFLGQREAIEAFNAPNSSKFIFMLSTRAGGLGINLASADVVILYDSDWNPQVDLQAMDRAHRIGQKKPVRVFRLITDNTVEERIVERAEIKLRLDSIVIQQGRLIDQQSNKLAKEEMLQMIRHGATHVFASKESELTDEDITTILERGEKKTAEMNERLQKMGESSLRNFRMDIEQSLYKFEGEDYREKQKLGMVEWIEPPKRERKANYAVDAYFREALRVSEPKIPKAPRPPKQPNVQDFQFFPPRLFELLEKEILYYRKTIGYKVPRNPDIPNPALAQREEQKKIDGAEPLTPEETEEKEKLLTQGFTNWTKRDFNQFIKANEKYGRDDIDNIAREVEGKSPEEVMEYSAVFWERCNELQDIEKIMAQIERGEARIQRRISIKKALDAKIARYKAPFHQLRIQYGTSKGKNYTEEEDRFLICMLHKMGFDRENVYEELRQCVRNAPQFRFDWFIKSRTAMEFQRRCNTLISLIEKENMEIEERERAEKKKRATKTPMVKFSAFS

SEQ ID NO: 8808 - protein, 976 aa, Homo sapiens [sequence omitted]

SEQ ID NO: 8809 - protein, 1586 aa, Homo sapiens
MSTPTDPGAMPHPGPSPGPGPSPGPILGPSPGPGPSPGSVHSMMGPSPGPPSVSHPMPTMGSTDFPQEGMHQMHKPIDGIHDKGIVEDIHCGSMKGTGMRPPHPGMGPPQSPMDQHSQGYMSPHPSPLGAPEHVSSPMSGGGPTPPQMPPSQPGALIPGDPQAMSQPNRGPSPFSPVQLHQLRAQILAYKMLARGQPLPETLQLAVQGKRTLPGLQQQQQQQQQQQQQQQQQQQQQQQPPQPQTQQQQQPALVNYNRPSGPGPELSGPSTPQKLPVPAPGGRPSPAPPAAAQPPAAAVPGPSVPQPAPGQPSPVLQLQQKQSRISPIQKPQGLDPVEILQEREYRLQARIAHRIQELENLPGSLPPDLRTKATVELKALRLLNFQRQLRQEVVACMRRDTTLETALNSKAYKRSKRQTLREARMTEKLEKQQKIEQERKRRQKHQEYLNSILQHAKDFKEYHRSVAGKIQKLSKAVATWHANTEREQKKETERIEKERMRRLMAEDEEGYRKLIDQKKDRRLAYLLQQTDEYVANLTNLVWEHKQAQAAKEKKKRRRRKKKAEENAEGGESALGPDGEPIDESSQMSDLPVKVTHTETGKVLFGPEAPKASQLDAWLEMNPGYEVAPRSDSEESDSDYEEEDEEEESSRQETEEKILLDPNSEEVSEKDAKQIIETAKQDVDDEYSMQYSARGSQSYYTVAHAISERVEKQSALLINGTLKHYQLQGLEWMVSLYNNNLNGILADEMGLGKTIQTIALITYLMEHKRLNGPYLIIVPLSTLSNWTYEFDKWAPSVVKISYKGTPAMRRSLVPQLRSGKFNVLLTTYEYIIKDKHILAKIRWKYMIVDEGHRMKNHHCKLTQVLNTHYVAPRRILLTGTPLQNKLPELWALLNFLLPTIFKSCSTFEQWFNAPFAMTGERVDLNEEETILIIRRLHKVLRPFLLRRLKKEVESQLPEKVEYVIKCDMSALQKILYRHMQAKGILLTDGSEKDKKGKGGAKTLMNTIMQLRKICNHPYMFQHIEESFAEHLGYSNGVINGAELYRASGKFELLDRILPKLRATNHRVLLFCQMTSLMTIMEDYFAFRNFLYLRLDGTTKSEDRAALLKKFNEPGSQYFIFLLSTRAGGLGLNLQAADTVVIFDSDWNPHQDLQAQDRAHRIGQQNEVRVLRLCTVNSVEEKILAAAKYKLNVDQKVIQAGMFDQKSSSHERRAFLQAILEHEEENEEEDEVPDDETLNQMIARREEEFDLFMRMDMDRRREDARNPKRKPRLMEEDELPSWIIKDDAEVERLTCEEEEEKIFGRGSRQRRDVDYSDALTEKQWLRAIEDGNLEEMEEEVRLKKRKRRRNVDKDPAKEDVEKAKKRRGRPPAEKLSPNPPKLTKQMNAIIDTVINYKDRCNVEKVPSNSQLEIEGNSSGRQLSEVFIQLPSRKELPEYYELIRKPVDFKKIKERIRNHKYRSLGDLEKDVMLLCHNAQTFNLEGSQIYEDSIVLQSVFKSARQKIAKEEESEDESNEEEEEEDEEESESEAKSVKVKIKLNKKDDKGRDKGKGKKRPNRGKAKPVVSDFDSDEEQDEREQSEGSGTDDE

SEQ ID NO: 8810 - protein, 1568 aa, Homo sapiens
MSTPTDPGAMPHPGPSPGPGPSPGPILGPSPGPGPSPGSVHSMMGPSPGPPSVSHPMPTMGSTDFPQEGMHQMHKPIDGIHDKGIVEDIHCGSMKGTGMRPPHPGMGPPQSPMDQHSQGYMSPHPSPLGAPEHVSSPMSGGGPTPPQMPPSQPGALIPGDPQAMSQPNRGPSPFSPVQLHQLRAQILAYKMLARGQPLPETLQLAVQGKRTLPGLQQQQQQQQQQQQQQQQQQQQQQQPPQPQTQQQQQPALVNYNRPSGPGPELSGPSTPQKLPVPAPGGRPSPAPPAAAQPPAAAVPGPSVPQPAPGQPSPVLQLQQKQSRISPIQKPQGLDPVEILQEREYRLQARIAHRIQELENLPGSLPPDLRTKATVELKALRLLNFQRQLRQEVVACMRRDTTLETALNSKAYKRSKRQTLREARMTEKLEKQQKIEQERKRRQKHQEYLNSILQHAKDFKEYHRSVAGKIQKLSKAVATWHANTEREQKKETERIEKERMRRLMAEDEEGYRKLIDQKKDRRLAYLLQQTDEYVANLTNLVWEHKQAQAAKEKKKRRRRKKKAEENAEGGESALGPDGEPIDESSQMSDLPVKVTHTETGKVLFGPEAPKASQLDAWLEMNPGYEVAPRSDSEESDSDYEEEDEEEESSRQETEEKILLDPNSEEVSEKDAKQIIETAKQDVDDEYSMQYSARGSQSYYTVAHAISERVEKQSALLINGTLKHYQLQGLEWMVSLYNNNLNGILADEMGLGKTIQTIALITYLMEHKRLNGPYLIIVPLSTLSNWTYEFDKWAPSVVKISYKGTPAMRRSLVPQLRSGKFNVLLTTYEYIIKDKHILAKIRWKYMIVDEGHRMKNHHCKLTQVLNTHYVAPRRILLTGTPLQNKLPELWALLNFLLPTIFKSCSTFEQWFNAPFAMTGERVDLNEEETILIIRRLHKVLRPFLLRRLKKEVESQLPEKVEYVIKCDMSALQKILYRHMQAKGILLTDGSEKDKKGKGGAKTLMNTIMQLRKICNHPYMFQHIEESFAEHLGYSNGVINGAELYRASGKFELLDRILPKLRATNHRVLLFCQMTSLMTIMEDYFAFRNFLYLRLDGTTKSEDRAALLKKFNEPGSQYFIFLLSTRAGGLGLNLQAADTVVIFDSDWNPHQDLQAQDRAHRIGQQNEVRVLRLCTVNSVEEKILAAAKYKLNVDQKVIQAGMFDQKSSSHERRAFLQAILEHEEENEEEDEVPDDETLNQMIARREEEFDLFMRMDMDRRREDARNPKRKPRLMEEDELPSWIIKDDAEVERLTCEEEEEKIFGRGSRQRRDVDYSDALTEKQWLRAIEDGNLEEMEEEVRLKKRKRRRNVDKDPAKEDVEKAKKRRGRPPAEKLSPNPPKLTKQMNAIIDTVINYKDSSGRQLSEVFIQLPSRKELPEYYELIRKPVDFKKIKERIRNHKYRSLGDLEKDVMLLCHNAQTFNLEGSQIYEDSIVLQSVFKSARQKIAKEEESEDESNEEEEEEDEEESESEAKSVKVKIKLNKKDDKGRDKGKGKKRPNRGKAKPVVSDFDSDEEQDEREQSEGSGTDDE

SEQ ID NO: 8811 - protein, 1586 aa, Homo sapiens
MSTPTDPGAMPHPGPSPGPGPSPGPILGPSPGPGPSPGSVHSMMGPSPGPPSVSHPMPTMGSTDFPQEGMHQMHKPIDGIHDKGIVEDIHCGSMKGTGMRPPHPGMGPPQSPMDQHSQGYMSPHPSPLGAPEHVSSPMSGGGPTPPQMPPSQPGALIPGDPQAMSQPNRGPSPFSPVQLHQLRAQILAYKMLARGQPLPETLQLAVQGKRTLPGLQQQQQQQQQQQQQQQQQQQQQQQPPQPQTQQQQQPALVNYNRPSGPGPELSGPSTPQKLPVPAPGGRPSPAPPAAAQPPAAAVPGPSVPQPAPGQPSPVLQLQQKQSRISPIQKPQGLDPVEILQEREYRLQARIAHRIQELENLPGSLPPDLRTKATVELKALRLLNFQRQLRQEVVACMRRDTTLETALNSKAYKRSKRQTLREARMTEKLEKQQKIEQERKRRQKHQEYLNSILQHAKDFKEYHRSVAGKIQKLSKAVATWHANTEREQKKETERIEKERMRRLMAEDEEGYRKLIDQKKDRRLAYLLQQTDEYVANLTNLVWEHKQAQAAKEKKKRRRRKKKAEENAEGGESALGPDGEPIDESSQMSDLPVKVTHTETGKVLFGPEAPKASQLDAWLEMNPGYEVAPRSDSEESDSDYEEEDEEEESSRQETEEKILLDPNSEEVSEKDAKQIIETAKQDVDDEYSMQYSARGSQSYYTVAHAISEWVEKQSALLINGTLKHYQLQGLEWMVSLYNNNLNGILADEMGLGKTIQTIALITYLMEHKRLNGPYLIIVPLSTLSNWTYEFDKWAPSVVKISYKGTPAMRRSLVPQLRSGKFNVLLTTYEYIIKDKHILAKIRWKYMIVDEGHRMKNHHCKLTQVLNTHYVAPRRILLTGTPLQNKLPELWALLNFLLPTIFKSCSTFEQWFNAPFAMTGERVDLNEEETILIIRRLHKVLRPFLLRRLKKEVESQLPEKVEYVIKCDMSALQKILYRHMQAKGILLTDGSEKDKKGKGGAKTLMNTIMQLRKICNHPYMFQHIEESFAEHLGYSNGVINGAELYRASGKFELLDRILPKLRATNHRVLLFCQMTSLMTIMEDYFAFRNFLYLRLDGTTKSEDRAALLKKFNEPGSQYFIFLLSTRAGGLGLNLQAADTVVIFDSDWNPHQDLQAQDRAHRIGQQNEVRVLRLCTVNSVEEKILAAAKYKLNVDQKVIQAGMFDQKSSSHERRAFLQAILEHEEENEEEDEVPDDETLNQMIARREEEFDLFMRMDMDRRREDARNPKRKPRLMEEDELPSWIIKDDAEVERLTCEEEEEKIFGRGSRQRRDVDYSDALTEKQWLRAIEDGNLEEMEEEVRLKKRKRRRNVDKDPAKEDVEKAKKRRGRPPAEKLSPNPPKLTKQMNAIIDTCINYKDSCNVEKVPSNSQLEIEGNSSGRQLSEVFIQLPSRKELPEYYELIRKPVDFKKIKERIRNHKYRSLGDLEKDVMLLCHNAQTFNLEGSQIYEDSIVLQSVFKSARQKIAKEEESEDESNEEEEEEDEEESESEAKSVKVKIKLNKKDDKGRDKGKGKKRPNRGKAKPVVSDFDSDEEQDEREQSEGSGTDDE

SEQ ID NO: 8812 - protein, 1572 aa, Homo sapiens
MSTPTDPGAMPHPGPSPGPGPSPGPILGPSPGPGPSPGSVHSMMGPSPGPPSVSHPMPTMGSTDFPQEGMHQMHKPIDGIHDKGIVEDIHCGSMKGTGMRPPHPGMGPPQSPMDQHSQGYMSPHPSPLGAPEHVSSPMSGGGPTPPQMPPSQPGALIPGDPQAMSQPNRGPSPFSPVQLHQLRAQILAYKMLARGQPLPETLQLAVQGKRTLPGLQQQQQQQQQQQQQQQQQQQQQQQPQQQPPQPQTQQQQQPALVNYNRPSGPGPELSGPSTPQKLPVPAPGGRPSPAPPAAAQPPAAAVPGPSVPQPAPGQPSPVLQLQQKQSRISPIQKPQGLDPVEILQEREYRLQARIAHRIQELENLPGSLPPDLRTKATVELKALRLLNFQRQLREEVVACMRRDTTLETALNSKAYKRSKRQTLREARMTEKLEKQQKIEQERKRRQKHQEYLNSILQHAKDFKEYHRSVAGKIQKLSKAVATWHANTEREQKKETERIEKERMRRLMAEDEESYRKLIDQKKDRRLAYLLQQTDEYVANLTNLVWEHKQAQAAKEKKKRRRRKKKAEENAEGGESALGPDGEPIDESSQMSDLPVKVTHTETGKVLFGPEAPKASQLDAWLEMNPGYEVAPRSDSEESDSDYEEEDEEEESSRQETEEKILLDPNSEEVSEKDAKQIIETAKQDVDDEYSMQYSARGSQSYYTVAHAISERVEKQSALLINGTLKHYQLQGLEWMVSLYNNNLNGILADEMGLGKTIQTIALITYLMEHKRLNGPYLIIVPLSTLSNWTYEFDKWAPSVVKISYKGTPAMRRSLVPQLRSGKFNVLLTTYEYIIKDKHILAKIRWKYMIVDEGHRMKNHHCKLTQVLNTHYVAPRRILLTGTPLQNKLPELWALLNFLLPTIFKSCSTFEQWFNAPFAMTGERVDLNEEETILIIRRLHKVLRPFLLRRLKKEVESQLPEKVEYVIKCDMSALQKILYRHMQAKGILLTDGSEKDKKGKGGAKTLMNTIMQLRKICNHPYMFQHIEESFAEHLGYSNGVINGAELYRASGKFELLDRILPKLRATNHRVLLFCQMTSLMTIMEDYFAFRNFLYLRLDGTTKSEDRAALLKKFNEPGSQYFIFLLSTRAGGLGLNLQAAHTVVIFDSDWNPHQDLQAQDRAHRIGQQNEVRVLRLCTVNSVEEKILAAAKYKLNVDQKVIQAGMFDQKSSSHERRAFLQAILEHEEENEEEDEVPDDETLNQMIARREEEFDLFMRMDMDRRREDARNPKRKPRLMEEDELPSWIIKDDAEVERLTCEEEEEKIFGRGSRQRRDVDYSDALTEKQWLRAIEDGNLEEMEEEVRLKKRKRRRNVDKDPAKEDVEKAKKRRGRPPAEKLSPNPPKLTKQMNAIIDTVINYKDSSGRQLSEVFIQLPSRKELPEYYELIRKPVDFKKIKERIRNHKYRSLGDLEKDVMLLCHNAQTFNLEGSQIYEDSIVLQSVFKSARQKIAKEEESEDESNEEEEEEDEEESESEAKSVKVKIKLNKKDDKGRDKGKGKKRPNRGKAKPVVSDFDSDEEQDEREQSEGSGTDDE

SEQ ID NO: 8813 - protein, 897 aa, Homo sapiens
MERAGATSRGGQAPGFLLRLHTEGRAEAARVQEQDLRQWGLTGIHLRSYQLEGVNWLAQRFHCQNGCILGDEMGLGKTCQTIALFIYLAGRLNDEGPFLILCPLSVLSNWKEEMQRFAPGLSCVTYAGDKEERACLQQDLKQESRFHVLLTTYEICLKDASFLKSFPWSVLVVDEAHRLKNQSSLLHKTLSEFSVVFSLLLTGTPIQNSLQELYSLLSFVEPDLFSKEEVGDFIQRYQDIEKESESASELHKLLQPFLLRRVKAEVATELPKKTEVVIYHGMSALQKKYYKAILMKDLDAFENETAKKVKLQNILSQLRKCVDHPYLFDGVEPEPFEVGDHLTEASGKLHLLDKLLAFLYSGGHRVLLFSQMTQMLDILQDYMDYRGYSYERVDGSVRGEERHLAIKNFGQQPIFVFLLSTRAGGVGMNLTAADTVIFVDSDFNPQNDLQAAARAHRIGQNKSVKVIRLIGRDTVEEIVYRKAASKLQLTNMIIEGGHFTLGAQKPAADADLQLSEILKFGLDKLLASEGSTMDEIDLESILGETKDGQWVSDALPAAEGGSRDQEEGKNHMYLFEGKDYSKEPSKEDRKSFEQLVNLQKTLLEKASQEGRSLRNKGSVLIPGLVEGSTKRKRVLSPEELEDRQKKRQEAAAKRRRLIEEKKRQKEEAEHKKKMAWWESNNYQSFCLPSEESEPEDLENGEESSAELDYQDPDATSLKYVSGDVTHPQAGAEDALIVHCVDDSGHWGRGGLFTALEKRSAEPRKIYELAGKMKDLSLGGVLLFPVDDKESRNKGQDLLALIVAQHRDRSNVLSGIKMAALEEGLKKIFLAAKKKKASVHLPRIGHATKGFNWYGTERLIRKHLAARGIPTYIYYFPRSKSAVLHSQSSSSSSRQLVP

SEQ ID NO: 8814 - protein, 1944 aa, Homo sapiens
MKAADTVILWARSKNDQLRISFPPGLCWGDRMPDKDDIRLLPSALGVKKRKRGPKKQKENKPGKPRKRKKRDSEEEFGSERDEYREKSESGGSEYGTGPGRKRRRKHREKKEKKTKRRKKGEGDGGQKQVEQKSSATLLLTWGLEDVEHVFSEEDYHTLTNYKAFSQFMRPLIAKKNPKIPMSKMMTILGAKWREFSANNPFKGSAAAVAAAAAAAAAAVAEQVSAAVSSATPIAPSGPPALPPPPAADIQPPPIRRAKTKEGKGPGHKRRSKSPRVPDGRKKLRGKKMAPLKIKLGLLGGKRKKGGSYVFQSDEGPEPEAEESDLDSGSVHSASGRPDGPVRTKKLKRGRPGRKKKKVLGCPAVAGEEEVDGYETDHQDYCEVCQQGGEIILCDTCPRAYHLVCLDPELDRAPEGKWSCPHCEKEGVQWEAKEEEEEYEEEGEEEGEKEEEDDHMEYCRVCKDGGELLCCDACISSYHIHCLNPPLPDIPNGEWLCPRCTCPVLKGRVQKILHWRWGEPPVAVPAPQQADGNPDVPPPRPLQGRSEREFFVKWVGLSYWHCSWAKELQLEIFHLVMYRNYQRKNDMDEPPPLDYGSGEDDGKSDKRKVKDPHYAEMEEKYYRFGIKPEWMTVHRIINHSVDKKGNYHYLVKWRDLPYDQSTWEEDEMNIPEYEEHKQSYWRHRELIMGEDPAQPRKYKKKKKELQGDGPPSSPTNDPTVKYETQPRFITATGGTLHMYQLEGLNWLRFSWAQGTDTILADEMGLGKTIQTIVFLYSLYKEGHTKGPFLVSAPLSTIINWEREFQMWAPKFYVVTYTGDKDSRAIIRENEFSFEDNAIKGGKKAFKMKREAQVKFHVLLTSYELITIDQAALGSIRWACLVVDEAHRLKNNQSKFFRVLNGYKIDHKLLLTGTPLQNNLEELFHLLNFLTPERFNNLEGFLEEFADISKEDQIKKLHDLLGPHMLRRLKADVFKNMPAKTELIVRVELSPMQKKYYKYILTRNFEALNSRGGGNQVSLLNIMMDLKKCCNHPYLFPVAAMESPKLPSGAYEGGALIKSSGKLMLLQKMLRKLKEQGHRVLIFSQMTKMLDLLEDFLDYEGYKYERIDGGITGALRQEAIDRFNAPGAQQFCFLLSTRAGGLGINLATADTVIIFDSDWNPHNDIQAFSRAHRIGQANKVMIYRFVTRASVEERITQVAKRKMMLTHLVVRPGLGSKAGSMSKQELDDILKFGTEELFKDENEGENKEEDSSVIHYDNEAIARLLDRNQDATEDTDVQNMNEYLSSFKVAQYVVREEDKIEEIEREIIKQEENVDPDYWEKLLRHHYEQQQEDLARNLGKGKRVRKQVNYNDAAQEDQDNQSEYSVGSEEEDEDFDERPEGRRQSKRQLRNEKDKPLPPLLARVGGNIEVLGFNTRQRKAFLNAVMRWGMPPQDAFTTQWLVRDLRGKTEKEFKAYVSLFMRHLCEPGADGSETFADGVPREGLSRQQVLTRIGVMSLVKKKVQEFEHINGRWSMPELMPDPSADSKRSSRASSPTKTSPTTPEASATNSPCTSKPATPAPSEKGEGIRTPLEKEEAENQEEKPEKNSRIGEKMETEADAPSPAPSLGERLEPRKIPLEDEVPGVPGEMEPEPGYRGDREKSEDVKGDRELRPGPRDEPRSNGRREEKTEKPRFMFNIADGGFTELHTLWQNEERAAISSGKLNEIWHRRHDYWLLAGIVLHGYARWQDIQNDAQFAIINEPFKTEANKGNFLEMKNKFLARRFKLLEQALVIEEQLRRAAYLNLSQEPAHPAMALHARFAEAECLAESHQHLSKESLAGNKPANAVLHKVLNQLEELLSDMKADVTRLPATLSRIPPIAARLQMSERSILSRLASKGTEPHPTPAYPPGPYATPPGYGAAFSAAPVGALAAAGANYSQMPAGSFITAATNGPIHRFFKKVPEIQ

SEQ ID NO: 8815 - protein, 1937 aa, Homo sapiens
MASGLGSPSPCSAGSEEEDMDALLNNSLPPPHPEDPEEDLSETETPKLKKKKKPKKPRDPKIPKSKRQKKERMLLCRQLGDSSGEGPEFVEEEEEVALRSDSEGSDYTPGKKKKKKLGPKKEKKSKSKRKEEEEEEDDDDDSKEPKSSAQLLEDWGMEDIDHVFSEEDYRTLTNYKAFSQFVRPLIAAKNPKIAVSKMMMVLGAKWREFSTNNPFKGSSGASVAAAAAAAVAVVESMVTATEVAPPPPPVEVPIRKAKTKEGKGPNARRKPKGSPRVPDAKKPKPKKVAPLKIKLGGFGSKRKRSSSEDDDLDVESDFDDASINSYSVSDGSTSRSSRSRKKLRTTKKKKKGEEEVTAVDGYETDHQDYCEVCQQGGEIILCDTCPRAYHMVCLDPDMEKAPEGKWSCPHCEKEGIQWEAKEDNSEGEEILEEVGGDLEEEDDHHMEFCRVCKDGGELLCCDTCPSSYHIHCLNPPLPEIPNGEWLCPRCTCPALKGKVQKILIWKWGQPPSPTPVPRPPDADPNTPSPKPLEGRPERQFFVKWQGMSYWHCSWVSELQLELHCQVMFRNYQRKNDMDEPPSGDFGGDEEKSRKRKNKDPKFAEMEERFYRYGIKPEWMMIHRILNHSVDKKGHVHYLIKWRDLPYDQASWESEDVEIQDYDLFKQSYWNHRELMRGEEGRPGKKLKKVKLRKLERPPETPTVDPTVKYERQPEYLDATGGTLHPYQMEGLNWLRFSWAQGTDTILADEMGLGKTVQTAVFLYSLYKEGHSKGPFLVSAPLSTIINWEREFEMWAPDMYVVTYVGDKDSRAIIRENEFSFEDNAIRGGKKASRMKKEASVKFHVLLTSYELITIDMAILGSIDWACLIVDEAHRLKNNQSKFFRVLNGYSLQHKLLLTGTPLQNNLEELFHLLNFLTPERFHNLEGFLEEFADIAKEDQIKKLHDMLGPHMLRRLKADVFKNMPSKTELIVRVELSPMQKKYYKYILTRNFEALNARGGGNQVSLLNVVMDLKKCCNHPYLFPVAAMEAPKMPNGMYDGSALIRASGKLLLLQKMLKNLKEGGHRVLIFSQMTKMLDLLEDFLEHEGYKYERIDGGITGNMRQEAIDRFNAPGAQQFCFLLSTRAGGLGINLATADTVIIYDSDWNPHNDIQAFSRAHRIGQNKKVMIYRFVTRASVEERITQVAKKKMMLTHLVVRPGLGSKTGSMSKQELDDILKFGTEELFKDEATDGGGDNKEGEDSSVIHYDDKAIERLLDRNQDETEDTELQGMNEYLSSFKVAQYVVREEEMGEEEEVEREIIKQEESVDPDYWEKLLRHHYEQQQEDLARNLGKGKRIRKQVNYNDGSQEDRGVCGRPRPPPMGRSTRAVGPAHLPSLPPDWQDDQSDNQSDYSVASEEGDEDFDERSEAPRRPSRKGLRNDKDKPLPPLLARVGGNIEVLGFNARQRKAFLNAIMRYGMPPQDAFTTQWLVRDLRGKSEKEFKAYVSLFMRHLCEPGADGAETFADGVPREGLSRQHVLTRIGVMSLIRKKVQEFEHVNGRWSMPELAEVEENKKMSQPGSPSPKTPTPSTPGDTQPNTPAPVPPAEDGIKIEENSLKEEESIEGEKEVKSTAPETAIECTQAPAPASEDEKVVVEPPEGEEKVEKAEVKERTEEPMETEPKGAADVEKVEEKSAIDLTPIVVEDKEEKKEEEEKKEVMLQNGETPKDLNDEKQKKNIKQRFMFNIADGGFTELHSLWQNEERAATVTKKTYEIWHRRHDYWLLAGIINHGYARWQDIQNDPRYAILNEPFKGEMNRGNFLEIKNKFLARRFKLLEQALVIEEQLRRAAYLNMSEDPSHPSMALNTRFAEVECLAESHQHLSKESMAGNKPANAVLHKVLKQLEELLSDMKADVTRLPATIARIPPVAVRLQMSERNILSRLANRAPEPTPQQVAQQQ

SEQ ID NO: 8816 - protein, 896 aa, Homo sapiens
ERAGATSRGGQAPGFLLRLHTEGPAEAARVQEQDLRQWGLTGIHLRSYQLEGVNWLAQRFHCQNGCILGDEMGLGKTCQTIALFIYLAGRLNDEGPFLILCPLSVLSNWKEEMQRFAPGLSCVTYAGDKEERACLQQDLKQESRFHVLLTTYEICLKDASFLKSFPWSVLVVDEAHRLKNQSSLLHKTLSEFSVVFSLLLTGTPIQNSLQELYSLLSFVEPDLFSKEEVGDFIQRYQDIEKESESASELHKLLQPFLLRRVKAEVATELPKKTEVVIYHGMSALQKKYYKAILMKDLDAFENETAKKVKLQNILSQLRKCVDHPYLFDGVEPEPFEVGDHLTEASGKLHLLDKLLAFLYSGGHRVLLFSQMTQMLDILQDYMDYRGYSYERVDGSVRGEERHLAIKNFGQQPIFVFLLSTRAGGVGMNLTAADTVIFVDSDFNPQNDLQAAARAHRIGQNKSVKVIRLIGRDTVEEIVYRKAASKLQLTNMIIEGGHFTLGAQKPAADADLQLSEILKFGLDKLLASEGSTMDEIDLESILGETKDGQWVSDALPAAEGGSRDQEEGKNHMYLFEGKDYSKEPSKEDRKSFEQLVNLQKTLLEKASQEGRSLRNKGSVLIPGLVEGSTKRKRVLSPEELEDRQKKRQEAAAKRRRLIEEKKRQKEEAEHKKKMAWWESNNYQSFCLPSEESEPEDLENGEESSAELDYQDPDATSLKYVSGDVTHPQAGAEDALIVHCVDDCGHWGRGGLFTALEKRSAEPRKIYELAGKMKDLSLGGVLLFPVDDKESRNKGQDLLALIVAQHRDRSNVLSGIKMAALEEGLKKIFLAAKKKKASVHLPRIGHATKGFNWYGTERLIRKHLAARGIPTYIYYFPRSKSAVLHSQSSSSSSRQLVP

SEQ ID NO: 8817 - protein, 890 aa, Homo sapiens
SRGGQAPGFLLRLHTEGRAEAARVQEQDLRQWGLTGIHLRSYQLEGVNWLAQRFHCQNGCILGDEMGLGKTCQTIALFIYLAGRLNDEGPFLILCPLSVLSNWKEEMQRFAPGLSCVTYAGDKEERACLQQDLKQESRFHVLLTTYEICLKDASFLKSFPWSVLVVDEAHRLKNQSSLLHKTLSEFSVVFSLLLTGTPIQNSLQELYSLLSFVEPDLFSKEEVGDFIQRYQDIEKESESASELHKLLQPFLLRRVKAEVATELPKKTEVVIYHGMSALQKKYYKAILMKDLDAFENETAKKVKLQNILSQLRKCVDHPYLFDGVEPEPFEVGDHLTEASGKLHLLDKLLAFLYSGGHRVLLFSQMTQMLDILQDYMDYRGYSYERVDGSVRGEERHLAIKNFGQQPIFVFLLSTRAGGVGMNLTAADTVIFVDSDFNPQNDLQAAARAHRIGQNKSVKVIRLIGRDTVEEIVYRKAASKLQLTNMIIEGGHFTLGAQKPAADADLQLSEILKFGLDKLLASEGSTMDEIDLESILGETKDGQWVSDALPAAEGGSRDQEEGKNHMYLFEGKDYSKEPSKEDRKSFEQLVNLQKTLLEKASQEGRSLRNKGSVLIPGLVEGSTKRKRVLSPEELEDRQKKRQEAAAKRRRLIEEKKRQKEEAEHKKKMAWWESNNYQSFCLPSEESEPEDLENGEESSAELDYQDPDATSLKYVSGDVTHPQAGAEDALIVHCVDDSGHWGRGGLFTALEKRSAEPRKIYELAGKMKDLSLGGVLLFPVDDKESRNKGQDLLALIVAQHRDRSNVLSGIKMAALEEGLKKIFLAAKKKKASVHLPRIGHATKGFNWYGTERLIRKHLAARGIPTYIYYFPRSKSAVLHSQSSSSSSRQLVP

SEQ ID NO: 8818 - protein, 1912 aa, Homo sapiens
MASGLGSPSPCSAGSEEEDMDALLNNSLPPPHPENEEDPEEDLSETETPKLKKKKKPKKPRDPKIPKSKRQKKERMLLCRQLGDSSGEGPEFVEEEEEVALRSDSEGSDYTPGKKKKKKLGPKKEKKSKSKRKEEEEEDDDDDDSKEPKSSAQLLEDWGMEDIDHVFSEEDYRTLTNYKAFSQFVRPLIAAKNPKIAVSKMMMVLGAKWREFSTNNPFKGSSGASVAAAAAAAVAVVESMVTATEVAPPPPPVEVPIRKAKTKEGKGPNARRKPKGSPRVPDAKKPKPKKVAPLKIKLGGFGSKRKRSSSEDDDLDVESDFDDASINSYSVSDGSTSRSSRSRKKLRTTKKKKKGEEEVTAVDGYETDHQDYCEVCQQGGEIILCDTCPRAYHMVCLDPDMEKAPEGKWSCPHCEKEGIQWEAKEDNSEGEEILEEVGGDLEEEDDHHMEFCRVCKDGGELLCCDTCPSSYHIHCLNPPLPEIPNGEWLCPRCTCPALKGKVQKILIWKWGQPPSPTPVPRPPDADPNTPSPKPLEGRPERQFFVKWQGMSYWHCSWVSELQLELHCQVMFRNYQRKNDMDEPPSGDFGGDEEKSRKRKNKDPKFAEMEERFYRYGIKPEWMMIHRILNHSVDKKGHVHYLIKWRDLPYDQASWESEDVEIQDYDLFKQSYWNHRELMRGEEGRPGKKLKKVKLRKLERPPETPTVDPTVKYERQPEYLDATGGTLHPYQMEGLNWLRFSWAQGTDTILADEMGLGKTVQTAVFLYSLYKEGHSKGPFLVSAPLSTIINWEREFEMWAPDMYVVTYVGDKDSRAIIRENEFSFEDNAIRGGKKASRMKKEASVKFHVLLTSYELITIDMAILGSIDWACLIVDEAHRLKNNQSKFFRVLNGYSLQHKLLLTGTPLQNNLEELFHLLNFLTPERFHNLEGFLEEFADIAKEDQIKKLHDMLGPHMLRRLKADVFKNMPSKTELIVRVELSPMQKKYYKYILTRNFEALNARGGGNQVSLLNVVMDLKKCCNHPYLFPVAAMEAPKMPNGMYDGSALIRASGKLLLLQKMLKNLKEGGHRVLIFSQMTKMLDLLEDFLEHEGYKYERIDGGITGNMRQEAIDRFNAPGAQQFCFLLSTRAGGLGINLATADTVIIYDSDWNPHNDIQAFSRAHRIGQNKKVMIYRFVTRASVEERITQVAKKKMMLTHLVVRPGLGSKTGSMSKQELDDILKFGTEELFKDEATDGGGDNKEGEDSSVIHYDDKAIERLLDRNQDETEDTELQGMNEYLSSFKVAQYVVREEEMGEEEEVEREIIKQEESVDPDYWEKLLRHHYEQQQEDLARNLGKGKRIRKQVNYNDGSQEDRDWQDDQSDNQSDYSVASEEGDEDFDERSEAPRRPSRKGLRNDKDKPLPPLLARVGGNIEVLGFNARQRKAFLNAIMRYGMPPQDAFTTQWLVRDLRGKSEKEFKAYVSLFMRHLCEPGADGAETFADGVPREGLSRQHVLTRIGVMSLIRKKVQEFEHVNGRWSMPELAEVEENKKMSQPGSPSPKTPTPSTPGDTQPNTPAPVPPAEDGIKIEENSLKEEESIEGEKEVKSTAPETAIECTQAPAPASEDEKVVVEPPEGEEKVEKAEVKERTEEPMETEPKGAADVEKVEEKSAIDLTPIVVEDKEEKKEEEEKKEVMLQNGETPKDLNDEKQKKNIKQRFMFNIADGGFTELHSLWQNEERAATVTKKTYEIWHRRHDYWLLAGIINHGYARWQDIQNDPRYAILNEPFKGEMNRGNFLEIKNKFLARRFKLLEQALVIEEQLRRAAYLNMSEDPSHPSMALNTRFAEVECLAESHQHLSKESMAGNKPANAVLHKVLKQLEELLSDMKADVTRLPATIARIPPVAVRLQMSERNILSRLANRAPEPTPQQVAQQQ

SEQ ID NO: 8819 - protein, 2000 aa, Homo sapiens [sequence omitted]

SEQ ID NO: 8820 - protein, 831 aa, Homo sapiens
MERAGATSRGGQAPGFLLRLHTEGRAEAARVQEQDLRQWGLTGIHLRSYQLEGVNWLAQRFHCQNGCILGDEMGLGKTCQTIALFIYLAGRLNDEGPFLILCPLSVLSNWKEEMQRFAPGLSCVTYAGDKEERACLQQDLKQESRFHVLLTTYEICLKDASFLKSFPWSVLVVDEAHRLKNQSSLLHKTLSEFSVVFSLLLTGTPIQNSLQELYSLLSFVEPDLFSKEEVGDFIQRYQDIEKESESASELHKLLQPFLLRRVKAEVATELPKKTEVVIYHGMSALQKKYYKAILMKDLDAFENETAKKVKLQNILSQLRKCVDHPYLFDGVEPEPFEVGDHLTEASGKLHLLDKLLAFLYSGGHRVLLFSQMTQMLDILQDYMDYRGYSYERVDGSVRGEERHLAIKNFGQQPIFVFLLSTRAGGVGMNLTAADTVIFVDSDFNPQNDLQAAARAHRIGQNKSVKVIRLIGRDTVEEIVYRKAASKLQLTNMIIEGGHFTLGAQKPAADADLQLSEILKFGLDKLLASEGSTMDEIDLESILGETKDGQWVSDALPAAEGGSRDQEEGKNHMYLFEGKDYSKEPSKEDRKSFEQLVNLQKTLLEKASQEGRSLRNKGSVLIPGLVEGSTKRKRVLSPEELEDRQKKRQEAAAKRRRLIEEKKRQKEEAEHKKKVAWWESNNYQSFCLPSEESEPEDLENGEESSAELDYQDPDATSLKYVSGDVTHPQAGAEDALIVHCVDDSGHWGRGGLFTALEKRSAEPRKIYELAGKMKDLSLGGVLLFPVDDKESRNKGQDLLALIVAQHRDRSNVLSGIKMAALEEGLKKIFLAA

SEQ ID NO: 8821 - protein, 1647 aa, Homo sapiens
MSTPDPPLGGTPRPGPSPGPGPSPGAMLGPSPGPSPGSAHSMMGPSPGPPSAGHPIPTQGPGGYPQDNMHQMHKPMESMHEKGMSDDPRYNQMKGMGMRSGGHAGMGPPPSPMDQHSQGYPSPLGGSEHASSPVPASGPSSGPQMSSGPGGAPLDGADPQALGQQNRGPTPFNQNQLHQLRAQIMAYKMLARGQPLPDHLQMAVQGKRPMPGMQQQMPTLPPPSVSATGPGPGPGPGPGPGPGPAPPNYSRPHGMGGPNMPPPGPSGVPPGMPGQPPGGPPKPWPEGPMANAAAPTSTPQKLIPPQPTGRPSPAPPAVPPAASPVMPPQTQSPGQPAQPAPMVPLHQKQSRITPIQKPRGLDPVEILQEREYRLQARIAHRIQELENLPGSLAGDLRTKATIELKALRLLNFQRQLRQEVVVCMRRDTALETALNAKAYKRSKRQSLREARITEKLEKQQKIEQERKRRQKHQEYLNSILQHAKDFKEYHRSVTGKIQKLTKAVATYHANTEREQKKENERIEKERMRRLMAEDEEGYRKLIDQKKDKRLAYLLQQTDEYVANLTELVPQHKAAQVAKEKKKKKKKKKAENAEGQTPAIGPDGEPLDETSQMSDLPVKVIHVESGKILTGTDAPKAGQLEAWLEMNPGYEVAPRSDSEESGSEEEEEEEEEEQPQAAQPPTLPVEEKKKIPDPDSDDVSEVDARHIIENAKQDVDDEYGVSQALARGLQSYYAVAHAVTERVDKQSALMVNGVLKQYQIKGLEWLVSLYNNNLNGILADEMGLGKTIQTIALITYLMEHKRINGPFLIIVPLSTLSNWAYEFDKWAPSVVKVSYKGSPAARRAFVPQLRSGKFNVLLTTYEYIIKDKHILAKIRWKYMIVDEGHRMKNHHCKLTQVLNTHYVAPRRLLLTGTPLQNKLPELWALLNFLLPTIFKSCSTFEQWFNAPFAMTGEKVDLNEEETILIIRRLHKVLRPFLLRRLKKEVEAQLPEKVEYVIKCDMSALQRVLYRHMQAKGVLLTDGSEKDKKGKGGTKTLMNTIMQLRKICNHPYMFQHIEESFSEHLGFTGGIVQGLDLYRASGKFELLDRILPKLRATNHKVLLFCQMTSLMTIMEDYFAYRGFKYLRLDGTTKAEDRGMLLKTFNEPGSEYFIFLLSTRAGGLGLNLQSADTVIIFDSDWNPHQDLQAQDRAHRIGQQNEVRVLRLCTVNSVEEKILAAAKYKLNVDQKVIQAGMFDQKSSSHERRAFLQAILEHEEQDESRHCSTGSGSASFAHTAPPPAGVNPDLEEPPLKEEDEVPDDETVNQMIARHEEEFDLFMRMDLDRRREEARNPKRKPRLMEEDELPSWIIKDDAEVERLTCEEEEEKMFGRGSRHRKEVDYSDSLTEKQWLKAIEEGTLEEIEEEVRQKKSSRKRKRDSDAGSSTPTTSTRSRDKDDESKKQKKRGRPPAEKLSPNPPNLTKKMKKIVDAVIKYKDSSSGRQLSEVFIQLPSRKELPEYYELIRKPVDFKKIKERIRNHKYRSLNDLEKDVMLLCQNAQTFNLEGSLIYEDSIVLQSVFTSVRQKIEKEDDSEGEESEEEEEGEEEGSESESRSVKVKIKLGRKEKAQDRLKGGRRRPSRGSRAKPVVSDDDSEEEQEEDRSGSGSEED

SEQ ID NO: 8822 - protein, 1647 aa, Homo sapiens
MSTPDPPLGGTPRPGPSPGPGPSPGAMLGPSPGPSPGSAHSMMGPSPGPPSAGHPIPTQGPGGYPQDNMHQMHKPMESMHEKGMSDDPRYNQMKGMGMRSGGHAGMGPPPSPMDQHSQGYPSPLGGSEHASSPVPASGPSSGPQMSSGPGGAPLDGADPQALGQQNRGPTPFNQNQLHQLRAQIMAYKMLARGQPLPDHLQMAVQGKRPMPGMQQQMPTLPPPSVSATGPGPGPGPGPGPGPGPAPPNYSRPHGMGGPNMPPPGPSGVPPGMPGQPPGGPPKPWPEGPMANAAAPTSTPQKLIPPQPTGRPSPAPPAVPPAASPVMPPQTQSPGQPAQPAPMVPLHQKQSRITPIQKPRGLDPVEILQEREYRLQARIAHRIQELENLPGSLAGDLRTKATIELKALRLLNFQRQLRQEVVVCMRRDTALETALNAKAYKRSKRQSLREARITEKLEKQQKIEQERKRRQKHQEYLNSILQHAKDFKEYHRSVTGKIQKLTKAVATYHANTEREQKKENERIEKERMRRLMAEDEEGYRKLIDQKKDKRLAYLLQQTDEYVANLTELVRQHKAAQVAKEKKKKKKKKKAENAEGQTPAIGPDGEPLDETSQMSDLPVKVIHVESGKILTGTDAPKAGQLEAWLEMNPGYEVAPRSDSEESGSEEEEEEEEEEQPQAAQPPTLPVEEKKKIPDPDSDDVSEVDARHIIENAKQDVDDEYGVSQALARGLQSYYAVAHAVTERVDKQSALMVNGVLKQYQIKGLEWLVSLYNNNLNGILADEMGLGKTIQTIALITYLMEHKRINGPFLIIVPLSTLSNWAYEFDKWAPSVVKVSYKGSPAARRAFVPQLRSGKFNVLLTTYEYIIKDKHILAKIRWKYMIVDEGHRMKNHHCKLTQVLNTHYVAPRRLLLTGTPLQNKLPELWALLNFLLPTIFKSCSTFEQWFNAPFAMTGEKVDLNEEETILIIRRLHKVLRPFLLRRLKKEVEAQLPEKVEYVIKCDMSALQRVLYRHMQAKGVLLTDGSEKDKKGKGGTKTLMNTIMQLRKICNHPYMFQHIEESFSEHLGFTGGIVQGLDLYRASGKFELLDRILPKLRATNHKVLLFCQMTSLMTIMEDYFAYRGFKYLRLDGTTKAEDRGMLLKTFNEPGSEYFIFLLSTRAGGLGLNLQSADTVIIFDSDWNPHQDLQAQDRAHRIGQQNEVRVLRLCTVNSVEEKILAAAKYKLNVDQKVIQAGMFDQKSSSHERRAFLQAILEHEEQDESRHCSTGSGSASFAHTAPPPAGVNPDLEEPPLKEEDEVPDDETVNQMIARHEEEFDLFMRMDLDRRREEARNPKRKPRLMEEDELPSWIIKDDAEVERLTCEEEEEKMFGRGSRHRKEVDYSDSLTEKQWLKAIEEGTLEEIEEEVRQKKSSRKRKRDSDAGSSTPTTSTRSRDKDDESKKQKKRGRPPAEKLSPNPPNLTKKMKKIVDAVIKYKDSSSGRQLSEVFIQLPSRKELPEYYELIRKPVDFKKIKERIRNHKYRSLNDLEKDVMLLCQNAQTFNLEGSLIYEDSIVLQSVFTSVRQKIEKEDDSEGEESEEEEEGEEEGSESESRSVKVKIKLGRKEKAQDRLKGGRRRPSRGSRAKPVVSDDDSEEEQEEDRSGSGSEED

SEQ ID NO: 8823 - protein, 1679 aa, Homo sapiens
MSTPDPPLGGTPRPGPSPGPGPSPGAMLGPSPGPSPGSAHSMMGPSPGPPSAGHPIPTQGPGGYPQDNMHQMHKPMESMHEKGMSDDPRYNQMKGMGMRSGGHAGMGPPPSPMDQHSQGYPSPLGGSEHASSPVPASGPSSGPQMSSGPGGAPLDGADPQALGQQNRGPTPFNQNQLHQLRAQIMAYKMLARGQPLPDHLQMAVQGKRPMPGMQQQMPTLPPPSVSATGPGPGPGPGPGPGPGPAPPNYSRPHGMGGPNMPPPGPSGVPPGMPGQPPGGPPKPWPEGPMANAAAPTSTPQKLIPPQPTGRPSPAPPAVPPAASPVMPPQTQSPGQPAQPAPMVPLHQKQSRITPIQKPRGLDPVEILQEREYRLQARIAHRIQELENLPGSLAGDLRTKATIELKALRLLNFQRQLRQEVVVCMRRDTALETALNAKAYKRSKRQSLREARITEKLEKQQKIEQERKRRQKHQEYLNSILQHAKDFKEYHRSVTGKIQKLTKAVATYHANTEREQKKENERIEKERMRRLMAEDEEGYRKLIDQKKDKRLAYLLQQTDEYVANLTELVRQHKAAQVAKEKKKKKKKKKAENAEGQTPAIGPDGEPLDETSQMSDLPVKVIHVESGKILTGTDAPKAGQLEAWLEMNPGYEVAPRSDSEESGSEEEEEEEEEEQPQAAQPPTLPVEEKKKIPDPDSDDVSEVDARHIIENAKQDVDDEYGVSQALARGLQSYYAVAHAVTERVDKQSALMVNGVLKQYQIKGLEWLVSLYNNNLNGILADEMGLGKTIQTIALITYLMEHKRINGPFLIIVPLSTLSNWAYEFDKWAPSVVKVSYKGSPAARRAFVPQLRSGKFNVLLTTYEYIIKDKHILAKIRWKYMIVDEGHRMKNHHCKLTQVLNTHYVAPRRLLLTGTPLQNKLPELWALLNFLLPTIFKSCSTFEQWFNAPFAMTGEKVDLNEEETILIIRRLHKVLRPFLLRRLKKEVEAQLPEKVEYVIKCDMSALQRVLYRHMQAKGVLLTDGSEKDKKGKGGTKTLMNTIMQLRKICNHPYMFQHIEESFSEHLGFTGGIVQGLDLYRASGKFELLDRILPKLRATNHKVLLFCQMTSLMTIMEDYFAYRGFKYLRLDGTTKAEDRGMLLKTFNEPGSEYFIFLLSTRAGGLGLNLQSADTVIIFDSDWNPHQDLQAQDRAHRIGQQNEVRVLRLCTVNSVEEKILAAAKYKLNVDQKVIQAGMFDQKSSSHERRAFLQAILEHEEQDESRHCSTGSGSASFAHTAPPPAGVNPDLEEPPLKEEDEVPDDETVNQMIARHEEEFDLFMRMDLDRRREEARNPKRKPRLMEEDELPSWIIKDDAEVERLTCEEEEEKMFGRGSRHRKEVDYSDSLTEKQWLKKITGKDIHDTASSVARGLQFQRGLQFCTRASKAIEEGTLEEIEEEVRQKKSSRKRKRDSDAGSSTPTTSTRSRDKDDESKKQKKRGRPPAEKLSPNPPNLTKKMKKIVDAVIKYKDSSSGRQLSEVFIQLPSRKELPEYYELIRKPVDFKKIKERIRNHKYRSLNDLEKDVMLLCQNAQTFNLEGSLIYEDSIVLQSVFTSVRQKIEKEDDSEGEESEEEEEGEEEGSESESRSVKVKIKLGRKEKAQDRLKGGRRRPSRGSRAKPVVSDDDSEEEQEEDRSGSGSEED

SEQ ID NO: 8824 - protein, 1613 aa, Homo sapiens
MSTPDPPLGGTPRPGPSPGPGLPLEPCWALAGSLAGLRHSMMGPSPGPPSAGHPIPTQGPGGYPQDNMHQMHKPMESMHEKGMSDDPRYNQMKGMGMRSGGHAGMGPPPSPMDQYSQGYPSPLGGSEHASSPVPASGPSSGPQMSSGPGGAPLDGADPQALGQQNRGPTPFNQNQLHQLRAQIMAYKMLARGQPLPDHLQMAVQGKRPMPGMQQQMPTLPPPSVSATGPGPGPGPGPGPGPGPAPPNYSRPHGMGGPNMPPPGPSGVPPGMPGQPPGGPPKPWPEGPMANAAAPTSTPQKLIPPQPTGRPSPAPPAVPPAASPVMPPQTQSPGQPAQPAPMVPLHQKQSRITPIQKPRGLDPVEILQEREYRLQARIAHRIQELENLPGSLVGDLRTKVTIELKDLRLLNFQRQLRQEVVVCMRRDTALETALNVKAYKRSKRQSLREARITEKLEKQQKIEQERKRRQKHQEYLNSILQHAKDFKEYHRSVTGTIQKLTKAVSTYHANTEREQKKENERIEKERIRRLMAEDEEGYRKLIDQKKDKRLAYLLQQTDEYVANLTELVRQHKASQVAKEIKKKKTKKKAENAEGQTPAIGPDGEPLDETSQMSDLPVKVIHVESGKILTGTDAPKAGQLEAWLEMNPGYEVAPRSDSEESGSEEEEEEEEEEQPQQAQPPTLPVEEKKKIPDPDSDDVSEVDARHIIENAKQDVDDEYGVSQALARGLQSYYAVAHAVTERVDKQSALMVNGVLKQYQIKGLEWLVSLYNNLNGILADEMGLGKTIQTIALITYLMEHKRINGPFLIIVPLSTLSNWAYEFDKWAPSVVKVSYKGSPAAKRAFVPQLRSGKFNVLLTTYEYIIKNKHILAKTRWKYMIVDEGHRMKNHHCKLKQVLNTHYVAPRRLLLTGTPLQNKLPELWALLNFLLPTIFKSCSTFEQWFNAPFAMTGEKVDLNEEETILIIRRLHKVLRPFLLRRLKKEVEAQLPEKVEYVIKCDMSALQRVLYRHMQAKGVLLTDGSEKDKKGKGGTKTLMNTIMQLRKICNHPYMFQHIEESFSEHLGFTGGIVQGLDMYRASGKFELLDRILPKLRATNHKVLLFCQMTSLMTIMEDYLAYRGFKYLRLAGTTKAEDRGMLLKTFNEPGSEYFIFLLSTRAGGLGLNLQSADTVIIFDSDWNPHQDLQAQDRAHRIGQRNEVRVLRLCTVNSVEEKILAAAKYKLNVDQKVIQAGMFDQKSSSHERRAFLQAILEHEEQDEEEDEVPDDETVNQMIARHEEEFDLFMRMDLDRRREEARNPKRKPRLMEEDELPSWIIKDDAEVERLTCEEEEEKMFGCSRHRKEVDYSDSLTEKQWLKTLKAIEEGTLEEIEEEVRQKKSSRKRKRDSDAGSSTPTTSTPAATRTTRARSRRSASGRCEKLSPNPPNLTKKMKKIVDAVIKYKDSSSGRQLSEVFIQLPSRKELPEYYELIRKPVDFKKIKERIRNHKYRSLNDLEKDVMLLCQNAQTFNLEGSLIYEDSIVLQSVFTSVRQKIEKEDDSEGEESEEEEEGEEEGSESESRSVKVKIKLGRKEKAQDRLKGGRRRPSRGSRAKPVVSDDDSEEEQEEDRSGSGSEED

SEQ ID NO: 8825 - protein, 1613 aa, Homo sapiens
MSTPDPPLGGTPRPGPSPGPGLPLEPCWALAGSLAGLRHSMMGPSPGPPSAGHPIPTQGPGGYPQDNMHQMHKPMESMHEKGMSDDPRYNQMKGMGMRSGGHAGMGPPPSPMDQYSQGYPSPLGGSEHASSPVPASGPSSGPQMSSGPGGAPLDGADPQALGQQNRGPTPFNQNQLHQLRAQIMAYKMLARGQPLPDHLQMAVQGKRPMPGMQQQMPTLPPPSVSATGPGPGPGPGPGPGPGPAPPNYSRPHGMGGPNMPPPGPSGVPPGMPGQPPGGPPKPWPEGPMANAAAPTSTPQKLIPPQPTGRPSPAPPAVPPAASPVMPPQTQSPGQPAQPAPMVPLHQKQSRITPIQKPRGLDPVEILQEREYRLQARIAHRIQELENLPGSLVGDLRTKVTIELKDLRLLNFQRQLRQEVVVCMRRDTALETALNVKAYKRSKRQSLREARITEKLEKQQKIEQERKRRQKHQEYLNSILQHAKDFKEYHRSVTGTIQRLTKAVSTYHANTEREQKKENERIEKERIRRLMAEDEEGYRKLIDQKKDKRLAYLLQQTDEYVANLTELVRQHKASQVAKEIKKKKTKKKAENAEGQTPAIGPDGEPLDETSQMSDLPVKVIHVESGKILTGTDAPKAGQLEAWLEMNPGYEVAPRSDSEESGSEEEEEEEEEEQPQQAQPPTLPVEEKKKIFDPDSDDVSEVDARHIIENAKQDVDDEYGVSQALARGLQSYYAVAHAVTERVDKQSALMVNGVLKQYQIKGLEWLVSLYNNLNGILADEMGLGKTIQTIALITYLMEHKRINGPFLIIVPLSTLSNWAYEFDKWAPSVVKVSYKGSPAAKRAFVPQLRSGKFNVLLTTYEYIIKNKHILAKTRWKYMIVDEGHRMKNHHCKLKQVLNTHYVAPRRLLLTGTPLQNKLPELWALLNFLLPTIFKSCSTFEQWFNAPFAMTGEKVDLNEEETILIIRRLHKVLRPFLLRRLKKEVEAQLPEKVEYVIKCDMSALQRVLYRHMQAKGVLLTDGSEKDKKGKGGTKTLMNTIMQLRKICNHPYMFQHIEESFSEHLGFTGGIVQGLDMYRASGKFELLDRILPKLRATNHKVLLFCQMTSLMTIMEDYLAYRGFKYLRLAGTTKAEDRGMLLKTFNEPGSEYFIFLLSTRAGGLGLNLQSADTVIIFDSDWNPHQDLQAQDRAHRIGQRNEVRVLRLCTVNSVEEKILAAAKYKLNVDQKVIQAGMFDQKSSSHERRAFLQAILEHEEQDEEEDEVPDDETVNQMIARHEEEFDLFMRMDLDRRREEARNPKRKPRLMEEDELPSWIIKDDAEVERLTCEEEEEKMFGCSRHRKEVDYSDSLTEKQWLKTLKAIEEGTLEEIEEEVRQKKSSRKRKRDSDAGSSTPTTSTPAATRTTRARSRRSASGRCEKLSPNPPNLTKKMKKIVDAVIKYKDSSSGRQLSEVFIQLPSRKELPEYYELIRKPVDFKKIKERIRNHKYRSLNDLEKDVMLLCQNAQTFNLEGSLIYEDSIVLQSVFTSVRQKIEKEDDSEGEESEEEEEGEEEGSESESRSVKVKIKLGRKEKAQDRLKGGRRRPSRGSRAKPVVSDDDSEEEQEEDRSGSGSEED

SEQ ID NO: 8826 - protein, 1033 aa, Homo sapiens
MEQDTAAVAATVAAADATATIVVIEDEQPGPSTSQEEGAAAAATEATAATEKGEKKKEKNVSSFQLKLAAKAPKSEKEMDPEYEEKMKADRAKRFEFLLKQTELFAHFIQPSAQKSPTSPLNMKLGRPRIKKDEKQSLISAGDYRHRRTEQEEDEELLSESRKTSNVCIRFEVSPSYVKGGPLRDYQIRGLNWLISLYENGVNGILADEIPGPHMVLVPKSTLHNWMNEFKRWVPSLRVICFVGDKDARAAFIRDEMMPGEWDVCVTSYEMVIKEKSVFKKFHWRYLVIDEAHRIKNEKSKLSEIVREFKSTNRLLLTGTPLQNNLHELWALLNFLLPDVFNSADDFDSWFDTKNCLGDQKLVERLHAVLKPFLLRRIKTDVEKSLPPKKEIKIYLGLSKMQREWYTKILMKDIDVLNSSGKMDKMRLLNILMQLRKCCNHPYLFDGAEPGPPYTTDEHIVSNSGKMVVLDKLLAKLKEQGSRVLIFSQMTRLLDILEDYCMWRGYEYCRLDGQTPHEEREDKFLEVEFLGQREAIEAFNAPNSSKFIFMLSTRAGGLGINLASADVVILYDSDWNPQVDLQAMDRAHRIGQKKPVRVFRLITDNTVEERIVERAEIKLRLDSIVIQQGRLIDQQSNKLAKEEMLQMIRHGATHVFASKESELTDEDITTILERGEKKTAEMNERLQKMGESSLRNFRMDIEQSLYKFEGEDYREKQKLGMVEWIEPPKRERKANYAVDAYFREALRVSEPKIPKAPRPPKQPNVQDFQFFPPRLFELLEKEILYYRKTIGYKVPRNPDIPNPALAQREEQKKIDGAEPLTPEETEEKEKLLTQGFTNWTKRDFNQFIKANEKYGRDDIDNIAREVEGKSPEEVMEYSAVFWERCNELQDIEKIMAQIERGEARIQRRISIKKALDAKIARYKAPFHQLRIQYGTSKGKNYTEEEDRFLICMLHKMGFDRENVYEELRQCVRNAPQFRFDWFIKSRTAMEFQRRCNTLISLIEKENMEIEERERAEKKKRATKTPMVKFSAFS

SEQ ID NO: 8827 - protein, 1026 aa, Homo sapiens
MNLFNLDRFRFEKRNKIEEAPEATPQPSQPGPSSPISLSAEEENAEGEVSRANTPDSDITEKTEDSSVPETPDNERKASISYFKNQRGIQYIDLSSDSEDVVSPNCSNTVQEKTFNKDTVIIVSEPSEDEESQGLPTMARRNDDISELEDLSELEDLKDAKLQTLKELFPQRSDNDLLKLIESTSTMDGAIAAALLMFGDAGGGPRKRKLSSSSEPYEEDEFNDDQSIKKTRLDHGEESNESAESSSNWEKQESIVLKLQKEFPNFDKQELREVLKEHEWMYTEALESLKVFAEDQDMQYASQSEVPNGKEVSSRSQNYPKNATKTKLKQKFSMKAQNGFNKKRKKNVFNPKRVVEDSEYDSGSDVGSSLDEDYSSGEEVMEDGYKGKILHFLQDASIGELTLIPQCSQKKAQKITELRPFNSWEALFTKMSKTNGLSEDLIWHCKTLIQERDVVIRLMNKCEDISNKLTKQVTMLTGNGGGWNIEQPSILNQSLSLKPYQKVGLNWLALVHKHGLNGILADEMGLGKTIQAIAFLAYLYQEGNNGPHLIVVPASTIDNWLREVNLWCPTLKVLCYYGSQEERKQIRFNIHSRYEDYNVIVTTYNCAISSSDDRSLFRRLKLNYAIFDEGHMLKNMGSIRYQHLMTINANNRLLLTGTPVQNNLLELMSLLNFVMPHMFSSSTSEIRRMFSSKTKSADEQSIYEKERIAHAKQIIKPFILRRVKEEVLKQLPPKKDRIELCAMSEKQEQLYLGLFNRLKKSINNLEKNTEMCNVMMQLRKMANHPLLHRQYYTAEKLKEMSQLMLKEPTHCEANPDLIFEDMEVMTDFELHVLCKQYRHINNFQLDMDLILDSGKFRVLGCILSELKQKGDRVVLFSQFTMMLDILEVLLKHHQHRYLRLDGKTQISERIHLIDEFNTDMDIFVFLLSTKAGGLGINLTSANVVILHDIDCNPYNDKQAEDRCHRVGQTKEVLVIKLISQGTIEESMLKINQQKLKLEQDMTTVDEGDEGSMPADIATLLKTSMGL

SEQ ID NO: 8828 - protein, 1709 aa, Homo sapiens
MNGHSDEESVRNSSGESSQSDDDSGSASGSGSGSSSGSSSDGSSSQSGSSDSDSGSESGSQSESESDTSRENKVQAKPPKVDGAEFWKSSPSILAVQRSAILKKQQQQQQQQQHQASSNSGSEEDSSSSEDSDDSSSEVKRKKHKDEDWQMSGSGSPSQSGSDSESEEEREKSSCDETESDYEPKNKVKSRKPQNRSKSKNGKKILGQKKRQIDSSEEDDDEEDYDNDKRSSRRQATVNVSYKEDEEMKTDSDDLLEVCGEDVPQPEEEEFETIERFMDCRIGRKGATGATTTIYAVEADGDPNAGFEKNKEPGEIQYLIKWKGWSHIHNTWETEETLKQQNVRGMKKLDNYKKKDQETKRWLKNASPEDVEYYNCQQELTDDLHKQYQIVGRIIAHSNQKSAAGYPDYYCKWQGLPYSECSWEDGALISKKFQACIDEYFSRNQSKTTPFKDCKVLKQRPRFVALKKQPSYIGGHEGLELRDYQLNGLNWLAHSWCKGNSCILADEMGLGKTIQTISFLNYLFHEHQLYGPFLLVVPLSTLTSWQREIQTWASQMNAVVYLGDINSRNMIRTHEWTHHQTKRLKFNILLTTYEILLKDKAFLGGLNWAFIGVDEAHRLKNDDSLLYKTLIDFKSNHRLLITGTPLQNSLKELWSLLHFIMPEKFSSWEDFEEEHGKGREYGYASLHKELEPFLLRRVKKDVEKSLPAKVEQILRMEMSALQKQYYKWILTRNYKALSKGSKGSTSGFLNIMMELKKCCNHCYLIKPPDNNEFYNKQEALQHLIRSSGKLILLDKLLIRLRERGNRVLIFSQMVRMLDILAEYLKYRQFPFQRLDGSIKGELRKQALDHFNAEGSEDFCFLLSTRAGGLGINLASADTVVIFDSDWNPQNDLQAQARAHRIGQKKQVNIYRLVTKGSVEEDILERAKKKMVLDHLVIQRMDTTGKTVLHTGSAPSSSTPFNKEELSAILKFGAEELFKEPEGEEQEPQEMDIDEILKRAETHENEPGPLTVGDELLSQFKVANFSNMDEDDIELEPERNSKNWEEIIPEDQRRRLEEEERQKELEEIYMLPRMRNCAKQISFNGSEGRRSRSRRYSGSDSDSISEGKRPKKRGRPRTIPRENIKGFSDAEIRRFIKSYKKFGGPLERLDAIARDAELVDKSETDLRRLGELVHNGCIKALKDSSSGTERTGGRLGKVKGPTFRISGVQVNAKLVISHEEELIPLHKSIPSDPEERKQYTIPCHTKAAHFDIDWGKEDDSNLLIGIYEYGYGSWEMIKMDPDLSLTHKILPDDPDKKPQAKQLQTRADYLIKLLSRDLAKKEALSGAGSSKRRKARAKKNKAMKSIKVKEEIKSDSSPLPSEKSDEDDDKLSESKSDGRERSKKSSVSDAPVHITASGEPVPISEESEELDQKTFSICKERMRPVKAALKQLDRPEKGLSEREQLEHTRQCLIKIGDHITECLKEYTNPEQIKQWRKNLWIFVSKFTEFDARKLHKLYKHAIKKRQESQQNSDQNSNLNPHVIRNPDVERLKENTNHDDSSRDSYSSDRHLTQYHDHHKDRHQGDSYKKSDSRKRPYSSFSNGKDHRDWDHYKQDSRYYSDREKHRKLDDHRSRDHRSNLEGSLKDRSHSDHRSHSDHRLHSDHRSSSEYTHHKSSRDYRYHSDWQMDHRASSSGPRSPLDQRSYGSRSPFEHSVEHKSTPEHTWSSRKT

SEQ ID NO: 8829 - protein, 594 aa, Homo sapiens
KTNGLSEDLIWHCKTLIQERDVVIRLMNKCEDISNKLTKQVTMLTGNGGGWNIEQPSILNQSLSLKPYQKVGLNWLALVHKHGLNGILADEMGLGKTIQAIAFLAYLYQEGNNGPHLIVVPASTIDNWLREVNLWCPTLKVLCYYGSQEERKQIRFNIHSRYEDYNVIVTTYNCAISSSDDRSLFRRLKLNYAIFDEGHMLKNMGSIRYQHLMTINANNRLLLTGTPVQNNLLELMSLLNFVMPHMFSSSTSEIRRMFSSKTKSADEQSIYEKERIAHAKQIIKPFILRRVKEEVLKQLPPKKDRIELCAMSEKQEQLYLGLFNRLKKSINNLEKNTEMCNVMMQLRKMANHPLLHRQYYTAEKLKEMSQLMLKEPTHCEANPDLIFEDMEVMTDFELHVLCKQYRHINNFQLDMDLILDSGKFRVLGCILSELKQKGDRVVLFSQFTMMLDILEVLLKHHQHRYLRLDGKTQISERIHLIDEFNTDMDIFVFLLSTKAGGLGINLTSANVVILHDIDCNPYNDKQAEDRCHRVGQTKEVLVIKLISQGTIEESMLKINQQKLKLEQDMTTVDEGDEGSMPADIATLLKTSMGL

SEQ ID NO: 8830 - protein, 1048 aa, Homo sapiens
GYKIIVHLKPPSLQVVLSTNMNLFNLDRFRFEKRNKIEEAPEATPQPSQPGPSSPISLSAEEENAEGEVSRANTPDSDITEKTEDSSVPETPDNERKASISYFKNQRGIQYIDLSSDSEDVVSPNCSNTVQEKTFNKDTVIIVSEPSEDEESQGLPTMARRNDDISELEDLSELEDLKDAKLQTLKELFPQRSDNDLLKLIESTSTMDGAIAAALLMFGDAGGGPRKRKLSSSSEPYEEDEFNDDQSIKKTRLDHGEESNESAESSSNWEKQESIVLKLQKEFPNFDKQELREVLKEHEWMYTEALESLKVFAEDQDMQYVSQSEVPNGKEVSSRSQNYPKNATKTKLKQKFSMKAQNGFNKKRKKNVFNPKRVVEDSEYDSGSDVGSSLDEDYSSGEEVMEDGYKGKILHFLQDASIGELTLIPQCSQKKAQKITELRPFNSWEALFTKMSKTNGLSEDLIWHCKTLIQERDVVIRLMNKCEDISNKLTKQVTMLTGNGGGWNIEQPSILNQSLSLKPYQKVGLNWLALVHKHGLNGILADEMGLGKTIQAIAFLAYLYQEGNNGPHLIVVPASTIDNWLREVNLWCPTLKVLCYYGSQEERKQIRFNIHSRYEDYNVIVTTYNCAISSSDDRSLFRRLKLNYAIFDEGHMLKNMGSIRYQHLMTINANNRLLLTGTPVQNNLLELMSLLNFVMPHMFSSSTSEIRRMFSSKTKSADEQSIYEKERIAHAKQIIKPFILRRVKEEVLKQLPPKKDRIELCAMSEKQEQLYLGLFNRLKKSINNLVTEKNTEMCNVMMQLRKMANHPLLHRQYYTAEKLKEMSQLMLKEPTHCEANPDLIFEDMEVMTDFELHVLCKQYRHINNFQLDMDLILDSGKFRVLGCILSELKQKGDRVVLFSQFTMMLDILEVLLKHHQHRYLRLDGKTQISERIHLIDEFNTDMDIFVFLLSTKAGGLGINLTSANVVILHDIDCNPYNDKQAEDRCHRVGQTKEVLVIKLISQGTIEESMLKINQQKLKLEQDMTTVDEGDEGSMPADIATLLKTSMGL

SEQ ID NO: 8831 - protein, 1028 aa, Homo sapiens
MNLFNLDRFRFEKRNKIEEAPEATPQPSQPGPSSPISLSAEEENAEGEVSRANTPDSDITEKTEDSSVPETPDNERKASISYFKNQRGIQYIDLSSDSEDVVSPNCSNTVQEKTFNKDTVIIVSEPSEDEESQGLPTMARRNDDISELEDLSELEDLKDAKLQTLKELFPQRSDNDLLKLIESTSTMDGAIAAALLMFGDAGGGPRKRKLSSSSEPYEEDEFNDDQSIKKTRLDHGEESNESAESSNNWEKQESIVLKLQKEFPNFDKQELREVLKEHEWMYTEALESLKVFAEDQDMQYASQSEVPNGKEVSSRSQNYPKNATKTKLKQKFSMKAQNGFNKKRKKNVFNQKRVVEDSEYDSGSDVGSSLDEDYSSGEEVMEDGYKGKILHFLQDASIGELTLIPQCSQKKAQKITELRPFNSWEALFTKMSKTNGLSEDLIWHCKTLIQERDVVIRLMNKCEDISNKLTKQVTMLTGNGGGWNIEQPSILNQSLSLKPYQKVGLNWLALVHKHGLNGILADEMGLGKTIQAIAFLAYLYQEGNNGPHLIVVPASTIDNWLREVNLWCPTLKVLCYYGSQEERKQIRFNIHSRYEDYNVIVTTYNCAISSSDDRSLFRRLKLNYAIFDEGHMLKNMGSIRYQHLMTINANNRLLLTGTPVQNNLLELMSLLNFVMPHMFSSSTSEIRRMFSSKTKSADEQSIYEKERIAHAKQIIKPFILRRVKEEVLKQLPPKKDRIELCAMSEKQEQLYLGLFNRLKKSINNLVTEKNTEMCNVMMQLRKMANHPLLHRQYYTAEKLKEMSQLMLKEPTHCEANPDLIFEDMEVMTDFELHVLCKQYRHINNFQLDMDLILDSGKFRVLGCILSELKQKGDRVVLFSQFTMMLDILEVLLKHHQHRYLRLDGKTQISERIHLIDEFNTDMDIFVFLLSTKAGGLGINLTSANVVILHDIDCNPYNDKQAEDRCHRVGQTKEALVIKLISQGTIEESMLKINQQKLKLEQDMTTVDEGDEGSMPADIATLLKTSMGL

SEQ ID NO: 8832 - protein, 1739 aa, Homo sapiens
MMRNKDKSQEEDSSLHSNASSHSASEEASGSDSGSQSESEQGSDPGSGHGSESNSSSESSESQSESESESAGSKSQPVLPEAKEKPASKKERIADVKKMWEEYPDVYGVRRSNRSRQEPSRFNIKEEASSGSESGSPKRRGQRQLKKQEKWKQEPSEDEQEQGTSAESEPEQKKVKARRPVPRRTVPKPRVKKQPKTQRGKRKKQDSSDEDDDDDEAPKRQTRRRAAKNVSYKEDDDFETDSDDLIEMTGEGVDEQQDNSETIEKVLDSRLGKKGATGASTTVYAIEANGDPSGDFDTEKDEGEIQYLIKWKGWSYIHSTWESEESLQQQKVKGLKKLENFKKKEDEIKQWLGKVSPEDVEYFNCQQELASELNKQYQIVERVIAVKTSKSTLGQTDFPAHSRKPAPSNEPEYLCKWMGLPYSECSWEDEALIGKKFQNCIDSFHSRNNSKTIPTRECKALKQRPRFVALKKQPAYLGGENLELRDYQLEGLNWLAHSWCKNNSVILADEMGLGKTIQTISFLSYLFHQHQLYGPFLIVVPLSTLTSWQREFEIWAPEINVVVYIGDLMSRNTIREYEWIHSQTKRLKFNALITTYEILLKDKTVLGSINWAFLGVDEAHRLKNDDSLLYKTLIDFKSNHRLLITGTPLQNSLKELWSLLHFIMPEKFEFWEDFEEDHGKGRENGYQSLHKVLEPFLLRRVKKDVEKSLPAKVEQILRVEMSALQKQYYKWILTRNYKALAKGTRGSTSGFLNIVMELKKCCNHCYLIKPPEENERENGQEILLSLIRSSGKLILLDKLLTRLRERGNRVLIFSQMVRMLDILAEYLTIKHYPFQRLDGSIKGEIRKQALDHFNADGSEDFCFLLSTRAGGLGINLASADTVVIFDSDWNPQNDLQAQARAHRIGQKKQVNIYRLVTKGTVEEEIIERAKKKMVLDHLVIQRMDTTGRTILENNSGRSNSNPFNKEELTAILKFGAEDLFKELEGEESEPQEMDIDEILRLAETRENEVSTSATDELLSQFKVANFATMEDEEELEERPHKDWDEIIPEEQRKKVEEEERQKELEEIYMLPRIRSSTKKAQTNDSDSDTESKRQAQRSSASESETEDSDDDKKPKRRGRPRSVRKDLVEGFTDAEIRRFIKAYKKFGLPLERLECLARDAELVDKSVADLKRLGELIHNSCVSAMQEYEEQLKENASEGKGPGKRRGPTIKISGVQVNVKSIIQHEEEFEMLHKSIPVDPEEKKKYCLTCRVKAAHFDVEWGVEDDSRLLLGIYEHGYGNWELIKTDPELKLTDKILPVETDKKPQGKQLQTRADYLLKLLRKGLEKKGAVTGGEEAKLKKRKPRVKKENKVPRLKEEHGIELSSPRHSDNPSEEGEVKDDGLEKSPMKKKQKKKENKENKEKQMSSRKDKEGDKERKKSKDKKEKPKSGDAKSSSKSKRSQGPVHITAGSEPVPIGEDEDDDLDQETFSICKERMRPVKKALKQLDKPDKGLNVQEQLEHTRNCLLKIGDRIAECLKAYSDQEHIKLWRRNLWIFVSKFTEFDARKLHKLYKMAHKKRSQEEEEQKKKDDVTGGKKPFRPEASGSSRDSLISQSHTSHNLHPQKPHLPASHGPQMHGHPRDNYNHPNKRHFSNADRGDWQRERKFNYGGGNNNPPWGSDRHHQYEQHWYKDHHYGDRRHMDAHRSGSYRPNNMSRKRPYDQYSSDRDHRGHRDYYDRYAKGCETPGANLCQELFLGRK

SEQ ID NO: 8833 - protein, 2713 aa, Homo sapiens [sequence omitted]

SEQ ID NO: 8834 - protein, 2715 aa, Homo sapiens
MKMKIQKKEKQLSNLKVLNHSPMSDASVNFDYKSPSPFDCSTDQEEKIEDVASHCLPQKDLYTAEEEAATLFPRKMTSHNGMEDSGGGGTGVKKKRKKKEPGDQEGAAKGSKDREPKPKRKREPKEPKEPRKAKEPKKAKEHKEPKQKDGAKKARKPREASGTKEAKEKRSCTDSAARTKSRKASKEQGPTPVEKKKKGKRKSETTVESLELDQGLTNPSLRSPEESTESTDSQKRRSGRQVKRRKYNEDLDFKVVDDDGETIAVLGAGRTSALSASTLAWQAEEPPEDDANIIEKILASKTVQEVHPGEPPFDLELFYVKYRNFSYLHCKWATMEELEKDPRIAQKIKRFRNKQAQMKHIFTEPDEDLFNPDYVEVDRILEVAHTKDAETGEEVTHYLVKWCSLPYEESTWELEEDVDPAKVKEFESLQVLPEIKHVERPASDSWQKLEKSREYKNSNQLREYQLEGMNWLLFNWYNRKNCILADEMGLGKTIQSITFLSEIFLRGIHGPFLIIAPLSTITNWEREFRTWTEMNAIVYHGSQISRQMIQQYEMVYRDAQGNPLSGVFKFHVVITTFEMILADCPELKKIHWSCVIIDEAHRLKNRNCKLLEGLKLMALEHKVLLTGTPLQNSVEELFSLLNFLEPSQFPSETAFLEEFGDLKTEEQVKKLQSILKPMMLRRLKDDVEKNLAPKQETIIEVELTNIQKKYYRAILEKNFSFLTKGANQHNMPNLINTMMELRKCCNHPYLINGAEEKILEDFRKTHSPDAPDFQLQAMIQAAGKLVLIDKLLPKLIAGGHKVLIFSQMVRCLDILEDYLIQRRYTYERIDGRVRGNLRQAAIDRFCKPDSDRFVFLLCTRAGGLGINLTAADTCIIFDSDWNPQNDLQAQARCHRIGQSKAVKVYRLITRNSYEREMFDKASLKLGLDKAVLQDINRKGGTNGVQQLSKMEVEDLLRKGAYGALMDEEDEGSKFCEEDIDQILQRRTHTITIQSEGKGSTFAKASFVASGNRTDISLDDPNFWQKWAKIAELDTEAKNEKESLVIDRPRVRKQTKHYNSFEEDELMEFSELDSDSDERPTRSRRLNDKARRYLRAECFRVEKNLLIFGWGRWKDILTHGRFKWHLNEKDMEMICRALLVYCVKHYKGDEKIKSFIWELITPTKDGQAQTLQNHSGLSAPVPRGRKGKKTKNQLLIPELKDADWLATCNPEVVLHDDGYKKHLKQHCNKVLLRVRMLYYLKAEILGEAAEKAFEGSPARELDVPLPDIDYMEIPVDWWDAEADKSLLIGVFKHGYERYNAMRADPALCFLEKVGMPDEKSLSAEQGVTDGTSDIPERGNTDKEDNAEDKVDGLQKQTESSSDGGDGVFSEKKDDSRAAQDGSDPDKSPWPVSSALTARLRRLVTVYQRCNRKELCRPEILGPGNQGYWVQEEMFRRTSEMDLINKEAQKRWTRREQADFYRTVSSFGVVYDQEKKTFDWTQFRIISRLDKKSDESLEQYFYSFVAMCRNVCRLPTWKDGGPPDTTIYVEPITEERAARTLYRIELLRKVREQVLKCPQLHERLQLCRPSLYLPVWWECGKHDRDLLIGTAKHGLNRTDCYIMNDPQLSFLDAYRNYAQHKRSGTQAPGNLCCLYQTNSKLYESLTYSQMSRTSESLENEPENLVRVESRDDHLSLPDVTCENFISKVQDVISINHDESLLPESLESMMYGKKVLSQEPSSFQESPSTNTESRKDVITISISKDGNCQSGGPEAEIASGPTFMGSLEAGGVAQANIKNGKHLLMSISKEGELCCSEAGQRPENIGQLEAKCLASPSLNPGNESGFVDMCSLSVCDSKRNLSSDQQLIDLLENKSLESKLILSQNHSDEEEEEEENEEENLAMAVGMGERPEVLHLTEPTTNISREKNQGFQDETKKGSLEVANQTPGLQRAFPAPAACQCHCKHMERWMHGLENDEFEIEKPKAYIPDLFKSKTNTIAMEGEPTAIPSQPFKVKHELLKEPWKESAEGQNVFPTYPLEGSELKSEDMDFENKDDYDRDGNCHSQDYPGKYSEEESKSSTSGITGDIGDELQEARAPTIAQLLQEKTLYSFSEWPKDRVIINRLDNICHVVLKGKWPSSQQYEPSGTLPTPVLTSSAGSRTSLSEPEAAEHSFSNGAALAAQIHKESFLAPVFTKDEQKHRRPYEFEVERDAKARGLEQFSATHGHTPIILNGWHGESAMDLSCSSEGSPGATSPFPVSASTPKIGAISSLQGALGMDLSGILQAGLIHPVTGQIVNGSLRRDDAATRRRRGRRKHVEGGMDLIFLKEQTLQAGILEVHEDPGQATLSTTHPEGPGPATSAPEPATAASSQAEKSIPSKSLLDWLRQQADYSLEVPGFGANFSDKPKQRRPRCKEPGKLDVSSLSGEERVPAIPKEPGLRGFLPENKFNHTLAEPILRDTGPRRRGRRPRSELLKAPSIVADSPSGMGPLFMNGLIAGMDLVGLQNMRNMPGIPLTGLVGFPAGFATMPTGEEVKSTLSMLPMMLPGMAAVPQMFGVGGLLSPPMATTCTSTAPASLSSTTKSGTAVTEKTAEDKPSSHDVKTDTLAEDKPGPGPFSDQSEPAITTSSPVAFNPFLIPGVSPGLIYPSMFLSPGMGMALPAMQQARHSEIVGLESQKRKKKKTKGDNPNSHPEPAPSCEREPSGDENCAEPSAPLPAEREHGAQAGEGALKDSNNDTN

SEQ ID NO: 8835 - protein, 2713 aa, Homo sapiens
MKIQKKEKQLSNLKVLNHSPMSDASVNFDYKSPSPFDCSTDQEEKIEDVASHCLPQKDLYTAEEEAATLFPRKMTSHNGMEDSGGGGTGVKKKRKKKEPGDQEGAAKGSKDREPKPKRKREPKEPKEPRKAEEPKKAKEHKEPKQKDGAKKARKPREASGTKEAKEKRSCTDSAARTKSRKASKEQGPTPVEKKKKGKRKSETTVESLELDQGLTNPSLRSPEESTESTDSQKRRSGRQVKRRKYNEDLDFKVVDDDGETIAVLGAGRTSALSASTLAWQAEEPPEDDANIIEKILASKTVQEVHPGEPPFDLELFYVKYRNFSYLHCKWATMEELEKDPRIAQKIKRFRNKQAQMKHIFTEPDEDLFNPDYVEVDRILEVAHTKDAETGEEVTHYLVKWCSLPYEESTWELEEDVDPAKVKEFESLQVLPEIKHVERPASDSWQKLEKSREYKNSNQLREYQLEGMNWLLFNWYNRKNCILADEMGLGKTIQSITFLSEIFLRGIHGPFLIIAPLSTITNWEREFRTWTEMNAIVYHGSQISRQMIQQYEMVYRDAQGNPLSGVFKFHVVITTFEMILADCPELKKIHWSCVIIDEAHRLKNRNCKLLEGLKLMALEHKVLLTGTPLQNSVEELFSLLNFLEPSQFPSETAFLEEFGDLKTEEQVKKLQSILKPMMLRRLKDDVEKNLAPKQETIIEVELTNIQKKYYRAILEKNFSFLTKGANQHNMPNLINTMMELRKCCNHPYLINGAEEKILEDFRKTHSPDAPDFQLQAMIQAAGKLVLIDKLLPKLIAGGHKVLIFSQMVRCLDILEDYLIQRRYTYERIDGRVRGNLRQAAIDRFCKPDSDRFVFLLCTRAGGLGINLTAADTCIIFDSDWNPQNDLQAQARCHRIGQSKAVKVYRLITRNSYEREMFDKASLKLGLDKAVLQDINRKGGTNGVQQLSKMEVEDLLRKGAYGALMDEEDEGSKFCEEDIDQILQRRTHTITIQSEGKGSTFAKASFVASGNRTDISLDDPNFWQKWAKIAKLDTEAKNEKESLVIDRPRVRKQTKHYNSFEEDELMEFSELDSDSDERPTRSRRLNDKARRYLRAECFRVEKNLLIFGWGRWKDILTHGRFKWHLNEKDMEMICRALLVYCVKHYKGDEKIKSFIWELITPTKDGQAQTLQNHSGLSAPVPRGRKGKKTKNQLLIPELKDADWLATCNPEVVLHDDGYKKHLKQHCNKVLLRVRMLYYLKAEILGEAAEKAFEGSPARELDVPLPDIDYMEIPVDWWDAEADKSLLIGVFKHGYERYNAMRADPALCFLEKVGMPDEKSLSAEQGVTDGTSDIPERGNTDKEDNAEDKVDGLQKQTESSSDGGDGVFSEKKDDSRAAQDGSDPDKSPWPVSSALTARLRRLVTVYQRCNRKELCRPEILGPGNQGYWVQEEMFRRTSEMDLINKEAQKRWTRREQADFYRTVSSFGVVYDQEKKTFDWTQFRIISRLDKKSDESLEQYFYSFVAMCRNVCRLPTWKDGGPPDTTIYVEPITEERAARTLYRIELLRKVREQVLKCPQLHERLQLCRPSLYLPVWWECGKHDRDLLIGTAKHGLNRTDCYIMNDPQLSFLDAYRNYAQHKRSGTQAPGNLCCLYQTNSKLYESLTYSQMSRTSESLENEPENLVRVESRDDHLSLPDVTCENFISKVQDVISINHDESLLPESLESMMYGKKVLSQEPSSFQESPSTNTESRKDVITISISKDGNCQSGGPEAEIASGPTFMGSLEAGGVAQANIKNGKHLLMSISKEGELCCSEAGQRPENIGQLEAKCLASPSLNPGNESGFVDMCSLSVCDSKRNLSSDQQLIDLLENKSLESKLILSQNHSDEEEEEEENEEENLAMAVGMGERPEVLHLTEPTTNISREKNQGFQDETKKGSLEVANQTPGLQRAFPAPAACQCHCKHMERWMHGLENDEFEIEKPKAYIPDLFKSKTNTIAMEGEPTAIPSQPFKVKHELLKEPWKESAEGQNVFPTYPLEGSELKSEDMDFENKDDYDRDGNCHSQDYPGKYSEEESKSSTSGITGDIGDELQEARAPTIAQLLQEKTLYSFSEWPKDRVIINRLDNICHVVLKGKWPSSQQYEPSGTLPTPVLTSSAGSRTSLSEPEAAEHSFSNGAALAAQIHKESFLAPVFTKDEQKHRRPYEFEVERDAKARGLEQFSATHGHTPIILNGWHGESAMDLSCSSEGSPGATSPFPVSASTPKIGAISSLQGALGMDLSGILQAGLIHPVTGQIVNGSLRRDDAATRRRRGRRKHVEGGMDLIFLKEQTLQAGILEVHEDPGQATLSTTHPEGPGPATSAPEPATAASSQAEKSIPSKSLLDWLRQQADYSLEVPGFGANFSDKPKQRRPRCKEPGKLDVSSLSGEERVPAIPKEPGLRGFLPENKFNHTLAEPILRDTGPRRRGRRPRSELLKAPSIVADSPSGMGPLFMNGLIAGMDLVGLQNMRNMPGIPLTGLVGFPAGFATMPTGEEVKSTLSMLPMMLPGMAAVPQMFGVGGLLSPPMATTCTSTAPASLSSTTKSGTAVTEKTAEDKPSSHDVKTDTLAEDKPGPGPFSDQSEPAITTSSPVAFNPFLIPGVSPGLIYPSMFLSPGMGMALPAMQQARHSEIVGLESQKRKKKKTKGDNPNSHPEPAPSCEREPSGDENCAEPSAPLPAEREHGAQAGEGALKDSNNDTN

SEQ ID NO: 8836 - protein, 910 aa, Homo sapiens
MRRSAAPSQLQGNSFKKPKFIPPGRSNPGLNEEITKLNPDIKLFEGVAINNTFLPSQNDLRICSLNLPSEESTREINNRDNCSGKYCFEAPTLATLDPPHTVHSAPKEVAVSKEQEEKSDSLVKYFSVVWCKPSKKKHKKWEGDAVLIVKGKSFILKNLEGKDIGRGIGYKFKELEKIEEGQTLMICGKEIEVMGVISPDDFSSGRCFQLGGGSTAISHSSQVARKCFSNPFKSVCKPSSKENRQNDFQNCKPRHDPYTPNSLVMPRPDKNHQWVFNKNCFPLVDVVIDPYLVYHLRPHQKEGIIFLYECVMGMRMNGRCGAILADEMGLGKTLQCISLIWTLQCQGPYGGKPVIKKTLIVTPGSLVNNWKKEFQKWLGSERIKIFTVDQDHKVEEFIKSIFYSVLIISYEMLLRSLDQIKNIKFDLLICDEGHRLKNSAIKTTTALISLSCEKRIILTGTPIQNDLQEFFALIDFVNPGILGSLSSYRKIYEEPIILSREPSASEEEKELGERRAAELTCLTGLFILRRTQEIINKYLPPKIENVVFCRPGALQIELYRKLLNSQVVRFCLQGLLENSPHLICIGALKKLCNHPCLLFNSIKEKECSSTCDKNEEKSLYKGLLSVFPADYNPLLFTEKESGKLQVLSKLLAVIHELRPTEKVVLVSNYTQTLNILQEVCKRHGYAYTRLDGQTPISQRQQIVDGFNSQHSSFFIFLLSSKAGGVGLNLIGGSHLILYDIDWNPATDIQAMSRVWRDGQKYPVHIYRLLTTGTIEEKIYQRQISKQGLCGAVVDLTKTSEHIQFSVEELKNLFTLHESSDCVTHDLLDCECTGEEVHTGDSLEKFIVSRDCQLGPHHQKSNSLKPLSMSQLKQWKHFSGDHLNLTDPFLERITENVSFIFQNITTQATGT

SEQ ID NO: 8837 - protein, 2004 aa, Homo sapiens
RQVKRKKYTEDLDIKITDDEEEEEVDVTGPIKPEPILPEPVQEPDGETLPSMQFFVENPSEEDAAIVDKVLSMRIVKKELPSGQYTEAEEFFVKYKNYSYLHCEWATISQLEKDKRIHQKLKRFKTKMAQMRHFFHEDEEPFNPDYVEVDRILDESHSIDKDNGEPVIYYLVKWCSLPYEDSTWELKEDVDEGKIREFKRIQSRHPELKRVNRPQASAWKKLELSHEYKNRNQLREYQLEGVNWLLFNWYNRQNCILADEMGLGKTIQSIAFLQEVYNVGIHGPFLVIAPLSTITNWEREFNTWTEMNTIVYHGSLASRQMIQQYEMYCKDSRGRLIPGAYKFDALITTFEMILSDCPELREIEWRCVIIDEAHRLKNRNCKLLDSLKHMDLEHKVLLTGTPLQNTVEELFSLLHFLEPSQFPSESEFLKDFGDLKTEEQVQKLQAILKPMMLRRLKEDVEKNLAPKQETIIEVELTNIQKKYYRAILEKNFSFLSKGAGHTNMPNLLNTMMELRKCCNHPYLINGAEEKILTEFREACHIIPHDFHLQAMVRSAGKLVLIDKLLPKLKAGGHKVLIFSQMVRCLDILEDYLIQRRYLYERIDGRVRGNLRQAAIDRFSKPDSDRFVFLLCTRAGGLGINLTAADTCIIFDSDWNPQNDLQAQARCHRIGQSKAVKVYRLITRNSYEREMFDKASLKLGLDKAVLQSMSGRDGNITGIQQFSKKEIEDLLRKGAYAAIMEEDDEGSKFCEEDIDQILLRRTTTITIESEGKGSTFAKASFVASENRTDISLDDPNFWQKWAKKADLDMDLLNSKNNLVIDTPRVRKQTRHFSTLKDDDLVEFSDLESEDDERPRSRRHDRHHAYGRTDCFRVEKHLLVYGWGRWRDILSHGRFKRRMTERDVETICRAILVYCLLHYRGDENIKGFIWDLISPAENGKTKELQNHSGLSIPVPRGRKGKKVKSQSTFDIHKADWIRKYNPDTLFQDESYKKHLKHQCNKVLLRVRMLYYLRQEVIGDQAEKVLGGAIASEIDIWFPVVDQLEVPTTWWDSEADKSLLIGVFKHGYEKYNTMRADPALCFLEKAGRPDDKAIAAEHRVLDNFSDIVEGVDFDKDCEDPEYKPLQGPPKDQDDEGDPLMMMDEEISVIDGDEAQVTQQPGHLFWPPGSALTARLRRLVTAYQRSYKREQMKIEAAERGDRRRRRCEAAFKLKEIARREKQQRWTRREQTDFYRVVSTFGVEYDPDTMQFHWDRFRTFARLDKKTDESLTKYFHGFVAMCRQVCRLPPAAGDEPPDPNLFIEPITEERASRTLYRIELLRRLREQVLCHPLLEDRLALCQPPGPELPKWWEPVRHDGELLRGAARHGVSQTDCNIMQDPDFSFLAARMNYMQNHQAGAPAPSLSRCSTPLLHQQYTSRTASPLPLRPDAPVEKSPEETATQVPSLESLTLKLEHEVVARSRPTPQDYEMRVSPSDTTPLVSRSVPPVKLEDEDDSDSELDLSKLSPSSSSSSSSSSSSSSTDESEDEKEEKLTDQSRSKLYDEESLLSLTMSQDGFPNEDGEQMTPELLLLQERQRASEWPKDRVLINRIDLVCQAVLSGKWPSSRRSQEMVTGGILGPGNHLLDSPSLTPGEYGDSPVPTPRSSSAASMAEEEASAVSTAAAQFTKLRRGMDEKEFTVQIKDEEGLKLTFQKHKLMANGVMGDGHPLFHKKKGNRKKLVELEVECMEEPNHLDVDLETRIPVINKVDGTLLVGEDAPRRAELEMWLQGHPEFAVDPRFLAYMEDRRKQKWQRCKKNNKAELNCLGMEPVQTANSRNGKKGHHTETVFNRVLPGPIAPESSKKRARRMRPDLSKMMALMQGGSTGSLSLHNTFQHSSSGLQSVSSLGHSSATSASLPFMPFVMGGAPSSPHVDSSTMLHHHHHHPHPHHHHHHHPGLRAPGYPSSPVTTASGTTLRLPPLQPEEDDDEDEEDDDDLSQGYDSSERDFSLIDDPMMPANSDSSEDADD

SEQ ID NO: 8838 - protein, 1953 aa, Homo sapiens
MQFFVENPSEEDAAIVDKVLSMRIVKKELPSGQYTEAEEFFVKYKNYSYLHCEWATISQLEKDKRIHQKLKRFKTKMAQMRHFFHEDEEPFNPDYVEVDRILDESHSIDKDNGEPVIYYLVKWCSLPYEDSTWELKEDVDEGKIREFKRIQSRHPELKRVNRPQASAWKKLELSHEYKNRNQLREYQLEGVNWLLFNWYNRQNCILADEMGLGKTIQSIAFLQEVYNVGIHGPFLVIAPLSTITNWEREFNTWTEMNTIVYHGSLASRQMIQQYEMYCKDSRGRLIPGAYKFDALITTFEMILSDCPELREIEWRCVIIDEAHRLKNRNCKLLDSLKHMDLEHKVLLTGTPLQNTVEELFSLLHFLEPSQFPSESEFLKDFGDLKTEEQVQKLQAILKPMMLRRLKEDVEKNLAPKQETIIEVELTNIQKKYYRAILEKNFSFLSKGAGHTNMPNLLNTMMELRKCCNHPYLINGAEEKILTEFREACHIIPHDFHLQAMVRSAGKLVLIDKLLPKLKAGGHKVLIFSQMVRCLDILEDYLIQRRYLYERIDGRVRGNLRQAAIDRFSKPDSDRFVFLLCTRAGGLGINLTAADTCIIFDSDWNPQNDLQAQARCHRIGQSKAVKVYRLITRNSYEREMFDKASLKLGLDKAVLQSMSGRDGNITGIQQFSKKEIEDLLRKGAYAAIMEEDDEGSKFCEEDIDQILLRRTTTITIESEGKGSTFAKASFVASENRTDISLDDPNFWQKWAKKADLDMDLLNSKNNLVIDTPRVRKQTRHFSTLKDDDLVEFSDLESEDDERPRSRRHDRHHAYGRTDCFRVEKHLLVYGWGRWRDILSHGRFKRRMTERDVETICRAILVYCLLHYRGDENIKGFIWDLISPAENGKTKELQNHSGLSIPVPRGRKGKKVKSQSTFDIHKADWIRKYNPDTLFQDESYKKHLKHQCNKVLLRVRMLYYLRQEVIGDQAEKVLGGAIASEIDIWFPVVDQLEVPTTWWDSEADKSLLIGVFKHGYEKYNTMRADPALCFLEKAGRPDDKAIAAEHRVLDNFSDIVEGVDFDKDCEDPEYKPLQGPPKDQDDEGDPLMMMDEEISVIDGDEAQVTQQPGHLFWPPGSALTARLRRLVTAYQRSYKREQMKIEAAERGDRRRRRCEAAFKLKEIARREKQQRWTRREQTDFYRVVSTFGVEYDPDTMQFHWDRFRTFARLDKKTDESLTKYFHGFVAMCRQVCRLPPAAGDEPPDPNLFIEPITEERASRTLYRIELLRRLREQVLCHPLLEDRLALCQPPGPELPKWWEPVRHDGELLRGAARHGVSQTDCNIMQDPDFSFLAARMNYMQNHQAGAPAPSLSRCSTPLLHQQYTSRTASPLPLRPDAPVEKSPEETATQVPSLESLTLKLEHEVVARSRPTPQDYEMRVSPSDTTPLVSRSVPPVKLEDEDDSDSELDLSKLSPSSSSSSSSSSSSSSTDESEDEKEEKLTDQSRSKLYDEESLLSLTMSQDGFPNEDGEQMTPELLLLQERQRASEWPKDRVLINRIDLVCQAVLSGKWPSSRRSQEMVTGGILGPGNHLLDSPSLTPGEYGDSPVPTPRSSSAASMAEEEASAVSTAAAQFTKLRRGMDEKEFTVQIKDEEGLKLTFQKHKLMANGVMGDGHPLFHKKKGNRKKLVELEVECMEEPNHLDVDLETRIPVINKVDGTLLVGEDAPRRAELEMWLQGHPEFAVDPRFLAYMEDRRKQKWQRCKKNNKAELNCLGMEPVQTANSRNGKKGHHTETVFNRVLPGPIAPESSKKRARRMRPDLSKMMALMQGGSTGSLSLHNTFQHSSSGLQSVSSLGHSSATSASLPFMPFVMGGAPSSPHVDSSTMLHHHHHHPHPHHHHHHHPGLRAPGYPSSPVTTASGTTLRLPPLQPEEDDDEDEEDDDDLSQGYDSSERDFSLIDDPMMPANSDSSEDADD

SEQ ID NO: 8839 - protein, 838 aa, Homo sapiens
MPAERPAGSGGSEAPAMVEQLDTAVITPAMLEEEEQLEAAGLERERKMLEKARMSWDRESTEIRYRRLQHLLEKSNIYSKFLLTKMEQQQLEEQKKKEKLERKKESLKVKKGKNSIDASEEKPVMRKKRGREDESYNISEVMSKEEILSVAKKNKKENEDENSSSTNLCVEDLQKNKDSNSIIKDRLSETVRQNTKFFFDPVRKCNGQPVPFQQPKHFTGGVMRWYQVEGMEWLRMLWENGINGILADEMGLGKTVQCIATIALMIQRGVPGPFLVCGPLSTLPNWMAEFKRFTPDIPTMLYHGTQEERQKLVRNIYKRKGTLQIHPVVITSFEIAMRDRNALQHCYWKYLIVDEGHRIKNMKCRLIRELKRFNADNKLLLTGTPLQNNLSELWSLLNFLLPDVFDDLKSFESWFDITSLSETAEDIIAKEREQNVLHMLHQILTPFLLRRLKSDVALEVPPKREVVVYAPLSKKQEIFYTAIVNRTIANMFGSSEKETIELSPTGRPKRRTRKSINYSKIDDFPNELEKLISQIQPEVDRERAVVEVNIPVESEVNLKLQNIMMLLRKCCNHPYLIEYPIDPVTQEFKIDEELVTNSGKFLILDRMLPELKKRGHKVLLFSQMTSMLDILMDYCHLRDFNFSRLDGSMSYSEREKNMHSFNTDPEVFIFLVSTRAGGLGINLTAADTVIIYDSDWNPQSDLQAQDRCHRIGQTKPVVVYRLVTANTIDQKIVERAAAKRKLEKLIIHKNHFKGGQSGLNLSKNFLDPKELMELLKSRDYEREIKGSREKVISDKDLELLLDRSDLIDQMNASGPIKEKMGIFKILENSEDSSPECLF

SEQ ID NO: 8840 - protein, 1967 aa, Homo sapiens
LEFKISDEEADDADAAGRDSPSNTSQSEQQESVDAEGPVVEKIMSSRSVKKQKESGEEVEIEEFYVKYKNFSYLHCQWASIEDLEKDKRIQQKIKRFKAKQGQNKFLSEIEDELFNPDYVEVDRIMDFARSTDDRGEPVTHYLVKWCSLPYEDSTWERRQDIDQAKIEEFEKLMSREPETERVERPPADDWKKSESSREYKNNNKLREYQLEGVNWLLFNWYNMRNCILADEMGLGKTIQSITFLYEIYLKGIHGPFLVIAPLSTIPNWEREFRTWTELNVVVYHGSQASRRTIQLYEMYFKDPQGRVIKGSYKFHAIITTFEMILTDCPELRNIPWRCVVIDEAHRLKNRNCKLLEGLKMMDLEHKVLLTGTPLQNTVEELFSLLHFLEPSRFPSETTFMQEFGDLKTEEQVQKLQAILKPMMLRRLKEDVEKNLAPKEETIIEVELTNIQKKYYRAILEKNFTFLSKGGGQANVPNLLNTMMELRKCCNHPYLINGAEEKILEEFKETHNAESPDFQLQAMIQAAGKLVLIDKLLPKLKAGGHRVLIFSQMVRCLDILEDYLIQRRYPYERIDGRVRGNLRQAAIDRFSKPDSDRFVFLLCTRAGGLGINLTAADTCIIFDSDWNPQNDLQAQARCHRIGQSKSVKIYRLITRNSYEREMFDKASLKLGLDKAVLQSMSGRENATNGVQQLSKKEIEDLLRKGAYGALMDEEDEGSKFCEEDIDQILLRRTHTITIESEGKGSTFAKASFVASGNRTDISLDDPNFWQKWAKKAELDIDALNGRNNLVIDTPRVRKQTRLYSAVKEDELMEFSDLESDSEEKPCAKPRRPQDKSQGYARSECFRVEKNLLVYGWGRWTDILSHGRYKRQLTEQDVETICRTILVYCLNHYKGDENIKSFIWDLITPTADGQTRALVNHSGLSAPVPRGRKGKKVKAQSTQPVVQDADWLASCNPDALFQEDSYKKHLKHHCNKVLLRVRMLYYLRQEVIGDQADKILEGADSSEADVWIPEPFHAEVPADWWDKEADKSLLIGVFKHGYEKYNSMRADPALCFLERVGMPDAKAIAAEQRGTDMLADGGDGGEFDREDEDPEYKPTRTPFKDEIDEFANSPSEDKEESMEIHATGKHSESNAELGQLYWPNTSTLTTRLRRLITAYQRSYKRQQMRQEALMKTDRRRRRPREEVRALEAEREAIISEKRQKWTRREEADFYRVVSTFGVIFDPVKQQFDWNQFRAFARLDKKSDESLEKYFSCFVAMCRRVCRMPVKPDDEPPDLSSIIEPITEERASRTLYRIELLRKIREQVLHHPQLGERLKLCQPSLDLPEWWECGRHDRDLLVGAAKHGVSRTDYHILNDPELSFLDAHKNFAQNRGAGNTSSLNPLAVGFVQTPPVISSAHIQDERVLEQAEGKVEEPENPAAKEKCEGKEEEEETDGSGKESKQECEAEASSVKNELKGVEVGADTGSKSISEKGSEEDEEEKLEDDDKSEESSQPEAGAVSRGKNFDEESNASMSTARDETRDGFYMEDGDPSVAQLLHERTFAFSFWPKDRVMINRLDNICEAVLKGKWPVNRRQMFDFQGLIPGYTPTTVDSPLQKRSFAELSMVGQASISGSEDITTSPQLSKEDALNLSVPRQRRRRRRKIEIEAERAAKRRNLMEMVAQLRESQVVSENGQEKVVDLSKASREATSSTSNFSSLSSKFILPNVSTPVSDAFKTQMELLQAGLSRTPTRHLLNGSLVDGEPPMKRRRGRRKNVEGLDLLFMSHKRTSLSAEDAEVTKAFEEDIETPPTRNIPSPGQLDPDTRIPVINLEDGTRLVGEDAPKNKDLVEWLKLHPTYTVDMPSYVPKNADVLFSSFQKPKQKRHRCRNPNKLDINTLTGEERVPVVNKRNGKKMGGAMAPPMKDLPRWLEENPEFAVAPDWTDIVKQSGFVPESMFDRLLTGPVVRGEGASRRGRRPKSEIARAA

SEQ ID NO: 8841 - protein, 1970 aa, Homo sapiens
MTQVSGPNAQLVKSDDYLPSIEQQPQQKKKKKKNNHIVAEDPSKGFGKDDFPGGVDNQELNRNSLDGSQEEKKKKKRSKAKKDPKEPKEPKEKKEPKEPKTPKAPKIPKEPKEKKAKTATPKPKSSKKSSNKKPDSEASALKKKVNKGKTEGSENSDLDKTPPPSPPPEEDEDPGVQKRRSSRQVKRKRYTEDLEFKISDEEADDADAAGRDSPSNTSQSEQQESVDAEGPVVEKIMSSRSVKKQKESGEEVEIEEFYVKYKNFSYLHCQWASIEDLEKDKRIQQKIKRFKAKQGQNKFLSEIEDELFNPDYVEVDRIMDFARSTDDRGEPVTHYLVKWCSLPYEDSTWERRQDIDQAKIEEFEKLMSREPETERVERPPADDWKKSESSREYKNNNKLREYQLEGVNWLLFNWYNMRNCILADEMGLGKTIQSITFLYEIYLKGIHGPFLVIAPLSTIPNWEREFRTWTELNVVVYHGSQASRRTIQLYEMYFKDPQGRVIKGSYKFHAIITTFEMILTDCPELRNIPWRCVVIDEAHRLKNRNCKLLEGLKMMDLEHKVLLTGTPLQNTVEELFSLLHFLEPSRFPSETTFMQEFGDLKTEEQVQKLQAILKPMMLRRLKEDVEKNLAPKEETIIEVELTNIQKKYYRAILEKNFTFLSKGGGQANVPNLLNTMMELRKCCNHPYLINGAEEKILEEFKETHNAESPDFQLQAMIQAAGKLVLIDKLLPKLKAGGHRVLIFSQMVRCLDILEDYLIQRRYPYERIDGRVRGNLRQAAIDRFSKPDSDRFVFLLCTRAGGLGINLTAADTCIIFDSDWNPQNDLQAQARCHRIGQSKSVKIYRLITRNSYEREMFDKASLKLGLDKAVLQSMSGRENATNGVQQLSKKEIEDLLRKGAYGALMDEEDEGSKFCEEDIDQILLRRTHTITIESEGKGSTFAKASFVASGNRTDISLDDPNFWQKWAKKAELDIDALNGRNNLVIDTPRVRKQTRLYSAVKEDELMEFSDLESDSEEKPCAKPRRPQDKSQGYARSECFRVEKNLLVYGWGRWTDILSHGRYKRQLTEQDVETICRTILVYCLNHYKGDENIKSFIWDLITPTADGQTRALVNHSGLSAPVPRGRKGKKVKAQSTQPVVQDADWLASCNPDALFQEDSYKKHLKHHCNKVLLRVRMLYYLRQEVIGDQADKILEGADSSEADVWIPEPFHAEVPADWWDKEADKSLLIGVFKHGYEKYNSMRADPALCFLERVGMPDAKAIAAEQRGTDMLADGGDGGEFDREDEDPEYKPTRTPFKDEIDEFANSPSEDKEESMEIHATGKHSESNAELGQLYWPNTSTLTTRLRRLITAYQRSYKRQQMRQEALMKTDRRRRRPREEVRALEAEREAIISEKRQKWTRREEADFYRVVSTFGVIFDPVKQQFDWNQFRAFARLDKKSDESLEKYFSCFVAMCRRVCRMPVKPDDEPPDLSSIIEPITEERASRTLYRIELLRKIREQVLHHPQLGERLKLCQPSLDLPEWWECGRHDRDLLVGAAKHGVSRTDYHILNDPELSFLDAHKNFAQNRGAGNTSSLNPLAVGFVQTPPVISSAHIQDERVLEQAEGKVEEPENPAAKEKCEGKEEEEETDGSGKESKQECEAEASSVKNELKGVEVGADTGSKSISEKGSEEDEEEKLEDDDKSEESSQPEAGAVSRGKNFDEESNASMSTARDETRDGFYMEDGDPSVAQLLHERTFAFSFWPKDRVMINRLDNICEAVLKGKWPVNRRQMFDFQGLIPGYTPTTVDSPLQKRSFAELSMVGQASISGSEDITTSPQLSKEDALNLSVPRQRRRRRRKIEIEAERAAKRRNLMEMVAQLRESQVVSENGQEKVVDLSKASREATSSTSNFSSLSSKFILPNVSTPVSDAFKTQMELLQAGLSRTPTRHLLNGSLVDGEPPMKRRRGRRKNVEGLDLLFMSHKRTSLSAGGC

SEQ ID NO: 8842 - protein, 628 aa, Homo sapiens
TLSNWAYEFDKWAPSVVKVSYKGSPAARRAFVPQLRSGKFNVLLTTYEYIIKDKHILAKIRWKYMIVDEGHRMKNHHCKLTQVLNTHYVAPRRLLLTGTPLQNKLPELWALLNFLLPTIFKSCSTFEQWFNAPFAMTGEKVDLNEEETILIIRRLHKVLRPFLLRRLKKEVEAQLPEKVEYVIKCDMSALQRVLYRHMQAKGVLLTDGSEKDKKGKGGTKTLMNTIMQLRKICNHPYMFQHIEESFSEHLGFTGGIVQGLDLYRASGKFELLDRILPKLRATNHKVLLFCQMTSLMTIMEDYFAYRGFKYLRLDGTTKAEDRGMLLKTFNEPGSEYFIFLLSTRAGGLGLNLQSADTVIIFDSDWNPHQDLQAQDRAHRIGQQNEVRVLRLCTVNSVEEKILAAAKYKLNVDQKVIQAGMFDQKSSSHERRAFLQAILEHEEQDEEEDEVPDDETVNQMIARHEEEFDLFMRMDLDRRREEARNPKRKPRLMEEDELPSWIIKDDAEVERLTCEEEEEKMFGRGSRHRKEVDYSDSLTEKQWLKAIEEGTLEEIEEEVRQKKSSRKRKRDSDAGSSTPTTSTRSRDKDDESKKQKKRGRPPAEKLSPNPPNLTKKMKKIVDAVIKYKD

SEQ ID NO: 8843 - protein, 661 aa, Homo sapiens
TLSNWAYEFDKWAPSVVKVSYKGSPAARRAFVPQLRSGKFNVLLTTYEYIIKDKHILAKIRWKYMIVDEGHRMKNHHCKLTQVLNTHYVAPRRLLLTGTPLQNKLPELWALLNFLLPTIFKSCSTFEQWFNAPFAMTGEKVDLNEEETILIIRRLHKVLRPFLLRRLKKEVEAQLPEKVEYVIKCDMSALQRVLYRHMQAKGVLLTDGSEKDKKGKGGTKTLMNTIMQLRKICNHPYMFQHIEESFSEHLGFTGGIVQGLDLYRASGKFELLDRILPKLRATNHKVLLFCQMTSLMTIMEDYFAYRGFKYLRLDGTTKAEDRGMLLKTFNEPGSEYFIFLLSTRAGGLGLNLQSADTVIIFDSDWNPHQDLQAQDRAHRIGQQNEVRVLRLCTVNSVEEKILAAAKYKLNVDQKVIQAGMFDQKSSSHERRAFLQAILEHEEQDESRHCSTGSGSASFAHTAPPPAGVNPDLEEPPLKEEDEVPDDETVNQMIARHEEEFDLFMRMDLDRRREEARNPKRKPRLMEEDELPSWIIKDDAEVERLTCEEEEEKMFGRGSRHRKEVDYSDSLTEKQWLKAIEEGTLEEIEEEVRQKKSSRKRKRDSDAGSSTPTTSTRSRDKDDESKKQKKRGRPPAEKLSPNPPNLTKKMKKIVDAVIKYKD

SEQ ID NO: 8844 - protein, 1561 aa, Homo sapiens
RQICSMASELGARDDGGCTELAKPLYLQYLERALRLDHFLRQTSAIFNRNISSDDSEDGLDDSNPLLPQSGDPLIQVKEEPPNSLLGETSGAGSSGMLNTYSLNGVLQSESKCDKGNLYNFSKLKKSRKWLKSILLSDESSEADSQSEDDDEEELNLSREELHNMLRLHKYKKLHQNKYSKDKELQQYQYYSAGLLSTYDPFYEQQRHLLGPKKKKFKEEKKLKAKLKKVKKKRRRDEELSSEESPRRHHHQTKVFAKFSHDAPPPGTKKKHLSIEQLNARRRKVWLSIVKKELPKANKQKASARNLFLTNSRKLAHQCMKEVRRAALQAQKNCKETLPRARRLTKEMLLYWKKYEKVEKEHRKRAEKEALEQRKLDEEMREAKRQQRKLNFLITQTELYAHFMSRKRDMGHDGIQEEILRKLEDSSTQRQIDIGGGVVVNITQEDYDSNHFKAQALKNAENAYHIHQARTRSFDEDAKESRAAALRAANKSGTGFGESYSLANPSIRAGEDIPQPTIFNGKLKGYQLKGMNWLANLYEQGINGILADEMGLGKTVQSIALLAHLAERENIWGPFLIISPASTLNNWHQEFTRFVPKFKVLPYWGNPHDRKVIRRFWSQKTLYTQDAPFHVVITSYQLVVQDVKYFQRVKWQYMVLDEAQALKSSSSVRWKILLQFQCRNRLLLTGTPIQNTMAELWALLHFIMPTLFDSHEEFNEWFSKDIESHAENKSAIDENQLSRLHMILKPFMLRRIKKDVENELSDKIEILMYCQLTSRQKLLYQALKNKISIEDLLQSSMGSTQQAQNTTSSLMNLVMQFRKVCNHPELFERQETWSPFHISLKPYHISKFIYRHGQIRVFNHSRDRWLRVLSPFAPDYIQRSLFHRKGINEESCFSFLRFIDISPAEMANLMLQGLLARWLALFLSLKASYRLHQLRSWGAPEGESHQRYLRNKDFLLGVNFPLSFPNLCSCPLLKSLVFSSHCKAVSGYSDQVVHQRRSATSSLRRCLLTELPSFLCVASPRVTAVPLDSYCNDRSAEYERRVLKEGGSLAAKQCLLNGAPELAADWLNRRSQFFPEPAGGLWSIRPQNGWSFIRIPGKESLITDSGKLYALDVLLTRLKSQGHRVLIYSQMTRMIDLLEEYMVYRKHTYMRLDGSSKISERRDMVADFQNRNDIFVFLLSTRAGGLGINLTAADTVIFYDSDWNPTVDQQAMDRAHRLGQTKQVTVYRLICKGTIEERILQRAKEKSEIQRMVISGGNFKPDTLKPKEVVSLLLDDEELEKKLRLRQEEKRQQEETNRVKERKRKREKYAEKKKKEDELDGKRRKEGVNLVIPFVPSADNSNLSADGDDSFISVDSAMPSPFSEISISSELHTGSIPLDESSSDMLVIVDDPASSAPQSRATNSPASITGSVSDTVNGISIQEMPAAGRGHSARSRGRPKGSGSTAKGAGKGRSRKSTAGSAAAMAGAKAGAAAASAAAYAAYGYNVSKGISASSPLQTSLVRPAGLADFGPSSASSPLSSPLSKGNNVPGNPKNLHMTSSLAPDSLVRKQGKGTNPSGGR

SEQ ID NO: 8845 - protein, 580 aa, Homo sapiens
KTLQCISLIWTLQCQGPYGGKPVIKKTLIVTPGSLVNNWKKEFQKWLGSERIKIFTVDQDHKVEEFIKSIFYSVLIISYEMLLRSLDQIKNIKFDLLICDEGHRLKNSAIKTTTALISLSCEKRIILTGTPIQNDLQEFFALIDFVNPGILGSLSSYRKIYEEPIILSREPSASEEEKELGEREEQLNLLASLDSLYLRRTQEIINKYLPPKIENVVFCRPGALQIELYRKLLNSQVVRFCLQGLLENSPHLICIGALKKLCNHPCLLFNSIKEKECSSTCDKNEEKSLYKGLLSVFPADYNPLLFTEKESGKLQVLSKLLAVIHELRPTEKVVLVSNYTQTLNILQEVCKRHGYAYTRLDGQTPISQRQQIVDGFNSQHSSFFIFLLSSKAGGVGLNLIGGSHLILYDIDWNPATDIQAMSRVWRDGQKYPVHIYRLLTTGTIEEKIYQRQISKQGLCGAVVDLTKTSEHIQFSVEELKNLFTLHESSDCVTHDLLDCECTGEEVHTGDSLEKFIVSRDCQLGPHHQKSNSLKPLSMSQLKQWKHFSGDHLNLTDPFLERITENVSFIFQNITTQATGT

SEQ ID NO: 8846 - protein, 1162 aa, Homo sapiens
MEEVRCPEHGTFCFLKTGVRDGPNKGKSFYVCRADTCSFVRATDIPVSHCLLHEDFVVELQGLPLPQDKKEYRLFFRCIGSKAEGKRWCGSIPWQDPDSKEHSVSNKSQHASETFHHSSNWLRNPFKVLDKNQEPALWKQLIKGEGEEKKADKKQREKGDQLFDQKKEQKPEMMEKDLSSGLVPKKKQSVVQEKKQEEGAEIQCEAETGGTHKRDFSEIKSQQCQGNELTRPSASSQEKSSGKSQDVQRESEPLREKVTQLLPQNVHSHNSISKPQKGGPLNKEYTNWEAKETKAKDGPSIQATQKSLPQGHFQERPETHSVPAPGGPAAQAAPAAPGLSLGEGREAATSSDDEEEDDVVFVSSKPGSPLLFDSTLDLETKENLQFPDRSVQRKVSPASGVSKKVEPSDPVARRVYLTTQLKQKKSTLASVNIQALPDKGQKLIKQIQELEEVLSGLTLSPEQGTNEKSNSQVPQQSHFTKTTTGPPHLVPPQPLPRRGTQPVGSLELKSACQVTAGGSSQCYRGHTNQDHVHAVWKITSEAIGQLHRSLESCPGETVVAEDPAGLKVPLLLHQKQALAWLLWRESQKPQGGILADDMGLGKTLTMIALILTQKNQEKKEEKEKSTALTWLSKDDSCDFTSHGTLIICPASLIHHWKNEVEKRVNSNKLRVYLYHGPNRDSRARVLSTYDIVITTYSLVAKEIPTNKQEAEIPGANLNVEGTSTPLLRIAWARIILDEAHNVKNPRVQTSIAVCKLQACARWAVTGTPIQNNLLDMYSLLKFLRCSPFDEFNLWRSQVDNGSKKGGERLSILTKSLLLRRTKDQLDSTGRPLVILPQRKFQLHHLKLSEDEETVYNVFFARSRSALQSYLKRHESRGNQSGRSPNNPFSRVALEFGSEEPRHSEAADSPRSSTVHILSQLLRLRQCCCHLSLLKSALDPMELKGEGLVLSLEEQLSALTLSELRDSEPSSTVSLNGTFFKMELFEGMRESTKISSLLAELEAIQRNSASQKSVIVSQWTNMLKVVALHLKKHGLTYATIDGSVNPKQRMDLVEAFNHSRGPQVMLISLLAGGVGLNLTGGNHLFLLDMHWNPSLEDQACDRIYRVGQQKDVVIHRFVCEGTVEEKILQLQEKKKDLAKQVLSGSGESVTKLTLAHLRVLFGI

SEQ ID NO: 8847 - protein, 521 aa, Homo sapiens
MQRFAPGLSCVTYAGDKEERACLQQDLKQESRFHVLLTTYEICLKDASFLKSFPWSVLVVDEAHRLKNQSSLLHKTLSEFSVVFSLLLTGTPIQNSLQELYSLLSFVEPDLFSKEEVGDFIQRYQDIEKESESASELHKLLQPFLLRRVKAEVATELPKKTEVVIYHGMSALQKKYYKAILMKDLDAFENETAKKVKLQNILSQLRKCVDHPYLFDGVEPEPFEVGDHLTEASGKLHLLDKLLAFLYSGGHRVLLFSQMTQMLDIPQDYMDYRGYSYERVDGSVRGEERHLAIKNFGQQPIFVFLLSTRAGGVGMNLTAADTVIFVDSDFNPQNDLQAAARAHRIGQNKSVKVIRLIGRDTVEEIVYRKAASKLQLTNMIIEGGHFTLGAQKPAADADLQLSEILKFGLDKLLASEGSTMDEIDLESILGETKDGQWVSDALPAAEGGSRDQEEGKNHMYLFEGKDYSKEPSKEDRKSFEQLVTFRKPFWRKLVKRADHSEIKAVFSSQALWRDLPKGSGF

SEQ ID NO: 8848 - protein, 683 aa, Homo sapiens
MQPGSAPPPGRMDPSAPQPRAETSGKDIWHPGERCLAPSPDNGKLCEASIKSITVDENGKSFAVVLYADFQERKIPLKQLQEVKFVKDCPRNLIFDDEDLEKPYFPNRKFPSSSVAFKLSDNGDSIPYTINRYLRDYQREGTRFLYGHYIHGGGCILGDDMGLGKTVQVISFLAAVLHKKGTREDIENNMPEFLLRSMKKEPLSSTAKKMFLIVAPLSVLYNWKDELDTWGYFRVTVLHGNRKDNELIRVKQRKCEIALTTYETLRLCLDELNSLEWSAVIVDEAHRIKNPKARVTEVMKALKCNVRIGLTGTILQNNMKELWCVMDWAVPGLLGSGTYFKKQFSDPVEHGQRHTATKRELATGRKAMQRLAKKMSGWFLRRTKTLIKDQLPKKEDRMVYCSLTDFQKAVYQTVLETEDVTLILQSSEPCTCRSGQKRRNCCYKTNSHGETVKTLYLSYLTVLQKVANHVALLQAASTSKQQETLIKRICDQVFSRFPDFVQKSKDAAFETLSDPKYSGKMKVLQQLLNHCRKNRDKVLLFSFSTKLLDVLQQYCMASGLDYRRLDGSTKSEERLKIVKEFNSTQDVNICLVSTMAGGLGLNFVGANVVVLFDPTWNPANDLQAIDRTQTHCRRERDAEPLSSAPGLQNGSENAVPYPWWCCVTGASISCWRCEICRIQDVLE

SEQ ID NO: 8849 - protein, 2971 aa, Homo sapiens
MAKDVRQFWSNVEKVVQFKQQSRLEEKRKKALDLHLDFIVGQTEKYSDLLSQSLNQPLTSSKAGSSPCLGSSSAASSPPPPASRLDDEDGDFQPQEDEEEDDEETIEVEEQQEGNDAEAQRREIELLRREGELPLEELLRSLPPQLLEGPSSPSQTPSSHDSDTRDGPEEGAEEEPPQVLEIKPPPSAVTQRNKQPWHPDEDDEEFTANEEEAEDEEDTIAAEEQLEGEVDHAMELSELAREGELSMEELLQQYAGAYAPGSGSSEDEDEDEVDANSSDCEPEGPVEAEEPPQEDSSSQSDSVEDRSEDEEDEHSEEEETSGSSASEESESEESEDAQSQSQADEEEEDDDFGVEYLLARDEEQSEADAGSGPPTPGPTTLGPKKEITDIAAAAESLQPKGYTLATTQVKTPIPLLLRGQLREYQHIGLDWLVTMYEKKLNGILADEMGLGKTIQTISLLAHLACEKGNWGPHLIIVPTSVMLNWEMELKRWCPSFKILTYYGAQKERKLKRQGWTKPNAFHVCITSYKLVLQDHQAFRRKNWRYLILDEAQNIKNFKSQRWQSLLNFNSQRRLLLTGTPLQNSLMELWSLMHFLMPHVFQSHREFKEWFSNPLTGMIEGSQEYNEGLVKRLHKVLRPFLLRRVKVDVEKQMPKKYEHVIRCRLSKRQRCLYDDFMAQTTTKETLATGHFMSVINILMQLRKVCNHPNLFDPRPVTSPFITPGICFSTASLVLRATDVHPLQRIDMGRFDLIGLEGRVSRYEADTFLPRHRLSRRVLLEVATAPDPPPRPKPVKMKVNRMLQPVPKQEGRTVVVVNNPRAPLGPVPVRPPPGPELSAQPTPGPVPQVLPASLMVSASPAGPPLIPASRPPGPVLLPPLQPNSGSLPQVLPSPLGVLSGTSRPPTPTLSLKPTPPAPVRLSPAPPPGSSSLLKPLTVPPGYTFPPAAATTTSTTTATATTTAVPAPTPAPQRLILSPDMQARLPSGEVVSIGQLASLAQRPVANAGGSKPLTFQIQGNKLTLTGAQVRQLAVGQPRPLQMPPTMVNNTGVVKIVVRQAPRDGLTPVPPLAPAPRPPSSGLPAVLNPRPTLTPGRLPTPTLGTARAPMPTPTLVRPLLKLVHSPSPEVSASAPGAAPLTISSPLHVPSSLPGPASSPMPIPNSSPLASPVSSTVSVPLSSSLPISVPTTLPAPASAPLTIPISAPLTVSASGPALLTSVTPPLAPVVPAAPGPPSLQPSGASPSASALTLGLATAPSLSSSQTPGHPLLLAPTSSHVPGLNSTVAPACSPVLVPASALASPFPSAPNPAPAQASLLAPASSASQALATPLAPMAAPQTAILAPSPAPPLAPLPVLAPSPGAAPVLASSQTPVPVMAPSSTPGTSLASASPVPAPTPVLAPSSTQTMLPAPVPSPLPSPASTQTLALAPALAPTLGGSSPSQTLSLGTGNPQGPFPTQTLSLTPASSLVPTPAQTLSLAPGPPLGPTQTLSLAPAPPLAPASPVGPAPAHTLTLAPASSSASLLAPASVQTLTLSPAPVPTLGPAAAQTLALAPASTQSPASQASSLVVSASGAAPLPVTMVSRLPVSKDEPDTLTLRSGPPSPPSTATSFGGPRPRRQPPPPPRSPFYLDSLEEKRKRQRSERLERIFQLSEAHGALAPVYGTEVLDFCTLPQPVASPIGPRSPGPSHPTFWTYTEAAHRAVLFPQQRLDQLSEIIERFIFVMPPVEAPPPSLHACHPPPWLAPRQAAFQEQLASELWPRARPLHRIVCNMRTQFPDLRLIQYDCGKLQTLAVLLRQLKAEGHRVLIFTQMTRMLDVLEQFLTYHGHLYLRLDGSTRVEQRQALMERFNADKRIFCFILSTRSGGVGVNLTGADTVVFYDSDWNPTMDAQAQDRCHRIGQTRDVHIYRLISERTVEENILKKANQKRMLGDMAIEGGNFTTAYFKQQTIRELFDMPLEEPSSSSVPSAPEEEEETVASKQTHILEQALCRAEDEEDIRAATQAKAEQVAELAEFNENDGFPAGEGEEAGRPGAEDEEMSRAEQEIAALVEQLTPIERYAMKFLEASLEEVSREELKQAEEQVEAARKDLDQAKEEVFRLPQEEEEGPGAGDESSCGTGGGTHRRSKKAKAPERPGTRVSERLRGARAETQGANHTPVISAHQTRSTTTPPRCSPARERVPRPAPRPRPTPASAPAAIPALVPVPVSAPVPISAPNPITILPVHILPSPPPPSQIPPCSSPACTPPPACTPPPAHTPPPAQTCLVTPSSPLLLGPPSVPISASVTNLPLGLRPEAELCAQALASPESLELASVASSETSSLSLVPPKDLLPVAVEILPVSEKNLSLTPSAPSLTLEAGSIPNGQEQEAPDSAEGTTLTVLPEGEELPLCVSESNGLELPPSAASDEPLQEPLEADRTSEELTEAKTPTSSPEKPQELVTAEVAAPSTSSSATSSPEGPSPARPPRRRTSADVEIRGQGTGRPGQPPGPKVLRKLPGRLVTVVEEKELVQRRRQQRGAASTLVPGVSETSASPGSPSVRSMSGPESSPPIGGPCEAAPSSSLPTPPQQPFIARRHIELGVTGGGSPENGDGALLAITPPAVKRRRGRPPKKNRSPADAGRGVDEAPSSTLKGKTNGADPVPGPETLIVADPVLEPQLIPGPQPLGPQPVHRPNPLLSPVEKRRRGRPPKARDLPIPGTISSAGDGNSESRTQPPPHPSPLTPLPPLLVCPTATVANTVTTVTISTSPPKRKRGRPPKNPPSPRPSQLPVLDRDSTSVLESCGLGRRRQPQGQGESEGSSSDEDGSRPLTRLARLRLEAEGMRGRKSGGSMVVAVIQDDLDLADSGPGGLELTPPVVSLTPKLRSTRLRPGSLVPPLETEKLPRKRAGAPVGGSPGLAKRGRLQPPSPLGPEGSVEESEAEASGEEEEGDGTPRRRPGPRRLVGTTNQGDQRILRSSAPPSLAGPAVSHRGRKAKT

SEQ ID NO: 8850 - protein, 730 aa, Homo sapiens
MGLGKTIQSITFLYEILLTGIRGPFLIIAPLSTIANWEREFRTWTDINVVVYHGSLISRQMIQQYEMYFRDSQGRIIRGAYRFQAIITTFEMILGGCGELNAIEWRCVIIDEAHRLKNKNCKLLEGLKLMNLEHKVLLTGTPLQNTVEELFSLLHFLEPLRFPSESTFMQEFGDLKTEEQVQKLQVILKPMMLRRLKEDVEKKLAPKEETIIEVELTNIQKKYYRAILEKNFSFLSKGAGQTNVPNLVNTMMELRKCCNHPYLIKGAEEKILGEFRDTYNPAASDFHLQAMIQSAGKLVLIDKLLPKMKAGGHKVLIFSQMVRCLDILEDYLIHKRYLYERIDGRVRGNLRQAAIDRFSKPDSDRFVFLLCTRAGGLGINLTAADTCIIFDSDWNPQNDLQAQARCHRIGQNKAVKVYRLVTRNSYEREMFDRASLKLGLDKAVLQSMSGRESNVGGIQQLSKKEIEDLLRRGAYGAIMEEEDEGSKFCEEDIDQILLRRTKTITIESEGRGSTFAKASFVASGNRTDISLDDPNFWQKWAKKAEIDIEAISGRNGLVIDTPRIRKQTRPFSATKDELAELSEAESEGDEKPKLRRPCDRSNGYGRTECFRVEKNLLVYGWGRWREILSHGRFKRQLNEHDVEIICRALLAYCLVHYRGDEKIKGFIWDLITPTEDGQTRELQNHLGLSAPVPRGRKGKKVKTQTSSFDIQKAEWLRKYNPEQLLQDEGY

SEQ ID NO: 8851 - protein, 1162 aa, Homo sapiens
MEEVRCPEHGTFCFLKTGVRDGPNKGKSFYVCRADTCSFVRATDIPVSHCLLHEDFVVELQGLLLPQDKKEYRLFFRCIRSKAEGKRWCGSIPWQDPDSKEHSVSNKSQHASETFHHSSNWLRNPFKVLDKNQEPALWKQLIKGEGEEKKADKKQREKGDQLFDQKKEQKPEMMEKDLSSGLVPKKKQSVVQEKKQEEGAEIQCEAETGGTHKRDFSEIKSQQCQGNELTRPSASSQEKSSGKSQDVQRESEPLREKVTQLLPQNVHSHNSISKPQKGGPLNKEYTNWEAKETKAKDGPSIQATQKSLPQGHFQERPETHSVPAPGGPAAQAAPAAPGLSLGEGREAATSSDDEEEDDVVFVSSKPGSPLLFDSTLDLETKENLQFPDRSVQRKVSPASGVSKKVEPSDPVARRVYLTTQLKQKKSTLASVNIQALPDKGQKLIKQIQELEEVLSGLTLSPEQGTNEKSNSQVPQQSHFTKTTTGPPHLVPPQPLPRRGTQPVGSLELKSACQVTAGGSSQCYRGHTNQDHVHAVWKITSEAIGQLHRSLESCPGETVVAEDPAGLKVPLLLHQKQALAWLLWRESQKPQGGILADDMGLGKTLTMIALILTQKNQEKKEEKEKSTALTWLSKDDSCDFTSHGTLIICPASLIHHWKNEVEKRVNSNKLRVYLYRGPNRDSRARVLSTYDIVITTYSLVAKEIPTNKQEAEIPGANLNVEGTSTPLLRIAWARIILDEAHNVKNPRVQTSIAVCKLQACARWAVTGTPIQNNLLDMYSLLKFLRCSPFDEFNLWRSQVDNGSKKGGERLSILTKSLLLRRTKDQLDSTGRPLVILPQRKFQLHHLKLSEDEETVYNVFFARSRSALQSYLKRHESRGNQSGRSPNNPFSRVALEFGSEEPRHSEAADSPRSSTVHILSQLLRLRQCCCHLSLLKSALDPMELKGEGLVLSLEEQLSALTLSELRDSEPSSTVSLNGTFFKMELFEGMRESTKISSLLAELEAIQRNSASQKSVIVSQWTNMLKVVALHLKKHGLTYATIDGSVNPKQRMDLVEAFNHSRGPQVMLISLLAGGVGLNLTGGNHLFLLDMHWNPSLEDQACDRIYRVGQQKDVVIHRFVCEGTVEEKILQLQEKKKDLAKQVLSGSGESVTKLTLADLRVLFGI

SEQ ID NO: 8852 - protein, 1106 aa, Homo sapiens [sequence omitted]

SEQ ID NO: 8853 - protein, 747 aa, Homo sapiens
MRRSLAPSQLAKRKPEGRSCDDEDWQPGLVTPRKRKSSSETQIQECFLSPFRKPLSQLTNQPPCLDSSQHEAFIRSILSKPFKVPIPNYQGPLGSRALGLKRAGVRRALHDPLEKDALVLYEPPPLSAHDQLKLDKEKLPVHVVVDPILSKVLRPHQREGVKFLWECVTSRRIPGSHGCIMADEMGLGKTLQCITLMWTLLRQSPECKPEIDKAVVVSPSSLVKNWYNEVGKWLGGRIQPLAIDGGSKDEIDQKLEGFMNQRGARVSSPILIISYETFRLHVGVLQKGSVGLVICDEGHRLKNSENQTYQALDSLNTSRRVLISGTPIQNDLLEYFSLVHFVNSGILGTAHEFKKHFELPILKGRDAAASEADRQLGEERLRELTSIVNRCLIRRTSDILSKYLPVKIEQVVCCRLTPLQTELYKRFLRQAKPAEELLEGKMSVSSLSSITSLKKLCNHPALIYDKCVEEEDGFVGALDLFPPGYSSKALEPQLSGKMLVLDYILAVTRSRSSDKVVLVSNYTQTLDLFEKLCRARRYLYVRLDGTMSIKKRAKVVERFNSPSSPDFVFMLSSKAGGCGLNLIGANRLVMFDPDWNPANDEQAMARVWRDGQKKTCYIYRLLSAGTIEEKIFQRQSHKKALSSCVVDEEQDVERHFSLGELKELFILDEASLSDTHDRLHCRRCVNSRQIRPPPDGSDCTSDLAGWNHCTDKWGLRDEVLQAAWDAASTAITFVFHQHSHEEQRGLR

SEQ ID NO: 8854 - protein, 3124 aa, Homo sapiens
MHHGTGPQNVQHQLQRSRACPGSEGEEQPAHPNPPPSPAAPFAPSASPSAPQSPSYQIQQLMNRSPATGQNVNITLQSVGPVVGGNQQITLAPLPLPSPTSPGFQFSAQPRRFEHGSPSYIQVTSPLSQQVQTQSPTQPSPGPGQALQNVRAGAPGPGLGLCSSSPTGGFVDASVLVRQISLSPSSGGHFVFQDGSGLTQIAQGAQVQLQHPGTPITVRERRPSQPHTQSGGTIHHLGPQSPAAAGGAGLQPLASPSHITTANLPPQISSIIQGQLVQQQQVLQGPPLPRPLGFERTPGVLLPGAGGAAGFGMTSPPPPTSPSRTAVPPGLSSLPLTSVGNTGMKKVPKKLEEIPPASPEMAQMRKQCLDYHYQEMQALKEVFKEYLIELFFLQHFQGNMMDFLAFKKKHYAPLQAYLRQNDLDIEEEEEEEEEEEEKSEVINDEQQALAGSLVAGAGSTVETDLFKRQQAMPSTGMAEQSKRPRLEVGHQGVVFQHPGADAGVPLQQLMPTAQGGMPPTPQAAQLAGQRQSQQQYDPSTGPPVQNAASLHTPLPQLPGRLPPAGVPTAALSSALQFAQQPQVVEAQTQLQIPVKTQQPNVPIPAPPSSQLPIPPSQPAQLALHVPTPGKVQVQASQLSSLPQMVASTRLPVDPAPPCPRPLPTSSTSSLAPVSGSGPGPSPARSSPVNRPSSATNKALSPVTSRTPGVVASAPTKPQSPAQNATSSQDSSQDTLTEQITLENQVHQRIAELRKAGLWSQRRLPKLQEAPRPKSHWDYLLEEMQWMATDFAQERRWKVAAAKKLVRTVVRHHEEKQLREERGKKEEQSRLRRIAASTAREIECFWSNIEQVVEIKLRVELEEKRKKALNLQKVSRRGKELRPKGFDALQESSLDSGMSGRKRKASISLTDDEVDDEEETIEEEEANEGVVDHQTELSNLAKEAELPLLDLMKLYEGAFLPSSQWPRPKPDGEDTSGEEDADDCPGDRESRKDLVLIDSLFIMDQFKAAERMNIGKPNAKDIADVTAVAEAILPKGSARVTTSVKFNAPSLLYGALRDYQKIGLDWLAKLYRKNLNGILADEAGLGKTVQIIAFFAHLACNEGNWGPHLVVVRSCNILKWELELKRWCPGLKILSYIGSHRELKAKRQEWAEPNSFHVCITSYTQFFRGLTAFTRVRWKCLVIDEMQRVKGMTERHWEAVFTLQSQQRLLLIDSPLHNTFLELWTMVHFLVPGISRPYLSSPLRAPSEESQDYYHKVVIRLHRVTQPFILRRTKRDVEKQLTKKYEHVLKCRLSNRQKALYEDVILQPGTQEALKSGHFVNVLSILVRLQRICNHPGLVEPRHPGSSYVAGPLEYPSASLILKALERDFWKEADLSMFDLIGLENKITRHEAELLSKKKIPRKLMEEISTSAAPAARPAAAKLKASRLFQPVQYGQKPEGRTVAFPSTHPPRTAAPTTASAAPQGPLRGRPPIATFSANPEAKAAAAPFQTSQASASAPRHQPASASSTAASPAHPAKLRAQTTAQAFTPGQPPPQPQAPSHAAGQSALPQRLVLPSQAQARLPSGEVVKIAQLASITGPQSRVAQPETPVTLQFQGSKFTLSHSQFRQFTAGQPLQLQGSVLQIVSAPGQPYLRAPGPVVMQTVSQAGAVHGALGSKPPAGGPSPAPLTPQVGVPGRVAVNALAVGEPGTASKPASPIGGPTQEEKTRLLKERLDQIYLVNERRCSQAPVYGRDLLRICALPSHGRVQWRGSLDGRRGKEAGPAHSYTSSSESPSELMLTLCRCGESLQDVIDRVAFVIPPVVAAPPSLRVPRPPPLYSHRMRILRQGLREHAAPYFQQLRQTTAPRLLQFPELRLVQFDSGKLEALAILLQKLKSEGRRVLILSQMILMLDILEMFLNFHYLTYVRIDENASSEQRQELMRSFNRDRRIFCAILSTHSRTTGINLVEADTVVFYDNDLNPVMDAKAQEWCDRIGRCKDIHIYRLVSGNSIEEKLLKNGTKDLIREVAAQGNDYSMAFLTQRTIQELFEVYSPMDDAGFPVKAEEFVVLSQEPSVTETIAPKIARPFIEALKSIEYLEEDAQKSAQEGVLGPHTDALSSDSENMPCDEEPSQLEELADFMEQLTPIEKYALNYLELFHTSIEQEKERNSEDAVMTAVRAWEFWNLKTLQEREARLRLEQEEAELLTYTREDAYSMEYVYEDVDGQTEVMPLWTPPTPPQDDSDIYLDSVMCLMYEATPIPEAKLPPVYVRKERKRHKTDPSAAGRKKKQRHGEAVVPPRSLFDRATPGLLKIRREGKEQKKNILLKQQVPFAKPLPTFAKPTAEPGQDNPEWLISEDWALLQAVKQLLELPLNLTIVSPAHTPNWDLVSDVVNSCSRIYRSSKQCRNRYENVIIPREEGKSKNNRPLRTSQIYAQDENATHTQLYTSHFDLMKMTAGKRSPPIKPLLGMNPFQKNPKHASVLAESGINYDKPLPPIQVASLRAERIAKEKKALADQQKAQQPAVAQPPPPQPQPPPPPQQPPPPLPQPQAAGSQPPAGPPAVQPQPQPQPQTQPQPVQAPAKAQPAITTGGSAAVLAGTIKTSVTGTSMPTGAVSGNVIVNTIAGVPAATFQSINKRLASPVAPGALTTPGGSAPAQVVHTQPPPRAVGSPATATPDLVSMATTQGVRAVTSVTASAVVTTNLTPVQTPARSLVPQVSQATGVQLPGKTITPAHFQLLRQQQQQQQQQQQQQQQQQQQQQQQQQQQQQQTTTTSQVQVPQIQGQAQSPAQIKAVGKLTPEHLIKMQKQKLQMPPQPPPPQAQSAPPQPAAQVQVQTSQPPQQQSPQLTTVTAPRPGALLTGTTVANLQVARLTRVPTSQLQSQGQMQTQAPQPAQVPLPKPPVVSVPAAVVSSPGVTTLPMNVAGISVAIGQPQKAAGQTVVAQPVHMQQLLKLKQQAVQQQKAIQPQAAQGPATVQQKITAQQITTPGAQQKVAYAAQPALKTQFLTTPISQAQKLAGAQQVQTQIQVAKLPQVVQQQTPVASIQQVASASQQASPQTVALTQATAAGQQVQMIPAVTATAQVVQQKLIQQQVVTTASAPLQTPGAPNPAQVPASSDSPSQQPKLQMRVPAVRLKTPTKPPCQ

SEQ ID NO: 8855 - protein, 1731 aa, Homo sapiens
IMHHGTGPQNVQHQLQRSRACPGSEGEEQPAHPNPPPSPAAPFAPSASPSAPQSPSYQIQQLMNRSPATGQNVNITLQSVGPVVGGNQQITLAPLPLPSPTSPGFQFSAQPRRFEHGSPSYIQVTSPLSQQVQTQSPTQPSPGPGQALQNVRAGAPGPGLGLCSSSPTGGFVDASVLVRQISLSPSSGGHFVFQDGSGLTQIAQGAQVQLQHPGTPITVRERRPSQPHTQSGGTIHHLGPQSPAAAGGAGLQPLASPSHITTANLPPQISSIIQGQLVQQQQVLQGPPLPRPLGFERTPGVLLPGAGGAAGFGMTSPPPPTSPSRTAVPPGLSSLPLTSVGNTGMKKVPKKLEEIPPASPEMAQMRKQCLDYHYQEMQALKEVFKEYLIELFFLQHFQGNMMDFLAFKKKHYAPLQAYLRQNDLDIEEEEEEEEEEEEKSEVINDEQQALAGSLVAGAGSTVETDLFKRQQAMPSTGMAEQSKRPRLEVGHQGVVFQHPGADAGVPLQQLMPTAQGGMPPTPQAAQLAGQRQSQQQYDPSTGPPVQNAASLHTPLPQLPGRLPPAGVPTAALSSALQFAQQPQVVEAQTQLQIPVKTQQPNVPIPAPPSSQLPIPPSQPAQLALHVPTPGKVQVQASQLSSLPQMVASTRLPVDPAPPCPRPLPTSSTSSLAPVSGSGPGPSPARSSPVNRPSSATNKALSPVTSRTPGVVASAPTKPQSPAQNATSSQDSSQDTLTEQITLENQVHQRIAELRKAGLWSQRRLPKLQEAPRPKSHWDYLLEEMQWMATDFAQERRWKVAAAKKLVRTVVRHHEEKQLREERGKKEEQSRLRRIAASTAREIECFWSNIEQVVEIKLRVELEEKRKKALNLQKVSRRGKELRPKGFDALQESSLDSGMSGRKRKASISLTDDEVDDEEETIEEEEANEGVVDHQTELSNLAKEAELPLLDLMKLYEGAFLPSSQWPRPKPDGEDTSGEEDADDCPGDRESRKDLVLIDSLFIMDQFKAAERMNIGKPNAKDIADVTAVAEAILPKGSARVTTSVKFNAPSLLYGALRDYQKIGLDWLAKLYRKNLNGILADEAGLGKTVQIIAFFAHLACNEGNWGPHLVVVRSCNILKWELELKRWCPGLKILSYIGSHRELKAKRQEWAEPNSFHVCITSYTQFFRGLTAFTRVRWKCLVIDEMQRVKGMTERHWEAVFTLQSQQRLLLIDSPLHNTFLELWTMVHFLVPGISRPYLSSPLRAPSEESQDYYHKVVIRLHRVTQPFILRRTKRDVEKQLTKKYEHVLKCRLSNRQKALYEDVILQPGTQEALKSGHFVNVLSILVRLQRICNHPGLVEPRHPGSSYVAGPLEYPSASLILKALERDFWKEADLSMFDLIGLENKITRHEAELLSKKKIPRKLMEEISTSAAPAARPAAAKLKASRLFQPVQYGQKPEGRTVAFPSTHPPRTAAPTTASAAPQGPLRGRPPIATFSANPEAKGGEVVKIAQLASITGPQSRVAQPETPVTLQFQGSKFTLSHSQLRQLTAGQPLQLQGSVLQIVSAPGQPYLRAPGPVVMQTVSQAGAVHGALGSKPPAGGPSPAPLTPQVGVPGRVAVNALAVGEPGTASKPASPIGGPTQEEKTRLLKERLDQIYLVNERRCSQAPVYGRDLLRICALPSHGRVQWRGSLDGRRGKEAGPAHSYTSSSESPSELMLTLCRCGESLQDVIDRVAFVIPPVVAAPPSLRV

SEQ ID NO: 8856 - protein, 375 aa, Homo sapiens
RLLLTGTPVQNNLLELMSLLNFVMPHMFSSSTSEIRRMFSSKTKSADEQSIYEKERIAHAKQIIKPFILRRVKEEVLKQLPPKKDRIELCAMSEKQEQLYLGLFNRLKKSINNLEKNTEMCNVMMQLRKMANHPLLHRQYYTAEKLKEMSQLMLKEPTHCEANPDLIFEDMEVMTDFELHVLCKQYRHINNFQLDMDLILDSGKFRVLGCILSELKQKGDRVVLFSQFTMMLDILEVLLKHHQHRYLRLDGKTQISERIHLIDEFNTDMDIFVFLLSTKAGGLGINLTSANVVILHDIDCNPYNDKQAEDRCHRVGQTKEVLVIKLISQGTIEESMLKINQQKLKLEQDMTTVDEGDEGSMPADIATLLKTSMGL

SEQ ID NO: 8857 - protein, 336 aa, Homo sapiens
MGLGKTIQSITFLYEILLTGIRGPFLIIAPLSTIANWEREFRTWTDINVVVYHGSLISRQMIQQYEMYFRDSQGRIIRGAYRFQAIITTFEMILGGCGELNAIEWRCVIIDEAHRLKNKNCKLLEGLKLMNLEHKVLLTGTPLQNTVEELFSLLHFLEPLRFPSESTFMQEFGDLETEEQVQKLQAILKPMMLRRLKEDVEKKLAPKEETIIEVELTNIQKKYYRAILEKNFSFLSKGAGQTNVPNLVNTMMELRKCCNHPYLIKGAEEKILGEFRDTYNPAASDFHLQAMIQSAGKLVLIDKLLPKMKAGGHKVLIFSQMVRCLDILEDYLIHKR

SEQ ID NO: 8858 - protein, 1008 aa, Homo sapiens
MSWMFKRDPVWKYLQTVQYGVHGNFPRLSYPTFFPRFEFQDVIPPDDFLTSDEEVDSVLFGSLRGHVVGLRYYTGVVNNNEMVALQRDPNNPYDKNAIKVNNVNGNQVGHLKKELAGALAYIMDNKLAQIEGVVPFGANNAFTMPLHMTFWGKEENRKAVSDQLKKHGFKLGPAPKTLGFNLESGWGSGRAGPSYSMPVHAAVQMTTEQLKTEFDKLFEDLKEDDKTHEMEPAEAIETPLLPHQKQALAWMVSRENSKELPPFWEQRNDLYYNTITNFSEKDRPENVHGGILADDMGLGKTLTAIAVILTNFHDGRPLPIERVKKNLLKKEYNVNDDSMKLGGNNTSEKADGLSKDASRCSEQPSISDIKEKSKFRMSELSSSRPKRRKTAVQYIESSDSEEIETSELPQKMKGKLKNVQSETKGRAKGSSKVIEDVAFACALTSSVPTTKKKMLKKGACAVEGSKKTDVEERPRTTLIICPLSVLSNWIDQFGQHIKSDVHLNFYVYYGPDRIREPALLSKQDIVLTTYNILTHDYGTKGDSPLHSIRWLRVILDEGHAIRNPNAQQTKAVLDLESERRWVLTGTPIQNSLKDLWSLLSFLKLKPFIDREWWHRTIQRPVTMGDEGGLRRLQSLIKNITLRRTKTSKIKGKPVLELPERKVFIQHITLSDEERKIYQSVKNEGRATIGRYFNEGTVLAHYADVLGLLLRLRQICCHTYLLTNAVSSNGPSGNDTPEELRKKLIRKMKLILSSGSDEECAICLDSLTVPVITHCAHVFCKPCICQVIQNEQPHAKCPLCRNDIHEDNLLECPPEELARDSEKKSDMEWTSSSKINALMHALTDLRKKNPNIKSLVVSQFTTFLSLIEIPLKASGFVFTRLDGSMAQKKRVESIQCFQNTEAGSPTIMLLSLKAGGVGLNLSAASRVFLMDPAWNPAAEDQCFDRCHRLGQKQEVIITKFIVKDSVEENMLKIQNKKRELAAGAFGTKKPNADEMKQAKINEIRTLIDL

SEQ ID NO: 8859 - protein, 1009 aa, Homo sapiens [sequence omitted]

SEQ ID NO: 8860 - protein, 1009 aa, Homo sapiens [sequence omitted]

SEQ ID NO: 8861 - protein, 1009 aa, Homo sapiens
MSWMFKRDPVWKYLQTVQYGVHGNFPRLSYPTFFPRFEFQDVIPPDDFLTSDEEVDSVLFGSLRGHVVGLRYYTGVVNNNEMVALQRDPNNPYDKNAIKVNNVNGNQVGHLKKELAGALAYIMDNKLAQIEGVVPFGANNAFTMPLHMTFWGKEENRKAVSDQLKKHGFKLGPAPKTLGFNLESGWGSGRAGPSYSMPVHAAVQMTTEQLKTEFDKLFEDLKEDDKTHEMEPAEAIETPLLPHQKQALAWMVSRENSKELPPFWEQRNDLYYNTITNFSEKDRPENVHGGILADDMGLGKTLTAIAVILTNFHDGRPLPIERVKKNLLKKEYNVNDDSMKLGGNNTSEKADGLSKDASRCSEQPSISDIKEKSKFRMSELSSSRPKRRKTAVQYIESSDSEEIETSELPQKMKGKLKNVQSETKGRAKAGSSKVIEDVAFACALTSSVPTTKKKMLKKGACAVEGSKKTDVEERPRTTLIICPLSVLSNWIDQFGQHIKSDVHLNFYVYYGPDRIREPALLSKQDIVLTTYNILTHDYGTKGDSPLHSIRWLRVILDEGHAIRNPNAQQTKAVLDLESERRWVLTGTPIQNSLKDLWSLLSFLKLKPFIDREWWHRTIQRPVTMGDEGGLRRLQSLIKNITLRRTKTSKIKGKPVLELPERKVFIQHITLSDEERKIYQSVKNEGRATIGRYFNEGTVLAHYADVLGLLLRLRQICCHTYLLTNAVSSNGPSGNDTPEELRKKLIRKMKLILSSGSDEECAICLDSLTVPVITHCAHVFCKPCICQVIQNEQPHAKCPLCRNDIHEDNLLECPPEELARDSEKKSDMEWTSSSKINALMHALTDLRKKNPNIKSLVVSQFTTFLSLIEIPLKASGFVFTRLDGSMAQKKRVESIQCFQNTEAGSPTIMLLSLKAGGVGLNLSAASRVFLMDPAWNPAAEDQCFDRCHRLGQKQEVIITKFIVKDSVEENMLKIQNKKRELAAGAFGTKKPNADEMKQAKINEIRTLIDL

SEQ ID NO: 8862 - protein, 887 aa, Homo sapiens [sequence omitted]

SEQ ID NO: 8863 - protein, 1009 aa, Homo sapiens [sequence omitted]

SEQ ID NO: 8864 - protein, 702 aa, Homo sapiens
MNLFNLDRFRFEKRNKIEEAPEATPQPSQPGPSSPISLSAEEENAEGEVSRANTPDSDITEKTEDSSVPETPDNERKASISYFKNQRGIQYIDLSSDSEDVVSPNCSNTVQEKTFNKDTVIIVSEPSEDEESQGLPTMARRNDDISELEDLSELEDLKDAKLQTLKELFPQRSDNDLLKLIESTSTMDGAIAAALLMFGDAGGGPRKRKLSSSSEPYEEDEFNDDQSIKKTRLDHGEESNESAESSSNWEKQESIVLKLQKEFPNFDKQELREVLKEHEWMYTEALESLKVFAEDQDMQYVSQSEVPNGKEVSSRSQNYPKNATKTKLKQKFSMKAQNGFNKKRKKNVFNPKRVVEDSEYDSGSDVGSSLDEDYSSGEEVMEDGYKGKILHFLQDASIGELTLIPQCSQKKAQKITELRPFNSWEALFTKMSKTNGLSEDLIWHCKTLIQERDVVIRLMNKCEDISNKLTKQVTMLTGNGGGWNIEQPSILNQSLSLKPYQKVGLNWLALVHKHGLNGILADEMGLGKTIQAIAFLAYLYQEGNNGPHLIVVPASTIDNWLREVNLWCPTLKVLCYYGSQEERKQIRFNIHSRYEDYNVIVTTYNCAISSSDDRSLFRRLKLNYAIFDEGHMLKNMGSIRYQHLMTINANNRLLLTGTPVQNNLLELMSLLNFVMPHMFSSSTSEIRRMFSSKTKSADEQSI

SEQ ID NO: 8865 - protein, 1668 aa, Homo sapiens
LLAPTSSHVPGLNSTVAPACSPVLVPASALASPFPSAPNPAPPLAPLPVLAPSPGAAPVLASSQTPVPVMAPSSTPGTSLASASPVPAPTPVLAPSSTQTMLPAPVPSPLPSPASTQTLALAPALAPTLGGSSPSQTLSLGTGNPQGPFPTQTLSLTPASSLVPTPAQTLSLAPGPPLGPTQTLSLAPAPPLAPASPVGPAPAHTLTLAPASSSASLLAPASVQTLTLSPAPVPTLGPAAAQTLALAPASTQSPASQASSLVVSASGAAPLPVTMVSRLPVSKDEPDTLTLRSGPPSPPSTATSFGGPRPRRQPPPPPRSPFYLDSLEEKRKRQRSERLERIFQLSEAHGALAPVYGTEVLDFCTLPQPVASPIGPRSPGPSHPTFWTYTEAAHRAVLFPQQRLDQLSEIIERFIFVMPPVEAPPPSLHACHPPPWLAPRQAAFQEQLASELWPRARPLHRIVCNMRTQFPDLRLIQYDCGKLQTLAVLLRQLKAEGHRVLIFTQMTRMLDVLEQFLTYHGHLYLRLDGSTRVEQRQALMERFNADKRIFCFILSTRSGGVGVNLTGADTVVFYDSDWNPTMDAQAQDRCHRIGQTRDVHIYRLISERTVEENILKKANQKRMLGDMAIEGGNFTTAYFKQQTIRELFDMPLEEPSSSSVPSAPEEEEETVASKQTHILEQALCRAEDEEDIRAATQAKAEQVAELAEFNENDGFPAGEGEEAGRPGAEDEEMSRAEQEIAALVEQLTPIERYAMKFLEASLEEVSREELKQAEEQVEAARKDLDQAKEEVFRLPQEEEEGPGAGDESSCGTGGGTHRRSKKAKAPERPGTRVSERLRGARAETQGANHTPVISAHQTRSTTTPPRCSPARERVPRPAPRPRPTPASAPAAIPALVPVPVSAPVPISAPNPITILPVHILPSPPPPSQIPPCSSPACTPPPACTPPPAHTPPPAQTCLVTPSSPLLLGPPSVPISASVTNLPLGLRPEAELCAQALASPESLELASVASSETSSLSLVPPKDLLPVAVEILPVSEKNLSLTPSAPSLTLEAGSIPNGQEQEAPDSAEGTTLTVLPEGEELPLCVSESNGLELPPSAASDEPLQEPLEADRTSEELTEAKTPTSSPEKPQELVTAEVAAPSTSSSATSSPEGPSPARPPRRRTSADVEIRGQGTGRPGQPPGPKVLRKLPGRLVTVVEEKELVRRRRQQRGAASTLVPGVSETSASPGSPSVRSMSGPESSPPIGGPCEAAPSSSLPTPPQQPFIARRHIELGVTGGGSPENGDGALLAITPPAVKRRRGRPPKKNRSPADAGRGVDEAPSSTLKGKTNGADPVPGPETLIVADPVLEPQLIPGPQPLGPQPVHRPNPLLSPVEKRRRGRPPKARDLPIPGTISSAGDGNSESRTQPPPHPSPLTPLPPLLVCPTATVANTVTTVTISTSPPKRKRGRPPKNPPSPRPSQLPVLDRDSTSVLESCGLGRRRQPQGQGESEGSSSDEDGSRPLTRLARLRLEAEGMRGRKSGGSMVVAVIQDDLDLADSGPGGLELTPPVVSLTPKLRSTRLRPGSLVPPLETEKLPRKRAGAPVGGSPGLAKRGRLQPPSPLGPEGSVEESEAEASGEEEEGDGTPRRRPGPRRLVGTTNQGDQRILRSSAPPSLAGPAVSHRGRKAKT

SEQ ID NO: 8866 - protein, 361 aa, Homo sapiens [sequence omitted]

SEQ ID NO: 8867 - protein, 978 aa, Homo sapiens
GNQVSLLNIMMDLKKCCNHPYLFPVAAVEAPVLPNGSYDGSSLVKSSGKLMLLQKMLKKLRDEGHRVLIFSQMTKMLDLLEDFLEYEGYKYERIDGGITGGLRQEAIDRFNAPGAQQFCFLLSTRAGGLGINLATADTVIIYDSDWNPHNDIQAFSRAHRIGQNKKVMIYRFVTRASVEERITQVAKRKMMLTHLVVRPGLGSKSGSMTKQELDDILKFGTEELFKDDVEGMMSQGQRPVTPIPDVQSSKGGNLAASAKKKHGSTPPGDNKDVEDSSVIHYDDAAISKLLDRNQDATDDTELQNMNEYLSSFKVAQYVVREEDGVEEVEREIIKQEENVDPDYWEKLLRHHYEQQQEDLARNLGKGKRIRKQVNYNDASQEDQEWQDELSDNQSEYSIGSEDEDEDFEERPEGQSGRRQSRRQLKSDRDKPLPPLLARVGGNIEVLGFNARQRKAFLNAIMRWGMPPQDAFNSHWLVRDLRGKSEKEFRAYVSLFMRHLCEPGADGAETFADGVPREGLSRQHVLTRIGVMSLVRKKVQEFEHVNGKYSTPDLIPEGPEGKKPGEVISSDPNTPVPASPAHLLPAPLGLPDKMEAQLGYMDEKDPGAQKPRQPLEVQALPAALDRVESEDKHESPASKERAREERPEETEKAPPSPEQLPREEVLPEKEKILDKLELSLIHSRGDSSELRPDDTKAEEKEPIETQQNGDKEEDDEGKKEDKKGKFKFMFNIADGGFTELHTLWQNEERAAVSSGKIYDIWHRRHDYWLLAGIVTHGYARWQDIQNDPRYMILNEPFKSEVHKGNYLEMKNKFLARRFKLLEQALVIEEQLRRAAYLNMTQDPNHPAMALNARLAEVECLAESHQHLSKESLAGNKPANAVLHKVLNQLEELLSDMKADVTRLPSMLSRIPPVAARLQMSERSILSRLTNRAGDPTIQQGAFGSSQMYSNNFGPNFRGPGPGGIVNYNQMPLGPYVTDI

SEQ ID NO: 8868 - protein, 2041 aa, Homo sapiens
LKPMMLRRLKDDVEKNLAPKQETIIEVELTNIQKKYYRAILEKNFSFLTKGANQHNMPNLINTMMELRKCCNHPYLINGAEEKILEDFRKTHSPDAPDFQLQAMIQAAGKLVLIDKLLPKLIAGGHKVLIFSQMVRCLDILEDYLIQRRYTYERIDGRVRGNLRQAAIDRFCKPDSDRFVFLLCTRAGGLGINLTAADTCIIFDSDWNPQNDLQAQARCHRIGQSKAVKVYRLITRNSYEREMFDKASLKLGLDKAVLQDINRKGGTNGVQQLSKMEVEDLLRKGAYGALMDEEDEGSKFCEEDIDQILQRRTHTITIQSEGKGSTFAKASFVASGNRTDISLDDPNFWQKWAKIAELDTEAKNEKESLVIDRPRVRKQTKHYNSFEEDELMEFSELDSDSDERPTRSRRLNDKARRYLRAECFRVEKNLLIFGWGRWKDILTHGRFKWHLNEKDMEMICRALLVYCVKHYKGDEKIKSFIWELITPTKDGQAQTLQNHSGLSAPVPRGRKGKKTKNQLLIPELKDADWLATCNPEVVLHDDGYKKHLKQHCNKVLLRVRMLYYLKAEILGEAAEKAFEGSPARELDVPLPDIDYMEIPVDWWDAEADKSLLIGVFKHGYERYNAMRADPALCFLEKVGMPDEKSLSAEQGVTDGTSDIPERGNTDKEDNAEDKVDGLQKQTESSSDGGDGVFSEKKDDSRAAQDGSDPDKSPWPVSSALTARLRRLVTVYQRCNRKELCRPEILGPGNQGYWVQEEMFRRTSEMDLINKEAQKRWTRREQADFYRTVSSFGVVYDQEKKTFDWTQFRIISRLDKKSDESLEQYFYSFVAMCRNVCRLPTWKDGGPPDTTIYVEPITEERAARTLYRIELLRKVREQVLKCPQLHERLQLCRPSLYLPVWWECGKHDRDLLIGTAKHGLNRTDCYIMNDPQLSFLDAYRNYAQHKRSGTQAPGNLCCLYQTNSKLYESLTYSQMSRTSESLENEPENLVRVESRDDHLSLPDVTCENFISKVQDVISINHDESLLPESLESMMYGKKVLSQEPSSFQESPSTNTESRKDVITISISKDGNCQSGGPEAEIASGPTFMGSLEAGGVAQANIKNGKHLLMSISKEGELCCSEAGQRPENIGQLEAKCLASPSLNPGNESGFVDMCSLSVCDSKRNLSSDQQLIDLLENKSLESKLILSQNHSDEEEEEEENEEENLAMAVGMGERPEVLHLTEPTTNISREKNQGFQDETKKGSLEVANQTPGLQRAFPAPAACQCHCKHMERWMHGLENDEFEIEKPKAYIPDLFKSKTNTIAMEGEPTAIPSQPFKVKHELLKEPWKESAEGQNVFPTYPLEGSELKSEDMDFENKDDYDRDGNCHSQDYPGKYSEEESKSSTSGITGDIGDELQEARAPTIAQLLQEKTLYSFSEWPKDRVIINRLDNICHVVLKGKWPSSQQYEPSGTLPTPVLTSSAGSRTSLSEPEAAEHSFSNGAALAAQIHKESFLAPVFTKDEQKHRRPYEFEVERDAKARGLEQFSATHGHTPIILNGWHGESAMDLSCSSEGSPGATSPFPVSASTPKIGAISSLQGALGMDLSGILQAGLIHPVTGQIVNGSLRRDDAATRRRRGRRKHVEGGMDLIFLKEQTLQAGILEVHEDPGQATLSTTHPEGPGPATSAPEPATAASSQAEKSIPSKSLLDWLRQQADYSLEVPGFGANFSDKPKQRRPRCKEPGKLDVSSLSGEERVPAIPKEPGLRGFLPENKFNHTLAEPILRDTGPRRRGRRPRSELLKAPSIVADSPSGMGPLFMNGLIAGMDLVGLQNMRNMPGIPLTGLVGFPAGFATMPTGEEVKSTLSMLPMMLPGMAAVPQMFGVGGLLSPPMATTCTSTAPASLSSTTKSGTAVTEKTAEDKPSSHDVKTDTLAEDKPGPGPFSDQSEPAITTSSPVAFNPFLIPGVSPGLIYPSMFLSPGMGMALPAMQQARHSEIVGLESQKRKKKKTKGDNPNSHPEPAPSCEREPSGDENCAEPSAPLPAEREHGAQAGEGALKDSNNDTN

SEQ ID NO: 8869 - protein, 205 aa, Homo sapiens
MGLGKTVQVISFLAAVLHKKGTREDIENNMPEFLLRSMKKEPLSSTAKKMFLIVAPLSVLYNWKDELDTWGYFRVTVLHGNRKDNELIRVKQRKCEIALTTYETLRLCLDELNSLEWSAVIVDEAHRIKNPKARVTEVMKALKCNVRIGLTGTILQNNMKELWCVMDWAVPGLLGSGTYFKKQFSDPVEHGQRHTATKRELATGR

SEQ ID NO: 8870 - protein, 954 aa, Homo sapiens
MSLPLTEEQRKKIEENRQKALGRRAEKLLAEQHQRTSSGTSIAGNPFQAKQGPSQNFPRESCKPVSHGVIFKQQNLSSSSNADQRPHDSHSFQAKGIWKKPEEMPTACPGHSPRSQMALTGISPPLAQSPPEVPKQQLLSYELGQGHAQASPEIRFTPFANPTHKPLAKPKSSQETPAHSSGQPPRDAKLEAKTAKASPSGQNISYIHSSSESVTPRTEGRLQQKSGSSVQKGVNSQKGKCVRNGDRFQVLIGYNAELIAVFKTLPSKNYDPDTKTWNFSMNDYSALMKAAQSLPTVNLQPLEWAYGSSESPSTSSEGQAGLPSAPSLSFVKGRCMLISRAYFEADISYSQDLIALFKQMDSRRYDVKTRKWSFLLQEHSKLIAKVRCLPQVQLDPLPTTLTLAFASQLKKTSLSLTPDVPEADLSEVDPKLVSNLMPFQRAGVNFAIAKGGRLLLADDMGLGKTIQAICIAAFYRKEWPLLVVVPSSVRFTWEQAFLRWLPSLSPDCINVVVTGKDRLTAGLINIVSFDLLSKLEKQLKTPFKVVIIDESHFLKNSRTARCRAAMPVLKVAKRVILLSGTPAMSRPAELYTQIIAVKPTFFPQFHAFGLRYCDAKRMPWGWDYSGSSNLGELKLLLEEAVMLRRLKSDVLSQLPAKQRKIVVIAPGRINARTRAALDAAAKEMTTKDKTKQQQKDALILFFNRTAEAKIPSVIEYILDLLESGREKFLVFAHHKVVLDAITQELERKHVQHIRIDGSTSSAEREDLCQQFQLSERHAVAVLSITAANMGLTFSSADLVVFAELFWNPGVLIQAEDRVHRIGQTSSVGIHYLVAKGTADDYLWPLIQEKIKVLAEAGLSETNFSEMTESTDYLYKDPKQQKIYDLFQKSFEKEGSDMELLEAAESFDPGSASGTSGSSSQNMGDTLDESSLTASPQKKRRFEFFDNWDSFTSPL

SEQ ID NO: 8871 - protein, 954 aa, Homo sapiens [sequence omitted]

SEQ ID NO: 8872 - protein, 808 aa, Homo sapiens
HAQASPEIRFTPFANPTHKPLAKPKSSQETPAHSSGQPPRDAKLEAKTAKASPSGQNISYIHSSSESVTPRTEGRLQQKSGSSVQKGVNSQKGKCVRNGDRFQVLIGYNAELIAVFKTLPSKNYDPDTKTWNFSMNDYSALMKAAQSLPTVNLQPLEWAYGSSESPSTSSEGQAGLPSAPSLSFVKGRCMLISRAYFEADISYSQDLIALFKQMDSRRYDVKTRKWSFLLEEHSKLIAKVRCLPQVQLDPLPTTLTLAFASQLKKTSLSLTPDVPEADLSEVDPKLVSNLMPFQRAGVNFAIAKGGRLLLADDMGLGKTIQAICIAAFYRKEWPLLVVVPSSVRFTWEQAFLRWLPSLSPDCINVVVTGKDRLTAGLINIVSFDLLSKLEKQLKTPFKVVIIDESHFLKNSRTARCRAAMPVLKVAKRVILLSGTPAMSRPAELYTQIIAVKPTFFPQFHAFGLRYCDAKRMPWGWDYSGSSNLGELKLLLEEAVMLRRLKSDVLSQLPAKQRKIVVIAPGRINARTRAALDAAAKEMTTKDKTKQQQKDALILFFNRTAEAKIPSVIEYILDLLESGREKFLVFAHHKVVLDAITQELERKHVQHIRIDGSTSSAEREDLCQQFQLSERHAVAVLSITAANMGLTFSSADLVVFAELFWNPGVLIQAEDRVHRIGQTSSVGIHYLVAKGTADDYLWPLIQEKIKVLAEAGLSETNFSEMTESTDYLYKDPKQQKIYDLFQKSFEKEGSDMELLEAAESFDPGSASGTSGSSSQNMGDTLDESSLTASPQKKRRFEFFDNWDSFTSPL

SEQ ID NO: 8873 - protein, 954 aa, Homo sapiens
MSLPLTEEQRKKIEENRQKALARRAEKLLAEQHQRTSSGTSIAGNPFQAKQGPSQNFPRESCKPVSHGVIFKQQNLSSSSNADQRPHDSHSFQAKGIWKKPEEMPTACPGHSPRSQMALTGISPPLAQSPPEVPKQQLLSYELGQGHAQASPEIRFTPFANPTHKPLAKPKSSQETPAHSSGQPPRDAKLEAKTAKASPSGQNISYIHSSSESVTPRTEGRLQQKSGSSVQKGVNSQKGKCVRNGDRFQVLIGYNAELIAVFKTLPSKNYDPDTKTWNFSMNDYSALMKAAQSLPTVNLQPLEWAYGSSESPSTSSEGQAGLPSAPSLSFVKGRCMLISRAYFEADISYSQDLIALFKQMDSRRYDVKTRKWSFLLEEHSKLIAKVRCLPQVQLDPLPTTLTLAFASQLKKTSLSLTPDVPEADLSEVDPKLVSNLMPFQRAGVNFAIAKGGRLLLADDMGLGKTIQAICIAAFYRKEWPLLVVVPSSVRFTWEQAFLRWLPSLSPDCINVVVTGKDRLTAGLINIVSFDLLSKLEKQLKTPFKVVIIDESHFLKNSRTARCRAAMPVLKVAKRVILLSGTPAMSRPAELYTQIIAVKPTFFPQFHAFGLRYCDAKRMPWGWDYSGSSNLGELKLLLEEAVMLRRLKSDVLSQLPAKQRKIVVIAPGRINARTRAALDAAAKEMTTKDKTKQQQKDALILFFNRTAEAKIPSVIEYILDLLESGREKFLVFAHHKVVLDAITQELERKHVQHIRIDGSTSSAEREDLCQQFQLSERHAVAVLSITAANMGLTFSSADLVVFAELFWNPGVLIQAEDRVHRIGQTSSVGIHYLVAKGTADDYLWPLIQEKIKVLAEAGLSETNFSEMTESTDYLYKDPKQQKIYDLFQKSFEKEGSDMELLEAAESFDPGSASGTSGSSSQNMGDTLDESSLTASPQKKRRFEFFDNWDSFTSPL

SEQ ID NO: 8874 - protein, 619 aa, Homo sapiens [sequence omitted]

SEQ ID NO: 8875 - protein, 348 aa, Homo sapiens
MFGSSEKETIELSPTGRPKRRTRKSINYSKIDDFPNELEKLISQIQPEVDRERAVVEVNIPVESEVNLKLQNIMMLLRKCCNHPYLIEYPIDPVTQEFKIDEELVTNSGKFLILDRMLPELKKRGHKVLLFSQMTSMLDILMDYCHLRDFNFSRLDGSMSYSEREKNMHSFNTDPEVFIFLVSTRAGGLGINLTAADTVIIYDSDWNPQSDLQAQDRCHRIGQTKPVVVYRLVTANTIDQKIVERAAAKRKLEKLIIHKNHFKGGQSGLNLSKNFLDPKELMELLKSRDYEREIKGSREKVISDKDLELLLDRSDLIDQMNASGPIKEKMGIFKILENSEDSSPECLF

SEQ ID NO: 8876 - protein, 306 aa, Homo sapiens
MMLLRKCCNHPYLIEYPIDPVTQEFKIDEELVTNSGKFLILDRMLPELKKRGHKVLLFSQMTSMLDILMDYCHLRDFNFSRLDGSMSYSEREKNMHSFNTDPEVFIFLVSTRAGGLGINLTAADTVIIYDSDWNPQSDLQAQDRCHRIGQTKPVVVYRLVTANTIDQKIVERAAAKRKLEKLIIHKNHFKGGQSGLNLSKNFLDPKELMELLKSRDYEREIKGSREKVISDKDLELLLDRSDLIDQMNASGPIKEKMGIFKILENSEDSSPELLRIRHRHIWEHGVARSFAFSCSYCTQTCFYIFH

SEQ ID NO: 8877 - protein, 310 aa, Homo sapiens
MMLLRKCCNHPYLIEYPIDPVTQEFKIDEELVTNSGKFLILDRMLPELKKRGHKVLLFSQMTSMLDILMDYCHLRDFNFSRLDGSMSYSEREKNMHSFNTDPEVFIFLVSTRAGGLGINLTAADTVIIYDSDWNPQSDLQAQDRCHRIGQTKPVVVYRLVTANTIDQKIVERAAAKRKLEKLIIHKNHFKGGQSGLNLSKNFLDPKELMELLKSRDYEREIKGSREKVISDKDLELLLDRSDLIDQMNASGPIKEKMGIFKILENSEDSSPELETGFHHLGLTGPELISGDLPTSASQSAGITSVSHCVA

SEQ ID NO: 8878 - protein, 1298 aa, Homo sapiens
MVVTLLIRDSTRIELRERRNLSSKRNTKEIQSGSSSSDAEESSEDNKKKKQRTSSKKKAVIVKEKKRNSLRTSTKRKQADITSSSSSDIEDDDQNSIGEGSSDEQKIKPVTENLVLSSHTGFCQSSGDEALSKSVPVTVDDDDDDNDPENRIAKKMLLEEIKANLSSDEDGSSDDEPEEGKKRTGKQNEENPGDEEAKNQVNSESDSDSEDLRAKIQHRLFGTNWLLSFGESGEEKKTKPKEHKEVKGRNRRKVSSEDSEDSDFQESGVSEEVSESEDEQRPRTRSAKKAELEENQRIYKQKKKRRRIKVQEDSSSENKSNSEEEEEEKEEEEEEEEEEEEEEEDENDDSKSPGKGRKKIRKILKDDKLRTETQNALKEEERKERRKRVRERETEKLREVIEIEDASPTKCPITTKLVLDEDEETKEPLVQVHRNMVIKLKPHQVDGVQFMWDCCCESVKKTKKSPGSGCILAHCMGLGKTLQVVSFLHTVLLCDKLDFSTALVGLSSSILAFNWMNEFEKWQEGLKDDEKLEVSELATVKRPQERSYMLQRWQEDGGVMIIGYEMYRNLAQGRNVKSRKLKEIFNKALVDPGPDFVVCDEGHILKNEASAVSKAMNSIRSRRRIILTGTPLQNNLIEYHCMVNFIKENLLGSIKEFRNRFINPIQNGQCADSTMVDVRVMKKRAHILYEMLAGCVQRKDYTALTKFLPPKHEYVLAVRMTSIQCKLYAGAKLFQDFQMLSRIWTHPWCLQLDYISKENKGYFDEDSMDEFIASDSDETSMSLSSDDYTKKKKKGKKGKKDSSSSGSGSDNDVEVIKVWNSRSRGGGEGNVDETGNNPSVSLKLEESKATSSSNPSSPAPDWYKDFVTDADAEVLEHSGKMVLLFEILRMAEEIGDKVLVFSQSLISLDLIEDFLELADKSREKTEDKPLIYKGEGKWLRNIDYYRLDGSTTAQSRKKWAEEFNDETNVRGRLFIISTKAGSLGINLVAANRVIIFDASWNPSYDIQSIFRVYRFGQTKPVYVYRFLAQGTMEDKIYDRQVTKQSLSFRVVDQQQVERHFTMNELTELYTFEPDLLDDPNSEKKKKRRDTPMLPKDTILAELLQIHKEHIVGYHEHDLFWTTKEEGELTEEERKAAWAEYEAEKKVLTMRFNIPTGTNLPPVSFNSQTPYIPFNLGALSAMSNQQLEDLINQGREKVVEATNSVTAVRIQPLEDIISAVWKENMKLTEAQVQALALSRQASQELDVKRREAIYNDVLTKQQMLISCVQRILMNRRLQQQYNQQQQQQMTYQQQHWVTT

SEQ ID NO: 8879 - protein, 1385 aa, Homo sapiens
EQLRRHQGKNLASEDPKKKRAQKPSHMRRNIRKLLREDQLQPVTKAAQQEELERRKRLEQQRKDYAAPIPTVPLEFLPEEIALRASDGPQLPPRVLAQEVICLDSSSGSEDEKSSRDEVIELSSGEEDTLHIVDSSESVSEDDEEEEKGGTHVNDVLNQRDALGRVLVNLNHPPEEENVFLAPQLARAVKPHQIGGIRFLYDNLVESLERFKTSSGFGCILAHSMGLGKTLQVISFIDVLFRHTPVKTVLAIVPVNTLQNWLAEFNMWLPPPEALPADNKPEEVQPRFFKVHILNDEHKTMASRAKVMADWVSEGGVLLMGYEMYRLLTLKKSFATGRPKKTKKRSHPVIIDLDEEDRQQEFRREFEKALCRPGPDVVICDEGHRIKNCQASTSQALKNIRSRRRVVLTGYPLQNNLIEYWCMVDFVRPDFLGTRQEFSNMFERPILNGQCIDSTPQDVRLMRYRSHVLHSLLEGFVQRRGHTVLKIHLPAKEENVILVRLSKIQRDLYTQFMDRFRDCGSSGWLGLNPLKAFCVCCKIWNHPDVLYEALQKESLANEQDLDVEELGSAGTSARCPPQGTKGKGEDSTLASSMGEATNSKFLQGVGFNPFQERGNNIVTYEWAKDLLTNYQTGVLENSPKMVLLFHLIEESVKLGDKILVFSQSLSTLALIEEFLGKREVPCPPGTEGQGAQKWVRNISYFRLDGSTPAFERERLINQFNDPSNLTTWLFLLSTRAGCLGVNLIGANRVVVFDASWNPCHDAQAVCRVYRYGQKKPCYIYRLVADYTLEKKIYDRQISKQGMSDRVVDDLNPMLNFTRKEVENLLHFVEKEPAPQVSLNVKGIKESVLQLACLKYPHLITKEPFEHESLLLNRKDHKLTKAEKKAAKKSYEEDKRTSVPYTRPSYAQYYPASDQSLTSIPAFSQRNWQPTLKGDEKPVASVRPVQSTPIPMMPRHVPLGGSVSSASSTNPSMNFPINYLQRAGVLVQKVVTTTDIVIPGLNSSTDVQARINAGESIHIIRGTKGTYIRTSDGRIFAVRATGKPKVPEDGRMAASGSQGPSCESTSNGRHSASSPKAPDPEGLARPVSPDSPEIISELQQYADVAAARESRQSSPSTNAALPGPPAQLMDSSAVPGTALGTEPRLGGHCLNSSLLVTGQPCGDRHPVLDLRGHKRKLATPPAAQESSRRRSRKGHLPAPVQPYEHGYPVSGGFAMPPVSLNHNLTTPFTSQAGENSLFMGSTPSYYQLSNLLADARLVFPVTTDPLVPAGPVSSSSTATSVTASNPSFMLNPSVPGILPSYSLPFSQPLLSEPRMFAPFPSPVLPSNLSRGMSIYPGYMSPHAGYPAGGLLRSQVPPFDSHEVAEVGFSSNDDEDKDDDVIEVTGK

SEQ ID NO: 8880 - protein, 2375 aa, Homo sapiens
MQSLPKGTVIVQPEPVLNEDKDDFKGPEFRSRSKMKTENLKKRGEDGLHGIVSCTACGQQVNHFQKDSIYRHPSLQVLICKNCFKYYMSDDISRDSDGMDEQCRWCAEGGNLICCDFCHNAFCKKCILRNLGRKELSTIMDENNQWYCYICHPEPLLDLVTACNSVFENLEQLLQQNKKKIKVDSEKSNKVYEHTSRFSPKKTSSNCNGEEKKLDDSCSGSVTYSYSALIVPKEMIKKAKKLIETTANMNSSYVKFLKQATDNSEISSATKLRQLKAFKSVLADIKKAHLALEEDLNSEFRAMDAVNKEKNTKEHKVIDAKFETKARKGEKPCALEKKDISKSEAKLSRKQVDSEHMHQNVPTEEQRTNKSTGGEHKKSDRKEEPQYEPANTSEDLDMDIVSVPSSVPEDIFENLETAMEVQSSVDHQGDGSSGTEQEVESSSVKLNISSKDNRGGIKSKTTAKVTKELYVKLTPVSLSNSPIKGADCQEVPQDKDGYKSCGLNPKLEKCGLGQENSDNEHLVENEVSLLLEESDLRRSPRVKTTPLRRPTETNPVTSNSDEECNETVKEKQKLSVPVRKKDKRNSSDSAIDNPKPNKLPKSKQSETVDQNSDSDEMLAILKEVSRMSHSSSSDTDINEIHTNHKTLYDLKTQAGKDDKGKRKRKSSTSGSDFDTKKGKSAKSSIISKKKRQTQSESSNYDSELEKEIKSMSKIGAARTTKKRIPNTKDFDSSEDEKHSKKGMDNQGHKNLKTSQEGSSDDAERKQERETFSSAEGTVDKDTTIMELRDRLPKKQQASASTDGVDKLSGKEQSFTSLEVRKVAETKEKSKHLKTKTCKKVQDGLSDIAEKFLKKDQSDETSEDDKKQSKKGTEEKKKPSDFKKKVIKMEQQYESSSDGTEKLPEREEICHFPKGIKQIKNGTTDGEKKSKKIRDKTSKKKDELSDYAEKSTGKGDSCDSSEDKKSKNGAYGREKKRCKLLGKSSRKRQDCSSSDTEKYSMKEDGCNSSDKRLKRIELRERRNLSSKRNTKEIQSGSSSSDAEESSEDNKKKKQRTSSKKKAVIVKEKKRNSLRTSTKRKQADITSSSSSDIEDDDQNSIGEGSSDEQKIKPVTENLVLSSHTGFCQSSGDEALSKSVPVTVDDDDDDNDPENRIAKKMLLEEIKANLSSDEDGSSDDEPEEGKKRTGKQNEENPGDEEAKNQVNSESDSDSEESKKPRYRHRLLRHKLTVSDGESGEEKKTKPKEHKEVKGRNRRKVSSEDSEDSDFQESGVSEEVSESEDEQRPRTRSAKKAELEENQRSYKQKKKRRRIKVQEDSSSENKSNSEEEEEEKEEEEEEEEEEEEEEEDENDDSKSPGKGRKKIRKILKDDKLRTETQNALKEEEERRKRIAEREREREKLREVIEIEDASPTKCPITTKLVLDEDEETKEPLVQVHRNMVIKLKPHQVDGVQFMWDCCCESVKKTKKSPGSGCILAHCMGLGKTLQVVSFLHTVLLCDKLDFSTALVVCPLNTALNWMNEFEKWQEGLKDDEKLEVSELATVKRPQERSYMLQRWQEDGGVMIIGYEMYRNLAQGRNVKSRKLKEIFNKALVDPGPDFVVCDEGHILKNEASAVSKAMNSIRSRRRIILTGTPLQNNLIEYHCMVNFIKENLLGSIKEFRNRFINPIQNGQCADSTMVDVRVMKKRAHILYEMLAGCVQRKDYTALTKFLPPKHEYVLAVRMTSIQCKLYQYYLDHLTGVGNNSEGGRGKAGAKLFQDFQMLSRIWTHPWCLQLDYISKENKGYFDEDSMDEFIASDSDETSMSLSSDDYTKKKKKGKKGKKDSSSSGSGSDNDVEVIKVWNSRSRGGGEGNVDETGNNPSVSLKLEESKATSSSNPSSPAPDWYKDFVTDADAEVLEHSGKMVLLFEILRMAEEIGDKVLVFSQSLISLDLIEDFLELASREKTEDKDKPLIYKGEGKWLRNIDYYRLDGSTTAQSRKKWAEEFNDETNVRGRLFIISTKAGSLGINLVAANRVIIFDASWNPSYDIQSIFRVYRFGQTKPVYVYRFLAQGTMEDKIYDRQVTKQSLSFRVVDQQQVERHFTMNELTELYTFEPDLLDDPNSEKKKKRDTPMLPKDTILAELLQIHKEHIVGYHEHDSLLDHKEEEELTEEERKAAWAEYEAEKKGLTMRFNIPTGTNLPPVSFNSQTPYIPFNLGALSAMSNQQLEDLINQGREKVVEATNSVTAVRIQPLEDIISAVWKENMNLSEAQVQALALSRQASQELDVKRREAIYNDVLTKQQMLISCVQRILMNRRLQQQYNQQQQQQMTYQQATLGHLMMPKPPNLIMNPSNYQQIDMRGMYQPVAGGMQPPPLQRAPPPMRSKNPGPSQGKSM

SEQ ID NO: 8881 - protein, 2375 aa, Homo sapiens
MQSLPKGTVIVQPEPVLNEDKDDFKGPEFRSRSKMKTENLKKRGEDGLHGIVSCTACGQQVNHFQKDSIYRHPSLQVLICKNCFKYYMSDDISRDSDGMDEQCRWCAEGGNLICCDFCHNAFCKKCILRNLGRKELSTIMDENNQWYCYICHPEPLLDLVTACNSVFENLEQLLQQNKKKIKVDSEKSNKVYEHTSRFSPKKTSSNCNGEEKKLDDSCSGSVTYSYSALIVPKEMIKKAKKLIETTANMNSSYVKFLKQATDNSEISSATKLRQLKAFKSVLADIKKAHLALEEDLNSEFRAMDAVNKEKNTKEHKVIDAKFETKARKGEKPCALEKKDISKSEAKLSRKQVDSEHMHQNVPTEEQRTNKSTGGEHKKSDRKEEPQYEPANTSEDLDMDIVSVPSSVPEDIFENLETAMEVQSSVDHQGDGSSGTEQEVESSSVKLNISSKDNRGGIKSKTTAKVTKELYVKLTPVSLPNSPIKGADCQEVPQDKDGYKSCGLNPKLEKCGLGQENSDNEHLVENEVSLLLEESDLRRSPRVKTTPLRRPTETNPVTSNSDEECNETVKEKQKLSVPVRKKDKRNSSDSAIDNPKPNKLPKSKQSETVDQNSDSDEMLAILKGVSRMSHSSSSDTDINEIHTNHKTLYDLKTQAGKDDKGKRKRKSSTSGSDFDTKKGKSAKSSIISKKKRQTQSESSNYDSELEKEIKSMSKIGAARTTKKRIPNTKDFDSSEDEKHSKKGMDNQGHKNLKTSQEGSSDDAERKQERETFSSAEGTVDKDTTIMELRDRLPKKQQASASTDGVDKLSGKEQSFTSLEVRKVAETKEKSKHLKTKTCKKVQDGLSDIAEKFLKKDQSDETSEDDKKQSKKGTEEKKKPSDFKKKVIKMEQQYESSSDGTEKLPEREEICHFPKGIKQIKNGTTDGEKKSKKIRDKTSKKKDELSDYAEKSTGKGDSCDSSEDKKSKNGAYGREKKRCKLLGKSSRKRQDCSSSDTEKYSMKEDGCNSSDKRLKRIELRERRNLSSKRNTKEIQSGSSSSDAEESSEDNKKKKQRTSSKKKAVIVKEKKRNSLRTSTKRKQADITSSSSSDIEDDDQNSIGEGSSDEQKIKPVTENLVLSSHTGFCQSSGDEALSKSVPVTVDDDDDDNDPENRIAKKMLLEEIKANLSSDEDGSSDDEPEEGKKRTGKQNEENPGDEEAKNQVNSESDSDSEESKKPRYRHRLLRHKLTVSDGESGEEKKTKPKEHKEVKGRNRRKVSSEDSEDSDFQESGVSEEVSESEDEQRPRTRSAKKAELEENQRSYKQKKKRRRIKVQEDSSSENKSNSEEEEEEKEEEEEEEEEEEEEEEDENDDSKSPGKGRKKIRKILKDDKLRTETQNALKEEEERRKRIAEREREREKLREVIEIEDASPTKCPITTKLVLDEDEETKEPLVQVHRNMVIKLKPHQVDGVQFMWDCCCESVKKTKKSPGSGCILAHCMGLGKTLQVVSFLHTVLLCDKLDFSTALVVCPLNTALNWMNEFEKWQEGLKDDEKLEVSELATVKRPQERSYMLQRWQEDGGVMIIGYEMYRNLAQGRNVKSRKLKEIFNKALVDPGPDFVVCDEGHILKNEASAVSKAMNSIRSRRRIILTGTPLQNNLIEYHCMVNFIKENLLGSIKEFRNRFINPIQNGQCADSTMVDVRVMKKRAHILYEMLAGCVQRKDYTALTKFLPPKHEYVLAVRMTSIQCKLYQYYLDHLTGVGNNSEGGRGKAGAKLFQDFQMLSRIWTHPWCLQLDYISKENKGYFDEDSMDEFIASDSDETSMSLSSDDYTKKKKKGKKGKKDSSSSGSGSDNDVEVIKVWNSRSRGGGEGNVDETGNNPSVSLKLEESKATSSSNPSSPAPDWYKDFVTDADAEVLEHSGKMVLLFEILRMAEEIGDKVLVFSQSLISLDLIEDFLELASREKTEDKDKPLIYKGEGKWLRNIDYYRLDGSTTAQSRKKWAEEFNDETNVRGRLFIISTKAGSLGINLVAANRVIIFDASWNPSYDIQSIFRVYRFGQTKPVYVYRFLAQGTMEDKIYDRQVTKQSLSFRVVDQQQVERHFTMNELTELYTFEPDLLDDPNSEKKKKRDTPMLPKDTILAELLQIHKEHIVGYHEHDSLLDHKEEEELTEEERKAAWAEYEAEKKVLTMRFNIPTGTNLPPVSFNSQTPYIPFNLGALSAMSNQQLEDLINQGREKVVEATNSVTAVRIQPLEDIISAVWKENMNLSEAQVQALALSRQASQELDVKRREAIYNDVLTKQQMLISCVQRILMNRRLQQQYNQQQQQQMTYQQATLGHLMMPKPPNLIMNPSNYQQIDMRGMYQPVAGGMQPPPLQRAPPPMRSKNPGPSQGKSM

SEQ ID NO: 8882 - protein, 2492 aa, Homo sapiens
MTAEPMSESKLNTLVQKLHDFLAHSSEESEETSSPPRLAMNQNTDKISGSGSNSDMMENSKEEGTSSSEKSKSSGSSRSKRKPSIVTKYVESDDEKPLDDETVNEDASNENSENDITMQSLPKGTVIVQPEPVLNEDKDDFKGPEFRSRSKMKTENLKKRGEDGLHGIVSCTACGQQVNHFQKDSIYRHPSLQVLICKNCFKYYMSDDISRDSDGMDEQCRWCAEGGNLICCDFCHNAFCKKCILRNLGRKELSTIMDENNQWYCYICHPEPLLDLVTACNSVFENLEQLLQQNKKKIKVDSEKSNKVYEHTSRFSPKKTSSNCNGEEKKLDDSCSGSVTYSYSALIVPKEMIKKAKKLIETTANMNSSYVKFLKQATDNSEISSATKLRQLKAFKSVLADIKKAHLALEEDLNSEFRAMDAVNKEKNTKEHKVIDAKFETKARKGEKPCALEKKDISKSEAKLSRKQVDSEHMHQNVPTEEQRTNKSTGGEHKKSDRKEEPQYEPANTSEDLDMDIVSVPSSVPEDIFENLETAMEVQSSVDHQGDGSSGTEQEVESSSVKLNISSKDNRGGIKSKTTAKVTKELYVKLTPVSLSNSPIKGADCQEVPQDKDGYKSCGLNPKLEKCGLGQENSDNEHLVENEVSLLLEESDLRRSPRVKTTPLRRPTETNPVTSNSDEECNETVKEKQKLSVPVRKKDKRNSSDSAIDNPKPNKLPKSKQSETVDQNSDSDEMLAILKEVSRMSHSSSSDTDINEIHTNHKTLYDLKTQAGKDDKGKRKRKSSTSGSDFDTKKGKSAKSSIISKKKRQTQSESSNYDSELEKEIKSMSKIGAARTTKKRIPNTKDFDSSEDEKHSKKGMDNQGHKNLKTSQEGSSDDAERKQERETFSSAEGTVDKDTTIMELRDRLPKKQQASASTDGVDKLSGKEQSFTSLEVRKVAETKEKSKHLKTKTCKKVQDGLSDIAEKFLKKDQSDETSEDDKKQSKKGTEEKKKPSDFKKKVIKMEQQYESSSDGTEKLPEREEICHFPKGIKQIKNGTTDGEKKSKKIRDKTSKKKDELSDYAEKSTGKGDSCDSSEDKKSKNGAYGREKKRCKLLGKSSRKRQDCSSSDTEKYSMKEDGCNSSDKRLKRIELRERRNLSSKRNTKEIQSGSSSSDAEESSEDNKKKKQRTSSKKKAVIVKEKKRNSLRTSTKRKQADITSSSSSDIEDDDQNSIGEGSSDEQKIKPVTENLVLSSHTGFCQSSGDEALSKSVPVTVDDDDDDNDPENRIAKKMLLEEIKANLSSDEDGSSDDEPEEGKKRTGKQNEENPGDEEAKNQVNSESDSDSEESKKPRYRHRLLRHKLTVSDGESGEEKKTKPKEHKEVKGRNRRKVSSEDSEDSDFQESGVSEEVSESEDEQRPRTRSAKKAELEENQRSYKQKKKRRRIKVQEDSSSENKSNSEEEEEEKEEEEEEEEEEEEEEEDENDDSKSPGKGRKKIRKILKDDKLRTETQNALKEEEERRKRIAEREREREKLREVIEIEDASPTKCPITTKLVLDEDEETKEPLVQVHRNMVIKLKPHQVDGVQFMWDCCCESVKKTKKSPGSGCILAHCMGLGKTLQVVSFLHTVLLCDKLDFSTALVVCPLNTALNWMNEFEKWQEGLKDDEKLEVSELATVKRPQERSYMLQRWQEDGGVMIIGYEMYRNLAQGRNVKSRKLKEIFNKALVDPGPDFVVCDEGHILKNEASAVSKAMNSIRSRRRIILTGTPLQNNLIEYHCMVNFIKENLLGSIKEFRNRFINPIQNGQCADSTMVDVRVMKKRAHILYEMLAGCVQRKDYTALTKFLPPKHEYVLAVRMTSIQCKLYQYYLDHLTGVGNNSEGGRGKAGAKLFQDFQMLSRIWTHPWCLQLDYISKENKGYFDEDSMDEFIASDSDETSMSLSSDDYTKKKKKGKKGKKDSSSSGSGSDNDVEVIKVWNSRSRGGGEGNVDETGNNPSVSLKLEESKATSSSNPSSPAPDWYKDFVTDADAEVLEHSGKMVLLFEILRMAEEIGDKVLVFSQSLISLDLIEDFLELASREKTEDKDKPLIYKGEGKWLRNIDYYRLDGSTTAQSRKKWAEEFNDETNVRGRLFIISTKAGSLGINLVAANRVIIFDASWNPSYDIQSIFRVYRFGQTKPVYVYRFLAQGTMEDKIYDRQVTKQSLSFRVVDQQQVERHFTMNELTELYTFEPDLLDDPNSEKKKKRDTPMLPKDTILAELLQIHKEHIVGYHEHDSLLDHKEEEELTEEERKAAWAEYEAEKKGLTMRFNIPTGTNLPPVSFNSQTPYIPFNLGALSAMSNQQLEDLINQGREKVVEATNSVTAVRIQPLEDIISAVWKENMNLSEAQVQALALSRQASQELDVKRREAIYNDVLTKQQMLISCVQRILMNRRLQQQYNQQQQQQMTYQQATLGHLMMPKPPNLIMNPSNYQQIDMRGMYQPVAGGMQPPPLQRAPPPMRSKNPGPSQGKSM

SEQ ID NO: 8883 - protein, 2492 aa, Homo sapiens
MTAEPMSESKLNTLVQKLHDFLAHSSEESEETSSPPRLAMNQNTDKISGSGSNSDMMENSKEEGTSSSEKSKSSGSSRSKRKPSIVTKYVESDDEKPLDDETVNEDASNENSENDITMQSLPKGTVIVQPEPVLNEDKDDFKGPEFRSRSKMKTENLKKRGEDGLHGIVSCTACGQQVNHFQKDSIYRHPSLQVLICKNCFKYYMSDDISRDSDGMDEQCRWCAEGGNLICCDFCHNAFCKKCILRNLGRKELSTIMDENNQWYCYICHPEPLLDLVTACNSVFENLEQLLQQNKKKIKVDSEKSNKVYEHTSRFSPKKTSSNCNGEEKKLDDSCSGSVTYSYSALIVPKEMIKKAKKLIETTANMNSSYVKFLKQATDNSEISSATKLRQLKAFKSVLADIKKAHLALEEDLNSEFRAMDAVNKEKNTKEHKVIDAKFETKARKGEKPCALEKKDISKSEAKLSRKQVDSEHMHQNVPTEEQRTNKSTGGEHKKSDRKEEPQYEPANTSEDLDMDIVSVPSSVPEDIFENLETAMEVQSSVDHQGDGSSGTEQEVESSSVKLNISSKDNRGGIKSKTTAKVTKELYVKLTPVSLPNSPIKGADCQEVPQDKDGYKSCGLNPKLEKCGLGQENSDNEHLVENEVSLLLEESDLRRSPRVKTTPLRRPTETNPVTSNSDEECNETVKEKQKLSVPVRKKDKRNSSDSAIDNPKPNKLPKSKQSETVDQNSDSDEMLAILKGVSRMSHSSSSDTDINEIHTNHKTLYDLKTQAGKDDKGKRKRKSSTSGSDFDTKKGKSAKSSIISKKKRQTQSESSNYDSELEKEIKSMSKIGAARTTKKRIPNTKDFDSSEDEKHSKKGMDNQGHKNLKTSQEGSSDDAERKQERETFSSAEGTVDKDTTIMELRDRLPKKQQASASTDGVDKLSGKEQSFTSLEVRKVAETKEKSKHLKTKTCKKVQDGLSDIAEKFLKKDQSDETSEDDKKQSKKGTEEKKKPSDFKKKVIKMEQQYESSSDGTEKLPEREEICHFPKGIKQIKNGTTDGEKKSKKIRDKTSKKKDELSDYAEKSTGKGDSCDSSEDKKSKNGAYGREKKRCKLLGKSSRKRQDCSSSDTEKYSMKEDGCNSSDKRLKRIELRERRNLSSKRNTKEIQSGSSSSDAEESSEDNKKKKQRTSSKKKAVIVKEKKRNSLRTSTKRKQADITSSSSSDIEDDDQNSIGEGSSDEQKIKPVTENLVLSSHTGFCQSSGDEALSKSVPVTVDDDDDDNDPENRIAKKMLLEEIKANLSSDEDGSSDDEPEEGKKRTGKQNEENPGDEEAKNQVNSESDSDSEESKKPRYRHRLLRHKLTVSDGESGEEKKTKPKEHKEVKGRNRRKVSSEDSEDSDFQESGVSEEVSESEDEQRPRTRSAKKAELEENQRSYKQKKKRRRIKVQEDSSSENKSNSEEEEEEKEEEEEEEEEEEEEEEDENDDSKSPGKGRKKIRKILKDDKLRTETQNALKEEEERRKRIAEREREREKLREVIEIEDASPTKCPITTKLVLDEDEETKEPLVQVHRNMVIKLKPHQVDGVQFMWDCCCESVKKTKKSPGSGCILAHCMGLGKTLQVVSFLHTVLLCDKLDFSTALVVCPLNTALNWMNEFEKWQEGLKDDEKLEVSELATVKRPQERSYMLQRWQEDGGVMIIGYEMYRNLAQGRNVKSRKLKEIFNKALVDPGPDFVVCDEGHILKNEASAVSKAMNSIRSRRRIILTGTPLQNNLIEYHCMVNFIKENLLGSIKEFRNRFINPIQNGQCADSTMVDVRVMKKRAHILYEMLAGCVQRKDYTALTKFLPPKHEYVLAVRMTSIQCKLYQYYLDHLTGVGNNSEGGRGKAGAKLFQDFQMLSRIWTHPWCLQLDYISKENKGYFDEDSMDEFIASDSDETSMSLSSDDYTKKKKKGKKGKKDSSSSGSGSDNDVEVIKVWNSRSRGGGEGNVDETGNNPSVSLKLEESKATSSSNPSSPAPDWYKDFVTDADAEVLEHSGKMVLLFEILRMAEEIGDKVLVFSQSLISLDLIEDFLELASREKTEDKDKPLIYKGEGKWLRNIDYYRLDGSTTAQSRKKWAEEFNDETNVRGRLFIISTKAGSLGINLVAANRVIIFDASWNPSYDIQSIFRVYRFGQTKPVYVYRFLAQGTMEDKIYDRQVTKQSLSFRVVDQQQVERHFTMNELTELYTFEPDLLDDPNSEKKKKRDTPMLPKDTILAELLQIHKEHIVGYHEHDSLLDHKEEEELTEEERKAAWAEYEAEKKVLTMRFNIPTGTNLPPVSFNSQTPYIPFNLGALSAMSNQQLEDLINQGREKVVEATNSVTAVRIQPLEDIISAVWKENMNLSEAQVQALALSRQASQELDVKRREAIYNDVLTKQQMLISCVQRILMNRRLQQQYNQQQQQQMTYQQATLGHLMMPKPPNLIMNPSNYQQIDMRGMYQPVAGGMQPPPLQRAPPPMRSKNPGPSQGKSM

SEQ ID NO: 8884 - protein, 2454 aa, Homo sapiens
MTAEPMSESKLNTLVQKLHDFLAHSSEESEETSSPPRLAMNQNTDKISGSGSNSDMMENSKEEGTSSSEKSKSSGSSRSKRKPSIVTKYVESDDEKPLDDETVNEDASNENSENDITMQSLPKEDGLHGIVSCTACGQQVNHFQKDSIYRHPSLQVLICKNCFKYYMSDDISRDSDGMDEQCRWCAEGGNLICCDFCHNAFCKKCILRNLGRKELSTIMDENNQWYCYICHPEPLLDLVTACNSVFENLEQLLQQNKKKIKVDSEKSNKVYEHTSRFSPKKTSSNCNGEEKKLDDSCSGSVTYSYSALIVPKEMIKKAKKLIETTANMNSSYVKFLKQATDNSEISSATKLRQLKAFKSVLADIKKAHLALEEDLNSEFRAMDAVNKEKNTKEHKVIDAKFETKARKGEKPCALEKKDISKSEAKLSRKQVDSEHMHQNVPTEEQRTNKSTGGEHKKSDRKEEPQYEPANTSEDLDMDIVSVPSSVPEDIFENLETAMEVQSSVDHQGDGSSGTEQEVESSSVKLNISSKDNRGGIKSKTTAKVTKELYVKLTPVSLSNSPIKGADCQEVPQDKDGYKSCGLNPKLEKCGLGQENSDNEHLVENEVSLLLEESDLRRSPRVKTTPLRRPTETNPVTSNSDEECNETVKEKQKLSVPVRKKDKRNSSDSAIDNPKPNKLPKSKQSETVDQNSDSDEMLAILKEVSRMSHSSSSDTDINEIHTNHKTLYDLKTQAGKDDKGKRKRKSSTSGSDFDTKKGKSAKSSIISKKKRQTQSESSNYDSELEKEIKSMSKIGAARTTKKRIPNTKDFDSSEDEKHSKKGMDNQGHKNLKTSQEGSSDDAERKQERETFSSAEGTVDKDTTIMELRDRLPKKQQASASTDGVDKLSGKEQSFTSLEVRKVAETKEKSKHLKTKTCKKVQDGLSDIAEKFLKKDQSDETSEDDKKQSKKGTEEKKKPSDFKKKVIKMEQQYESSSDGTEKLPEREEICHFPKGIKQIKNGTTDGEKKSKKIRDKTSKKKDELSDYAEKSTGKGDSCDSSEDKKSKNGAYGREKKRCKLLGKSSRKRQDCSSSDTEKYSMKEDGCNSSDKRLKRIELRERRNLSSKRNTKEIQSGSSSSDAEESSEDNKKKKQRTSSKKKAVIVKEKKRNSLRTSTKRKQADITSSSSSDIEDDDQNSIGEGSSDEQKIKPVTENLVLSSHTGFCQSSGDEALSKSVPVTVDDDDDDNDPENRIAKKMLLEEIKANLSSDEDGSSDDEPEEGKKRTGKQNEENPGDEEAKNQVNSESDSDSEESKKPRYRHRLLRHKLTVSDGESGEEKKTKPKEHKEVKGRNRRKVSSEDSEDSDFQESGVSEEVSESEDEQRPRTRSAKKAELEENQRSYKQKKKRRRIKVQEDSSSENKSNSEEEEEEKEEEEEEEEEEEEEEEDENDDSKSPGKGRKKIRKILKDDKLRTETQNALKEEEERRKRIAEREREREKLREVIEIEDASPTKCPITTKLVLDEDEETKEPLVQVHRNMVIKLKPHQVDGVQFMWDCCCESVKKTKKSPGSGCILAHCMGLGKTLQVVSFLHTVLLCDKLDFSTALVVCPLNTALNWMNEFEKWQEGLKDDEKLEVSELATVKRPQERSYMLQRWQEDGGVMIIGYEMYRNLAQGRNVKSRKLKEIFNKALVDPGPDFVVCDEGHILKNEASAVSKAMNSIRSRRRIILTGTPLQNNLIEYHCMVNFIKENLLGSIKEFRNRFINPIQNGQCADSTMVDVRVMKKRAHILYEMLAGCVQRKDYTALTKFLPPKHEYVLAVRMTSIQCKLYQYYLDHLTGVGNNSEGGRGKAGAKLFQDFQMLSRIWTHPWCLQLDYISKENKGYFDEDSMDEFIASDSDETSMSLSSDDYTKKKKKGKKGKKDSSSSGSGSDNDVEVIKVWNSRSRGGGEGNVDETGNNPSVSLKLEESKATSSSNPSSPAPDWYKDFVTDADAEVLEHSGKMVLLFEILRMAEEIGDKVLVFSQSLISLDLIEDFLELASREKTEDKDKPLIYKGEGKWLRNIDYYRLDGSTTAQSRKKWAEEFNDETNVRGRLFIISTKAGSLGINLVAANRVIIFDASWNPSYDIQSIFRVYRFGQTKPVYVYRFLAQGTMEDKIYDRQVTKQSLSFRVVDQQQVERHFTMNELTELYTFEPDLLDDPNSEKKKKRDTPMLPKDTILAELLQIHKEHIVGYHEHDSLLDHKEEEELTEEERKAAWAEYEAEKKGLTMRFNIPTGTNLPPVSFNSQTPYIPFNLGALSAMSNQQLEDLINQGREKVVEATNSVTAVRIQPLEDIISAVWKENMNLSEAQVQALALSRQASQELDVKRREAIYNDVLTKQQMLISCVQRILMNRRLQQQYNQQQQQQMTYQQATLGHLMMPKPPNLIMNPSNYQQIDMRGMYQPVAGGMQPPPLQRAPPPMRSKNPGPSQGKSM

SEQ ID NO: 8885 - protein, 2288 aa, Homo sapiens
MSDDISRDSDGMDEQCRWCAEGGNLICCDFCHNAFCKKCILRNLGRKELSTIMDENNQWYCYICHPEPLLDLVTACNSVFENLEQLLQQNKKKIKVDSEKSNKVYEHTSRFSPKKTSSNCNGEEKKLDDSCSGSVTYSYSALIVPKEMIKKAKKLIETTANMNSSYVKFLKQATDNSEISSATKLRQLKAFKSVLADIKKAHLALEEDLNSEFRAMDAVNKEKNTKEHKVIDAKFETKARKGEKPCALEKKDISKSEAKLSRKQVDSEHMHQNVPTEEQRTNKSTGGEHKKSDRKEEPQYEPANTSEDLDMDIVSVPSSVPEDIFENLETAMEVQSSVDHQGDGSSGTEQEVESSSVKLNISSKDNRGGIKSKTTAKVTKELYVKLTPVSLSNSPIKGADCQEVPQDKDGYKSCGLNPKLEKCGLGQENSDNEHLVENEVSLLLEESDLRRSPRVKTTPLRRPTETNPVTSNSDEECNETVKEKQKLSVPVRKKDKRNSSDSAIDNPKPNKLPKSKQSETVDQNSDSDEMLAILKEVSRMSHSSSSDTDINEIHTNHKTLYDLKTQAGKDDKGKRKRKSSTSGSDFDTKKGKSAKSSIISKKKRQTQSESSNYDSELEKEIKSMSKIGAARTTKKRIPNTKDFDSSEDEKHSKKGMDNQGHKNLKTSQEGSSDDAERKQERETFSSAEGTVDKDTTIMELRDRLPKKQQASASTDGVDKLSGKEQSFTSLEVRKVAETKEKSKHLKTKTCKKVQDGLSDIAEKFLKKDQSDETSEDDKKQSKKGTEEKKKPSDFKKKVIKMEQQYESSSDGTEKLPEREEICHFPKGIKQIKNGTTDGEKKSKKIRDKTSKKKDELSDYAEKSTGKGDSCDSSEDKKSKNGAYGREKKRCKLLGKSSRKRQDCSSSDTEKYSMKEDGCNSSDKRLKRIELRERRNLSSKRNTKEIQSGSSSSDAEESSEDNKKKKQRTSSKKKAVIVKEKKRNSLRTSTKRKQADITSSSSSDIEDDDQNSIGEGSSDEQKIKPVTENLVLSSHTGFCQSSGDEALSKSVPVTVDDDDDDNDPENRIAKKMLLEEIKANLSSDEDGSSDDEPEEGKKRTGKQNEENPGDEEAKNQVNSESDSDSEESKKPRYRHRLLRHKLTVSDGESGEEKKTKPKEHKEVKGRNRRKVSSEDSEDSDFQESGVSEEVSESEDEQRPRTRSAKKAELEENQRSYKQKKKRRRIKVQEDSSSENKSNSEEEEEEKEEEEEEEEEEEEEEEDENDDSKSPGKGRKKIRKILKDDKLRTETQNALKEEEERRKRIAEREREREKLREVIEIEDASPTKCPITTKLVLDEDEETKEPLVQVHRNMVIKLKPHQVDGVQFMWDCCCESVKKTKKSPGSGCILAHCMGLGKTLQVVSFLHTVLLCDKLDFSTALVVCPLNTALNWMNEFEKWQEGLKDDEKLEVSELATVKRPQERSYMLQRWQEDGGVMIIGYEMYRNLAQGRNVKSRKLKEIFNKALVDPGPDFVVCDEGHILKNEASAVSKAMNSIRSRRRIILTGTPLQNNLIEYHCMVNFIKENLLGSIKEFRNRFINPIQNGQCADSTMVDVRVMKKRAHILYEMLAGCVQRKDYTALTKFLPPKHEYVLAVRMTSIQCKLYQYYLDHLTGVGNNSEGGRGKAGAKLFQDFQMLSRIWTHPWCLQLDYISKENKGYFDEDSMDEFIASDSDETSMSLSSDDYTKKKKKGKKGKKDSSSSGSGSDNDVEVIKVWNSRSRGGGEGNVDETGNNPSVSLKLEESKATSSSNPSSPAPDWYKDFVTDADAEVLEHSGKMVLLFEILRMAEEIGDKVLVFSQSLISLDLIEDFLELASREKTEDKDKPLIYKGEGKWLRNIDYYRLDGSTTAQSRKKWAEEFNDETNVRGRLFIISTKAGSLGINLVAANRVIIFDASWNPSYDIQSIFRVYRFGQTKPVYVYRFLAQGTMEDKIYDRQVTKQSLSFRVVDQQQVERHFTMNELTELYTFEPDLLDDPNSEKKKKRDTPMLPKDTILAELLQIHKEHIVGYHEHDSLLDHKEEEELTEEERKAAWAEYEAEKKGLTMRFNIPTGTNLPPVSFNSQTPYIPFNLGALSAMSNQQLEDLINQGREKVVEATNSVTAVRIQPLEDIISAVWKENMNLSEAQVQALALSRQASQELDVKRREAIYNDVLTKQQMLISCVQRILMNRRLQQQYNQQQQQQMTYQQATLGHLMMPKPPNLIMNPSNYQQIDMRGMYQPVAGGMQPPPLQRAPPPMRSKNPGPSQGKSM

SEQ ID NO: 8886 - protein, 1641 aa, Homo sapiens
MDNQGHKNLKTSQEGSSDDRERKQERETFSSAEGTVDKDTTIMELRDRLPKKQQASASTDGVDKLSGKEQSFTSLEVRKVAETKEKSKHLKTKTCKKVQDGLSDIAEKFLKKDQSDETSEDDKKQSKKGTEEKKKPSDFKKKVIKMEQQYESSSDGTEKLPEREEICHFPKGIKQIKNGTTDGEKKSKKIRDKTSKKKDELSDYAEKSTGKGDSCDSSEDKKSKNGAYGREKKRCKLLGKSSRKRQDCSSSDTEKYSMKEDGCNSSDKRLKRIELRERRNLSSKRNTKEIQSGSSSSDAEESSEDNKKKKQRTSSKKKAVIVKEKKRNSLRTSTKRKQADITSSSSSDIEDDDQNSIGEGSSDEQKIKPVTENLVLSSHTGFCQSSGDEALSKSVPVTVDDDDDDNDPENRIAKKMLLEEIKANLSSDEDGSSDDEPEEGKKRTGKQNEENPGDEEAKNQVNSESDSDSEESKKPRYRHRLLRHKLTVSDGESGEEKKTKPKEHKEVKGRNRRKVSSEDSEDSDFQESGVSEEVSESEDEQRPRTRSAKKAELEENQRSYKQKKKRRRIKVQEDSSSENKSNSEEEEEEKEEEEEEEEEEEEEEEDENDDSKSPGKGRKKIRKILKDDKLRTETQNALKEEEERRKRIAEREREREKLREVIEIEDASPTKCPITTKLVLDEDEETKEPLVQVHRNMVIKLKPHQVDGVQFMWDCCCESVKKTKKSPGSGCILAHCMGLGKTLQVVSFLHTVLLCDKLDFSTALVGLSSSILAFNWMNEFEKWQEGLKDDEKLEVSELATVKRPQERSYMLQRWQEDGGVMIIGYEMYRNLAQGRNVKSRKLKEIFNKALVDPGPDFVVCDEGHILKNEASAVSKAMNSIRSRRRIILTGTPLQNNLIEYHCMVNFIKENLLGSIKEFRNRFINPIQNGQCADSTMVDVRVMKKRAHILYEMLAGCVQRKDYTALTKFLPPKHEYVLAVRMTSIQCKLYQYYLDHLTGVGNNSEGGRGKAGAKLFQDFQMLSRIWTHPWCLQLDYISKENKGYFDEDSMDEFIASDSDETSMSLSSDDYTKKKKKGKKGKKDSSSSGSGSDNDVEVIKVWNSRSRGGGEGNVDETGNNPSVSLKLEESKATSSSNPSSPAPDWYKDFVTDADAEVLEHSGKMVLLFEILRMAEEIGDKVLVFSQSLISLDLIEDFLELASREKTEDKDKPLIYKGEGKWLRNIDYYRLDGSTTAQSRKKWAEEFNDETNVRGRLFIISTKAGSLGINLVAANRVIIFDASWNPSYDIQSIFRVYRFGQTKPVYVYRFLAQGTMEDKIYDRQVTKQSLSFRVVDQQQVERHFTMNELTELYTFEPDLLDDPNSEKKKKRDTPMLPKDTILAELLQIHKEHIVGYHEHDSLLTTKKKKRLTEEERKAAWAEYEGEKRVLTMRFNIPTGTNLPPVSFNSQTPYIPFNLGALSAMSNQQLEDLINQGREKVVEATNSVTAVRIQPLEDIISAVWKENMNLSEAQVQALALSRQASQELDVKRREAIYNDVLTKQQMLIQLCSANTYEQKAPAAVQSAATATNDLSTTTLGHHMMPKPRNLIMNPSNYQQIDMRGMYQPVAGGMQPPPLQRCTTPNEKQKIQDLPKGNQCDFALKA

SEQ ID NO: 8887 - protein, 973 aa, Homo sapiens
VIEIEDASPTKCPITTKLVLDEDEETKEPLVQVHRNMVIKLKPHQVDGVQFMWDCCCESVKKTKKSPGSGCILAHCMGLGKTLQVVSFLHTVLLCDKLDFSTALVVCPLNTALNWMNEFEKWQEGLKDDEKLEVSELATVKRPQERSYMLQRWQEDGGVMIIGYEMYRNLAQGRNVKSRKLKEIFNKALVDPGPDFVVCDEGHILKNEASAVSKAMNSIRSRRRIILTGTPLQNNLIEYHCMVNFIKENLLGSIKEFRNRFINPIQNGQCADSTMVDVRVMKKRAHILYEMLAGCVQRKDYTALTKFLPPKHEYVLAVRMTSIQCKLYQYYLDHLTGVGNNSEGGRGKAGAKLFQDFQMLSRIWTHPWCLQLDYISKENKGYFDEDSMDEFIASDSDETSMSLSSDDYTKKKKKGKKGKKDSSSSGSGSDNDVEVIKVWNSRSRGGGEGNVDETGNNPSVSLKLEESKATSSSNPSSPAPDWYKDFVTDADAEVLEHSGKMVLLFEILRMAEEIGDKVLVFSQSLISLDLIEDFLELASREKTEDKDKPLIYKGEGKWLRNIDYYRLDGSTTAQSRKKWAEEFNDETNVRGRLFIISTKAGSLGINLVAANRVIIFDASWNPSYDIQSIFRVYRFGQTKPVYVYRFLAQGTMEDKIYDRQVTKQSLSFRVVDQQQVERHFTMNELTELYTFEPDLLDDPNSEKKKKRDTPMLPKDTILAELLQIHKEHIVGYHEHDSLLDHKEEEELTEEERKAAWAEYEAEKKGLTMRFNIPTGTNLPPVSFNSQTPYIPFNLGALSAMSNQQLEDLINQGREKVVEATNSVTAVRIQPLEDIISAVWKENMNLSEAQVQALALSRQASQELDVKRREAIYNDVLTKQQMLISCVQRILMNRRLQQQYNQQQQQQMTYQQATLGHLMMPKPPNLIMNPSNYQQIDMRGMYQPVAGGMQPPPLQRAPPPMRSKNPGPSQGKSM

SEQ ID NO: 8888 - protein, 2337 aa, Homo sapiens
MQSLPKEDGLHGIVSCTACGQQVNHFQKDSIYRHPSLQVLICKNCFKYYMSDDISRDSDGMDEQCRWCAEGGNLICCDFCHNAFCKKCILRNLGRKELSTIMDENNQWYCYICHPEPLLDLVTACNSVFENLEQLLQQNKKKIKVDSEKSNKVYEHTSRFSPKKTSSNCNGEEKKLDDSCSGSVTYSYSALIVPKEMIKKAKKLIETTANMNSSYVKFLKQATDNSEISSATKLRQLKAFKSVLADIKKAHLALEEDLNSEFRAMDAVNKEKNTKEHKVIDAKFETKARKGEKPCALEKKDISKSEAKLSRKQVDSEHMHQNVPTEEQRTNKSTGGEHKKSDRKEEPQYEPANTSEDLDMDIVSVPSSVPEDIFENLETAMEVQSSVDHQGDGSSGTEQEVESSSVKLNISSKDNRGGIKSKTTAKVTKELYVKLTPVSLSNSPIKGADCQEVPQDKDGYKSCGLNPKLEKCGLGQENSDNEHLVENEVSLLLEESDLRRSPRVKTTPLRRPTETNPVTSNSDEECNETVKEKQKLSVPVRKKDKRNSSDSAIDNPKPNKLPKSKQSETVDQNSDSDEMLAILKEVSRMSHSSSSDTDINEIHTNHKTLYDLKTQAGKDDKGKRKRKSSTSGSDFDTKKGKSAKSSIISKKKRQTQSESSNYDSELEKEIKSMSKIGAARTTKKRIPNTKDFDSSEDEKHSKKGMDNQGHKNLKTSQEGSSDDAERKQERETFSSAEGTVDKDTTIMELRDRLPKKQQASASTDGVDKLSGKEQSFTSLEVRKVAETKEKSKHLKTKTCKKVQDGLSDIAEKFLKKDQSDETSEDDKKQSKKGTEEKKKPSDFKKKVIKMEQQYESSSDGTEKLPEREEICHFPKGIKQIKNGTTDGEKKSKKIRDKTSKKKDELSDYAEKSTGKGDSCDSSEDKKSKNGAYGREKKRCKLLGKSSRKRQDCSSSDTEKYSMKEDGCNSSDKRLKRIELRERRNLSSKRNTKEIQSGSSSSDAEESSEDNKKKKQRTSSKKKAVIVKEKKRNSLRTSTKRKQADITSSSSSDIEDDDQNSIGEGSSDEQKIKPVTENLVLSSHTGFCQSSGDEALSKSVPVTVDDDDDDNDPENRIAKKMLLEEIKANLSSDEDGSSDDEPEEGKKRTGKQNEENPGDEEAKNQVNSESDSDSEESKKPRYRHRLLRHKLTVSDGESGEEKKTKPKEHKEVKGRNRRKVSSEDSEDSDFQESGVSEEVSESEDEQRPRTRSAKKAELEENQRSYKQKKKRRRIKVQEDSSSENKSNSEEEEEEKEEEEEEEEEEEEEEEDENDDSKSPGKGRKKIRKILKDDKLRTETQNALKEEEERRKRIAEREREREKLREVIEIEDASPTKCPITTKLVLDEDEETKEPLVQVHRNMVIKLKPHQVDGVQFMWDCCCESVKKTKKSPGSGCILAHCMGLGKTLQVVSFLHTVLLCDKLDFSTALVVCPLNTALNWMNEFEKWQEGLKDDEKLEVSELATVKRPQERSYMLQRWQEDGGVMIIGYEMYRNLAQGRNVKSRKLKEIFNKALVDPGPDFVVCDEGHILKNEASAVSKAMNSIRSRRRIILTGTPLQNNLIEYHCMVNFIKENLLGSIKEFRNRFINPIQNGQCADSTMVDVRVMKKRAHILYEMLAGCVQRKDYTALTKFLPPKHEYVLAVRMTSIQCKLYQYYLDHLTGVGNNSEGGRGKAGAKLFQDFQMLSRIWTHPWCLQLDYISKENKGYFDEDSMDEFIASDSDETSMSLSSDDYTKKKKKGKKGKKDSSSSGSGSDNDVEVIKVWNSRSRGGGEGNVDETGNNPSVSLKLEESKATSSSNPSSPAPDWYKDFVTDADAEVLEHSGKMVLLFEILRMAEEIGDKVLVFSQSLISLDLIEDFLELASREKTEDKDKPLIYKGEGKWLRNIDYYRLDGSTTAQSRKKWAEEFNDETNVRGRLFIISTKAGSLGINLVAANRVIIFDASWNPSYDIQSIFRVYRFGQTKPVYVYRFLAQGTMEDKIYDRQVTKQSLSFRVVDQQQVERHFTMNELTELYTFEPDLLDDPNSEKKKKRDTPMLPKDTILAELLQIHKEHIVGYHEHDSLLDHKEEEELTEEERKAAWAEYEAEKKGLTMRFNIPTGTNLPPVSFNSQTPYIPFNLGALSAMSNQQLEDLINQGREKVVEATNSVTAVRIQPLEDIISAVWKENMNLSEAQVQALALSRQASQELDVKRREAIYNDVLTKQQMLISCVQRILMNRRLQQQYNQQQQQQMTYQQATLGHLMMPKPPNLIMNPSNYQQIDMRGMYQPVAGGMQPPPLQRAPPPMRSKNPGPSQGKSM

SEQ ID NO: 8889 - protein, 1359 aa, Homo sapiens
MRRNIRKLLREDQLEPVTKAAQQEELERRKRLEQQRKDYAAPIPTVPLEFLPEEIALRASDGPQLPPRVLAQEVICLDSSSGSEDEKSSRDEVIELSSGEEDTLHIVDSSESVSEDDEEEEKGGTHVNDVLNQRDALGRVFVNLNHPPEEENVFLAPQLARAVKPHQIGGIRFLYDNLVESLERFKTSSGFGCILAHSMGLGKTLQVISFIDVLFRHTPAKTVLAIVPVNTLQNWLAEFNMWLPPPEALPADNKPEEVQPRFFKVHILNDEHKTMASRAKVMADWVSEGGVLLMGYEMYRLLTLKKSFATGRPKKTKKRSHPVIIDLDEEDRQQEFRREFEKALCRPGPDVVICDEGHRIKNCQASTSQALKNIRSRRRVVLTGYPLQNNLIEYWCMVDFVRPDFLGTRQEFSNMFERPILNGQCIDSTPQDVRLMRYRSHVLHSLLEGFVQRRGHTVLKIHLPAKEENVILVRLSKIQRDLYTQFMDRFRDCGSSGWLGLNPLKAFCVCCKIWNHPDVLYEALQKESLANEQDLDVEELGSAGTSARCPPQGTKGKGEDSTLASSMGEATNSKFLQGVGFNPFQERGNNIVTYEWAKDLLTNYQTGVLENSPKMVLLFHLIEESVKLGDKILVFSQSLSTLALIEEFLGKREVPCPPGTEGQGAQKWVRNISYFRLDGSTPAFERERLINQFNDPSNLTTWLFLLSTRAGCLGVNLIGANRVVVFDASWNPCHDAQAVCRVYRYGQKKPCYIYRLVADYTLEKKIYDRQISKQGMSDRVVDDLNPMLNFTRKEVENLLHFVEKEPAPQVSLNVKGIKESVLQLACLKYPHLITKEPFEHESLLLNRKDHKLTKAEKKAAKKSYEEDKRTSVPYTRPSYAQYYPASDQSLTSIPAFSQRNWQPTLKGDEKPVASVRPVQSTPIPMMPRHVPLGGSVSSASSTNPSMNFPINYLQRAGVLVQKVVTTTDIVIPGLNSSTDVQARINAGESIHIIRGTKGTYIRTSDGRIFAVRATGKPKVPEDGRMAASGSQGPSCESTSNGRHSASSPKAPDPEGLARPVSPDSPEIISELQQYADVAAARESRQSSPSTNAALPGPPAQLMDSSAVPGTALGTEPRLGGHCLNSSLLVTGQPCGDRHPVLDLRGHKRKLATPPAAQESSRRRSRKGHLPAPVQPYEHGYPVSGGFAMPPVSLNHNLTTPFTSQAGENSLFMGSTPSYYQLSNLLADARLVFPVTTDPLVPAGPVSSSSTATSVTASNPSFMLNPSVPGILPSYSLPFSQPLLSEPRMFAPFPSPVLPSNLSRGMSIYPGYMSPHAGYPAGGLLRSQVPPFDSHEVAEVGFSSNDDEDKDDDVIEVTGK

SEQ ID NO: 8890 - protein, 348 aa, Homo sapiens [sequence omitted]

SEQ ID NO: 8891 - protein, 1162 aa, Homo sapiens
ARGLGKTLQVISFIDVLFRHTPAKTVLAIVPVNTLQNWLAEFNMWLPPPEALPADNKPEEVQPRFFKVHILNDEHKTMASRAKVMADWVSEGGVLLMGYEMYRLLTLKKSFATGRPKKTKKRSHPVIIDLDEEDRQQEFRREFEKALCRPGPDVVICDEGHRIKNCQASTSQALKNIRSRRRVVLTGYPLQNNLIEYWCMVDFVRPDFLGTRQEFSNMFERPILNGQCIDSTPQDVRLMRYRSHVLHSLLEGFVQRRGHTVLKIHLPAKEENVILVRLSKIQRDLYTQFMDRFRDCGSSGWLGLNPLKAFCVCCKIWNHPDVLYEALQKESLANEQDLDVEELGSAGTSARCPPQGTKGKGEDSTLASSMGEATNSKFLQGVGFNPFQERGNNIVTYEWAKDLLTNYQTGVLENSPKMVLLFHLIEESVKLGDKILVFSQSLSTLALIEEFLGKREVPCPPGTEGQGAQKWVRNISYFRLDGSTPAFERERLINQFNDPSNLTTWLFLLSTRAGCLGVNLIGANRVVVFDASWNPCHDAQAVCRVYRYGQKKPCFIYRLVADYTLEKKIYDRQISKQGMSDRVVDDLNPMLNFTRKEVENLLHFVEKEPAPQVSLNVKGIKESVLQLACLKYPHLITKEPFEHESLLLNRKDHKLTKAEKKAAKKSYEEDKRTSVPYTRPSYAQYYPASDQSLTSIPAFSQRNWQPTLKGDEKPVASVRPVQSTPIPMMPRHVPLGGSVSSASSTNPSMNFPINYLQRAGVLVQKVVTTTDIVIPGLNSSTDVQARINAGESIHIIRGTKGTYIRTSDGRIFAVRATGKPKVPEDGRMAASGSQGPSCESTSNGRHSASSPKAPDPEGLARPVSPDSPEIISELQQYADVAAARESRQSSPSTNAALPGPPAQLMDSSAVPGTALGTEPRLGGHCLNSSLLVTGQPCGDRHPVLDLRGHKRKLATPPAAQESSRRRSRKGHLPAPVQPYEHGYPVSGGFAMPPVSLNHNLTTPFTSQAGENSLFMGSTPSYYQLSNLLADARLVFPVTTDPLVPAGPVSSSSTATSVTASNPSFMLNPSVPGILPSYSLPFSQPLLSEPRMFAPFPSPVLPSNLSRGMSIYPGYMSPHAGYPAGGLLRSQVPPFDSHEVAEVGFSSNDDEDKDDDVIEVTGK

SEQ ID NO: 8892 - protein, 220 aa, Homo sapiens
MGADRDSPTLLPAGGSNWLAQRFHCQNGCILGDEMGLGKTCQTIALFIYLAGRLNDEGPFLILCPYVCFEQLERRNAEICSRSFLCNICSDKEERACLQQDLKQESRFHVLLTTYEICLKDASFLKSFPWSVLVVDEAHRLKNQSSLLHKTLSEFSVVFSLLLTGTPIQNSLQELYSLLSFVEPDLFSKEEWEILFNATRILRKNLSQQVNCTNSCSHFC

SEQ ID NO: 8893 - protein, 757 aa, Homo sapiens
MIQAAGKLVLIDKLLPKLIAGGHKVLIFSQMVRCLDILEDYLIQRRYTYERIDGRVRGNLRQAAIDRFCKPDSDRFVFLLCTRAGGLGINLTAADTCIIFDSDWNPQNDLQAQARCHRIGQSKAVKVYRLITRNSYEREMFDKASLKLGLDKAVLQDINRKGGTNGVQQLSKMEVEDLLRKGAYGALMDEEDEGSKFCEEDIDQILQRRTHTITIQSEGKGSTFAKASFVASGNRTDISLDDPNFWQKWAKIAELDTEAKNEKESLVIDRPRVRKQTKHYNSFEEDELMEFSELDSDSDERPTRSRRLNDKARRYLRAECFRVEKNLLIFGWGRWKDILTHGRFKWHLNEKDMEMICRALLVYCVKHYKGDEKIKSFIWELITPTKDGQAQTLQNHSGLSAPVPRGRKGKKTKNQLLIPELKDADWLATCNPEVVLHDDGYKKHLKQHCNKVLLRVRMLYYLKAEILGEAAEKAFEGSPARELDVPLPDIDYMEIPVDWWDAEADKSLLIGVFKHGYERYNAMRADPALCFLEKVGMPDEKSLSAEQGVTDGTSDIPERGNTDKEDNAEDKVDGLQKQTESSSDGGDGVFSEKKDDSRAAQDGSDPDKSPWPVSSALTARLRRLVTVYQRCNRKELCRPEILGPGNQGYWVQEEMFRRTSEMDLINKEAQKRWTRREQADFYRTVSSFGVVYDQEKKTFDWTQFRIISRLDKKSDESLEQYFYSFVAMCRNVCRLPTWKDGGPPDTTIYVRVSLQGV

SEQ ID NO: 8894 - protein, 368 aa, Homo sapiens [sequence omitted]

SEQ ID NO: 8895 - protein, 251 aa, Homo sapiens
MDFARSTDDRGEPVTHYLVKWCSLPYEGSTWERRQDIDQAKIEEFEKLMSREPETERVERPPADDWKKSESSREYKNNNKLREYQLEGVNWLLFNWYNMRNCILADEMGLGKTIQSITFLYEIYLKGIHGPFLVIAPLSTIPNWEREFRTWTELNVVVYHGSQASRRTIQLYEMYFKDPQGRVIKGSYKFHAIITTFEMILTDCPELRNIPWRCVVIDEAHRLKNRNCKLLEGLKMMDLVSDHIGDCTEPE

SEQ ID NO: 8896 - protein, 799 aa, Ferroplasma acidarmanus
MLRMFISEVIDSISRRFAYNPGKPVKGSVGDAAKWVNSLSLDNPFVTYGRSLAMQKLVSWSEKIKSTLNFPFRTCMDLIPPENNGQWFLKFFLQSKKDPSLMVPYGKIWDRKDSETISLINKYTAFPEEFLLRSIGIAQSIFSPIGKNITSKPDGVYLSDEEVFDLLKTYSSSMEEAGFGILFPEWWGKKENKLGIKIKVKAGDINNSVKLGINALLDYSLDIVLNGEPVSKSDLEKLAIMKSHLVQIGKKWVEIDNDQLNKILKLLDKGNKKMSLPELLTMENSNSIPVVEISGEGWVGDIISGNAKTLPIDEPENFIGNLRAYQKHGVAWLKFMTGAGFGCCLADDMGLGKTIEIIAFLLDRLENNGSTSLILCPTSVISNWEHEIHKFAPSLNVYIHHGNSRKKDDNFIDNITDYKIVLTSYSLLQRDIKFLSQVNWDGIIADEAQYIKNYSTKQSRAIRSLQGNFKIALTGTPIENRLQDLRSIFEFINPGYLSGEKKFRETFSIPIERYGDENAMNALNTLVNPMILRRVKTDKSIIQDLPDKEEVKVYIPLTGEQASLYEAAVNTMLESVNTKKGIERKSVILSTITKLKRLLDHPSLVSGDLDRRLDRSEKLVRLREMLEEAIDSNQKTLVFTQYTDAGKIIKEEMLKKLGEEALYLNGSTPMSLRQNMVERFQDPDGPKIFIISVKAGGAGINLTAATNVIHFDRWWNPSVEDQATDRAYRIGQMKNVHVYKFISTGTIEEKIDDIIEGKSMLREKIIGASDESWITGLSSTDLKNVFSLRREVIASEDDE

SEQ ID NO: 8897 - protein, 977 aa, Cytophaga hutchinsonii
MKVSTTEPFQIIYSLFEHEYLGYLFESFVIQLDHQRRLTLKHQNISAKNADEFARELDDVDFKLIDLIDSIQQEAIVKKFYNKKITPAEFFLKIYHKEKGDELIQDAIRSYIELKKNQILCLLENKMLFEMGHDGEPTWKRLALAPQKANILFHFMRNEDNTHYFPTIKYDGQKIDFQYKNAIIVCSMPAWLLVDNTVYHFNKDVDGNKLKPFLNKKFILVPRKMEETYYEKFVTQIVSSFDVHAKGFTIHAEEYAPKPVLTLTELAVAKAPVSLFDTAGQDTAVDTVEENKILVSLDFQYGTFIFSSDKLSPSFVKMEKTDDSYIFHKVKRDSDKEKDFLDLLRNSDLEFKSGKVTLDKSKIFSWLSANRAALEAQGLVVRQNLKDGKRYFVGASSISLEVKENNDWFDIYAVVRFGEFEIPFLKLKQYILKKKKEFVLPNGEIAVIPEEWFSQYSDLFAFIEDDSDDLKLRKHHMALVKELQNDRLAEVSMDRKLERLRDFQEIEDYDLPAEFKGELRPYQKAGYNWMRFLNQYNFGGCLADDMGLGKTVQTLALLQSLQKTADGKASLLIMPTSLVYNWEMEARKFTPDLKILNFTGINRDKNVEQFHNYDIIITSYGTVRIDIELFKQYQFYYTILDESQVIKNPESIIAKAVKELNSKHRLILTGTPVENSTMDLWSQMTFVNPGLLGSQQFFRNEFLNPIEKKHDEVKTKRLYSIIKPFILRRQKSQVVKDLPEKIENVHYCTMSPEQEQEYEKTKSNYRNLILESIDEKGLAGSQILLLQGLTKLRQIANHPSLVEDTFEGTSGKMEDVNYMLDNALELGHKILVFSQFVKHLHLYAKLLDKAGIKYAYLDGQTRDRQAEVERFQNEEGIRVFLISLKAGGLGLNLTAADYVFLLDPWWNPAVEAQAVDRAYRIGQKNTVFTYKFITKNTVEEKILNLQKNKLKLANDLISSEETFFKALSKEDIQSIFD

SEQ ID NO: 8898 - protein, 1005 aa, Oryctolagus cuniculus
MSWMFKRDPVWKYLQTVQYGVHGNFSRLSYPTFFPRFEFQDIIPPDDFLTSDEELDSVLFGTLRGHVVGLRYYTGVVNNNEMVALQREPNNPYDKNAIKVNNVNGNQVGYLKKELAAALAYIMDNKLAQIEGVVPYGANNAFTMPLQMTFWGKEENRKAVLDQLKKHGFKLGPAPKTLGFSLESGWGSGRAGPSYSMPVHAAIQMTTEQLKTEFDKLFEDLKEDDKTQEMEPAEAVETPLLPHQKQALAWMVSRENSRELPPFWELRNDLYYNTITNFSEKDQPENVHGGILADDMGLGKTLTAIAVILTNFHDGKPLPVERMKKNQVKKECNSSESDKPGRKDTIKKTDGLSKEGSRYSEEPSISDVKKNKYSMSELSSSQPKRKKIAVQYIESSDSEEIEISELPQKMKGKLKNVQSETKRVKVGPSKIKEDTAFACALTSSASTTTKKILKKGASAQRVQRKLMFEERPRTTLIICPLSVLSNWIDQFGQHIKSDVHLNFYVYYGPDRIRDPALLSKQDIVLTTYNILTHDYGTKGDSPLHSIRWLRVILDEGHAIRNPNAQQTKAVLDLEAERRWVLTGTPIQNSLKDLWSLLSFLKLKPFVDREWWHRTIQRPVTMGDEGGLRRLQSLIKNITLRRTKTSKIKGKPVLELPERPVFIQHITLSDEERKIYQSVKSEGKATIGRYFNEGTVLAHYADVLGLLLRLRQICCHTHLLTNTVSSSGPSGNDTPEELRKKLIKKMKLILSSGSDEECAICLDSLTVPVITHCAHVFCKPCICQCIQNEQPHAKCPLCRNDIHGDNLLECPPEELACDSEKKSNMEWTSSSKINALMHALIDLRTKNPNIKSLVVSQFTTFLSLIETPLKASGFVFTRLDGSMAQKKRVESIQCFQNTEAGSPTIMLLSLKAGGVGLNLCAASRVFLMDPAWNPAAEDQRFDRCHRLGQKQEVIITKFIVKDSVEENMLKIQNTKRELAAGAFGTKKNANEMKQAKINEIRTLIDL

SEQ ID NO: 8899 - protein, 836 aa, Oryctolagus cuniculus
MSWMFKRDPVWKYLQTVQYGVHGNFSRLSYPTFFPRFEFQDIIPPDDFLTSDEELDSVLFGTLRGHVVGLRYYTGVVNNNEMVALQREPNNPYDKNAIKVNNVNGNQVGYLKKELAAALAYIMDNKLAQIEGVVPYGANNAFTMPLQMTFWGKEENRKAVLDQLKKHGFKLGPAPKTLGFSLESGWGSGRAGPSYSMPVHAAIQMTTEQLKTEFDKLFEDLKEDDKTQEMEPAEAVETPLLPHQKQALAWMVSRENSRELPPFWELRNDLYYNTITNFSEKDQPENVHGGILADDMGLGKTLTAIAVILTNFHDGKPLPVERMKKNQVKKECNSSESDKPGRKDTIKKTDGLSKEGSRYSEEPSISDVKKNKYSMSELSSSQPKRKKIAVQYIESSDSEEIEISELPQKMKGKLKNVQSETKRVKVGPSKIKEDTAFACALTSSASTTTKKILKKGASAQRVQRKLMFEERPRTTLIICPLSVLSNWIDQFGQHIKSDVHLNFYVYYGPDRIRDPALLSKQDIVLTTYNILTHDYGTKGDSPLHSIRWLRVILDEGHAIRNPNAQQTKAVLDLEAERRWVLTGTPIQNSLKDLWSLLSFLKLKPFVDREWWHRTIQRPVTMGDEGGLRRLQSLIKNITLRRTKTSKIKGKPVLELPERPVFIQHITLSDEERKIYQSVKSEGKATIGRYFNEGTVLAHYADVLGLLLRLRQICCHTHLLTNTVSSSGPSGNDTPEELRKKLIKKMKLILSSGSDEECAICLDSLTVPVITHCAHVFCKPCICQCIQNEQPHAKCPLCRNDIHGDNLLECPPEELACDSEKKSNMEWTSSSKRFLSC

SEQ ID NO: 8900 - protein, 616 aa, Staphylococcus aureus
MNQIEEALTGLISKDPAIVNENANKDSDTFSTMRDLTAGIVSKSYALNHLLPKHVADAHQRGDIHFHDLDYHPFQPLTNCCLIDAKNMLHNGFEIGNANVTSPKSIQTASAQLVQIIANVSSSQYGGCTVDRVDELLSTYARHNEEQHRNIAKQFVKESEIDRYVDQQVTKDINDAIESLEYEINTLYTSNGQTPFVTLGFGLGTDHLSRKIQQAILNTRIKGLGKDRTTAIFPKLVFSIKKGTNFSPQDPNYDIKQLALKCSTKRMYPDILNYDKLVEILGDFKAPMGCRSFLPSWKDAEGHFENNGRCNLGVVTLNLPRMALESAGNMTKFWEIFYERIDVLHDALLYRINRLKDAVPNNAPILYKSGAFNYKLKETDDVAELFKNKRATISMGYIGLYETATVFYGPNWETSQEAKAFTLEILKEMKRYQTKWTELYDIWFSIYSTPSESLTDRFCRLDQERFGDIKDITDKGYYQNSFHYDVRKDVTPFEKLDFEKDYPYYASGGFIHYCEYPKLQHNLKALEAVWDYSYDKVGYLGTNIPIDHCYECDYDGDFEATEKGFKCPNCGNDNPKTVDVVKRTCGYLGNPVQRPVIKGRHKEICARVKHMKAPKE

SEQ ID NO: 8901 - protein, 594 aa, Enterococcus faecium
MNENANKDSNVFNTQRDLTAGIVGKSIGLKMLPPHIANAHQKGDIHYHDLDYHPYTPMTNCCLIDFKGMLNNGFKIGNAEVESPKSIQTATAQISQIIANVASSQYGGCSADRTDELLAPFAELNYKKHLKDAEEWIDSPERQKEYAKAKTKKDIFDAMQSLEYEINTLFTSNGQTPFTSLGFGLGENWFEREIQKAILQIRINGLGSEKRTAIFPKLIFTLKKGVNLNPEDPNYDIKQLALECATKRMYPDILNYDKIVELTGSFKVPMGCRSFLQGWKDENGQEVNVGRMNLGVVTLNLPRIAIESKGDQNKFWQLLSDRLEIMKDALLYRVERCKEAIPANAPILYMYGAFGKRLSRTDSVNELFKNRRATVSLGYIGLYEVASAFFGGEWETNPEAKAFTLDIVKELKANADAWGDEYGYHFSVYSTPSESLTDRFCRLDTEKFGIIENITDKEYYTNSFHYDVRKNPTPFEKLEFEKDYPKYCSGGFIHYCEYPMLQQNPKALEAVWDFAYDKIGYLGTNTPIDHCYQCGFEGDFKPTERGFECPECGNHDPKTCDVVKRTCGYLGNPQARPMVHGRHKEISSRVKHMK

SEQ ID NO: 8902 - protein, 235 aa, Enterococcus faecium
MKVNYEEKTVVTQQPETSQMKVIKRDGRHVDFDEQKINEALIKAEKKIHGSLSPLTYEKIQMIADLVVQEIKSRFAENVKIYEIQNIVEHILLEKNEYELAEEYINYRTKRDFARSKATDINFSIEKLINKDQTVVNENANKDSNVFNTQRDLTAGIVGKSIGLKMLPPHIANAHQKGDIHYHDLDYHPYTPMTNCCLIDFKGMLNNGFKIGMPKSNRQNLSRPPQHKSHRLLPM

SEQ ID NO: 8903 - protein, 747 aa, Lactococcus lactis subsp. cremoris
MKTEVKYQDVTLEEINVIKRDGRSVKFNSEKIFDALTKAAKKVELTDKSVLSELTDRVVSEIFSRFSENVKIYEIQSIVEQELLESGETALAEEYISYRANRDLARTKATDINFTIEKLINRDQTVVNENANKDSNVFNTQRDLTAGAVSKAIGLKLLPPHVANAHQKGDIHYHDLDYSPFTTMANCCLIDFKNMFENGFKLGNAQVDSPKSIQTATAQASQIIANVASSQYGGCSFDRADEVLAPYAKLNYQKHLKDAQKWIDGDEKREAYAREKTAKDIYDAMQSLEYEINTLFTSNGQTPFVTVGFGLGDDWYAREIQKAILKVRIGGLGSEHRTAIFPKLIFTLKRGLNLEVGTPNYDIKELALECSTKRMYPDILSYDKIVELTGSFKASMGCRSFLQGWKDANGNDVTAGRNNLGVVTVNLPRIALEAAGNKEKFWEIFNERVEIAHDALAFRVERAKEAQPKNAPILFMNGALGRLDSEGSVDDLYNNERATVSLGYIGLYEVATTFYGPTWESNPEAKAFTIEIVKRMHEDCEDWSKASGYHYSVYSTPSESLTDRFCRMDKEKFGSVADITDKDYYTNSFHYDVRKNPTPFEKLEFEKDYPVYANGGFIHYCEYPVLQQNPKALEAVWDFAYDRIGYLGTNAPIDHCYACGFEGDFTPTERGFKCPQCGNDDPKTCDVVKRTCGYLGNPQARPMVHGRHKEISSRVKHMNGSVGALNDGNLIDSVEVDEAKSKYFAEK

SEQ ID NO: 8904 - protein, 747 aa, Lactococcus lactis subsp. lactis
MKSEVKYQDVTLEEINVIKRDGRSVKFNSEKIFDALTKAAKKVELTDMSVLSELTDRVVSEIFTRFSENVKIYEIQSIVEQELLESGETQLAEEYISYRANRDLARTKATDINFTIEKLINRDQTVVNENANKDSNVFNTQRDLTAGAVSKAIGLKLLPPHVANAHQKGDIHYHDLDYSPFTTMANCCLIDFKNMFENGFKLGNAQVDSPKSIQTATAQASQIIANVASSQYGGCSFDRADEVLAPYAKLNYKKHLKDAQKWIDGAEKQEAYAREKTAKDIYDAMQSLEYEINTLFTSNGQTPFVTVGFGLGDDWYAREIQKAILNVRIGGLGSEHRTAIFPKLIFTLKRGLNLEVGTPNYDIKELALECSTKRMYPDILSYDKIVELTGSFKASMGCRSFLQGWKDENGNDVTAGRNNLGVVTVNLPRIALEAAGNKEKFWEIFNERIEIAHDALAFRVERAKEAQPKNAPILFMNGALGRLDAEGSVDELYNKERATVSLGYIGLYEVATTFYGPTWENNPEAKAFTIEIVKRMHEDCEDWSKASGYHYSVYSTPSESLTDRFCRMDKEKFGSVADITDKDYYTNSFHYDVRKNPTPFEKLEFEKDYPVYANGGFIHYCEYPVLQQNPKALEAVWDFAYDRIGYLGTNAPIDHCYACGFEGDFAATERGFKCPQCGNDDPKTCDVVKRTCGYLGNPQARPMVHGRHKEISSRVKHMNGSVGALNDGNLIDSVEVDEAKSKYFAEK

SEQ ID NO: 8905 - protein, 712 aa, Escherichia coli O157:H7 EDL933
MTPHVMKRDGCKVPFKSERIKEAILRAAKAAEVDDADYCATVAAVVSEQMQGRNQVDINEIQTAVENQLMSGPYKQLARAYIEYRHDRDIEREKRGRLNQEIRGLVEQTNASLLNENANKDSKVIPTQRDLLAGIVAKHYARQHLLPRDVVQAHERGDIHYHDLDYSPFFPMFNCMLIDLKGMLTQGFKMGNAEIEPPKSISTATAVTAQIIAQVASHIYGGTTINRIDEVLAPFVTASYNKHRKTAEEWNIPDAEGYANSRTIKECYDAFQSLEYEVNTLHTANGQTPFVTFGFGLGTSWESRLIQESILRNRIAGLGKNRKTAVFPKLVFAIRDGLNHKKGDPNYDIKQLALECASKRMYPDILNYDQVVKVTGSFKTPMGCRSFLGVWENENGEQIHDGRNNLGVISLNLPRIALEAKGDEATFWKLLDERLVLARKALMTRIARLEGVKARVAPILYMEGACGVRLNADDDISEIFKNGRASISLGYIGIHETINALFGGEHVYDNEQLRAKGIAIVERLRQAVDQWKEETGYGFSLYSTPSENLCDRFCRLDTAEFGVVPGVTDKGYYTNSFHLDVEKKVNPYDKIDFEAPYPPLANGGFICYGEYPNIQHNLKALEDVWDYSYQHVPYYGTNTPIDECYECGFTGEFECTSKGFTCPKCGNHDASRVSVTRRVCGYLGSPDARPFNAGKQEEVKRRVKHLGNGQIG

SEQ ID NO: 8906 - protein, 616 aa, Staphylococcus aureus subsp. aureus Mu50
MNQIEEALTGLISKDPAIVNENANKDSDTFSTMRDLTAGIVSKSYALNYLLPKHVADAHQRGDIHFHDLDYHPFQPLTNCCLIDAKNMLHNGFEIGNANVTSPKSIQTASAQLVQIIANVSSSQYGGCTVDRVDELLSTYARHNEEQHRNIAKQFVKESEIDRYVDQQVTKDINDAIESLEYEINTLYTSNGQTPFVTLGFGLGTDHLSRKIQQAILNTRIKGLGKDRTTAIFPKLVFSIKKGTNFSPQDPNYDIKQLALKCSTKRMYPDILNYDKLVEILGDFKAPMGCRSFLPSWKDAEGHFENNGRCNLGVVTLNLPRMALESAGNMTKFWEIFYERIDVLHDALLYRINRLKDAVPNNAPILYKSGAFNYKLKETDDVAELFKNKRATISMGYIGLYETATVFYGPDWETSQEAKAFTLEILKEMKRYQTKWTELYDIWFSIYSTPSESLTDRFCRLDQERFGDIKDITDKGYYQNSFHYDVRKDVTPFEKLDFEKDYPYYASGGFIHYCEYPKLQHNLKALEAVWDYSYDKVGYLGTNIPIDHCYECDYDGDFEATEKGFKCPNCGNDNPKTVDVVKRTCGYLGNPVQRPVIKGRHKEICARVKHMKAPKE

SEQ ID NO: 8907 - protein, 738 aa, Lactobacillus gasseri
MTMLQQDAQIKSITQMTLPETAIKRDGSIYPFALYKIEMVLDNLHLTKHEADILPSILKKLNGVKQTSTKDIADAFVQTLTELGFDDEANAYVDYRREDEANFEKQTETTNRLDRLVHHDPTIVNENANKDSRVFSTQRDLTAGVVGKTIGLTMMPEHIAKAHLRGDIHWHDLDYTPLSPLTNCCLIDFKEMLSHGFTIGNANIESPHSIETATAQMSQIIANVASSQYGGCSADRVDEVLAPYAEKNYHKNINEAREFFDDEEKIKAFAIKRTKKDIYDAMQALEYEINTLLSSQGQTPFTTLGFGLGTSWIEREIQKAILKIRIEGLGKDKRTAIFPKLVFTLKKGLNLHPGDPNYDIKELALECSTKRMYPDIVSYDMIKKITGSFKAPMGCRSFLQGWKDPETGKEVNSGRMNLGVVTLNLPRIAMESKGDKDLFWQIFREKVQTAHEALQIKAKRCTEAVPDNAPILYEYGAFGKRLNAEDNVNDLFKNGRCTISLGYIGLYEVGTVFYGPNWEHNEEAHQFTINIVKELHDYCAKWEKEDPNHYHYSVYSTPSESLTDRFCRLDTKKFGKVKDITDKEYYTNSFHYDVRKHPTPFEKLAFEAPYPFYAAGGFIHYCEYPNLKQNPKALEAVWDWAYDKVGYLGTNTPIDQCYKCGFKGEFKATAKGFECPQCGNHDPETCDCVKRTCGYLGNPLKRPMVHGRHEEIVHRVKHLNLGMEEKMAKDEVRKNDEY

SEQ ID NO: 8908 - protein, 732 aa, Streptococcus pyogenes M1 GAS
MVSLEEDKVTVQPDIKVIKRDGRLVNFDSTKIYSALLKASMKVTRMSPLVEAKLEAISDRIIAEIIERFPTNIKIYEIQNIVEHKLLAANEYAIAKEYINYRTQRDFARSQATDINFSIDKLINKDQTVVNENANKDSDVFNTQRDLTAGIVGKSIGLKMLPSHVANAHQKGDIHYHDLDYSPYTPMTNCCLIDFKGMLANGFKIGNAEVESPKSIQTATAQISQIIANVASSQYGGCTADRIDEFLAPYAELNFKKHMADAKKWIVETKRESYAFEKTQKDIYDAMQSLEYEINTLFTSNGQTPFTSLGFGLGTSWFEREIQKAILTIRINGLGSEHRTAIFPKLIFTVKRGLNLEPDSPNYDIKTLALECATKRMYPDMLSYDKIIDLTGSFKSPMGCRSFLQGWKDENGQDVTSGRMNLGVVTLNLPRIAMESNGDMDKFWELFNERMLISKDALIYRVERVTEAKPANAPILYQYGAFGKRLEKTGNVNDLFKNRRATVSLGYIGLYEVASVFYGGQWEGNPDAKAFTLSIVKAMKQACEDWSDEYGYHFSVYSTPSESLTDRFCRLDTEKFGIVTDITDKEYYTNSFHYDVRKSPTPFEKLDFEKDYPEAGASGGFIHYCEYPVLQQNPKALEAVWDYAYDRVGYLGTNTPIDKCYNCQFEGDFTPTERGFTCPNCGNNDPKTVDVVKRTCGYLGNPQARPMVNGRHKEISARVKHMNGSTIKYPGL

SEQ ID NO: 8909 - protein, 716 aa, Listeria innocua
MYVEQLNEQMVIKRDGRKANFDLIKIRNAVEASMKAIELEDETFLEEILLEVVSELPNKTDMTIDEIQQCVENTLMKSTYPDVARAYIEYRHDRDHERENITDMHKSVEKLLQKDKTVVNENANKDATVFNTQRDLTAGAVAKSYALKYMLPKHVSNAHLKGEIHFHDLDYSPYHAMTNCCLIDIEGMLSKGFTIGNANVESPKSIQTATAQIAQIIANVASSQYGGCSVDRIDEVLSVYARLNFEKHKKDAAEWVVPEKQEGYAAEKTRKDIYDAMQSLEYEINTLYTSNGQTPFVTLGFGLGEDWFAREIQKAILKVRIGGVGKDKHTAIFPKLVFSIRRGTNLNAEDPNYDIKQLALECSSKRMYPDVLNYDSLVRLTGDFKVPMGCRSFLPAWKNENGEHVNAGRNNLGVVTLNIPRIAIQSGGDKERFWEIFHERMKTVKDALLFRLNRVRQARPENAPILYKYGAFGKRLQDGENVDQLFNKERSTISIGYIGLYEAATVFYGGEWEGDKEAKNFTLDIVKELKAYADNWKDEYGYWFSVYSTPSESLTDRFNRLDKEKYGVIKDITDKDYYQNSFHYDVRKKITPFEKIDFEKDYPEFCSGGFIHYCEYPKMVHNTKALEAVWDYSYDRVAYLGTNTPIDKCYECDFEGEFVPTEEGFKCPSCGNTDPEKADVVKRTCGYLGNPMKRPMVHGRHVEISNRVKHMENLGE

SEQ ID NO: 8910 - protein, 710 aa, Listeria monocytogenes EGD-e
MYVEQLNEQMVIKRDGRKASFDLIKIRNAVEASMKAINLEDETFLEEILLEVVSELPNKADMTIDEIQHCVENTLMKSTYPDVARAYIEYRHDRDHERENITDMHKSVEKLLQKDKTVVNENANKDATVFNTQRDLTAGAVAKSYALKYMLPKHVSNAHLKGEIHFHDLDYSPYHAMTNCCLIDIEGMLSKGFTIGNANVESPKSIQTATAQIAQIIANVASSQYGGCSVDRIDEVLSVYARLNFEKHKKDAMEWVVPEKQEGYAAEKTRKDIYDAMQSLEYEINTLYTSNGQTPFVTLGFGLGEDWFAREIQKAILKVRIGGVGKDKHTAIFPKLVFSIRRGTNLNAEDPNYDIKQLALECSSKRMYPDVLNYDSLVRLTGDFKVPMGCRSFLPAWENENGEHVNAGRNNLGVVTLNIPRIAIQSGGDKERFWEIFHERMKTVKDALLFRLNRVRQARPENAPILYKYGAFGKRLQDGEDVDQLFNKERSTISIGYIGLYEAATVFYGGEWEGDKEAKNFTLDIVKELKAYADNWKDEYGYWFSVYSTPSESLTDRFNRLDKEKYGVIKDITDKDYYQNSFHYDVRKKIDFEKDYPEFCSGGFIHYCEYPKMVHNTKALEAVWDYSYDRVAYLGTNTPIDKCYECDFEGEFVPTEEGFKCPSCGNTDPEKADVVKRTCGYLGNPMKRPMVHGRHVEISNRVKHMENLGE

SEQ ID NO: 8911 - protein, 735 aa, Streptococcus pneumoniae TIGR4
MIALEEKITILPTLFVEKRDGRRVVFDVDKIDKALHKAADKVMDVTPLVEKCLNDLTERIITEIHSRFPQGIKIYEIQNIVEHELLEAKEYALAEEYITYRTQRDFERSKATDINFSIHKLLNKDQTVVNENANKDSDVFNTQRDLTAGIVGKSIGLQMLPKHVANAHQKGDIHYHDLDYSPYTPMTNCCLIDFKGMLENGFKIGNAEVESPKSIQTATAQISQIIANVASSQYGGCSADRIDEILAPYAEKNYQKHLKDAEEWVLPEKQEDYAWKKAQKDIYDAMQSLEYEINTLFTSNGQTPFTSLGFGLGTSRFEREIQKAILNIRIKGLGSEHRTAIFPKLIFTLKRGLNLEEGTPNYDIKQLALECATKRMYPDVLSYDKIVDLTGSFKVPMGCRSFLQGWKDENGVEVNSGRMNLGVVTVNLPRIALESEGDMNKFWEIFNERMNIAEDALVYRVERTKEATPANAPILYQYGAFGHRLGKEESVDQLFKNRRATVSLGYIGLYEVATVFFGNSWESNPDAKEFTLDIIHDMKRRVEEWSDQYGYHFSIYSTPSESLTDRFCRLDIDKFGSIPDITDKEYYTNSFHYDVRKNPTPFEKLDFEKVYPEAGASGGFIHYCEYPVLQQNPKALEAVWDYAYDRVGYLGTNTPIDRCYKCDFEGDFEPTERGFACPNCGNSDPKTVDVVKRTCGYLGNPQARPMVNGRHKEIAARVKHMNGSTIKIAGHQVTN

SEQ ID NO: 8912 - protein, 737 aa, Streptococcus pneumoniae R6
MRMIALEEKITILPTLFVEKRDGRRVVFDVDKIDKALHTAADKVMDVTPLVEKRLNDLTERIITEIHSRFPQGIKIYEIQNIVEHELLEAKEYALAEEYITYRTQRDFERSKATDINFSIHKLLNKDQTVVNENANKDSDVFNTQRDLTAGIVGKSIGLQMLPKHVANAHQKGDIHYHDLDYSPYTPMTNCCLIDFKGMLENGFKIGNAEVESPKSIQTATAQISQIIANVASSQYGGCSADRIDEILAPYAEKNYQKHLKDAEEWVLPEKQEDYAWKKAQKDIYDAMQSLEYEINTLFTSNGQTPFTSLGFGLGTSRFEREIQKAILNIRIKGLGSEHRTAIFPKLIFTLKRGLNLEEGTPNYDIKQLALECATKRMYPDVLSYDKIVDLTGSFKVPMGCRSFLQGWKDENGVEVNSGRMNLGVVTVNLPRIALESEGDMNKFWEIFNERMNIAEDALVYRVERTKEATPANAPILYQYGAFGHRLGKEESVDQLFKNRRATVSLGYIGLYEVATVFFGNSWESNPDAKEFTLDIIHDMKRRVEEWSDQYGYHFSIYSTPSESLTDRFCRLDIDKFGSIPDITDKEYYTNSFHYDVRKNPTPFEKLDFEKVYPEAGASGGFIHYCEYPVLQQNPKALEAVWDYAYDRVGYLGTNTPIDRCYKCDFEGDFEPTERGFACPNCGNSDPKTVDVVKRTCGYLGNPQARPMVNGRHKEIAARVKHMNGSTIKIAGHQVTN

SEQ ID NO: 8913 - protein, 616 aa, Staphylococcus epidermidis ATCC 12228
MTTLETSLTRLITKDPTILNENANKDSNTFSTMRDLTAGTVSKSYALDHLLPKHVAHAHQSGDIHFHDLDYHPFQPLTNCCLIDAKDMLENGFEIGNANVTTPQSIQTASAQLVQIIANVSSSQYGGCTVDRVDELLSKYAQMNAQHHREVANDFVQPDKIENYVDTQVTKDIGDAIESLEYEINTLYTSNGQTPFVTLGFGLGTDQLSRKIQQAILHTRIKGLGKDRVTAIFPKLVFSIKKGVNFSPEDPNYDIKQLALECSTKRMYPDILNYDKLVELLGDFKAPMGCRSFLPSWKNDEGQLENNGRCNLGVVTLNVPRIAIEADGAMQQFWDIFEKRMQLLHDALVYRIQRLQDAIPDNAPILYKSGAFKNKLTSEDTVDSLFTKQRATISMGYIGLYEAATLFYGPNWEHNPEAKTFTLDILREMKRYQVEWTKQYDIWFSIYSTPSESLTDRFCRLDKEKFGFIPDVTDKGYYQNSFHYDVRKDVTPFEKLDFEKDYPYYASGGFIHYCEYPKLNHNLKALEAVWDYAYDKVGYLGTNIPIDHCYRCGYDGDFETTANGYRCPHCGNTDPKTVDVVKRTCGYLGNPVQRPVIEGRQKEICARVKHMKEPRS

SEQ ID NO: 8914 - protein, 728 aa, Fusobacterium nucleatum subsp. nucleatum ATCC 25586
MKRVIKRDGSVVEFDRSRIINAIKKTFEQASREPNMKLIEKIASQVEDLPDKVLAVEQIQDIVVKKLMGSSEKDIAMSYQSYRTLKAEIREKEKGIYRQIGELVDASNEKLLSENANKDAKTISVQRDLLAGISSRDYYLNKIVPEHIKLAHIKGEIHLHDLDYLLFRETNCELVNIEAMLKGGCNIGNAKMLEPNSVDVAVGHIVQIIASVSSNTYGGCSIPYLDRALVRYIKKTFKKHFLRGAKYIDDLNEEQIEELKKENLEYSNEIIKNKYPKTYEYSVDMTEESVKQAMQGLEYEINSLSTVNGQTPFTTVGIGTETSWEGRLVQKYVLKTRMAGFGAKKETAIFPKIVYAMCEGLNLNEGDPNWDISQLAFECMTKSIYPDILFITPEQLKNETVVYPMGCRAFLSPWKDKNGKEKYAGRFNIGATSINLPRIAIKNRGDEEGFYKELDRILEICKDNCLFRAKYLENTVAEMAPILWMSGALAEKNQKDTIKDLIWGGYSTVSIGYIGLSEVSQLLYGKDFSESEEVYEKTFNILKYIADKVLEYKQKYNLGFALYGTPSESLCDRFARVDKQEFGDIKGITDKGYYDNSFHVSSRINMSPFEKLRLEALGHKYSAGGHISYIETDSLTKNLDAIPDILRYAKMVGIHYMGINQPVDKCHICGYKGEFTATKEGFTCPQCGNHDSNEMSVIRRVCGYLSQPNARPFNKGKQEEIMHRVKHS

SEQ ID NO: 8915 - protein, 605 aa, Bacillus anthracis str. A2012
MFETIVHGNEQDLMQENANVDGRSPMGVMGTFASESAKYYAVEKLLSDQVKKAINENILYPHDLDFYATGTTTCSQIPLAQMLANGFHTGHGHMRQPQDIKSALALSSIIFQANQNMQHGGQSFALFDVDLAPYVRKTVERHKKRLQSYPLTKEQIEEFAWKETENDTYQACEAFIHNSNSMHSRGGGQVPFISINYGTDTSKEGRLLIKQLLKATQAGLGKGETPIFPIQIFKMKKGVNFEGSDPNYDLFELALETTAERLFPNFSFLDAPFNAVHYDGRPESEVCYMGCRTRVMSNIHGEETAIGRGNLSFTSINLVKLALISGSKEAFYEALNYYLDLGIKQLLERFEYQCTKRARDFRFLYSQGVWRGGEKLQPEDSVASILKQGTLSLGFIGLAECLVALTGKHHGEDEESWKLGYEIISFMRDRMDKATEEHELNFSVIATPAEGLSGKFVKKDREEFGVISGITNHNYYTNSFHIPVYYNMQAINKIRLEGPFHALCNGGHITYIELDGAAMHNKKALKQIVQAMAEHGVGYGSINHPVDRCKCCSYHGVIGNECPSCGNEDEANIERIRRITGYLVGDMSKWNSAKRSEEMDRVKHK

SEQ ID NO: 8916 - protein, 728 aa, Corynebacterium efficiens YS-314
MTAPDTLPAEELIIGLSVLKKDGRVVDYRPRKILNSLEAAERTSGEPLHAPSDQLLGEITRRVAEHHIISTEDLSRLVEQTLAQSPAVLAAYRDYQRRQEEKINSSTDITHAITGVVEGDAKILAENGNKDARTFTTQREILAGAVSKAKGLQMLPEDIRRAHLKGLIHVHDLDRSPFAAMPNCSLPDFDYLLSHGFTLGNARIEPPRSIGVAATLLVQLLGAISGEQYGGISIHEIDRLLEPYAELTLQKNRRLYSDASGLLCSDSATDAQDDLVEELARRKTAKDIFDAMQAFEYQVNTLTTAAAQTPFTSISLGMTTSWCGREIQKSILAVRENGMSGETAIFPKIIFFVDEGVNHAPGDPNYDIKMAAMRCSMRRIYPDLVSVPRIRELKQGQLITPMGCRSFLHPWKNSDGDYELLGRNNLGVVSINLPRIAIAAQQSVDDFFTGLDEAIDLGVRALRIREEVVLSADLEQAPIMYTQGGMGNPAGKTSVRDFYTGDNHKRSSISLGYTGIHNAMVALTGEEHWHTVAGHRALSHRILEHMNTRVVAVQDQFHATVSVYATPSESLCDRFAELDRDRFGELPGINDRDYYENSFHFPSYLHTNPMDKIHFEAQYMPLTPGGFMYYVEAPNLLVNPMAFESIWDEAFDHVGYFGINSPVDHCLVCGFEGEFHCDEQGYTCPGCSNRDETQASVTRRLCGYLGAPMKRPVVSGRQAEINSRIKHM

SEQ ID NO: 8917 - protein, 712 aa, Shigella flexneri 2a str. 301
MTPHVMKRDGCKVPFKSERIKEAILRAAKAAEVDDADYCATVAAVVNEQMQGRNQVDINEIQTAVENQLMSGPYKQLARAYIEYRHDRDIEREKRGRLNQEIRGLVEQTNASLLNENANKDSKVIPTQRDLLAGIVAKHYARQHLLPRDVVQAHERGDIHYHDLDYSPFFPMFNCMLIDLKGMLTQGFKMGNAEIEPPKSISTATAVTAQIIAQVASHIYGGTTINRIDEVLAPFVTASYNKHRKTAEEWNIPDAEGYANSRTIKECYDAFQSLEYEVNTLHTANGQTPFVTFGFGLGTSWESRLIQESILRNRIAGLGKNRKTAVFPKLVFAIRDGLNHKKGDPNYDIKQLALECASKRMYPDILNYDQVVNVTGSFKTPMGCRSFLGVWENENGEQIHDGRNNLGVISLNLPRIALEAKGDEATFWKLLDERLVLARKALMTRIARLEGVKARVAPILYMEGACGVRLNADDDVSEIFKNGRASISLGYIGIHETINALFSGEHVYDNEKLRAKGIAIVERLRQAVDQWKEETGYGFSLYSTPSENLCDRFCRLDTAEFGVVPGVTDKGYYTNSFHLDVEKKVNPYDKIDFEAPYPPLANGGFICYGEYPNIQHNLKALEDVWDYSYQHVPYYGTNTPIDECYECGFTGEFECTSKGFTCPKCGNHDASRVSVTRRVCGYLGSPDARPFNAGKQEEVKRRVKHLGNGQIG

SEQ ID NO: 8918 - protein, 732 aa, Streptococcus pyogenes MGAS315
MVSLEEDKVTVQPDIKVIKRDGRLVNFDSTKIYSALLKASMKVTRMSPLVEAKLEAISDRIIAEIIERFPTNIKIYEIQNIVEHKLLAANEYTIAKEYINYRTQRDFARSQATDINFSIDKLINKDQTVVNENANKDSDVFNTQRDLTAGIVGKSIGLKMLPSHVANAHQKGDIHYHDLDYSPYTPMTNCCLIDFKGMLANGFKIGNAEVESPKSIQTATAQISQIIANVASSQYGGCTADRIDEFLAPYAELNFKKHMADAKKWIVETKRESYAFEKTQKDIYDAMQSLEYEINTLFTSNGQTPFTSLGFGLGTSWFEREIQKAILTIRINGLGSEHRTAIFPKLIFTVKRGLNLEPDSPNYDIKTLALECATKRMYPDMLSYDKIIDLTGSFKSPMGCRSFLQGWKDENGQDVTSGRMNLGVVTLNLPRIAMESNGDMDKFWELFNERMLISKDALIYRVERVTEAKPANAPILYQYGAFGKRLEKTGNVNDLFKNRRATVSLGYIGLYEVASVFYGGQWEGNPDAKAFTLSIVKAMKQACEDWSDEYGYHFSVYSTPSESLTDRFCRLDTEKFGIVTDITDKEYYTNSFHYDVRKSPTPFEKLDFEKDYPGAGASGGFIHYCEYPVLQQNPKALEAVWDYAYDRVGYLGTNTPIDKCYNCQFEGDFTPTERGFTCPNCGNNDPKTVDVVKRTCGYLGNPQARPMVNGRHKEISARVKHMNGSTIKYPGL

SEQ ID NO: 8919 - protein, 712 aa, Escherichia coli CFT073
MTPHVMKRDGCKVPFKSERIKEAILRAAKAAEVDDADYCATVAAVVSEQMQGRNQVDINEIQTAVENQLMSGPYKQLARAYIEYRHDRDIEREKRGRLNQEIRGLVEQTNSSLLNENANKDSKVIPTQRDLLAGIVAKHYARQHLLPRDVVQAHERGDIHYHDLDYSPFFPMFNCMLIDLKGMLTQGFKMGNAEIEPPKSISTATAVTAQIIAQVASHIYGGTTINRIDEVLAPFVTASYNKHRKTAEEWNIPDAEGYANSRTIKECYDAFQSLEYEVNTLHTANGQTPFVTFGFGLGTSWESRLIQESILRNRIAGLGKNRKTAVFPKLVFAIRDGLNHKKGDPNYDIKQLALECASKRMYPDILNYDQVVKVTGSFKTPMGCRSFLGVWENENGEQIHDGRNNLGVISLNLPRIALEAKGDEATFWKLLDERLVLARKALMTRIARLEGVKARVAPILYMEGACGVRLNADDDVSEIFKNGRASISLGYIGIHETINALFGGEHVYDNEQLRAKGIAIVERLRQAVDQWKEETGYGFSLYSTPSENLCDRFCRLDTAEFGVVPGVTDKGYYTNSFHLDVEKKVNPYDKIDFEAPYPPLANGGFICYGEYPNIQHNLKALEDVWDYSYQHVPYYGTNTPIDECYECGFTGEFECTSKGFTCPKCGNHDTSRVSVTRRVCGYLGSPDARPFNAGKQEEVKRRVKHLGNGQIG

SEQ ID NO: 8920 - protein, 736 aa, Leuconostoc mesenteroides subsp. mesenteroides ATCC 8293
MNNTIKLMKLPDLTVIKHSGEGTQFYAYKINFILEKLNLSENIINDINRDLYQMLANQASITAIEIRNLLVSLLKKYEQLDAVDAYNSYYVADQQKFSDASNVQKRIEKLFAQDESVVHENANKDSRVFNTQRDLEAGAASRALGLQMLPPLVAKAHLRGDIHWHDLDYSPVTPATNCCLIDFENLLTNGYKIGNAWVDSPHSIQTATAQMAQIIANVASSQYGGCSANRIDQLLAPYAQINYDKHLVDAKKWIDADRQEEYAKEKTCKDIYDAMQGLEYEINTLYSSQGQTPFTTVNFGLGTSWLEREIQKAILQIRIKGLGKERRTAIFPKLIFTLKKGLNFSQEDPNYDIKQLALECSTKRMYPDLLMYDKIVELTGSFKTPMGCRSFLQGWEDETGVEVNSGRMNLGVVSVNLPRISLFAKGDMNLFWKIFDEKMALCHDALAYRIERTKEAVPENAPLLYMYGAFGKRLKATDSVDEVFKNGRATISLGYVGVYETCIAFFGPDWEKNPEAHQFAEAVVKRMHDYCQEWAAESGYHYSLYSTPAESLTDTFCHLDQEKFGAVPDITDKQYYTNSFHYDVRKHPTPFEKIAFEETFPKYASGGFIHYCEYPNLKQNPQALEAVWNWAYDHVGYLGTNTCIDKCFKCGFAGEFKSTARGFMCPECGNHDPELCDVVKRTCGYLGNPQQRPMVHGRHVEIISRQKNLTKEMIENVATFAKTKQSDAQRMDRAKV

SEQ ID NO: 8921 - protein, 733 aa, Oenococcus oeni MCW
MINQDNDSPATLTAIKIQEDDGSISQLKDGQIEKVLLHANDKVDQPLDSQLIKNIVDQVMTKIPLSDNSVATRQDLNTAILRSLKEQGNPQLAQVANNQLLSAEINSSKATDINFTIQKLLNKDKTVVNENANKDSHVFNTQRDLTAGTVARSIGLKMLPPRVAKAHMSGDIHWHDLDYQPYSPMTNCCLIDFKEMLTNGFKIGNAELESPNSIQTATAQMAQIIANVASSQYGGCSADRTDEFLAPFAEKNYHKNLAEAKQWIEDQDKQEAFARQKTEKDIYDAMQGLEYEINTLYSSQGQTPFTTVGFGLGTSWIERSIQKAILQVRIKGLGKERRTAIFPKLVFTIKRGLNLKPEDPNYDIKQLAIECATKRMYPDVLMYDKIVELTGSFKAPMGCRSFLQGWWDESGREVNAGRMNLGVVTVNLPRIAMESKGDQAKFWKIFEDRLDVCKEALVFKINRAKEASPENAPILYEYGAFGKRLKPNDSIDQLFNKSRSTVSLGYIGIYEVGTVFFGHAWEHNPEAKAFSVKIVKTLWEHCKDWEKEYGYHFSVYSTPSESLTDTFCRLDTKKFGIVKDITDKEYYTNSFHYDVRKKITPFEKIDFEKDYPKYCSGGFIHYCEYPNLKQNPKALEAVWDYAYDKIGYLGTNTPIDQCFKCGFKGEFEATARGFKCPKCGNTDPATCDVVKRTCGYLGNPLQRPMIHGRHQEIISRVKHMSLGNDSTSSARQG

SEQ ID NO: 8922 - protein, 821 aa, Bifidobacterium longum DJO10A
MRPKCGTQESVRLIGKGCPMGAQVLEETVTYNETKVAAKASTVLVEKRDGRVVDFDPINIISAVKSAFGDLNKEVGPEEDAMIRGFANQVEGEIKERYAGPAKIEDIQNLVEHALIDAHLYDVARAYTNYRLDKDIQRAKATDVNEAVARFINHDPTLIHENANKDSNVYSTQRDLLAGAVSKAAAFNMLPPAVSNAHMKGDIHFHDADYSPFTAQSNCSLPNFWDMLANGFTLGNAPMASPKSIAIAATQITQIMKDVASSQYGGQTANRADEHLAQYAKKDYEKFLEEARETIPDGMPVEFARRQVESAKKNEPAKLHFGSREPLPMDTPFHTDVDELEQEREILAKIRTRKAIYDAMQTMEYQINSNRVSNGQTPFVTVGFGLGTDWFSREVQRAILLNRIRGLGKEHHTAIFPKLVFTVKHGVNADPGDPNYDLKQLALESATKRMYPDVVFYENIVKITGSFKAPMGCRSFLQGWINPETGKDEEDGRMNLGVVTVNVPRIAIESHGDKARFWKLFDERMEVAHQALQFRIMRCKEATPVNAPTLFRFGAFGRLGANDNVDQLFKNERATVSLGYIGLAETTAVFYGKNWIRDHGWDPEGKEFALSIVKRMNELCKQWSKAEGYHYSVYSTPAESLTDRFNRMDREKFGRIEGVTDHDFYTNSFHYPVWLQPTPMEKLSYEKDFPYYASGGFINYCEYPCLQDNPKALEAVWDYAYNIGIGYLGTNTPIDHCFVCGFQGDFEPTEEGFKCPECGNSNPDKCNVTKRTCGYLGSPVQRPMVHGRHEEIAHRVKHMSGETGRVTLDDGTTREWFEETK

SEQ ID NO: 8923 - protein, 707 aa, Haemophilus somnus 129PT
  unsure (1)..(707): unsure at all Xaa locations
MGSFFVIKRDGSRAEFEIQRIINAIKKAASAVNIQDEMFCHKIGQLVCDDIFAHHQKEIDISRIQEIVENHLMGSQYPQVARAYIEYRHERDLAREKRSNLTKEIEGLIQQSNVELLXXXXXXXXXXXXXXXXXXXXXXXXXXXXXXXXXXXXXXXXXXXXXXXXXXXXXXXXXXXXXXXXXXXXXXXGFKMGNAEIEPPKSIGTATAVTAQIIAQVASHIYGGTTVNRIDEVLAPYVQLSYEKHLKTAALWQIPDPKAYADSLIQKECFDAFQSLEYEVNTLHTANGQTPFVTFGFGLGISWQERLIQKAILQNRIRGLGKNHKTPVFPKLVFTIKKGVNQNSGDPNYDIKQLALECASKRMYPDILNYDQVVKVTGSFKAPMGCRSFLGAYEENNELVHDGRNNLGVVSLNLPRIALEAKGDEQQFYTLLEARLDLAKKALMTRIARLENTKARVAPILYMEGACGVRLKADDNVAQIFKNGRASISLGYIGIHETINALFGGKHIYDDTKLRKKGIEIVSFLSEKVKHWKAETGYAFSLYSTPSENLCDRFCRLDTKQFGVVDGVTDKGYYTNSYHLDVEKKVNPYDKLDFEMPYPPLASGGFICYGEYPNIQHNLKALEDVWDYSYERVPYYGTNTPIDECYECGFTGEFSCTSKGFTCPKCGNHDSEKVSVTRRVCGYLGSPDARPFNAGKQEEVKRRVKHL

SEQ ID NO: 8924 - protein, 802 aa, Bifidobacterium longum NCC2705
MGAQVLEETVTDNETKVAAKASTVLVEKRDGRVVDFDPINIISAVKSAFGDLNKEVGPEEDAMIRGFANQVEGEIKGRYTGPAKIEDIQNLVEHALIDAHLYDVARAYTNYRLDKDIQRAKATDVNEAVARFINHDPTLIHENANKDSNVYSTQRDLLAGAVSKAAAFNMLPPAVSNAHMKGDIHFHDADYSPFTAQSNCSLPNFWDMLANGFTLGNAPMASPKSIAIAATQITQIMKDVASSQYGGQTANRADEHLAQYAKKDYEKFLEEARETIPDGMPVEFARRQVESAKKNEPAKLHFGSREPLPMDTPFHTDVDELEQEREILAKIRTRKAIYDAMQTMEYQINSNRVSNGQTPFVTVGFGLGTDWFSREVQRAILLNRIRGLGKEHHTAIFPKLVFTVKHGVNADPGDPNYDLKQLALESATKRMYPDVVFYENIVKITGSFKAPMGCRSFLQGWINPETGKDEEDGRMNLGVVTVNVPRIAIESHGDKARFWKLFDERMEVAHQALQFRIMRCKEATPVNAPTLFRFGAFGRLGANDNVDQLFKNERATVSLGYIGLAETTAVFYGKNWIRDHGWDPEGKEFALSIVKRMNELCKQWSKAEGYHYSVYSTPAESLTDRFNRMDREKFGRIEGVTDHDFYTNSFHYPVWLQPTPMEKLSYEKDFPYYASGGFINYCEYPCLQDNPKALEAVWDYAYNIGIGYLGTNTPIDHCFVCGFQGDFEPTEEGFKCPECGNSNPDKCNVTKRTCGYLGSPVQRPMVHGRHEEIAHRVKHMSGETGRVTLDDGTTREWFEETK

SEQ ID NO: 8925 - protein, 723 aa, Streptococcus agalactiae 2603V/R
MTESDIKVIKRDGRLVSFDKYKIYTALLKASNKVIKMSPLVEAKLEMIADHVIAEIYNRFKDNIKIYEIQNIVEHKLLEANEYAIAQEYINYRTQRDFERSQATDINFSIGKLINKDQTVVNENANKDSDVFNTQRDLTAGIVGKSIGLKMLPSHVANAHQKGDIHYHDLDYSPYTPMTNCCLIDFKGMLANGFKIGNAEVESPKSIQTATAQISQIIANVASSQYGGCTADRIDEFLAPYAQLNYQKHLKDAKEWVIEDKQEDYARAKTQKDIYDAMQSLEYEINTLFTSNGQTPFTSLGFGLGTNWFEREIQKAILKIRIQGLGSEHRTAIFPKLIFTLKKGLNLEEDSPNYDIKQLALECATKRMYPDVLSYDKIIDLTGSFKAPMGCRSFLQGWRDANGQDVTSGRMNLGVVTVNLPRVAMESNGDMDKFWEIFNERMSIARDALVYRVERVKEAIPANAPILYQYGAFGERLGKYDNVDRLFNHRRATVSLGYIGLYEVASVFYGGDWEDNHQAKAFTVDIVRKMKQLCADWSDEYDYHFSVYSTPSESLTDRFCRLDTEKFGIVTDITDKEYYTNSFHYDVRKNPTPFEKLDFEKIYPETGASGGFIHYCEYPVLQQNPKALEAVWDYAYDRVGYLGTNTPIDKCYQCQFEGDFTPTDRGFTCPNCGNSDPKTVDVVKRTCGYLGNPQARPMVNGRHKEISARVKHMNGSSIKNQGN

SEQ ID NO: 8926 - protein, 728 aa, Fusobacterium nucleatum subsp. vincentii ATCC 49256
MKRVIKRDGSVVEFDKSRIINAIKKTFEQASREPNMKLIEKIASQVEDLPDKVLAVEQIQDIVVKKLMGSSEKDIAMSYQSYRTLKAEIREKEKGIYRQIGELVDASNEKLLSENANKDAKTISVQRDLLAGISSRDYYLNKIVPEHIKLAHIKGEIHLHDLDYLLFRETNCELVNIETMLRGGCNIGNAKMLEPNSVDVAVGHIVQIIASVSSNTYGGCSIPYLDRALVRYIKKTFKKHFLRGVKYIDDLNEEQIEELKKQDLEYLNEEIKNKYPKTYEYSVDMTEESVKQAMQGLEYEINSLSTVNGQTPFTTIGIGTETSWEGRLVQKYVLKTRMAGFGAKKETAIFPKIVYAMCEGLNLNEGDPNWDISQLAFECMTKSIYPDILFITPEQLKNETVVYPMGCRAFLSLWKDENGKEKYAGRFNIGATSINLPRIAIKNRGDEEGFYKELDRILEICKDNCLFRARYLENTVAEMAPILWMSGALAEKKPKDTIKDLIWGGYSTVSIGYIGLSEVSQLLYGKDFSESEEVYQKTFNILKYIADKVLEYKEKYNLGFALYGTPSESLCDRFARIDKQEFGDIKGITDKGYYDNSFHVSSRINMSPFEKLRLEALGHKYSAGGHISYIETDSLTKNLDAIPDILRYAKSVGIHYMGINQPVDKCHICGYKGEFTATKEGFTCPQCGNHDSNEMSVIRRVCGYLSQPNARPFNKGKQEEIMHRVKHS

SEQ ID NO: 8927 - protein, 734 aa, Streptococcus mutans UA159
MIALEKENIFVKPDVIVIKRDGRHVAFDKDKIYQAIVRASNQVTELTPFIEAKLSGIADRVVAEIYERFTENIKIYEIQNIVEHELLQAGEYVIAQEYINYRAKRDFERSQATDINFTIDKLINKDQAVVNENANKDSDVFNTQRDLTAGIVGKSIGLKMLPEHVANAHLKGDIHFHDLDYSPYTPMTNCCLIDFKGMLHSGFKIGNAEVESPKSIQTATAQISQIIANVASSQYGGCSADRIDETLAPYAELNYQKHLKDAEKWVSEDKREDYAREKTKKDIYDAMQSLEYEINTLFTSNGQTPFTSLGFGLGKDWFEREIQKAILNIRIKGLGSEHRTAIFPKLIFTLKRGLNLEPGTPNYDIKKLALECATKRMYPDMLSYEKIIELTGSFKVPMGCRSFLQGWKDENGVEVNSGRMNLGVVTVNLPRIALESNGNIDKFWDIFKEKMAIAKDALVYRVERVKEATPANAPILYQYGAFGKRLGKDDSVDELFKERRATVSLGYIGLYEVATVFYGGNWESNPVAKDFTIDIVRQMKDLCGKWSNEYDYHFSVYSTPSESLTDRFCRLDTEKFGIIKDITDKEYYTNSFHYDVRKNPTPFEKLDFEKDYPDAGATGGFIHYCEYPVLQQNPKALEAVWDYAYDRVGYLGTNTPIDHCYKCDFEGDFTPTERGFMCPNCGNTDPKTADVVKRTCGYLGNPQARPMVNGRHKEISARVKHMNGSTIKNPGHKA

SEQ ID NO: 8928 - protein, 732 aa, Streptococcus agalactiae NEM316
MMVLERERFMTESDIKVIKRDGRLVSFDKYKIYTALLKASNKVIKMSPLVEAKLEMIADHVIAEIYNRFKDNIKIYEIQNIVEHKLLEANEYAIAQEYINYRTQRDFERSQATDINFSIGKLINKDQTVVNENANKDSDVFNTQRDLTAGIVGKSIGLKMLPSHVANAHQKGDIHYHDLDYSPYTPMTNCCLIDFKGMLANGFKIGNAEVESPKSIQTATAQISQIIANVASSQYGGCTADRIDEFLAPYAQLNYQKHLKDAKEWVIEDKQEDYARAKTQKDIYDAMQSLEYEINTLFTSNGQTPFTSLGFGLGTNWFEREIQKAILKIRIQGLGSEHRTAIFPKLIFTLKKGLNLEEDSPNYDIKQLALECATKRMYPDVLSYDKIIDLTGSFKAPMGCRSFLQGWRDANGQDVTSGRMNLGVVTVNLPRVAMESNGDMDKFWEIFNERMSIARDALVYRVERVKEAIPANAPILYQYGAFGERLGKYDNVDRLFNHRRATVSLGYIGLYEVASVFYGGDWEDNHQAKAFTVDIVRKMKQLCADWSDEYDYHFSVYSTPSESLTDRFCRLDTEKFGIVTDITDKEYYTNSFHYDVRKNPTPFEKLDFEKIYPETGASGGFIHYCEYPVLQQNPKALEAVWDYAYDRVGYLGTNTPIDKCYQCQFEGDFTPTDRGFTCPNCGNSDPKTVDVVKRTCGYLGNPQARPMVNGRHKEISARVKHMNGSSIKNQGN

SEQ ID NO: 8929 - protein, 705 aa, Shewanella oneidensis MR-1
MPVVIKRDGCRTPFDETRIRDAVIAAANSVGIEDTDYAATVAACVSARVANMAEVEIHHLQDVVENLLMEGPYKSLARVYIEYRHDRDICRDATSKLNLEIRGLVEQSNAALLNENANKDSKVIPTQRDLLAGIVAKHYAKSHILPKDVVAAHEMGEIHYHDLDYSPFFPMFNCMLIDLAGMLTHGFKMGNAEIETPKSISTATAVTAQIIAQVASHIYGGTTINRIDEVLAPFVAKSYDKHYQVALNWQIKDAKAYATAQTEKECHDAFQSLEYEVNTLHTANGQTPFVTFGFGLGTSWESRLIQQSMLKVRMAGLGKNRKTAVFPKLVFAIRDGINHKVGDCNYDVKQLALKCATMRMYPDILNYEQVEKVTGSFKTPMGCRSFLGSYKENGELVHEGRNNLGVVSLNLPRVALEAKGDEAEFYRILDERLLLARRALDTRIERLNGVKARVAPILYMEGACGVRLRADDDIAQIFKNGRASISLGYIGLHETINALYGTETHVFDNAQLREKAVAIVAYLKAATDAWKAETGYGFSLYSTPSESLCSRFCKLDARQFGVVTGVTDKGYYTNSFHLDVEKRVNPYDKIDFEQPYPAIANGGFICYGEYPNMQHNIEALENVWDYSYSRVPYYGTNTPIDECYDCGFTGEFSCTSKGFTCPKCGNHEPSRVSVTRRVCGYLGSPDARPFNHGKQEEVKRRIKHL

SEQ ID NO: 8930 - protein, 712 aa, Yersinia pestis CO92
MKTVVIKRDGCQVPFDEVRIKEAVERAALAVGVVDADYCATVARVVAQTMENQPKVDIREIQNAVENQLMAGQYKQLARAYIEYRHDRDISRELRGRLNQEIQGLVEQSNKALLNENANKDSKVIPTQRDLLAGIVAKHYAKQHLLPRDVVLAHERGEIHYHDLDYAPFFPMFNCMLIDLEGMLTQGFKMGNAEIEPPKSISTATAVTAQIIAQVASHIYGGTTINRIDEVLAPFVTESFNKHKAVAEEWQIPDVAGYAMSRTEKECYDAFQSLEYEVNTLHTANGQTPFVTFGFGLGTSWQSRMIQQAILRNRIAGLGKNRKTAVFPKLVFAIRDGLNHKFGDANYDIKQLALECATKRMYPDILNYDQVVKVTGSFKTPMGCRSFLGVYEEEGQQIHDGRNNLGVISLNLPRIALEAKGDENQFWQLLDERLLIAKKALMTRIARLEGIKARVAPILYMEGACGVRLQADDNIAEIFKNGRASISLGYIGIHETINALFGHQTHLFDDQKLREKAIAIVAHLKQATDDWKDETGYAFSLYSTPSENLCDRFCRLDTAEFGVVEGVTDKGYYTNSFHLDVEKKVNPYDKLDFEAPYPPLANGGFICYGEYPNLQHNIRALEDVWDYSYSRVPYYGTNTPIDECYECGFTGEFSCTSKGFTCPKCGNHEPSKVSVTRRVCGYLGSPDARPFNAGKQEEVKRRVKHLANGQLG

SEQ ID NO: 8931 - protein, 706 aa, Vibrio vulnificus CMCP6
MKPIVIKRDGSRAPFSRDRIQAAVEAAAENVDKEIAIYALNVALAVELQLKDHDEVHIHEIQTRVENELMQGPYKSLARAYIEYRHDRDIAREKQSTLTREIEGLIEESNVDLINENANKDGKVIPTQRDLLAGIVAKHYAKTHILPRDVVQAHDEGDIHYHDLDYAPFFPMFNCMLIDLKGMLTHGFKMGNAEIDTPKSISTATAVTAQIIAQVASHIYGGTTINRIDEILEPYVNASYEKHLKIAQEWDIHNPEGFAIARTEKECYDAFQSLEYEVNTLHTANGQTPFVTFGFGLGTSWASKLIQQSILKNRIAGLGKNRKTAVFPKLVFAIKDGLNHKPTDPNYDIKQLALECASKRMYPDILNYDKVVEITGSFKTPMGCRSFLGTYEENGELIHEGRNNLGVVSLNLPRIALKANGDEEKFYALLDEKLKLARRALETRISRLENVKARVAPILYMEGACGVRLKADQPIADIFKHGRASISLGYIGIHETINALFGNQTHVYDDNELREKALNIVKRMKKAVEAWSEETGYGFSLYGTPSENLCSRFCRIDTKEFGVIEGVTDKGYYTNSFHLDVEKKVNPYDKIDFEMPYPEISSGGFICYGEFPNMQKNIEALENVWDYSYSKVPYYGTNTPIDECYECGYTGEFDCTSKGFTCPKCGNHDSSKVSVTRRVCGYLGSPDARPFNFGKQEEVKRRVKHL

SEQ ID NO: 8932 - protein, 740 aa, Lactobacillus plantarum WCFS1
MLTTTTNDILDQLRPLTVTKRGGAQTKFHPYKIDFVLRRLLATDDEVRVVKQALVAQYQDADNIDTRELRSTMMQILNAQGLTAAAKAYQDYFEAEQQRFAAATNVQGRIEKLFERDASVVHENANKDSTIFNTQRDLEAGAASRAMGLKMLPDVVAKAHLRGDIHWHDLDYSPVTPETNCCLIDFDGMFKNGYKIGNAEVASPRSIQTATAQMAQIIANVASLQYGGCSANRVDQLLAPYAAINYQKHMTDAKKWVPADQREAYAKAKTKKDIYDAMQALEYEINTLYSSQGQTPFTTVNFGLGTSWIEREIQKAILQIRIKGLGKEHRTAIFPKLIFTMKRGLNLSPNDPNYDIKMLAIECSTKRMYPDLLMYDKIKELTGSFKTPMGCRSFLQGWRDENGVEVNSGRMNLGVVTVNLPRIALAAHGDQQLFWEIFEERMATCHEALAYRIERTKEAKPENAPLLYMYGAFGKRLPAGGNVDELFKNQRATISLGYIGIYEVCTTFFGPNWEQDEHALAFAETVVKALRDKCAQWAAESGYHYSLYSTPAESLTDTFCRDDIAKFGRIADITDKEYYTNSFHYDVRKHPTPFDKLTLEERFPQYASGGFIHYCEYPNLTQNPKALEAVWDWAYDHVGYLGTNTSIDQCFKCGFKGEFKATARGFVCPECGNHDPKYCDVVKRTCGYLGNPQQRPMVHGRHVEIASRAKNMSPEMIKNAARYERTKQSDAQRMAGRGLK

SEQ ID NO: 8933 - protein, 706 aa, Vibrio parahaemolyticus RIMD 2210633
MKPIVIKRDGSRAPFNRDRIQAAVEAAAENKDKDVAIYALNVALAVELQLKDHDEVHIHEIQDLVENELMQGPYKALARSYIEYRHDRDIAREKQSALTREIEGLIEESNLDLINENANKDGKVIPTQRDLLAGIVAKHYAKTHILPRDVVQAHEVGDIHYHDLDYAPFFPMFNCMLIDLKGMLTHGFKMGNAEIDTPKSISTATAVTAQIIAQVASHIYGGTTINRIDEVLAPYVMTSYEKHLEIAKEWNIAEPEEFAKARTEKECYDAFQSLEYEVNTLHTANGQTPFVTFGFGLGTSWASRLIQQSILKNRIAGLGKNRKTAVFPKLVFGIKDGLNHKAEDPNYDIKKLALECASKRMYPDILNYDKVVEVTGSFKTPMGCRSFLGTYEEDGELIHEGRNNLGVVSLNLPRIALRAKGSEAKFYELLDDRLRLARKALETRISRLENVKARVAPILYMEGACGVRLKADDSIAEIFKNGRASISLGYIGVHETINALFGIEAHVYDDAVLREKAVAIIKHLKDAVNQWADETGYGFSLYATPSENLCSRFCRIDTKEFGLIEGVTDKGYYTNSFHLDVEKKVNPYDKIDFEMPYPEISSGGFICYGEFPNMQRNVEALENVWDYSYTRVPYYGTNTPIDECYECGYTGEFECTSKGFTCPSCGNHDSTKVSVTRRVCGYLGSPDARPFNFGKQEEVKRRVKHL

SEQ ID NO: 8934 - protein, 727 aa, Enterococcus faecalis V583
MMKITDEKAEDVNLSTIKVVKRDGRLVTFDDQKIYDALIKAEQKIHDQVTPLTHQKVQSIVADVNREIAERFTNNVKIYEIQNIVEHTLLSNNEYALAEEYIHYRTQRDFERSKATDINVSIGKLINKDQTVVNENANKDSDVFNTQRDLTAGIVGKSIGLKMLPSHVANAHQKGDIHYHDLDYHPYTPMTNCCLIDFKGMLNNGFKIGNADVESPKSIQTATAQISQIIANVASSQYGGCSADRIDELLAPFAERNYEKHLADAQEWIEGEERQKAFARKKTKKDIFDAMQSLEYEINTLFTSNGQTPFTSLGFGLGTNWFEREIQRAILQIRINGLGIEKRTAIFPKLIFTIKRGVNAQPTDPNYDIKQLALECATKRMYPDVLNYDKIVELTGSFKVPMGCRSFLQGWKDEQGEEVNVGRMNLGVVTLNLPRIALEAQGSQEKFWQILNERLAIVKDALVYRVERVKEAKPANAPILYMYGAFGKRLATQDAVDELFKNKRATVSLGYIGLYEVASAFYGGAWEDNQEAKNFTLDILKELKKNADNWGNEYGYHFSVYSTPSESLTDRFCRLDTEKFGIVENITDKEYYTNSFHYDVRKNPTPFEKLDFEKDYPKYCSGGFIHYCEYPMLQQNPKALEAVWDYAYDKVGYLGTNTPIDHCYACGFEGDFHPTERGFECPECGNHDPKTCDVVKRTCGYLGNPQARPMVHGRHKEISSRVKHLKN

SEQ ID NO: 8935 - protein, 797 aa, Bacteroides thetaiotaomicron VPI-5482
MNYAEICIIKRDGKREDFSISKIKNAIGKAFSATGIQNEQQLIADVTMSVISQFTNPTITVEEIQDLVEKALMKVRPEVAKKYIIYREWRNTERDKKTQMKHVMDGIVAIDKNDVNLSNANMSSHTPAGQMMTFASEVTKDYTYKYLLPKRFAEAHQLGDVHIHDLDYYPTKTTTCIQYDMDDLFERGFRTKNGSIRTPQSIQSYATLATIIFQTNQNEQHGGQAIPAFDFFMAKGVAKSFRKHLASFINFYVAMENGTQADEKAIRTLIKEHLPSIKSTEAERETLRIALIALQIIIDKEHLTRIAEKAYQQTKKDTHQAMEGFIHNLNTMHSRGGNQVVFSSINYGTDTSAEGRLVIEELLKATIEGLGTRGEVPVFPIQIFKVKDGVSYSEKDFEKAMKAENIEDAMRGTYEAPNFDLLLRACQTTSKALFPNFMFLDTPFNKNEKWKADDPKRYIYELATMGCRTRVFENVAGEKSSLGRGNLSFTTLNMPRLAIEARIKAENLIEGERNKDAIEQKAKEIFMESVRNMATLVADQLYERYQYQRTALARQFPFMMGNDVWKGGGALNPNEQVGDALRSGTLGIGFIGGHNAMVALYGEGHGHSQKAWDTLYEAVMEMNKVVDEYKEKYNLNYSVLATPAEGLSGRFTKIDRRKYGKIPGVTDRDYYVNSFHVDVKEPISITEKIRCEAPFHAITRGGHITYVELDGEAQKNVRAIAKIVKVMHDEGIGYGSINHPVDTCHNCGYKGVIFDKCPVCQSENILRMRRITGYLTGDLSSWNSAKRAEEKDRVKHL

SEQ ID NO: 8936 - protein, 618 aa, Bacillus cereus ATCC 14579
MLQNNTRGEELMKVFETIVHGNEQDLMQENANVDGRSPMGVMGTFASESAKYYAVENLLSDQVKKAINENILYPHDLDFYATGTTTCSQIPLAQMLANGFHTGHGHMRQPQDIKSALALSSIIFQANQNMQHGGQSFALFDIDLAPYVRKTIERHKKRLQSYPLKKEQIEEFAWKETENDTYQACEAFVHNSNSMHSRGGGQVPFISINYGTDTSKEGRMLIKQLLKATQAGLGKGETPIFPIQIFKMKKGVNFEESDPNYDLFELALETTAERLFPNFSFLDAPFNAVHYDGRPESEVCYMGCRTRVMSNIHGEETAIGRGNLSFTSINLVKLALISGSKEAFFEALNYYLDLGIKQLLERYAYQCTKRARDFQFLYSQGVWRGGETLQPEDSVASILKQGTLSIGFIGLAECLVALTGKHHGEDEESWKLGYEIISFMRDRMDKATEEHQLNFSVIATPAEGLSGKFVKKDRKEFGVISGITNHNYYTNSFHIPVYYNIQAINKIRLEGPFHALCNGGHITYIELDGAAMHNKKALKQIVQAMAEHGVGYGSINHPVDRCKCCSYHGVIGNECPSCGNEDEANIERIRRITGYLVGDMSKWNSAKRSEEIDRVKHK

SEQ ID NO: 8937 - protein, 713 aa, Mycoplasma penetrans
MLMYTNEQLIIIKKDNTKQSFDPNKIKTAVSKSAVRVMVNFTEQDLDKIVNNVLDKIRQSEYSEIHISLMHNLVEKSLEELYPAVAKSYKDYRNYKQDFIHMLDDVYKRSQSIMYIGDKENSNSDSALVSTKRSLIFNELNKALYKKFFLTTDELQAFNDGYIYIHDSSARRDTMNCCLFDLANVLKGGFEMGNIWYNEPKTLSSAFNVIGDVVLSTAAQQYGGFTLPEIDKILGKYAKLSYEKYLNKYLSLGLNYDKAQEVALSDLENDFTQGWQGIEYKFNTVGSSRGDYPFIAITIGLGTDQFSKMAAKTCLQVRAKGQGEEGKKRPVLFPKIVFLYDENLHGENKVNEDLFEEGVLCSSKTMYPDWLSLTGEGYVCDIYKKYKEVISPMGCRAFLSPWYEKGGMYPLDETDKPVYVGRFNIGAISLHLPMILEKSRKENKDFHETLDYYLEMIRQLHIRTYNYLGEMRASTNPLAYCQGGFYGGNLKPNEKIKPILKTCTASFGFTALNELQMLYNNKTLVEDGEFAIKTLEYINEKVLSFKNEDKILYAIYATPAESLCGLQVEQFRSKYGIVEGVSDKPYVSNSFHCHVTEDITPIQKQDLEKRFWNLSNGGKIQYVKYPINYNVGAIKSLIKRAMKMGFYEGVNLSLSYCGDCGHQELNMNKCPQCSSTNLTKIERMNGYLSYSRVSGDTRLNDAKMAEIAERKSM

SEQ ID NO: 8938 - protein, 256 aa, Desulfitobacterium hafniense
TRVTVPPLRSADVGPYKQLARAYIEYRHDRDSQREKRGRLNQEIRGLVEQTNSALLNENANKDSKVIPTQRDLLAGIVAKHYARQHLLPHDVVMAHERGVIHYHDLDYSPFFPMFNCMLIDLKGMLTQGFKMGNAEIEPPKSISTATAVTAQIIAQVASHIYGGTTINRIDEVLAPFVTESFNKHRKIAEEWHIPDAEGYARSRTEKECYDAFQSLEYEVNTLHTANGQTPFVTFGFGLGTSWESRLIQQSILRNR

SEQ ID NO: 8939 - protein, 120 aa, Enterobacteria phage RB49
IAGAVSKQIAKTVLPEHIYKAHVDGDIHYHDMDYAPAMPFTNCCLVNLKDMLENGFKLGSSQIESPKSIGVACAVTAQIIAQVASHQYGGTTIANIDEVLAPYVKKTYHKHLADAEPTES

SEQ ID NO: 8940 - protein, 712 aa, Escherichia coli
MTPHVMKRDGCKVPFKSERIKEAILRAAKAAEVDDADYCATVAAVVSEQMQGRNQVDINEIQTAVENQLMSGPYKQLARAYIEYRHDRDIEREKRGRLNQEIRGLVEQTNASLLNENANKDSKVIPTQRDLLAGIVAKHYARQHLLPRDVVQAHERGDIHYHDLDYSPFFPMFNCMLIDLKGMLTQGFKMGNAEIEPPKSISTATAVTAQIIAQVASHIYGGTTINRIDEVLAPFVTASYNKHRKTAEEWNIPDAERYANSRTIKECYDAFQSLEYEVNTLHTANGQTPFVTFGFGLGTSWESRLIQESILRNRIAGLGKNRKTAVFPKLVFAIRDGLNHKKGDPNYDIKQLALECASKRMYPDILNYDQVVKVTGSFKTPMGCRSFLGVWENENGEQIHDGRNNLGVISLNLPRIALEPKGDEATFWKLLDERLVLARKALMTRIARLEGVKARVAPILYMEGACGVRLNADDDVSEIFKNGRASISLGYIGIHETINALFGGEHVYDNEQLRAKGIAIVERLRQAVDQWKEETGYGFSLYSTPSENLCDRFCRLDTAEFGVVPGVTDKGYYTNSFHLDVEKKVNPYDKIDFEAPYPPLANGGFICYGEYPNIQHNLKALEDVWDYSYQHVPYYGTNTPIDECYECGFTGEFECTSKGFTCPKCGNHDASRVSVTRRVCGYLGSPDARPFNAGKQEEVKRRVKHLGNGQIG

SEQ ID NO: 8941 - protein, 229 aa, Escherichia coli
MTPHVMKRDGCKVPFKSERIKEAILRAAKAAEVDDADYCATVAAVVSEQMQGRNQVDINEIQTAVENQLMSGPYKQLARAYIEYRHDRDIEREKRGRLNQEIRGLVEQTNASLLNENANKDSKVIPTQRDLLAGIVAKHYARQHLLPRDVVQAHERGDIHYHDLDYSPFFPMFNCMLIDLKGMLTQGFKMGNAEIEPPKSISTATAVTAQIIAQVASHIYGGTTINRID

SEQ ID NO: 8942 - protein, 706 aa, Vibrio cholerae
MKPIVIKRDGSKAPFNRDRIQAAVESAAEHADQEIAIYALNVALAVELKLRDYDEVHITEIQTLVENELMQGPYKALARSYIEYRHDRDVAREKQSKLTKEIEGLIQESNADLLNENANKDGKVIPTQRDLLAGIVAKHYAKTRILPRDVVQAHESGDIHYHDLDYAPFFPMFNCMLIDLKGMLTHGFKMGNAEIDTPKSISTATAVTAQIIAQVASHIYGGTTINRIDEVLAPYVTASYEKHLEIAREWDIHSPEAFAKARTEKECYDAFQSLEYEVNTLHTANGQTPFVTFGFGLGTSWESRLIQQSILKNRIAGLGKNRKTAVFPKLVFAIKDGLNHKTEDPNYDIKQLALECASKRMYPDILNYDKVVEVTGSFKTPMGCRSFLNPYEENGELIHEGRNNLGVVSLNLPRIALQAKGDINKFYALLDDKLKLARRALDTRINRLENVKARVAPILYMEGACGVRLKANDSIADIFKHGRASISLGYIGVHETIMALFGQQKHVYDDVQLREEAVKIIQHLRNAVEQWKKETGYAFSLYGTPSENLCSRFCRIDAKQFGVVEGVTDKGYYTNSFHLDVQKKVNPYDKIDFEMPYPEISSGGFICYGEFPNMQRNVEALENVWDYSYHRVPYYGTNTPIDECYECGFTGEFDCTSKGFVCPRCGNHEPTKVSVTRRVCGYLGSPDARPFNVGKQEEVKRRVKHL

SEQ ID NO: 8943 - protein, 707 aa, Haemophilus influenzae Rd
MSNFGVIKRDGSRAEFEIQRIINAIKKAASAVNISDEFYCHQIGQEVGNEIFTRHQGEIDINQIQKIVEDKLMASRYPEVARAYIEYRHDRDLAREKRSQLTKEIEGLIEQSNVELLNENANKDAKVIPTQRDLLAGIVAKHYAKHNILPRDVVEAHEKGEIHYHDLDYAPFFPMFNCMLVDLEGMLSRGFKMGNAEIEPPKSIGTATAVTAQIIAQVASHIYGGTTINRIDEVLSPYVQISYEKHLKHAQEWNVPDVEGYAKALIEKECFDAFQSLEYEVNTLHTSNGQTPFVTFGFGLGTSWQSRLIQQAILKNRIRGLGKNHKTPVFPKLVFTIKKGLNQNKGDPNYDIKQLALECASKRMYPDILNYDQVVKVTGSFKAPMGCRSFLGAYEEKGHEIHDGRNNLGVVSLNLPRIALESKNEEDFYRTLDERLAIAKKALMTRIARLENTKARVAPILYMEGACGVRLKADENVAQIFKNGRASISLGYIGIHETINALYNKGHIFDDEQLREKGIAIVRHLSEAVKRWQKETGYAFSLYSTPSENLCDRFCRLDTKKFGVIEGVTDKGYYTNSYHLDVEKKVNPYDKLDFEMTYPPLASGGFICYGEYPNIQHNLKALEDVWDYSYDRVPYYGTNTPIDECYECGFTGEFECTSKGFVCPKCGNHDSTKVSVTRRVCGYLGSPDARPFNAGKQEEVKRRVKHL

SEQ ID NO: 8944 - protein, 713 aa, Pasteurella multocida
MATFFVIKRDGSRTGFEIQRIINAIKKAAQAVNIEDERYCHTMGQQVCNDIFTRYQQEIDISHIQKIVENTLMAGKYPEIARAYIEYRHDRDLAREKRSQLTKEIEGLIQQSNVELLNENANKDAKVIPTQRDLLAGIVAKHYAKRYILPRDVVDAHEKGEIHYHDLDYAPFFPMFNCMLVDLKGMLSNGFKMGNAEIEPPKSITTATAVSAQIIAQVASHIYGGTTINRIDEILAPYVQLSYEKHLKNAAEWKVPEPEAYAKALIEKECFDAFQSLEYEVNTLHTSNGQTPFVTFGFGLGTTWQSRLIQRSILKNRIRGLGKNHKTPVFPKLVFTIKKGINHSPSDPNYDIKQLALECASKRMYPDILNYDQVVKVTGSFKAPMGCRSFLGAYQEQGQEIHDGRNNLGVVSLNLPRIAIEANATNSAQSAVEFYKILDQRLAIAKKALMTRIARLEHTKARVAPILYMEGACGVRLKADDNVAQIFKNGRASISLGYIGIHETINALYGDKHIYDDEQLRQKGIEIVEYLHETVQRWKQETGYAFSLYSTPSENLCDRFCRLDTKQFGLIEGVTDKGYYTNSYHLDVEKKVNPYDKIDFELPYPPFASGGFICYGEYPNVQHNLKALEDVWDYSYDRVPYYGTNTPIDECYECGFSGEFECTSKGFTCPKCGNHDSEKVSVTRRVCGYLGSPDARPFNAGKQEEVKRRVKHL

SEQ ID NO: 8945 - protein, 712 aa, Escherichia coli K12
MTPHVMKRDGCKVPFKSERIKEAILRAAKAAEVDDADYCATVAAVVSEQMQGRNQVDINEIQTAVENQLMSGPYKQLARAYIEYRHDRDIEREKRGRLNQEIRGLVEQTNASLLNENANKDSKVIPTQRDLLAGIVAKHYARQHLLPRDVVQAHERGDIHYHDLDYSPFFPMFNCMLIDLKGMLTQGFKMGNAEIEPPKSISTATAVTAQIIAQVASHIYGGTTINRIDEVLAPFVTASYNKHRKTAEEWNIPDAEGYANSRTIKECYDAFQSLEYEVNTLHTANGQTPFVTFGFGLGTSWESRLIQESILRNRIAGLGKNRKTAVFPKLVFAIRDGLNHKKGDPNYDIKQLALECASKRMYPDILNYDQVVKVTGSFKTPMGCRSFLGVWENENGEQIHDGRNNLGVISLNLPRIALEAKGDEATFWKLLDERLVLARKALMTRIARLEGVKARVAPILYMEGACGVRLNADDDVSEIFKNGRASISLGYIGIHETINALFGGEHVYDNEQLRAKGIAIVERLRQAVDQWKEETGYGFSLYSTPSENLCDRFCRLDTAEFGVVPGVTDKGYYTNSFHLDVEKKVNPYDKIDFEAPYPPLANGGFICYGEYPNIQHNLKALEDVWDYSYQHVPYYGTNTPIDECYECGFTGEFECTSKGFTCPKCGNHDASRVSVTRRVCGYLGSPDARPFNAGKQEEVKRRVKHLGNGQIG

SEQ ID NO: 8946 - protein, 712 aa, Salmonella enterica subsp. enterica serovar Typhi
MTPHVMKRDGCKVPFKSERIKEAILRAAKAAGVDDADYCATVAEVVSSQMNARSQVDINEIQTAVENQLMSGPYKQLARAYIEYRHDRDIQREKRGRLNQEIRGLVEQTNSALLNENANKDSKVIPTQRDLLAGIVAKHYARQHLLPRDVVQAHERGDIHYHDLDYSPFFPMFNCMLIDLKGMLTQGFKMGNAEIEPPKSISTATAVTAQIIAQVASHIYGGTTINRIDEVLAPFVTESYNKHRKTADEWQIPDAEGYARSRTEKECYDAFQSLEYEVNTLHTANGQTPFVTFGFGLGTSWESRLIQASILRNRIAGLGKNRKTAVFPKLVFAIRDGLNHKFGDPNYDIKQLALECASKRMYPDILNYDQVVKVTGSFKTPMGCRSFLGVWENENGEQIHDGRNNLGVISLNLPRIALEAKGDETAFWKLLDERLALARKALMTRIARLEGVKARVAPILYMEGACGVRLKADDDVSEIFKNGRASISLGYIGIHETINALFGGEHLYDSEQLRAKGIAIVERLRQAVDQWKDETGYGFSLYSTPSENLCDRFCRLDTAEFGVVPGVTDKGYYTNSFHLDVEKKVNPYDKISFEAPYPPLANGGFICYGEYPNIQHNLKALEDVWDYSYQHVPYYGTNTPIDECYECGFTGEFECTSKGFTCPKCGNHDAARVSVTRRVCGYLGSPDARPFNAGKQEEVKRRVKHLGNGQIG

SEQ ID NO: 8947 - protein, 712 aa, Salmonella typhimurium LT2
MTPHVMKRDGCKVPFKSERIKEAILRAAKAAGVDDADYCATVAEVVSSQMNARSQVDINEIQTAVENQLMSGPYKQLARAYIEYRHDRDIQREKRGRLNQEIRGLVEQTNSALLNENANKDSKVIPTQRDLLAGIVAKHYARQHLLPRDVVQAHERGDIHYHDLDYSPFFPMFNCMLIDLKGMLTQGFKMGNAEIEPPKSISTATAVTAQIIAQVASHIYGGTTINRIDEVLAPFVTESYNKHRKTADEWQIPDAEGYARSRTEKECYDAFQSLEYEVNTLHTANGQTPFVTFGFGLGTSWESRLIQASILRNRIAGLGKNRKTAVFPKLVFAIRDGLNHKFGDPNYDIKQLALECASKRMYPDILNYDQVVKVTGSFKTPMGCRSFLGVWENENGEQIHDGRNNLGVISLNLPRIALEAKGDETAFWKLLDERLALARKALMTRIARLEGVKARVAPILYMEGACGVRLKADDDVSEIFKNGRASISLGYIGIHETINALFGGEHLYDSEQLRAKGIAIVERLRQAVDQWKDETGYGFSLYSTPSENLCDRFCRLDTAEFGVVPGVTDKGYYTNSFHLDVEKKVNPYDKIDFEAPYPPLANGGFICYGEYPNIQHNLKALEDVWDYSYQHVPYYGTNTPIDECYECGFTGEFECTSKGFTCPKCGNHDAARVSVTRRVCGYLGSPDARPFNAGKQEEVKRRVKHLGNGQIG

SEQ ID NO: 8948 - protein, 190 aa, Mus musculus
METQVLTPHVYWAQRHRELYLRVELSDVQNPAISITDNVLHFKAQGHGAKGDNVYEFHLEFLDLVKPEPAYRLTQRQVNITVQKKGSHWWERLTKQEKRPLFLAPDFDRWLDESDAEMELRAKEEERLNKLRLEREGSPETLTNLRKGYLFMYNLVQLLGFSWIFVNLTVRFFILGKESFYDTFHNVADM

SEQ ID NO: 8949 - protein, 185 aa, Giardia lamblia ATCC 50803
MHHPTIYWAQRKDVVYMRLSVSSATDVKFKIAEETIHFACKSGGNDYACKLTLFAPINPDESKYKVTGPCIESILQKKEASDEFWTSLTKTKLPYVRIDWDRWVDEGEDENTAGALPNPNDMDFASMMKNMGGGMPGLDGMNFDPSNFKMPEGADFGDEEDDDNKDEEDGPDEEKKESGEEKAEE

SEQ ID NO: 8950 - protein, 276 aa, Plasmodium falciparum 3D7
MQKLYPIVLWAQKKECLYLTIELQDIENVKIDLKEDKLYFYGTKDKNEYEFTLNFLKPINVEESKYSTQRNIKFKIIKKEQERWKTLNNDGKKHWVKCDWNSWVDTDEEDKANDYDDMGMNSFGGMGGMPDMSQFGNMGGLGNMGGLGNMGGLGNMGGLGNMGGLGNMGGLGNMGGLGNMGGMGDLDFSKLGNMGGDMPNFAGLGGMDQFKNMPNMNNMNDDDSSSYGDDTSDEEDDDDEEDEDVEVDNKTLDSDKLKDEENKIPDAAVEVQEPVA

SEQ ID NO: 8951 - protein, 178 aa, Brassica napus
MSRHPTVKWAQRSDWVYITVELPDAEDVKLKLEPEGKFFFSATSGASKTLYEVDLDLLDSVDVNESKASVSSRSVFYLVKKAESKWWNRLTKPEGKHPLYLKVDWDKWVDEDDEDKGGEGDMDFGDFDFNGLNMGDTDEIGEEVAEEDGDGEGETAAETKEKKIDGEKDEEGVNAKKD

SEQ ID NO: 8952 - protein, 174 aa, Glycine max
  unsure (1)..(174): unsure at all Xaa locations
MSRHPEVKWAQRLDKVYITVQLADSKNAKVDLTPDGIFTFSGSAGAEDHQYELKLELFDKVNVEESKINVGVRSIFCVVQKAEDGWWKRLLRGEGKPPHYVKVDWDKWVDEDEDDGNNGEVDLGGMDFSKFGGMGADAMGAMGGMGAGAMGGMDFSKXXGGMGGKGGRSRXKTX

SEQ ID NO: 8953 - protein, 160 aa, Glycine max
  unsure (1)..(160): unsure at all Xaa locations
ISSHFAPCHSKTSQNPRSPHSPPPPPPPPVPSKXSRHPEVRWAQRIDKVYITVQLPDAKDAKVKLEPDGVFSFFATAGTDGNSYESKLDLNDKVNVEASKVSVGVRSIFCILEKADAKWWNKLVHDQKAPHFVKVDWDKWVDEDDDGADVNVDGMDFSNX

SEQ ID NO: 8954 - protein, 210 aa, Glycine max
  unsure (1)..(210): unsure at all Xaa locations
MSRHPEVKWAQRLDKVYITVQLADSKNAKVDLTPDGIFTFSGSAGAEDHQYELKLELFDKVNVEESKINVGERSIFIVVQKAEDGWWKRLLRGEGKTPHYVKVDWDKWVDEDEDEGNTGEVDLGGMDFSKFGGMGADAMGGMDAMGGMGGMDFSKXXGGMGGLMQWMTLMRVTMKSKKCQSLLNKMQARGRPRKKRLLQAHNVVAIKTLP

SEQ ID NO: 8955 - protein, 175 aa, Glycine max
  unsure (1)..(175): unsure at all Xaa locations
MSRHPEVKWAQRLDKVYITVQLADSKNAKVDLTPDGIFTFSGSAGAEDHQYELKLELFDKVNVEESKINVGERSIFIVVQKAEDGWWKRLLRGEGKTPHYVKVDWDKWVDEDEDEGNTGEVDLGGMDFSKFGGMGADAMGGMDAMGGMGGMDFSKXXGGMGFIGIMSPVXLFSXK

SEQ ID NO: 8956 - protein, 128 aa, Glycine max
  unsure (1)..(128): unsure at all Xaa locations
XPPTPENLTKTLAPHNPPSPTPPPVPAASRXSRHPEVKWAQRIDKVYITVQLPDAKDAKVNLEPDGVFTFSGSVGTNLYELKLDLNDKVNVEASKISVGVRSIFCIVEKAEAKWWKKLVRDDQRAPHX

SEQ ID NO: 8957 - protein, 157 aa, Glycine max
  unsure (1)..(157): unsure at all Xaa locations
MSRHPEVKWAQRLDKVYITVQLADSKNAKVDLTPDGIFTFSGSAGAEDHQYELKLELFDKVNVEESKINVGVRSIFCVVQKAEDGWWKRLLRGEGKPPHYVKVDWDKFVXVEWVMQWMTLMRVMMKSKKCQSLLNRMLARHQQRKKRLLQAHDAVAV

SEQ ID NO: 8958 - protein, 179 aa, Lycopersicon esculentum
MSRHPTIKWAQMSDKLFITVELPDAKNVKLKLEPEGKFLFSATAGADNVPYEVDLDLFDKINVDESKSSTTSRSIVYLVKKAEDKWWSRLVKQEGLRPVFLKVDWDKWVDEDEEDSKPEPDMDFGDMDFSKLNMGEGPSNFDVDVPEGDDDSDTEEIEEEENSEPKAAVPPSTEPGVKA

SEQ ID NO: 8959 - protein, 235 aa, Oryza sativa
  unsure (1)..(235): unsure at all Xaa locations
MSRHPEVKWAQRIDKVYITVQLADAKDAKVNLEPEGVFSFSATAGTDGNLYESKLELNDKVNVEESKISVGVRSIFCIVEKAEAKWWKKLVRDDQKAPHFVKVDWDKWVDEDDDGADVNVDGMDFSNFGGMGGMGGMGGMGDMMGGMGGMGGMGGMAEMMGGMGGMGGMGGMGGMDEFEDESDDEEEVSKPQDAEKAAEAGKSQESDAKAETSXSNRRPLYIIPFSVASRLLWIW

SEQ ID NO: 8960 - protein, 186 aa, Schizosaccharomyces pombe
MSLNTQIPEVLWAQRSNKDDAEKNVIYLTVLIPDAVDPKINLTPEKLVIDSKSGANAHYAVQIDFFKDIDVEKSKYSVTGRYIFFVLYKKELQEEFWPRLTKEKLRLHWLRTDFDRWVDEDEQEAQPEVSPFGAGGMPDLSALGGMGGMDFSQFGNLGGAGAGEDASDSEPELEEEEEVGSNEKKE

SEQ ID NO: 8961 - protein, 216 aa, Saccharomyces cerevisiae
MSDKVINPQVAWAQRSSTTDPERNYVLITVSIADCDAPELTIKPSYIELKAQSKPHVGDENVHHYQLHIDLYKEIIPEKTMHKVANGQHYFLKLYKKDLESEYWPRLTKEKVKYPYIKTDFDKWVDEDEQDEVEAEGNDAAQGMDFSQMMGGAGGAGGAGGMDFSQMMGGAGGAGSPDMAQLQQLLAQSGGNLDMGDFKENDEEDEEEEIEPEVKA

SEQ ID NO: 8962 - protein, 465 aa, Neurospora crassa
MASTVTPEVRWAQRSSATDPENNFIYLTISVPDVPTSNLKLDLKPTGLVFTGHSDTLKKTYHVELEFYAEIDPAASQVHHTARDVEMKLRKKELDAHYWPRLLKEPKKVHFLKTDFDKWVDEDEQHEAAEDDFSNFGGMEGMGGMPGMGGMNGMGGMGGDFGGIDFSKLGGAGLPGGDDEEDSDDDMPPLEGEGEADKAEEAKDAKETVDTSKEAAEPSIPNLHHSNVHPSPSVYSRSSFLHHFRKRDAVLSSEAADPSHWYPIVVRLPEAARREYRKPILRCLAFSKISGLFSGRGHDLQSYSGSLDQSYGECLSNGRFHLPPPIADVASSPAMRHADIATMPPRCRAAQCSVLTPRRSTQLLSVPSPWKSLEHFTARILNRYTDLAPFEKANLSRCSGEPSSHHYHRLRLDLERNKLQQIFLTHPKLRTTYGKKWWTTAGVDCIITENGHKRCEVLEELSVAV

SEQ ID NO: 8963 - protein, 216 aa, Neurospora crassa
MASTVTPEVRWAQRSSATDPENNFIYLTISVPDVPTSNLKLDLKPTGLVFTGHSDTLKKTYHVELEFYAEIDPAASQVHHTARDVEMKLRKKELDAHYWPRLLKEPKKVHFLKTDFDKWVDEDEQHEAAEDDFSNFGGMEGMGGMPGMGGMNGMGGMGGDFGGIDFSKLGGAGLPGGDDEEDSDDDMPPLEGEGEADKAEEAKDAKETVDTSKEAA

SEQ ID NO: 8964 - protein, 145 aa, Plasmodium berghei
TTEYDDMAMNSFGGMGGLPDMSQFGGMGGMGGMGGMGGMGGLGGMGGMGGMGGMGDIDFSKLGNMGGDMSNLAGLGGMDQFKNMPNMNDDDSSSYGDDSSDDDDEDDDTNKSDADHSHACNDAKCNIDKDGAIHNDDAKVQEPVA

SEQ ID NO: 8965 - protein, 195 aa, Plasmodium falciparum
RNIKFKIIKKEQERWKTLNNDGKKHWVKCDWNSWVDTDEEDKANDYDDMGMNSFGGMGGMPDMSQFGNMGGLGNMGGLGNMGGLGNMGGLGNMGGLGNMGGMGDLDFSKLGNMGGDMPNFAGLGGMDQFKNMPNMNNMNDDDSSSYGDDTSDEEDDDDEEDEDVEVDNKTLDSDKLKDEENKIPDAAVEVQEPVA

SEQ ID NO: 8966 - protein, 175 aa, Caenorhabditis elegans
MAKQPTVLWAQRESLVYLTIEVDEAKIEELKGEGNKLHFQGSSKTDKYEATLEFFDEIDPASVKHTGSSTRVVEITVQKKTPAWWPRLLQNKGKVHWLKVDFGKWKDEDEDDEAEDAGAGIGGGMANGFDLNQYMSQMGGAGGADFGGLEDDEEDDDMPDLEDNEEEEGKNGTRA

SEQ ID NO: 8967 - protein, 256 aa, Plasmodium yoelii yoelii
LFPIVLWAQKKECLYLTIELQDAEDVKIDLKEDSLYFYGTKEKNEYEFTLNFLKPINVEESKYTTKRNIKFKIIKKEKERWKSINNDGKKHWIKCDWNSWVDTDEEDKTTEYDDMAMNSFGGMGGLPDMSQFGGMGGMGGMGGMGGLGGMGGMGGLGGMGGMGGMGDIDFSKLGNMGGDMSNLAGLGGMDQFKNMPNMNDDDSSSYGDDSSDDDDEDDDTNKSDADHSHACNDAKCNIDKEGAIHNDDAKVQEPVA

SEQ ID NO: 8968 - protein, 123 aa, Streptomyces coelicolor A3(2)
MSIDKPEVDFPGGEPPADLEIKDIWEGDGPVAEAGQTVTVHYVGVTFSTGEEFDASWNRGAPFRFPLGGGRVIKGWDQGVQGMKVGGRRQLTIPAHLAYGDQSPAPAIPPGSTLIFVVDLLGV

SEQ ID NO: 8969 - protein, 335 aa, Streptomyces coelicolor A3(2)
MRRRSLLIAVPTGLVTLAACGDSDDSGSSSNASESPSPDASATSAAPPPKIVDGPLPAITAGTKFDEKPTVAKGSGEPSKDLAVKTVIAGGGKAVAENDFVSANYLGQVWQSAKVFDNSYDRKTPLVIQLAQGSIIDGWRYALTGKKTGSRVQFSVPPTWGYGEQGNEQAGIKGDDTLVFVVDVQDTFNAKSSAQGKKVAQDDAALPKVGTNTDGKAPSIEVPKADAPKKLVAEYVLEGDGAEVGAQDSVLVQYKGVLWDGGKEFDSTYGRKQLTSFSLQQVVKGWAQGLTGKKVGSRVLIVIPPDLGYGDSPPEGSGIEKDSTLVFSVDILAKM

SEQ ID NO: 8970 - protein, 458 aa, Mus musculus
MTAEEMKAAENGAQSAPLPLEGVDISPKQDEGVLKVIKREGTGTETPMIGDRVFVHYTGWLLDGTKFDSSLDRKDKFSFDLGKGEVIKAWDIAVATMKVGEVCHITCKPEYAYGAAGSPPKIPPNATLVFEVELFEFKGEDLTEEEDGGIIRRIRTRGEGYARPNDGAMVEVALEGYHKDRLFDQRELCFEVGEGESLDLPCGLEEAIQRMEKGEHSIVYLKPSYAFGSVGKERFQIPPHAELRYEVRLKSFEKAKESWEMSSAEKLEQSNIVKERGTAYFKEGKYKQALLQYKKIVSWLEYESSFSGEEMQKVRALRLASHLNLAMCHLKLQAFSAAIESCNKALELDSNNEKGLFRRGEAHLAVNDFDLARADFQKVLQLYPSNKAAKTQLAVCQQRTRRQLAREKKLYANMFERLAEEEHKVKAEVAAGDHPTDAEMKGERNNVAENQSRVETEA

SEQ ID NO: 8971 - protein, 458 aa, Mus musculus
MTAEEMKAAENGAQSAPLPLEGVDISPKQDEGVLKVIKREGTGTETPMIGDRVFVHYTGWLLDGTKFDSSLDRKDKFSFDLGKGEVIKAWDIAVATMKVGEVCHITCKPEYAYGAAGSPPKIPPNATLVFEVELFEFKGEDLTEEEDGGIIRRIRTRGEGYARPNDGAMVEVALEGYHKDRLFDQRELCFEVGEGESLDLPCGLEEAIQRMEKGEHSIVYLKPSYAFGSVGKERFQIPPHAELRYEVRLKSFEKAKESWEMSSAEKLEQSNIVKERGTAYFKEGKYKQALLQYKKIVSWLEYESSFSGEEMQKVHALRLASHLNLAMCHLKLQAFSAAIESCNKALELDSNNEKGLFRRGEAHLAVNDFDLARADFQKVLQLYPSNKAAKTQLAVCQQRTRRQLAREKKLYANMFERLAEEEHKVKAEVAAGDHPTDAEMKGERNNVAENQSRVETEA

SEQ ID NO: 8972 - protein, 456 aa, Mus musculus
MTTDEGTSNNGENPAATMTEQGEDITTKKDRGVLKIVKRVGTSDEAPMFGDKVYVHYKGMLSDGKKFDSSHDRKKPFAFSLGQGQVIKAWDIGVSTMKKGEICHLLCKPEYAYGSAGHLQKIPSNATLFFEIELLDFKGEDLFEDSGVIRRIKRKGEGYSNPNEGATVKVHLEGCCGGRTFDCRDVVFVVGEGEDHDIPIGIDKALVKMQREEQCILYLGPRYGFGEAGKPKFGIDPNAELMYEVTLKSFEKAKESWEMDTKEKLTQAAIVKEKGTVYFKGGKYTQAVIQYRKIVSWLEMEYGLSEKESKASESFLLAAFLNLAMCYLKLREYNKAVECCDKALGLDSANEKGLYRRGEAQLLMNDFESAKGDFEKVLAVNPQNRAARLQISMCQRKAKEHNERDRRVYANMFKKFAERDAKEEASKAGSKKAVEGAAGKQHESQAMEEGKAKGHV

SEQ ID NO: 8973 - protein, 453 aa, Mus musculus
HEAAENGAQSAPLPLEGVDISPKQDEGVLKVIKREGTGTETPMIGDRVFVHYTGWLLDGTKFDSSLDRKDKFSFDLGKGEVIKAWDIAVATMKVGEVCHITCKPEYAYGAAGSPPKIPPNATLVFEVELFEFKGEDLTEEEDGGIIRRIRLGVKAMQGPNDGAMVEVALEGYHKDRLFDQRELCFEVGEGESLDLPCAWRRPFSAWRKESIPSCTSNLAMLLAVWGRRGSRSHRTAELRYEVRLKSFEKAKESWEMSSARSWSRATYVKERGTAYFKEGKYKQALLQYKKIVSWLEYESSFSGEEMQKVHALRLASHLNLAMCHLKLQAFSAAIESCNKALELDSNNEKGLFRRGEAHLAVNDFDLARADFQKVLQLYPSNKAAKTQLAVCQQRTRRQLAREKKLYANMFERLAEEEHKVKAEVAAGDHPTDAEMKGERNNVAENQSRVETEA

SEQ ID NO: 8974 - protein, 519 aa, Mus musculus
MIGDRVFVHYTGWLLDGTKFDSSLDRKDKFSFDLGKGEVIKAWDIAVATMKVGEVCHITCKPEYAYGAAGSPPKIPPNATLVFEVELFEFKGEDLTEEEDGGIIRRIRLGVKAMQGPNDGAMVEVALEGYHKDRLFDQRELCFEVGEGESLDLPCAWRRPFSAWRKESIPSCTSNLAMLLAVWGRRGSRSHRTAELRYEVRLKSFEKAKESWEMSSARSWSRATYVKERGTAYFKEGKYKQALLQYKKIVSWLEYESSFSGEEMQKVHALRLASHLNLAMCHLKLQAFSAAIESCNKALELDSNNEKGLFRRGEAHLAVNDFDLARADFQKVLQLYPSNKAAKTQLAVCQQRTRRQLAREKKLYANMFERLAEEEHKVKAEVAAGDHPTDAERKSLPRVWPPMDTKMQSLPTTHPHPHSSSRPQSHTSNQCNQCTCSHHCRSCSQAGHAGSSSSPSPGPPMKHPKPSVHSRHSPARPSHRGSCPKNRKTFEGKVSKRKAVRRRKRTHRAKRRSSGRRYK

SEQ ID NO: 8975 - protein, 411 aa, Mus musculus
MIGDRVFVHYTGWLLDGTKFDSSLDRKDKFSFDLGKGEVIKAWDIAVATMKVGEVCHITCKPEYAYGAAGSPPKIPPNATLVFEVELFEFKGEDLTEEEDGGIIRRIRLGVKAMQGPNDGAMVEVALEGYHKDRLFDQRELCFEVGEGESLDLPCAWRRPFSAWRKESIPSCTSNLAMLLAVWGRRGSRSHRTAELRYEVRLKSFEKAKESWEMSSARSWSRATYVKERGTAYFKEGKYKQALLQYKKIVSWLEYESSFSGEEMQKVHALRLASHLNLAMCHLKLQAFSAAIESCNKALELDSNNEKGLFRRGEAHLAVNDFDLARADFQKVLQLYPSNKAAKTQLAVCQQRTRRQLAREKKLYANMFERLAEEEHKVKAEVAAGDHPTDAEMKGERNNVAENQSRVETEA

SEQ ID NO: 8976 - protein, 570 aa, Mus musculus
MALGARGWRRRSLLLLLLWVTGQAAPVLGLAVSSELQIQQSFVPDECPRTVHSGDFVRYHYVGTFLDGQKFDSSYDRDSTFNVFVGKGQLIAGMDQALVGMCVNERRLVTIPPNLAYGSEGVSGVIPPNSVLHFDVLLVDIWNSEDQVHIQTYFKPPSCPRTIQVSDFVRYHYNGTFLDGTLFDSSHNRMKTYDTYVGIGWLIPGMDKGLLGMCVGEKRIITVPPFLAYGEEGDGKDIPGQASLVFDVALLDLHNPKDTISIENKVVPENCERRSQSGDFLRYHYNGTLLDGTLFDSSYSRNHTFDTYIGQGYVIPGMDEGLLGVCIGERRRIVVPPHLGYGEKGRGSIPGSAVLVFDIHVIDFHNPSDSISITSHYKPPDCSVLSKKGDYLKYHYNASLLDGTLLDSTWNLGKTYNIVLGSGQVVLGMDMGLREMCVGEKRTVIIPPHLGYGEAGVDGEVPGSAVLVFDIELLELVSGLPEGYMFIWNGEVSPNLFEEIDRDGNGEVLLEEFSEYIHAQVATGKGKLAPGFNAEMIVKNMFTNQDRSGDGKVTAEEFKLKDQEAKHDEL

SEQ ID NO: 8977 - protein, 570 aa, Mus musculus
MALGARGWRRRSLLLLLLWVTGQAAPVLGLAVSSELQIQRSFVPDECPRTVHSGDFVRYHYVGTFLDGQKFDSSYDRDSTFNVFVGKGQLIAGMDQALVGMCVNERRLVTIPPNLAYGSEGVSGVIPPNSVLHFDVLLVDIWNSEDQVQIQTYFKPPSCPRTIQVSDFVRYHYNGTFLDGTLFDSSHNRMKTYDTYVGIGWLIPGMDKGLLGMCVGEKRIITVPPFLAYGEEGDGKDIPGQASLVFDVALLDLHNPKDTISIENKVVPENCERRSQSGDFLRYHYNGTLLDGTLFDSSYSRNHTFDTYIGQGYVIPGMDEGLLGVCIGERRRIVVPPHLGYGEKGRGSIPGSAVLVFDIHVIDFHNPSDSISITSHYKPPDCSVLSKKGDYLKYHYNASLLDGTLLDSTWNLGKTYNIVLGSGQVVLGMDMGLREMCVGEKRTVIIPPHLGYGEAGVDGEVPGSAVLVFDIELLELVSGLPEGYMFIWNGEVSPNLFEEIDRDGNGEVLLEEFSEYIHAQVATGKGKLAPGFNAEMIVKNMFTNQDRNGDGKVTAEEFKLKDQEAKHDEL

SEQ ID NO: 8978 - protein, 570 aa, Mus musculus
MALGARGWRRRSLLLLLLWVTGQAAPVLGLAVSSELQIQQSFVPDECPRTVHSGDFVRYHYVGTFLDGQKFDSSYDRDSTFNVFVGKGQLIAGMDQALVGMCVNERRLVTIPPNLAYGSEGVSGVIPPNSVLHFDVLLVDIWNSEDQVHIQTYFKPPSCPRTIQVSDFVRYHYNGTFLDGTLFDSSHNRMKTYDTYVGIGWLIPGMDKGLLGMCVGEKRIITVPPFLAYGEEGDGKDIPGQASLVFDVALLDLHNPKDTISIENKVVPENCERRSQSGDFLRYHYNGTLLDGTLFDSSYSRNHTFDTYIGQGYVIPGMDEGLLGVCIGERRRIVVPPHLGYGEKGRGSIPGSAVLVFDIHVIDFHNPSDSISITSHYKPPDCSVLSKKGDYLKYHYNASLLDGTLLDSTWNLGKTYNIVLGSGQVVLGMDMGLREMCVGEKRTVIIPPHLGYGEAGVDGEVPGSAVLVFDIELLELVSGLPEGYMFIWNGEVSPNLFEEIDRDGNGEVLLEEFSEYIHAQVATGKGKLAPGFNAEMIVKNMFTNQDRNGDGKVTAEEFKLKDQEAKHDEL

SEQ ID NO: 8979 - protein, 570 aa, Mus musculus
MALGARGWRRRSLLLLLLWVTGQAAPVLGLAVSSELQIQQSFVPDECPRTVHSGDFVRYHYVGTFLDGQKFDSSYDRDSTFNVFVGKGQLIAGMDQALVGMCVNERRLVTIPPNLAYGSEGVSGVIPPNSVLHFDVLLVDIWNSEDQVHIQTYFKPPSCPRTIQVSDFVRYHYNGTFLDGTLFDSSHNRMKTYDTYVGIGWLIPGMDKGLLGMCVGEKRIITVPPFLAYGEEGNGEDIPGQASLVFDVALLDLHNPKDTISIENKVVPENCERRSQSGDFLRYHYNGTLLDGTLFDSSYSRNHTFDTYIGQGYVIPGMDEGLLGVCIGERRRIVVPPHLGYGEKGRGSIPASAVLVFDIHFIDVHNPSDSISITSHYNPPDCSVLIKKGDYLKYHYNASLLDGTLLDSTWNLGKTYNIVLGSGQVVLGMDMGLREMCVGEKRTVIIPPHLGYGEAGVDGEVPGSAVLVFDIELLDLVSGLPEGYMFIWNGEVSPNLFEEIDRDGNGEVLLEEFSEYIHAQVATGKGKLAPGFNAEMIVKNMFTNQDRNGNGKVTAEEFKLKDQEAKHDEL

SEQ ID NO: 8980 - protein, 416 aa, Mus musculus
KPPSCPRTIQVSDFVRYHYNGTFLDGTLFDSSHNRMKTYDTYVGIGWLIPGMDKGLLGMCVGEKRIITVPPFLAYGEEGDGKDIPGQASLVFDVALLDLHNPKDTISIENKVVPENCERRSQSGDFLRYHYNGTLLDGTLFDSSYSRNHTFDTYIGQGYVIPGMDESLLGVCIGERRRIVVPPHLGYGEKGRGSIPGSTVLVFDIHVIDFHNPSDSISITSHYKPPDCSVLSKKGDYLKYHYNASLLDGTLLDSTWNLGKTYNIVLGSGQVVLGMDMGLREMCVGEKRTVIIPPHLGYGEAGVDGEVPGSAVLVFDIELLELVSGLPEGYMFIWNGEVSPNLFEEIDRDGNGEVLLEEFSEYIHAQVATGKGKLAPGFNAEMIVKNMFTNQDRNGDGKVTAEEFKLKDQEAKHDEL

SEQ ID NO: 8981 - protein, 581 aa, Mus musculus
MFLVGSSSHTLHRLRILPLLLLLQTLERGLGRASPAGAPLEDVVIERYHIPRACPREVQMGDFVRYHYNGTFEDGKKFDSSYDRSTLVAIVVGVGRLITGMDRGLMGMCVNERRRLIVPPHLGYGSIGVAGLIPPDATLYFDVVLLDVWNKADTVQSTILLRPPYCPRMVQNSDFVRYHYNGTLLDGTAFDNSYSRGGTYDTYIGSGWLIKGMDQGLLGMCPGEKRKIIIPPFLAYGEKGYGTVIPPQASLVFYVLLLDVHNPKDTVQLETLELPQGCVRRAVAGDFMRYHYNGSLMDGTLFDSSYSRNHTYNTYVGQGYIIPGMDQGLQGACIGERRRITVPPHLAYGENGTGDKIPGSAVLIFDVHVIDFHNPSDPVEIKTLSRPPENCNETSKIGDFIRYHYNCSLLDGTRLFSSHDYEAPQEITLGANKVIEGLDRGLQGMCVGERRQLIVPPHLAHGENGARGVPGSAVLLFEVELVSREDGLPTGYLFVWYQDPSTSLFEDMDLNKDGEVPPEEFSSFIKAQVNEGKGRLMPGQDPDKTISDMFQNQDRNQDGKITAEELKLKSDEDQERVHEEL

SEQ ID NO: 8982 - protein, 581 aa, Mus musculus
MFLVGSSSHTLHRVRILPLLLLLQTLERGLGRASPAGAPLEDVVIERYHIPRACPREVQMGDFVRYHYNGTFEDGKKFDSSYDRSTLVAIVVGVGRLITGMDRGLMGMCVNERRRLIVPPHLGYGSIGVAGLIPPDATLYFDVVLLDVWNKADTVQSTILLRPPYCPRMVQNSDFVRYHYNGTLLDGTGFDNSYSRGGTYDTYIGSGWLIKGMDQGLLGMCPGEKRKIIIPPFLAYGEKGYGTVIPPQASLVFYVLLLDVHNPKDTVQLETLELPQGCVRRAVAGDFMRYHYNGSLMDGTLFDSSYSRNHTYNTYVGQGYIIPGMDQGLQGACIGERRRITVPPHLAYGENGTGDKIPGSAVLIFDVHVIDFHNPSDPVEIKTLSRPPENCNETSKIGDFIRYHYNCSLLDGTRLFSSHDYEAPQEITLGANKVIEGLDRGLQGMCVGERRQLIVPPHLAHGENGARGVPGSAVLLFEVELVSREDGLPTGYLFVWYQDPSTSLFEDMDLNKDGEVPPEEFSSFIKAQVNEGKGRLMPGQDPDKTISDMFQNQDRNQDGKITAEELKLKSDEDQERVHEEL

SEQ ID NO: 8983 - protein, 356 aa, Mus musculus
MGQPTVEEAEQPGALAREFLAATEPEPAPAPAPEEWLDILGNGLLRMKTLVPGPKGSSRPLKGQVVTVHLQMSLENGTRVQEEPELAFTLGDCDVIQALDLSVPLMDVGETAMVTADSKYCYGPQGSRSPYIPPHAALCLEVTLKTAEDGPDLEMLSGQERVALANRKRECGNAHYQRADFVLAANSYDLAIKAITSNTKVDMTCEEEEELLQLKVKCLNNLAASQLKLDHYRAALRSCSQVLEHQPDNIKALFRKGKVLAQQGEYSEAIPILRAALKLEPSNKTIHAELSKLVKKRAAQRSTETALYRKMLGNPSRLPAKCPGKGAWSIPWKWLFGATAVALGGVALSVVIAARN

SEQ ID NO: 8984 - protein, 356 aa, Mus musculus
MGQPTVEEAEQPGALAREFLAATEPEPAPAPAPEEWLDILGNGLLRMKTLVPGPKGSSRPLKGQVVTVHLQMSLENGTRVQEEPELAFTLGDCDVIQALDLSVPLMDVGETAMVTADSKYCYAPQGSRSPYIPPHAALCLEVTLKTAEDGPDLEMLSGQERVALANRKRECGNAHYQRADFVLAANSYDLAIKAITSNTKVDMTCEEEEELLQLKVKCLNNLAASQLKLDHYRAALRSCSQVLEHQPDNIKALFRKGKVLAQQGEYSEAIPILRAALKLEPSNKTIHAELSKLVKKRAAQRSTETALYRKMLGNPSRLPAKCPGKGAWSIPWKWLFGATAVALGGVALSVVIAARN

SEQ ID NO: 8985 - protein, 355 aa, Mus musculus
MGQPTVEEAEQPGALAREFLAATEPEPAPAPAPEEWLDILGNGLLRMKTLVPGPKGSSRPLKGQVVTVHLQMSLENGTRVQEEPELAFTLGDCDVIQALDLSVPLMDVGETAMVTADSKYCYGPQGRSPYIPPHAALCLEVTLKTAEDGPDLEMLSGQERVALANRKRECGNAHYQRADFVLAANSYDLAIKAITSNTKVDMTCEEEEELLQLKVKCLNNLAASQLKLDHYRAALRSCSQVLEHQPDNIKALFRKGKVLAQQGEYSEAIPILRAALKLEPSNKTIHAELSKLVKKRAAQRSTETALYRKMLGNPSRLPAKCPGKGAWSIPWKWLFGATAVALGGVALSVVIAARN

SEQ ID NO: 8986 - protein, 402 aa, Mus musculus
MASWAEPSEPAALRLPGAPLLEGFEVLDGVDDAEEEDDLSGLPPLEDMGQPTVEEAEQPGALAREFLAATEPEPAPAPAPEEWLDILGNGLLRMKTLVPCPKGSSRPLKGQVVTVHLQMSLENGTRVQEEPELAFTLGDCDVIQALDLSVPLMDVGETAMVTADSKYCYGPQGRSPYIPPHAALCLEVTLKTAEDGPDLEMLSGQERVALANRKRECGNAHYQRADFVLAANSYDLAIKAITSNTKVDMTCEEEEELLQLKVKCLNNLAASQLKLDHYRAALRSCSQVLEHQPDNIKALFRKGKVLAQQGEYSEAIPILRAALKLEPSNKTIHAELSKLVKKRAAQRSTETALYRKMLGNPSRLPAKCPGKGAWSIPWKWLFGATAVALGGVALSVVIAGRN

SEQ ID NO: 8987 - protein, 355 aa, Mus musculus
MGQPTVEEAEQPGALAREFLAATEPEPAPAPAPEEWLDILGNGLLRMKTLVPCPKGSSRPLKGQVVTVHLQMSLENGTRVQEEPELAFTLGDCDVIQALDLSVPLMDVGETAMVTADSKYCYGPQGRSPYIPPHAALCLEVTLKTAEDGPDLEMLSGQERVALANRKRECGNAHYQRADFVLAANSYDLAIKAITSNTKVDMTCEEEEELLQLKVKCLNNLAASQLKLDHYRAALRSCSQVLEHQPDNIKALFRKGKVLAQQGEYSEAIPILRAALKLEPSNKTIHAELSKLVKKRAAQRSTETALYRKMLGNPSRLPAKCPGKGAWSIPWKWLFGATAVALGGVALSVVIAGRN

SEQ ID NO: 8988 - protein, 108 aa, Mus musculus
MGVEIETISPGDGRTFPKKGQICVVHYTGMLQNGKKFDSSRDRNKPFKFRIGKQEVIKGFEEGTAQMSLGQRAKLTCTPDVAYGATGHPGVIPPNATLIFDVELLSLE

SEQ ID NO: 8989 - protein, 154 aa, Mus musculus
DSSRTSSGSAVAARRRAGVPAGSAPERSRGRGSREDPLGGGACGTVMGVEIETISPGDGRTFPKKGQICVVHYTGMLQKGKKFDSSRDRNKPFKFRIGKQEVIKGFEEGTAQMSLGQRAKLTCTPDVAYGATGHPGVIPPNATLIFDVELLSLE

SEQ ID NO: 8990 - protein, 108 aa, Mus musculus
MGVQVETISPGDGRTFPKRGQTCVVHYTGMLEDGKKFDSSRDRNKPFKFTLGKQEVIRGWEEGVAQMSVGQRAKLIISSDYAYGATGHPGIIPPHATLVFDVELLKLE

SEQ ID NO: 8991 - protein, 327 aa, Mus musculus
MGGSTRDPGALEGAGILGQSPYERLSQRMLDISGDRGVLKDIIREGTGDTVTPDASVLVKYSGYLEHMDKPFDSNCFRKTPRLMKLGEDITLWGMELGLLSMRKGELARFLFKPAYAYGTLGCPPLIPPNATVLFEIELIDFLDSAESDKFCALSAEQQEQFPLQKVLKVAATEREFGNYLFRQNRFCDAKVRYKRALLLLHRRLATCEEQHLVEPAVLLVLLNLSFVYLKLDRPAMALRYGEQALLIDKRNAKALFRCGQACLLLTEYERARDFLVRAQKEQPCNHDINNELKKLSSHYRDYVDREREMCHRMFAPCGSRSSVGGN

SEQ ID NO: 8992 - protein, 327 aa, Mus musculus
MSVFSRLRNGIPPSRDDCHSPYERLSQRMLDISGDRGVLKDIIREGTGDTVTPDASVLVKYSGYLEHMDKPFDSNCFRKTPRLMKLGEDITLWGMELGLLSMRKGELARFLFKPAYAYGTLGCPPLIPPNATVLFEIELIDFLDSAESDKFCALSAEQQEQFPLQKVLKVAATEREFGNYLFRQNRFCDAKVRYKRALLLLHRRLATCEEQHLVEPAVLLVLLNLSFVYLKLDRPAMALRYGEQALLIDKRNAKALFRCGQACLLLTEYERARDFLVRAQKEQPCNHDINNELKKLSSHYRDYVDREREMCHRMFAPCGSRSSVGGN

SEQ ID NO: 8993 - protein, 327 aa, Mus musculus
MSVFSRLRNGIPPSRDDCQSPYERLSQRMLDISGDRGVLKDIIREGTGDTVTPDASVLVKYSGYLEHMDKPFDSNCFRKTPRLMKLGEDITLWGMELGLLSMRKGELARFLFKPAYAYGTLGCPPLIPPNATVLFEIELIDFLDSAESDKFCALSAEQQEQFPLQKVLKVAATEREFGNYLFRQNRFCDAKVRYKRALLLLHRRLATCEEQHLVEPAVLLVLLNLSFVYLKLDRPAMALRYGEQALLIDKRNAKALFRCGQACLLLTEYERARDFLVRAQKEQPCNHDINNELKKLSSHYRDYVDREREMCHRMFAPCGSRSSVGGN

SEQ ID NO: 8994 - protein, 458 aa, Rattus norvegicus
MTAEEMKVAENGAQSAPLPLEGVDISPKQDEGVLKVIKREGTGTETAMIGDRVFVHYTGWLLDGTKFDSSLDRKDKFSFDLGKGEVIKAWDIAVATMKVGEVCHITCKPEYAYGSAGSPPKIPPNATLVFEVELFEFKGEDLTEDEDGGIIRRIRTRGEGYARPNDGAMVEVALEGYYNDRLFDQRELCFEVGEGESLDLPCGLEEAIQRMEKGEHSIVYLKPSYAFGSVGKERFQIPPHAELRYEVHLKSFEKAKASWEMNSEEKLEQSNIVKERGTVYFKEGKYKQALLQYKKIVSWLEYESSFSGEEMQKVHALRLASHLNLAMCHLKLQAFSAAIESCNKALELDSNNEKGLFRRGEAHLAVNDFDLARADFQKVLQLYPSNKAAKTQLAVCQQRTRRQLAREKKLYANMFERLAEEEHKAKTEVAAGDHPTDAEMKGEPNNVAGNQAQVKTEA

SEQ ID NO: 8995 - protein, 402 aa, Rattus norvegicus
YTGWLLDGTKFDSSLDRKDKFSFDLGKGEVIKAWDIAVATMKVGEVCHITCKPEYAYGSAGSPPKIPPNATLVFEVELFEFKGEDLTEDEDGGIIRRIRTRGEGYARPNDGAMVEVALEGYYNDRLFDQRELCFEVGEGESLDLPCGLEEAIQRMEKGEHSIVYLKPSYAFGSVGKERFQIPPHAELRYEVHLKSFEKAKASWEMNSEEKLEQSNIVKERGTVYFKEGKYKQALLQYKKIVSWLEYESSFSGEEMQKVHALRLASHLNLAMCHLKLQAFSAAIESCNKALELDSNNEKGLFRRGEAHLAVNDFDLARADFQKVLQLYPSNKAAKTQLAVCQQRTRRQLAREKKLYANMFERLAEEEHKAKTEVAAGDHPTDAEMKGEPNNVAGNQAQVKTEA

SEQ ID NO: 8996 - protein, 108 aa, Rattus norvegicus
MGVQVETISSGDGRTFPKRGQTCVVHYTGMLEDGKKFDSSRDRNKPFKFTLGKQEVIRGWEEGVAQMSVGQRAKLIISPDYAYGATGHPGIIPPHATLVFDVELLKLE

SEQ ID NO: 8997 - protein, 108 aa, Rattus norvegicus
MGVQVETISSGDGRTFPKRGQTCVVHYTGMLEDGKKFDSSRDRNKPFKFTLGKQEVIRGWEEGVAQMSVGQRAKLIISPDYAYGATGHTGIIPPHATLVFDVELLKLE

SEQ ID NO: 8998 - protein, 108 aa, Rattus norvegicus
MGVEIETISPGDGRTFPKKGQICVVHYTGMLQNGKKFDSSRDRNKPFKFRIGKQEVIKGFEEGAAQMSLGQRAKLTCTPDVAYGATGHPGVIPPNATLIFDVELLNLE

SEQ ID NO: 8999 - protein, 165 aa, Nostoc sp. PCC 7120
MLACVVVLVLAQVGNKQDSAIAANLPQTPLATISVTENNTPIKKNIMSEASKPPVTTDSGLKYVEIEEGTGATPKSGQTVVVHYTGTLEDGTKFDSSRDRNRPFSFTIGVGQVIKGWDEGLSTMKVGGRRQLIIPSELGYGARGAGGVIPPYATLLFDVELLEVK

SEQ ID NO: 9000 - protein, 241 aa, Buchnera aphidicola str. APS (Acyrthosiphon pisum)
MILYVPKSFSISAPISDIHLQSVLETKNTFHNNNEKLGYILGLSFGNYVNQTFEKQKKIGIELDRNSLLKGIQDAISGNLKLSHQDISSGLKELEKKLKHATKIQLKKNAKENFIQGELYMKNFSKLKGVKKTSSGLLYLLERAGEGEALKDETKITVHYKGTLINGLEFDNSYKRGRPVSLRLKDVILGWKEGLKYIKKGGKIKLVIPPNLAYGTEEVNGIPANSTLIFDIELLDVVNGV

SEQ ID NO: 9001 - protein, 237 aa, Chloroflexus aurantiacus
MTTASGLQYVEIQAGDGEQPQPGAIVAVHYRGMLADGSVFDSSYERGEPIRFPLGVGMVIPGWDEGIGLMRVGGKARLIIPPHLGYGAMGYPPVIPPNATLTFDVELVEVLPGPPEAPQDLPADRYTTSASGLQYADLTVGDGATAMAGRTVTVHYTGWLTDGSMFDSSLSRGEPFVFPLGAGRVIRGWDEGVAGMRVGGRRQLIIPAALAYGNRGAGGVIPPGATLIFEVELLEVR

SEQ ID NO: 9002 - protein, 258 aa, Chlamydophila pneumoniae CWL029
MNRRWNLVLATVALALSVASCDVRSKDKDKDQGSLVEYKDNKDTNDIELSDNQKLSRTFGHLLARQLRKSEDMFFDIAEVAKGLQAELVCKSAPLTETEYEEKMAEVQKLVFEKKSKENLSLAEKFLKENSKNAGVVEVQPSKLQYKIIKEGAGKAISGKPSALLHYKGSFINGQVFSSSEGNNEPILLPLGQTIPGFALGMQGMKEGETRVLYIHPDLAYGTAGQLPPNSLLIFEINLIQASADEVAAVPQEGNQGE

SEQ ID NO: 9003 - protein, 115 aa, Ralstonia metallidurans
MQTTPSGLQFEDTVVGSGDEAKAGKHVTVHYTGWLFENGQAGRKFDSSKDRNDPFVFPLGAGHVIRGWDEGVQGMKVGGTRRLVIPADLGYGARGAGGVIPPNATLLFEVELLAV

SEQ ID NO: 9004 - protein, 131 aa, Ralstonia metallidurans
MKKLSLILAAVALGAAGIAQAETLPSGVVIEHVTKGTGASPKATDTVKVHYRGTLTDGKEFDSSYKRGQPISFPLNRVIPCWTEGVQKMQVGGKAKLTCPASTAYGERGVPGTIPPNATLNFEVELLGIGG

SEQ ID NO: 9005 - protein, 109 aa, Neisseria meningitidis MC58
MGGLIIEDLQEGFGKEAVKGKEITVHYTGWLENGTKFDSSLDRRQPLTITLGVGQVIKGWDEGFGGMKEGGKRKLTIPSEMGYGAHGAGGVIPPHATLIFEVELLKVYE

SEQ ID NO: 9006 - protein, 272 aa, Neisseria meningitidis MC58
MNTIFKISALTLSAALALSACGKKEAAPASASEPAAASSAQGDTSSIGSTMQQASYAMGVDIGRSLKQMKEQGAEIDLKVFTEAMQAVYDGKEIKMTEEQAQEVMMKFLQEQQAKAVEKHKADAKANKEKGEAFLKENAAKDGVKTTASGLQYKITKQGEGKQPTKDDIVTVEYEGRLIDGTVFDSSKANGGPVTFPLSQVIPGWTEGVQLLKEGGEATFYIPSNLAYREQGAGDKIGPNATLVFDVKLVKIGAPENAPAKQPAQVDIKKVN

SEQ ID NO: 9007 - protein, 109 aa, Neisseria meningitidis Z2491
MGSLIIEDLQEGFGKEAVKGKEITVHYTGWLENGTKFDSSLDRRQPLTITLGVGQVIKGWDEGFGGMKEGGKRKLTIPSEMGYGARGAGGVIPPHATLIFEVELLKVYE

SEQ ID NO: 9008 - protein, 272 aa, Neisseria meningitidis Z2491
MNTIFKISALTLSAALALSACGKKEAAPASASEPAAASSAQGDTSSIGSTMQQASYAMGVDIGRSLKQMKEQGAEIDLKVFTEAMQAVYDGKEIKMTEEQAQEVMMKFLQEQQAKAVEKHKADAKANKEKGEAFLKENAAKDGVKTTASGLQYKITKQGEGKQPTKDDIVTVEYEGRLIDGTVFDSSKANGGPVTFPLSQVILGWTEGVQLLKEGGEATFYIPSNLAYREQGAGDKIGPNATLVFDVKLVKIGAPENAPAKQPAQVDIKKVN

SEQ ID NO: 9009 - protein, 152 aa, Deinococcus radiodurans
MTAASYAGQLTFSTSHLSTCDPHDLHGCFTEFLASGRARYSRRMTQDLQVEKYQEGSGQPAEKGKMVSVHYTGTLENGQKFDSSRDRGQPIEFPLGVGYVIPGWDQGIAQMRVGDKARLTIPGHLAYGEAGVPGVIPPNATLIFDVELMDVR

SEQ ID NO: 9010 - protein, 112 aa, Burkholderia fungorum
MSVTTESGLKYEDIVEGTGAEAVAGKTVSVHYTGWLTDGQKFDSSKDRNDPFAFVLGGGMVIKGWDEGVQGMKVGGTRKLTIPPQLGYGVRGAGGVIPPNATLVFEVELLGV

SEQ ID NO: 9011 - protein, 270 aa, Escherichia coli O157:H7 EDL933
  unsure (1)..(270): unsure at all Xaa locations
MKSLFKVTLLATTMAVALHAPITFAAEAAKPATTADSKAAFKNDDQKSAYALGASLGRYMENSLKEQEKLGIKLDKDQLIAGVQDAFADKSKLSDQEIEQTLQAFEARVKSSAQAKMEKDAADNEAKGKEYREKFAKEKGVKTSSTGLVYQVVEAGKGEAPKDSDTVVVNYKGTLIDGKEFDNSYTRGEPLSFRLDGVIPGWTEGLKNIKKGGKIKLVIPPELAYGKAGVPGIPPNSTXVFDVELLDVKPAPKADAKPEADAKAADSAKK

SEQ ID NO: 9012 - protein, 259 aa, Escherichia coli O157:H7 EDL933
  unsure (1)..(259): unsure at all Xaa locations
MMSVVNPPLLYSYGILLLFLFPWDLSSFPRQSFTQRSVADMLPATLYPKKGNTMTTPTFDTIEAQASYGIGLQVGQQLSESGLEGLLPEALVAGIADALEGKHPAVPVDVVHRALREIHERADAVRRQRFQAMAAEGVKYLEENAKKEGVNSTESGLQFRVINQGEGAIPARTDRVRVHYTGKLIDGTVFDSSVARGEPAEFPVNGVIPGWIEALTLMPVGSKWELTIPQELAYGERGAGASIXPFSTLVFEVELLEIL

SEQ ID NO: 9013 - protein, 318 aa, Xylella fastidiosa Dixon
MKIQMRHAVVSLLVAAMSASLPAMSKQSVSVVNNQEKTVLSTEKEKVSYAIGLDIARSHVFELIAQDIDVAALQRAIENVFKGGPPLISEEVAQTTDTALRAMLAARSGQQEASGTAPPAVSKENIGLMLGSYMVGPSLLAIKDDIDLPVLLQALRTRFAKRTPLMDEQEMTTRMQAFVASKNAVVAGKNRDEGSAFLSKNKNEKGVVTTASGLQYMVLRQGSGSRPTPSNNVRVNYEGKLLSGQVFDSSYQRGQPAEFGLGQVIKGWSEGLSLMPVGSKYRFWIPADLAYGQQGTPGGPIGPDATLTFDVELLSILP

SEQ ID NO: 9014 - protein, 318 aa, Xylella fastidiosa Ann-1
MKIQMRHAVVSLLVAAMSASLPAMSKQSVSVVNNQEKTVLSTEKEKVSYAIGLDIARSHVFELIAQDIDVAALQRAIENVFKGGPPLISEEVAQTTDTALRAMLAARSGQQEASGTAPPAVSKENIGLMLGSYMVGPSLLAIKDDIDLPVLLQALRTRFAKRTPLMDEQEMTTRMQAFVASKNAVVAGKNRDEGSAFLSKNKNEKGVVTTASGLQYMVLRQGSGSRPTPSNNVRVNYEGKLLSGQVFDSSYQRGQPAEFGLAQVIKGWSEGLSLMSVGSKYRFWIPADLAYGQQGTPGGPIGPDATLTFDVELLSILP

SEQ ID NO: 9015 - protein, 142 aa, Magnetococcus sp. MC-1
RALVTEKKDSLKKDNLKEAEAFLKENGRKPGVRTTMSGLQYKELKAGTGAKPANRTAKVKVHYEGRLLDGTIFDSSYKRNEPVEFTLSQVVMGWTEGLQLMKTGSIYELYLPPHLAYGEAGRPPVIAPNKLLIFKVELLEVK

SEQ ID NO: 9016 - protein, 264 aa, Treponema pallidum
MILKKEAAGVCSFALLLLAGMSIFSCRKGAEGVSSAGEAADKKALTADQLDPRKVQEQERQKTPLSKKSVGYAFGVLMGVTLQDSKLDVDLGQVWKGLKKTVSADKDKQALADAQDVLQRAFEAYRQKEVEKNSQEAKAFLEENAKKPGVQVTSSGLQYEVVKAADGPKPQGGQRVRTQYKGTLLDGTVFDASRDKPAEFPVDGMVPGVSEGLKLMPVGSTYRFYVPSSLGYGERGIEGVIPPGALLVFEIELQEILPDSASKK

SEQ ID NO: 9017 - protein, 205 aa, Pseudomonas putida KT2440
MSELNLSTDETRVSYGIGRQLGGQLRDNPPPGVSLEAILAGLTDAFNGADSRVSEADLSASFKVIREVMQAEAAAKAEAAAAAGKEFLVENAKREGITTLASGLQFEVLTAGEGAKPTREDNVRTHYHGTLIDGTVFDSSYERGQPAEFPVGGVIAGWTEALQLMNAGSKWRLYVPSELAYGAQGVGSIPPHSVLVFDVELLDVL

SEQ ID NO: 9018 - protein, 250 aa, Pseudomonas putida KT2440
MKQHRLAAAVALVGLVLAGCDQQASSPELKTPAQKASYGIGLNMGKSLAQEGMEDLDSKAVALGIEDAVSKKEQRIKDEELVEAFTALQKRAEERLAKASEEAASAGKKFLEENAKKPGVVTTASGLQYEVVKKADGPQPKPTDVVTVHYEGKLIDGKVFDSSVERGSPIDLPVSGVIPGWVEGLQLMHVGEKYKLFIPAELAYGAQSPSPLIPANSVLVFDLELIAIKDPAQLQGAEPQAEAPEEAPAK

SEQ ID NO: 9019 - protein, 295 aa, Xylella fastidiosa 9a5c
MSKQSVSVVNNEEKTVLSTEKEKVSYAIGLDIARSHVFELIAQDIDVAALQRAIENVFKGGPPLISEEVAQTTDTALRAMLAARSGQQEASGTAPPAVSKENIGLMLGSYMVGPSLLAIKDDIDLPVLLQALRTSFAKRTPLMDEQEMTTRMQAFVASKNAAVAGKNRDEGSAFLSKNKNEKGVITTASGLQYMVLRQGSGSRPTPSNNVRVNYEGKLLSGQVFDSSYQRGQPAEFGLGQVIKGWSEGLSLMPVGSKYRFWIPADLAYGQQGTPGGPIGPDATLTFDVELLSILP

SEQ ID NO: 9020 - protein, 195 aa, Legionella drancourtii
AVLGLALSTAMAADALVTDKDKLSYSIGADLGKNFKTQGIDINPEALAKGMQDGMSGGQLILTEQQMKDVLNKFQKDLMAKRSADFNKKADENKVKGEAFLTSNKAKTGVVVLPSGLQYKILEAGTGAKPSKTDTVTVDYTGTLIDGTVFDSTQKTGKPATFQVSQVIPGWTEALQLMPAGSTWEVYVPADLAYG

SEQ ID NO: 9021 - protein, 198 aa, Legionella drancourtii
VLGLALSTAMAADALVTDKDKLSYSIGADLGKNFKTQGIDINPEALAKGMQDGMSGGQLILTEQQMKDVLNKFQKDLMAKRSADFNKKADENKVKGEAFLTSNKAKTGVVVLPSGLQYKILEAGTGAKPSKTDTVTVDYTGTLIDGTVFDSTQKTGKPATFQVSQVIPGWTEALQLMPAGSTWEVYVPADLAYGPRSV

SEQ ID NO: 9022 - protein, 122 aa, Mycobacterium smegmatis
MTSTEKPEVEFQAGPPPSELTMTDLIVGEGAEAVRGGVVDVHYVGVDYETGEEFDSSWDRGQSANFPLDRLIPGWQEGIPGMKVGGRRQLTVPPELAYGPAGAGHRLSGRTLVFVIDLLGVA

SEQ ID NO: 9023 - protein, 108 aa, Cryptococcus neoformans var. grubii
MGVTVENISAGDGKTFPQPGDNVTIHYVGTLLDGSKFDSSRDRGTPFVCRIGQGQVIRGWDEGVPQLSVGQKANLICTPDYAYGARGFPPVIPPNSTLKFEVELLKVN

SEQ ID NO: 9024 - protein, 454 aa, Anopheles gambiae str. PEST
KPYEMEEYHDLSGDGGVQKRILQEGTGDERPSKGCSVSLHYTGTLDADGKKFDSSRDRNEPFQFTLGTGSVIKAFDMGVASMRLGERCILRCAPEYAYGSSGSPPNIPPNATLNFELEILGWKGEDLSPKSDGGIQRFIVQSGSSKKRPTAGGLVKVHLVGRHEGRVFEERDVEFCLDEGKEVGVVAGVELALEKFHKEETARLLLKPQYAFGAQGNSELGVPPNATVEYTVTLTDFEALVERSMMSQDEMLAQAKLLREKGTKYLKEEKHELALKLYNRALTYLYDQSKEGEAAKLAIYLNKILCLQKLNSHDEAKVACVEALKMDSKNVKALYRRGMSNLALGDLDRALQDFSAVLEIEPENKAALNQVTICKHKIKAYNDQQKKVFANMFTKFAQSDSKKAQEEQSRQPDVMKQKFGEWGADEREHEPTRFEQENPDVIMLNDLHKQFRNM

SEQ ID NO: 9025 - protein, 232 aa, Xylella fastidiosa Temecula1
MISEEVAQTTDTALRAMLAARSGQQEASGTAPPAVSKENIGLMLGSYMVGPSLLAIKDDIDLPVLLQALRTRFAKRTPLMDEQEMTTRMQAFVASKNAVVAGKNRDEGSAFLSKNKNEKGVVTTASGLQYMVLRQGSGSRPTPSNNVRVNYEGKLLSGQVFDSSYQRGQPAEFGLGQVIKGWSEGLSLMPVGSKYRFWIPADLAYGQQGTPGGPIGPDATLTFDVELLSILP

SEQ ID NO: 9026 - protein, 109 aa, Giardia lamblia ATCC 50803
MSAQLEKKVLTPGDGVTKPQAGKKVTVHYDGRFPDGKQFDSSRSRGKPFQFTLGAGEVIKGWDQGVATMTLGEKALFTIPYQLAYGERGYPPVIPPKATLVFEVELLAV

SEQ ID NO: 9027 - protein, 338 aa, Giardia lamblia ATCC 50803
MFDNSAPEPAGEVTEVFMPTFCSDEEREIYNKFKESPETIDVKGNGAILKQVLVAGPEDAEVCPQSDATVYVHYTGKLLNGTVFDSSVTRGQPFNFDIGNMSVIRGWDEGVCGMRVGEKSLFTIASDYAYGSKGSGSIPADATLQFEIELLDVVEKDHEYPHTNEEKLAAAKVRQEAGNALFKSGKYKKAAAKYDKGTQLLEYFIDSTPEVEEERCVLRATLFGNWALCNLRMKDYADCCSHAREGMKILEEKEERASKNVELRLKLCQRVGRGAMGAGRSAEARKYIDMGLDIAKAAGQNDKVQEFENDLKKCDAQIALEARKQQDIYKRLMANMGK

SEQ ID NO: 9028 - protein, 215 aa, Giardia lamblia ATCC 50803
MWLFVSLLVAAASSCFNNPKLILKEKVLCVSYEAPAKKQCSLQAREMYKAKLEFEAKDGQQVVYHNHNAVYGAIDACFVNTDHHFTFAKGQVQFTMGNETVAVTNIEANELIYVSLAPGSGPAPSKGETVMAHYTGMYLNGTVFDTSRKRSFPFMFHLGQNEVISGWDLTFASMQAKEKGIIVVPYQYGYGEQGIPPTIPPRSTLVFEVELVQIN

SEQ ID NO: 9029 - protein, 111 aa, Giardia lamblia ATCC 50803
MSLALYKHILRHGDRRTYPQKGSSVLVHYTAAFKNGKVFDSTRFTNKPISFKVGINQTIRAWDIAIPTMSEGEHAILQVPAEFGYGPRGLFEIVPPNTDLIYDIHLVKVLH

SEQ ID NO: 9030 - protein, 279 aa, Yersinia pestis KIM
MLGVRVLKPMEKWMKSLFKVTLLATAMTLTLNTSTVFAADATSPVVTNSAFKNNDQQSAYALGASLGRYMDNSLKEQEKLGIKLDKDQLIAGVQDAFANKSKLTDEEIEKTLQNFEARVKASAQAKMEQDAKENADKGAKYRDTFAKEKGVKKTASGLLYKVENAGTGDAPKDSDTVVVNYKGTLADGTEFDNSYKRGEPLSFRLDGVIPGWTEGLKQIKKGGKITLVIPPELAYGKAGVPGIPANSTLIFDVELLDVKAAAKADAQEQQPAVDTKAKK

SEQ ID NO: 9031 - protein, 185 aa, Magnetospirillum magnetotacticum
  unsure (1)..(185): unsure at all Xaa locations
MVIAARLMPISQXEGKSSGDRARPGPGDPRRVGRPAPARAFLHPTRGNLVTDQPTLPTASGSFGEKPTLTFPETDAPSGLQVVVLTEGDGPAVTSGRNIVVHYLGQTWGGHVFDNSYDRGDTIAFPIGVGAVIGGWDKGLVGQNVGSRVLLSIPPEHGYGQRGVPQAGIGGTDTLVFVVDVVDVQ

SEQ ID NO: 9032 - protein, 160 aa, Methanosarcina acetivorans C2A
MTEETIKNPDKTIENGDTISVDYVGKLEDGTVFDTSEKEAASEAGIYNEMRDYKPLTFTVGAGQMIKGFDEGVVGMKVGEEKTLEIPPEEAYGEYMEEYVRELPRNAVNFTPETGMQLATENGLRGKVTEVGEENFVVDFNHELAGKTLIFKIKVISLEA

SEQ ID NO: 9033 - protein, 129 aa, Leptospira interrogans serovar lai str. 56601
MKFTRLIFVLAILCAVVAPTFAEDLVIKEIRIGTGKEAFSGSNVTVHYVGTLTNGKKFDSSRDRKNPFTFNLGAGEVIKGWDRGVRGMKEGGIRKLTIPPELGYGSRGAGAAIPPNSTLIFEVELLKVY

SEQ ID NO: 9034 - protein, 311 aa, Streptomyces chrysomallus
RRIAGLLVAPLLLLSAVACGSDDKASDSASSKNGVPAITAGAKFGEKPTLSKGEGDPPKELKTDVISEGDGAKLKNGDAIQVNYLGQAWDSTKPFDNSFDRKQPFDLTLGAGMVIQGWDKGLVGQKVGSRVELVIPPELGYGEQGQGDIKPNATLVFVVDILKATQIPASAKGTEVAQDNVDLPKVGVKTDGKAPTVTIPKSDPPKKLVSNYVLESDGEVVKESDSVVVNYVGMIWKGAKEFDNTYTTGKTQTFPLSQVTLKGLKNGLIDKKVGSRVLLVIPPDQAFGDQQQQAIPKNSTLVFAVDILAKV

SEQ ID NO: 9035 - protein, 312 aa, Streptomyces chrysomallus
MRRIAGLLVAPLLLLSAVACGSDDKASDSASSKNGVPAITAGAKFGEKPTLSKGEGDPPKELKTDVISEGDGAKLKNGDAIQVNYLGQAWDSTKPFDNSFDRKQPFDLTLGAGMVIQGWDKGLVGQKVGSRVELVIPPELGYGEQGQGDIKPNATLVFVVDILKATQIPASAKGTEVAQDNVDLPKVGVKTDGKAPTVTIPKSDPPKKLVSNYVLESDGEVVKESDSVVVNYVGMIWKGAKEFDNTYTTGKTQTFPLSQVTLKGLKNGLIDKKVGSRVLLVIPPDQAFGDQQQQAIPKNSTLVFAVDILAKV

SEQ ID NO: 9036 - protein, 123 aa, Streptomyces chrysomallus
SIEKPEVDFPGGEPPADLAIKDIWEGDGPVAQAGQTVSVHYVGVAFSTGEEFDASWNRGTPLQFQLGAGQVISGWDQGVQGMKVGGRRELIIPAHLAYGDRGAGGGKIAPGETLIFVCDLVAV

SEQ ID NO: 9037 - protein, 124 aa, Streptomyces chrysomallus
MSIEKPEVDFPGGEPPADLAIKDIWEGDGPVAQAGQTVSVHYVGVAFSTGEEFDASWNRGTPLQFQLGAGQVISGWDQGVQGMKVGGRRELIIPAHLAYGDRGAGGGKIAPGETLIFVCDLVAV

SEQ ID NO: 9038 - protein, 177 aa, Caulobacter crescentus CB15
MLAGRRILIEVPMHRRALLVTLAAAGVALSACGPSKKAQENLAAADAFMAKNAKEPGVVTLPQGLQYKVVREGPNGGMHPNKADEVKVHYEGKLIDGTVFDSSYERGVPAVFPLDGLVPAWVIALQRMKAGDEWILYVPPALGYGAQDKGPIPGNSVMIFRIELLDVNRIGPGKPKE

SEQ ID NO: 9039 - protein, 114 aa, Caulobacter crescentus CB15
MVSLPSGLQYKVIASGPKDGPSPKLGDIIKVNYEGKLLSGAVFDSSFARGKAAIMPADGLIRGWLEALPLMKVGDEWTLFIPPELGYGSRDMGEIPPDSTLVFRLKLEGMLSVD

SEQ ID NO: 9040 - protein, 163 aa, Methanosarcina mazei Goe1
MIVMTEDIIENSNKVVEKGDAVSVHYVGKLDDGTVFDTSEKEEAMEAGIYNEMRDYEPLKFTVGAGQMIKGFDEGVVGMKAGEEKILKIPPEEAYGEYVEEYARELPRDAVDFVPEVGMQLATETGLRGTVTEVGEENFVIDFNHALAGKTLTFKVKVISVEE

SEQ ID NO: 9041 - protein, 121 aa, Corynebacterium efficiens YS-314
MNLMEKPQIEAQTGPVPEDLVIKDLIVGDGAEAQPGGVVEVHYVGVDFETGEEFDSSWDRGQTNQFPLTGLIAGWQEGIPGMKVGGRRQLTIPPEAAYGPEGSGHPLSGRTLVFIIDLISA

SEQ ID NO: 9042 - protein, 118 aa, Corynebacterium glutamicum ATCC 13032
MEKPQIELPVGPAPEDLVISDIIVGEGAEARPGGEVEVHYVGVDFETGEEFDSSWDRGQTSQFPLNGLIAGWQEGIPGMKVGGRRQLTIPPEAAYGPEGSGHPLSGRTLVFIIDLISA

SEQ ID NO: 9043 - protein, 162 aa, Thermosynechococcus elongatus BP-1
MVKQWVHRGCGWLLCGIVLVVVWLVAAPMAIASVPLEASTEAAGLMGNPKVVTTPSGLQYEDIVVGSGAQPQVGDRVTVHYTGMLTDGRIFDSSRDRGQPFQFQIGVGQVIKGWDEGVGSMHVGGQRRLIIPPNLGYGARGVGGVIPPNATLIFDVELLGVQ

SEQ ID NO: 9044 - protein, 270 aa, Shigella flexneri 2a str. 301
MKSLFKVTLLATTMAVALHAPITFAAEAAKPATTADSKASFKNDDQKSAYALGASLGRYMENSLKEQEKLGIKLDKDQLIAGVQDAFADKSKLSDQEIEQTLQAFEARVKSSAQAKMEKDAADNEAKGKEYREKFAKEKGVKTSSTGLVYQVVEAGKGEAPKDSDTVVVNYKGTLIDGKEFDNSYTRGEPLSFRLDGVIPGWTEGLKNIKKGGKIKLVIPPELAYGKAGVPGIPPNSTLVFDVELLDVKPAPKADAKPEADAKAADSAKK

SEQ ID NO: 9045 - protein, 223 aa, Shigella flexneri 2a str. 301
MWLICCPLLLYPKKGNTMTTPTFDTIEAQASYGIGLQVGQQLSESGLEGLLPEALVAGIADALEGKHPAVPVDVVHRALREIHERADAVRRQRFQAMAAEGVKYLEENAKKEGVNSTESGLQFRVINQGEGAIPARTDRVRVHYTGKLIDGTVFDSSVARGEPAEFPVNGVIPGWIEALTLMPVGSKWELTIPQELAYGERGAGASIPPFSTLVFEVELLEIL

SEQ ID NO: 9046 - protein, 259 aa, Escherichia coli CFT073
MMSVVNPPLLYSYGILLLFLFPRDLSSFPRQSFTQRSVADMLPATLYPKKGNTMTTPTFDTIEAQASYGIGLQVGQQLSESGLEGLLPEALVAGIADALEGKHPAVPVDVVHRALREIHERADAVRRQRFQTMAAEGVKYLEENAKKEGVNSTESGLQFRVINQGEGAIPARTDRVRVHYTGKLIDGTVFDSSVARGEPAEFPVNGVIPGWIEALTLMPVGSKWELTIPQELAYGERGAGASIPPFSTLVFEVELLEIL

SEQ ID NO: 9047 - protein, 246 aa, Microbulbifer degradans 2-40
MCDFAPILASAQQAFASRGRLRAFNFAKAFLFIRKRGFFMSDNQYTTVEQRVSYGIGRQMGDQLASNPFEGVEPSAVAQGVIDALEGKESPVSPEDLNEAFRVIREKLEAEEKERAKTMGAEGEAFLAENAKKEGVTVTESGLQYEILTEGTGEKPKATSTVKTHYHGTLIDGTVFDSSVERGQPAEFPVNGVIAGWTEALQLMPVGSKWRLSIPYQLAYGERGAGGAIKPFAALVFDVELLEIVA

SEQ ID NO: 9048 - protein, 156 aa, Trichodesmium erythraeum IMS101
MVASQNTPDTIGSTEIQEQVAEGTILNPTITMAENIMAQDDEKVTTTDSGLQYVDVVEGDGATPQRGQTVVVHYTGTLEDGSKFDSSRDRNQPFQFKVGVGQVIKGWDEGVGSMKVGGRRKLIIPSDLGYGSRGAGGVIPPNATLIFDVELLRIAN

SEQ ID NO: 9049 - protein, 329 aa, Bifidobacterium longum DJO10A
MRKSVKSMLSPLGKAVALACSLAMCVSLAACSSSSSDSKSSSSDSSSSSDSSDKKGQIAGVTAKGKLGEKPTISFNTPMTVSDGSYVVLQKGDGDVIEEGDRVCAQGIALNVKDGTELMDTWTKNTPDCSLKVDSKTLSSTYYNQIKGAKINTTIGFGVNAQDSSGYSYILAMTFVSKSKDLEKATGEEVKDVPANLPKVTRAKNGEPSIDMNGQGSVDSLISQTLIKGNGAKLTDKNTVVVKYTGWLTNGKQFDSSWDRDSTIDADLFSDSSGQHQVIEGWQKGLVGQTVGSQVLLVIPPDQAYGDKEQGPIPANSTLVFVIDILAAY

SEQ ID NO: 9050 - protein, 228 aa, Haemophilus somnus 129PT
MLKIKKRSAIALIASAVVSQSVFADKQFNDDVSYALGYFMGKYLTVMGEEHKDVASYNYEKIVAGIKDVVENKSTLTDEKAQETLQELENKARHAKMAKIKAENEKFTAEFAKKSNVKKTESGLLYRIEKMGEGKSIKPTDRVKVHYTGKLANGKVFDSSRERGQPAEFKLNQVILGWKEGLQFIKKGGKIELVIPADLAYGERGAGLIPPSSTLYFDIEILDVTSEK

SEQ ID NO: 9051 - protein, 210 aa, Haemophilus somnus 129PT
MTKQFFAQVALDDVSAQGSYGIGLQIGQQLVDSKLAVKAEAVAKGIYDALNQNPPALELNEVAKALQELQQQASEIAQAQFKQIEEEGKKYLEENAKKDCVKVTETGLQYEVLVEGNGAIPTRQDQVRVHYTGTLIDGTVFDSSVNRGQPAEFPVSGVIAGWIEALSMMPLGSKWKLTIPHHLAYGERGAGASIPPFSTLVFEVELLDIL

SEQ ID NO: 9052 - protein, 124 aa, Pseudomonas syringae pv. syringae B728a
MTERAATGSIAMSKELQITDLHLGEGKAAVKGALITTHYTGTLEDGTVFDSSHERGKPFQCVIGTGRVIKGWDQGLMGMKVGGKRQLFVPAHLAYGDRSMGAHIKPGADLTFEIELLEVLTRDD

SEQ ID NO: 9053 - protein, 284 aa, Pseudomonas syringae pv. syringae B728a
MPVAIDRGGLISSRLYSFALLAHEQGISMKQHRLAAAIALVGLVLAGCDKQASTVELKTPAQKASYGIGLNMGKSLAQEGMDDLDSKAVALGIEDAVGKKDQKLKDEELVEAFSALQKRSEERLAKMSEEASAAGKKFLEENGKKDGVVTTASGLQYQIIKKADGAQPKPTDVVTVHYEGKLIDGKVFDSSVERGSPIDLPVGGVIPGWVEGLQLMHVGEKIKLFIPSDLAYGAQSPSPAIPANSVLVFDLELLGIKDPAAAPTPGADADEEEAAPAASAPAKK

SEQ ID NO: 9054 - protein, 210 aa, Pseudomonas syringae pv. syringae B728a
MRSSVMSEVNLSTDETRVSYGIGRQLGDQLRDNPPPGVDLEAIVAGLRDAFGGQPSRVGQEEMSASFKVIREIMQAEAAAKAEQAAGAGKAYLAENAKREGVTTLASGLQFEVVTAGTGAKPTREDQVRVHYHGTLIDGNVFDSSYDRGEPAEFPVSGVIAGWTEALQLMNAGSKWRLHVPSELAYGAQGVGSIAPHSVLVFDVELLDVL

SEQ ID NO: 9055 - protein, 221 aa, Pseudomonas fluorescens PfO-1
MYARRVPRPSAQRSSVMSEVNLSTDETRVSYGIGRQLGDQLRDNPPPGVSLDAILAGLTDAFAGKESRVSQEAMSASFKVIREIMQAEAAAKAEAAAGEGLAFLAENAKKEGITTLASGLQFEVLTQGEGAKPSREDTVRTHYHGTLIDGTVFDSSYERGQPAEFPVGGVIAGWTEALQLMNAGSKWRLYVPSELAYGAQGVGSIPPHSVLVFDVELLEVL

SEQ ID NO: 9056 - protein, 268 aa, Pseudomonas fluorescens PfO-1
MPVAIGRGGLISSRLYSIALSAHEQGNSMKQHRLAAAVALVSLVLAGCDSQTSVELKTPAQKASYGIGLNMGKSLAQEGMDDLDSKAVAQGIEDAVGKKEQKLKDEELVEAFAALQKRAEERMAKMSEESAAAGKKFLEENGKKAGVTTTASGLQYEVVKKADGPQPKPTDVVTVHYTGKLTNGTVFDSSVERGSPIDLPVSGVIPGWVEGLQLMHVGEKYKLYIPSDLAYGAQSPSPAIPANSVLVFDLELLAIKDPAKEDAAAAKQ

SEQ ID NO: 9057 - protein, 135 aa, Bifidobacterium longum NCC2705
MTDQMPQVNAEFGTTPVIEFPTPEAPKGLKVVELTEGDGPIVRRGDTVTVNYHGVVWGKDTPFDSSFDRHQPASFGIGVGQVIKGWDQTVPGHNVGSRLVVSIPPEYGYGSRGIPQAGIGGEDTLVFVIDIISTR

SEQ ID NO: 9058 - protein, 329 aa, Bifidobacterium longum NCC2705
MRKSVKSMLSPLGKAVALACSLAMCVSLAACSSSSSDSKSSSSDSSSSSDSSDKKGQIAGVTAKGKLGEKPTISFNTPMTVSDGSYVVLQKGDGDVIEEGDRVCAQGIALNVKDGTELMDTWTKNTPDCSLKVDSKTLSSTYYNQIKGAKINTTIGFGVNAQDSSGYSYILAMTFVSKSKDLEKATGEEVKDVPANLPKVTRAKNGEPSIDMNGQGSVDSLISQTLIKGNGAKLTDKNTVVVKYTGWLTDGKQFDSSWDRDSTIDADLFSDSSGQHQVIEGWQKGLVGQTVGSQVLLVIPPDQAYGDKEQGPIPANSTLVFVIDILAAY

SEQ ID NO: 9059 - protein, 161 aa, Desulfovibrio desulfuricans G20
MAEQAKVTMFLYAKNHARSFYMAIKNGDTVRVHYTGTLDDGTVFDSSRDREPLEFTMGEGMLIPGFEAALMGLAAGDTTKTTIQPEDAYGEPNDELILAVAREQVPDHITPEVGLMLQVQTEEGMMDVTITDVTDEQVVLDANHPLAGESLTFEIEVMEVL

SEQ ID NO: 9060 - protein, 253 aa, Pseudomonas aeruginosa PAO1
MKQHRLAAAIALVGLVLSGCDSQTNVELKTPAQKASYGIGLNMGKSLSQEGMDDLDSKAVAKGIEDALGKKKQQLTDEELTEAFAFLQKRAEERMAAIGDENAKAGKKFLEENGKRDGVTTTASGLQYEIVKKADGPQPKATDVVTVHYEGRLTDGTVFDSSIERGSPIDLPVSGVIPGWVEALQLMHVGEKIKLYIPSELAYGAQSPSPAIPANSVLVFDMELLGIKDPSKPDAEPEAGAAAQPEAKADAKK

SEQ ID NO: 9061 - protein, 205 aa, Pseudomonas aeruginosa PAO1
MSELNLTTDEARVSYGIGRQLGDQLRENPVPGMTLDAVLAGLSDAFAGIDSRVSGEALSASFQVIRERMQAEAQAKAEAAAGEGRAYLAENAKREGVTVLPSGLQFEVLSTGEGAKPSREDTVRTHYHGTLIDGTVFDSSYQRGQPAEFPVGGVIAGWVEALQLMNAGSKWRLHVPSELAYGGQAVGSIPPHSVLVFDVELLEIL

SEQ ID NO: 9062 - protein, 113 aa, Pseudomonas aeruginosa PAO1
MNDRLQIEDLLLGDGKEVVKGALITTQYKGTLEDGTLFDSSYERGRPFQCVIGTGRVIKGWDQGLMGMKVGGKRRLFVPSHLAYGERQVGAHIKPHSNLLFEIELLEVLTRDD

SEQ ID NO: 9063 - protein, 255 aa, Shewanella oneidensis MR-1
MKSIYKLSLVALAVIGLSACNQEEKATNASTNVELTTEAQKEAYSVGASIGRYMSGHIKEQEELGLPVDRTLIVTGFTSGLNDQLKLTEEEMQTILQSLDKKLNDKRQEQAKAIAVKNLEDGKKFLDENKAKSGVVTTESGLQYEVLTPGSGEKPAAEDTVEVDYVGTLIDGKEFDSSYKRGESLKFPLNRVIPGWTEGVQLMPVGAKYKFVIPANLAYGDRDNGTIPPNSTLIFEVELKSIEKAAAPAAEPAKK

SEQ ID NO: 9064 - protein, 156 aa, Shewanella oneidensis MR-1
MKMLLAVVVIAGVIFYFFTTMNNQKAAQENIRLGNEFLAQNKTKEGVVTTASGLQYQVLNQGSGTIHPKASDTVTVHYHGTLIDGTIFDSSVERGDPIAFPLNRVIKGWTEGVQLMVEGDKYRFFIPSDLAYGNRSTGKIGGGSVLIFDVELLKIN

SEQ ID NO: 9065 - protein, 111 aa, Shewanella oneidensis MR-1
MTELEIIDLVVGDGKEAVKGALITTQYRGFLQDGTQFDSSYDRGQAFQCVIGTGRVIKGWDQGIMGMKVGGKRKLLVPAHLAYGERQVGAHIKPNSDLTFEIELLEVLTRD

SEQ ID NO: 9066 - protein, 205 aa, Shewanella oneidensis MR-1
MSDKFSTVEQQASYGVGRQMGEQLAANSFEGVDIPAVQAGLADAFAGLESAVSMQELQVAFTEISRRIQAAQEQAAAEASAEGEAFLVENANREGVIVTESGLQYEVLVQGNGAKPTYEDTVRTHYHGSFINGDVFDSSVVRGQPAEFPVSGVIAGWTEALQLMPVGTKLKLYVPHHLAYGERGAGASIPPYSTLVFEVELLDIV

SEQ ID NO: 9067 - protein, 259 aa, Shewanella oneidensis MR-1
MKKSMPTSFIPKTITVATCAALFVSMASFAAPSLKTDADKASYSIGASVGNYISGQVYNQVELGAEVNVDLVVQGFVDALKKQQQLTDEEVVTYLNQRAEELNQVRKANAEKLAAENIKAGEAFLAENKKKAGVTVTESGLQYEVLTKGTGNKPNPEDVVTVEYVGKLIDGTEFENTVGRKEPTRFALMTVIPGWEEGLKLMPMGSKYRFVIPANLAYGNEFVGEIPPQSTLIFEIELKNIEKPSEKKEARMMGMMPAH

SEQ ID NO: 9068 - protein, 266 aa, Yersinia pestis CO92
MKSLFKVTLLATAMTLTLNTSTVFAADATSPVVTNSAFKNNDQQSAYALGASLGRYMDNSLKEQEKLGIKLDKDQLIAGVQDAFANKSKLTDEEIEKTLQNFEARVKASAQAKMEQDAKENADKGAKYRDTFAKEKGVKKTASGLLYKVENAGTGDAPKDSDTVVVNYKGTLADGTEFDNSYKRGEPLSFRLDGVIPGWTEGLKQIKKGGKITLVIPPELAYGKAGVPGIPANSTLIFDVELLDVKAAAKADAQEQQPAVDTKAKK

SEQ ID NO: 9069 - protein, 206 aa, Yersinia pestis CO92
MTTPSFDSVEAQASYGIGLQIGQQLQESGLQGLLPEALLAGLRDAMEGNTPTVPVDVIHRALQEVHEKADKVRIERQQALVDEGKTFLEENAKRDDVTTTESGLQFSVLQAGDGPIPSRQDRVRVHYTGRLVDGTVFDSSVERGQPADFPVSGVIPGWIEALSMMPVGSKWKLYIPHNLAYGERGAGATIPPFSALMFEVELLEIL

SEQ ID NO: 9070 - protein, 260 aa, Vibrio vulnificus CMCP6
MKSVLKVSLLAATVMLAVGCQKEEAKPAAAPQAEQVQAETGKAVHFKSEDDKAAYAIGVSFANYLSASLDKPSEIGINLNKDLVLKGIEHVFAGNPELNEEETRAALEALDKRVAETMQKKAAEKAEAAKKAGDEFRAEFEKQEGVVKTDTGLLYQVITPAEGEKPKDTDTVQVHYKGTLTDGTQFDSSYDRGEPATFPLNRVIPGWTEGVQLMPVGSKFKFVIPPELAYGAQDTPSIPANSTLVFEVELLKIENGDNAQ

SEQ ID NO: 9071 - protein, 141 aa, Vibrio vulnificus CMCP6
MIYRTWNNHKAAEVNFEKGQAFLLENSKKEGVITTESGLQYQVLEKGHGDKHPSASSKVKVHYHGMLTDGTVFDSSVERGSPISFNLNQVIKGWQEGLQYMVEGEKVRLFIPSTLGYGKGGSGPIPPASVLIFDVELLEIQ

SEQ ID NO: 9072 - protein, 186 aa, Vibrio vulnificus CMCP6
MGQQLAGSGLDGLNVAAIAAGIATSLTGDMPAVEVDEINKALHELYTRAESARAEAAKAAAADGEVFLKDNALRPEVTVLESGLQYEIITEGNGEIPTSDKTVRVHYHGELVDGTVFDSSVSRGQPAQFPVTGVIKGWVEALQLMPVGSKWKLYIPHDLAYGERGAGASIPPFAALVFEVELLDIV

SEQ ID NO: 9073 - protein, 192 aa, Methanosarcina barkeri
MKGMKTRNEAVFFIVILLLVSIIFGSGCTDNGNEGGDSRAVKSGDSVKVDYTGKLEDGTVFDTSREDVAKQAGIYVERKEYTPLSFVVGSGQVISGFDEGVIGMKVGEEKTLTIPPDKAYGEYDEARVLAVPVEELNLTNRSEIPEVGQTLRDMYGNQYKVTAVNDTHITLDANHELAGKTLIFDIKVISIE

SEQ ID NO: 9074 - protein, 113 aa, Pseudomonas syringae pv. tomato str. DC3000
MSKALQITDLHIGEGKAAVKGALITTHYTGTLEDGTVFDSSHERGKPFQCVIGTGRVIKGWDQGLIGMKVGGKRTLFVPAHLAYGDRTIGAHIKPGADLKFEIELLEVLTRDD

SEQ ID NO: 9075 - protein, 257 aa, Pseudomonas syringae pv. tomato str. DC3000
MKQHRLAAAIALVGLVLAGCDKQASTVELKTPAQKASYGIGLNMGKSLAQEGMDDLDSKAVALGIEDAVGKKDQKLKDEELVEAFSALQKRSEERLAKMSEEASAAGKKFLEENGKKDGVVTTASGLQYQIIKKADGAQPKPTDVVTVHYEGKLIDGKVFDSSVERGSPIDLPVGGVIPGWVEGLQLMHVGEKVKLFIPSDLAYGAQSPSPAIPANSVLVFDLELLGIKDPAAAPAVGADADEEEDAAPAASAPAKK

SEQ ID NO: 9076 - protein, 224 aa, Pseudomonas syringae pv. tomato str. DC3000
MTVQVLRNYRLRAPQRSSVMSEVNLSTDETRVSYGIGRQLGDQLRDNPPPGVNLEAIVAGLRDAFGGQPSRVGQEEMSASFKVIREIMQAEAAAKAEQAAGAGKAYLAENAKREGVTTLASGLQFEALTSGDGAKPTREDQVRVHYHGTLIDGTVFDSSYDRGEPAEFPVSGVIAGWTEALQLMNAGSKWRLHVPSELAYGAQGVGSIAPHSVLVFDVELLDVL

SEQ ID NO: 9077 - protein, 260 aa, Vibrio parahaemolyticus RIMD 2210633
MKSVLKVSLLAATVMLAVGCQKEETKPEAAPQAEQVQAETGKAVHFKTDDDKAAYAIGVSFANYLSTSIEKPSEIGINLNKDLVLKGIEDVFKGNAELNEEETRAALESLDKRVAEKMQAQAAEKAAAAKKAGDDFRAEFEKQEGVVKTDTGLLYQVITPAEGEKPKDTDTVQVHYKGTLIDGTQFDSSYDRGEPATFPLNRVIPGWTEGVQLMPVGSKFKFVIPPELAYGDQDTPSIPANSTLVFEVELLKVENDKAEQ

SEQ ID NO: 9078 - protein, 157 aa, Vibrio parahaemolyticus RIMD 2210633
MSKFLFPIIIFVLAAFFIYRTWTNHKVADENFAKGQAFLLENAKKEGVITTESGLQYLVLEKGTGDVHPTATSKVKVHYHGTLIDGTVFDSSVNRGEPITFGLNQVIKGWQEGLQYMVVGEKIRLFVPSTLGYGKNGTGPIPPASVLIFDVELLEIQ

SEQ ID NO: 9079 - protein, 206 aa, Vibrio parahaemolyticus RIMD 2210633
MSEIKFETAEQKASYGIGLQMGQQLAGSGLEGLSVDAIAAGIATALTGEMPSIEIDEINNALQELHSRAEAARQEAAKAAAADGEAFLKDNALRPEVNVLESGLQYEIINEGTGEIPTADKSVRVHYHGELTDGTVFDSSVSRGQPAEFPVTGVIKGWVEALQLMPVGSKWKLYIPQDLAYGERGAGAAIPPFAALVFEVELLDIL

SEQ ID NO: 9080 - protein, 251 aa, Buchnera aphidicola str. Bp (Baizongia pistaciae)
MILLKIIHIIFVMIFLSIFFPKSLYASTSLIRKDHIIQKNLENFDDQSAYALGVSLGNYINHSFREQKRLGVILDKNSLLSGIRDSLSGKTILSDQEISMELIKLEKKLKYFEDIVLKKEAHNNKIQGDLYIKKMLKKKDARHTSSGLVFFIKKKGSGKFLHDSDVITVHYKGSLINGNEFDNSYKRGQPLSFSLDSVIPGWIEGLKYIKKGGLIKLVIPPKLAYGETGVPGIPGNSTLIFEIELIDIQSK

SEQ ID NO: 9081 - protein, 194 aa, Bacteroides thetaiotaomicron VPI-5482
MDKFSYAIGLGIGQNLLSMGAKGIAVDDFAQAIKDVLEGNQTAISHQEAREIVNKYFEELEAKMGAAAIEQGKAFLEENKKKPGVVTLPSGLQYEVINEGTGKKAKATDQVKCHYEGTLIDGTLFDSSIKRGEPAVFGVNQVIPGWVEALQLMPEGSKWKLYIPSDLAYGARGAGEMIPPHSTLVFEVELLEVL

SEQ ID NO: 9082 - protein, 291 aa, Bacteroides thetaiotaomicron VPI-5482
MKKVSIFMAIAAAASLASCTAQAPKANLKTDIDSLSYSIGMAQTQGLKGYLTGRLDVDTAYMAEFIKGLNEGANKTSKKDIAYMAGLQIGQQISNQMMKGINQELFAGDSTKTISKDNFMAGFIAGTLEKGGVMTMEAAQEYTRTAMETIKAKAMEEKYADNKAAGEKFLAENKTKEGVKTTESGLQYKVITEGKGEIPADTCKVKVNYKGTLIDGTEFDSSYKRNEPATFRANQVIKGWTEALTMMPVGSKWELYIPQELAYGSRESGQIKPFSTLIFEVELVGIEKDKK

SEQ ID NO: 9083 - protein, 133 aa, Bacteroides thetaiotaomicron VPI-5482
MGRKQEYKETNLEFLKELSSQEGVYALPCGIYYKVLETGTGTVFPNVRSIVTVHYKGSLINGRVFDNSYERNCPEAFRLCDVIDGWQLALQRMRAGDKWIIYIPYTMGYGTRASGPIPAFSTLVFEVELLGVA

SEQ ID NO: 9084 - protein, 230 aa, Coxiella burnetii RSA 493
MKRLILPFLSVGLLLGTTAHAATPLKTEQDKLSYSMGVMTGKAFRKHDIKIDPQTFSMGLSDAYLGKETQMTEAEMRQTLQQFEKQSLQKMQHKMKQTAQQNAEKSRAFLTANKNKPGVKTLANGLQYKVLQAGQGQSPTLNDEVTVNYEGRLINGTVFDSSYKRGQPATFPLKSVIKGWQEALTRMKPGAIWEIYVPPQLAYGEQGAPGVIGPNEALIFKVNLISVKKK

SEQ ID NO: 9085 - protein, 124 aa, Streptomyces avermitilis MA-4680
MSIEKPEIDFPGGEPPADLEIKDIWEGDGPVAKAGNTVSVHYVGVAFSTGEEFDASWNRGTPLQFQLGAGQVIKGWDQGVQGMKVGGRRQLTIPAHLAYGDRGAGGGRIAPGETLIFVCDLVAV

SEQ ID NO: 9086 - protein, 334 aa, Streptomyces avermitilis MA-4680
MRRRSVLLAVPAGLVTLAGCGDEKSDTAKTKPSTSPSPSASASSAPPPKIVDGPLPAITAGTKFDEKPTVAKGSGDPSKDVAVKTVIAGSGKTVAENDYIQANYLGQVWDTAKVFDNSYDRKTPLVIQLAQGSIIDGWRYALAGKKAGSRVLMSVPPTWGYGKQGNSQAGIKGTDTLVFVVDIQNTFNAKSSAQGKDVAQGDAKLPKVGTNTDGKAPSIDVPKTAAPTKLVANYVIEGDGDVVKADSSVLVQYKGVLWDTGKEFDSTYSRSALTSFSLQQVVKGWSQGLTGKKVGSRVLIVVPPKLGYGDSPPSGSGIEKDSTLVFSVDILAKM

SEQ ID NO: 9087 - protein, 255 aa, Chlamydophila caviae GPIC
MKKRWHLMIITMVVSFSIASCDSSSQRGNQIAQVEEKSAANDSQLSVNQQISRTFGHLLARQLRKSEDIMMDIAEVAKGLQGELECKSAPLTESEYEEKMAEIQKLVFEKKAKENLSLAERFLQENKKNSGVVEVQADKLQYRIVKEGTGRAISGKPSALLHYKGTFIDGQVFSSSEANKEPILLPLAQTIPGFALGMQGMKEGETRILYIHPDLAYGTSGQLPPNSLLIFEINLIETTDDSVAAQNTENENTAS

SEQ ID NO: 9088 - protein, 167 aa, Pyrus communis
MIGLLFGVSSAVTGAFEAEGAGLPPEEKPRLCDNSCEKELLKVPMVTTESGLQYKDIKVGQGPSPPVGFQVAANYVAMVPSGQIFDSSLEKGQVYIFRVGSGQVIKGLDEGILSMKVGGKRRLYIPGSLAFPKGLNSAPGRPRVAPSSPVVFDVSLEYVPGLDIEEE

SEQ ID NO: 9089 - protein, 243 aa, Amoeba proteus symbiotic bacterium
MKMRLVAATVIGLAMSTTMAASAAPDAATTASSATSLTTDMDKLSYSIGADLGKNLKKQGIDISPAAMAKGLQDGISGGQLLLTEQQMKDVLNKFQKDLMARRTADFNKKAEENKTKGDSFLNQNKGKDGVVSLPSGLQYKVIQKGDGAKPSKEDTVTVDYTGTLLDGQVFDTTEKTGKPATFKVSQVIPGWTEALQLMPAGSTWEVFVPAGLAYGPRSVGGPIGPNETLIFKIHLISVKKSS

SEQ ID NO: 9090 - protein, 457 aa, Saimiri boliviensis
MTTDEGAKNSRGNPAATVAEQGEDVTSKKDRGVLKIVKRVGHGEETPMIGDRVYVHYNGKLANGKKFDSSHDRNEPFVFSIGKGQVIKAWDIGVATMKKGEICHLLCKPEYAYGATGSLPKIPSNATLFFEVELLDFKGEDLLEDGGIIRRTKRRGEGYSNPNEGARVQIHLEGRCGGRVFDCRDVAFTVGEGEDHDIPIGIDKALEKMQREEQCILHLGPRYGFGEAGKPKFGIEPNAELIYEVTLKSFEKAKESWEMDTKEKLEQAAIVKEKGTVYFKGGKYVQAVIQYGKIVSWLEMEYGLSEKESKASESFLLAAFLNLAMCYLKLREYTKAVECCDKALGLDSANEKGLYRRGEAQLLMNEFESAKGDFEKVLEVNPQNKAARLQIFMCQKKAKEHNERDRRTYANMFKKFAEQDAKEEANKAMSKKTSEGVTNEKLTASHAVEEEKPEGHV

SEQ ID NO: 9091 - protein, 372 aa, Saimiri boliviensis
MDAALLLNVEGVKKTILHGGTGELPNFITGSRVIFHFRTMKCDEERTVIDDSREVGQPMHIIIGNMFKLEVWEILLTSMRVREVAEFWCDTIHTGVYPILSRSLRQMAQGKDPTEWHVHTCGLANMFAYHTLGYEDLDELQKEPQPLIFVIELLQVDAPSDYQRETWNLSNHEKMKVVPVLHGEGNRLFKLGRYEEASSKYQEAIICLRNLQTKEKPWEVQWLKLEKMINTLILNYCQCLLKKEEYYEVLEHTSDILRHHPGIVKAYYVRARAHAEVWNEAEAKADLQKVLELEPSMQKAVRRELRLLENRMAEKQEEERLRCRNMLSQGATWSPAEPPAEPPAESSTEPPAEPPAEPPAELTLTPGHPLQH

SEQ ID NO: 9092 - protein, 232 aa, Legionella anisa
MKMKLVTAAVMGLAMSTVMAADATSLVTDKDKLSYSIGADLGKNFKNQGIDINPDALAKGMQDGMSGAQLILTEQQMKDVLNKFQKELMAKRSAEFNKKAEENKSKGDAFLSTNKSKSGVTVLPSGLQYKVIEAGTGNKPGKADTVTVEYTGTLIDGTVFDSTEKTGKPATFQVSQVIPGWTEALQLMPAGSTWEIYVPSDLAYGPRSVGGPIGPNETLIFKIHLISVKKSA

SEQ ID NO: 9093 - protein, 200 aa, Legionella anisa
TAAVMGLAMSTVMAADATSLVTDKDKLSYSIGADLGKNFKNQGIDINPDALAKGMQDGMSGAQLILTEQQMKDVLNKFQKELMAKRSAEFNKKAEENKSKGDAFLSTNKSKSGVTVLPSGLQYKVIEAGTGNKPGKSDTVTVEYTGTLIDGTVFDSTEKTGKPATFQVSQVIPGWTEALQLMPAGSTWEIYVPSDLAYGP

SEQ ID NO: 9094 - protein, 233 aa, Legionella birminghamensis
MKMKLVAAATMGLAMSTAIAASDVTLSTDMDKLSYSIGADLGKNFKKQGIEINPTAMAKGLQDGMSGSQLMLTEDQMKEVLNNFQKDLMAKRNAEFSKKSEENKAKGETFLSQNKSKEGVVSLPSGLQYKIIETGSGAKPAKDDTVTVEYTGRTIDGQVFDSTDKSGKPATFKVSQVIPGWTEALQLMPAGSTWEIYIPSGLAYGPRSVGGPIGPNETLIFKIHLISVKKAGA

SEQ ID NO: 9095 - protein, 233 aa, Legionella cherrii
MKMKLVTAAIMGLAMSTAMAATDATSLVTDKDKLSYSIGADLGKNFKNQGIDINPDALAKGMQDGMSGAQLILTEQQMKDVLNKFQKDLMAKRSAEFNKKAEENKAKGEAFLSTNKSKSGVVVLPSGLQYKIIEAGTGAKPGKSDTVTVEYTGTLIDGTVFDSTEKAGKPATFQVSQVIPGWTEALQLMPAGSTWEIFVPSDLAYGPRSVGGPIGPNETLIFKIHLISVKKAA

SEQ ID NO: 9096 - protein, 233 aa, Legionella cincinnatiensis
MKMKLVTAAIMGLAMSTAMATTDATSLTTDKDKLSYSIGADLGKNFKNQGIDINPEALAKGMQDGMSGAQLILTEEQMKDVLSKFQKDLMAKRSAEFNKKAEENKAKGEAFLSANKSKPGIVVLPSGLQYKIIDAGTGAKPGKSDTVTVEYTGTLIDGTVFDSTEKAGKPATFQVSQVIPGWTEALQLMPSGSTWEVYVPADLAYGPRSVGGPIGPNETLIFKIHLISVKKAA

SEQ ID NO: 9097 - protein, 204 aa, Legionella cincinnatiensis
TAAIMGLAMSTAMAATDATSLTTDKDKLSYSIGADLGKNFKNQGIDVNPEALAKGMQDGMSGAQLILTEEQMKDVLSKFQKDLMAKRSAEFNKKAEENKAKGEAFLSANKSKAGIVVLPSGLQYKIIDAGTGAKPGKSDTVTVEYTGTLIDGTVFDSTEKAGKPATFQVSQVIPGWTEALQLMPSGSTWEVYVPADLAYGPRSV

SEQ ID NO: 9098 - protein, 204 aa, Legionella cincinnatiensis
TAAIMGLAMSTAMATTDATSLTTDKDKLSYSIGADLGKNFKNQGIDINPEALAKGMQDGMSGAQLILTEEQMKDVLSKFQKDLMAKRSAEFNKKAEENKAKGEAFLSANKSKPGIVVLPSGLQYKIIDAGTGAKPGKSDTVTVEYTGTLIDGTVFDSTEKAGKPATFQVSQVIPGWTEALQLMPSGSTWEVYVPADLAYGPRSV

SEQ ID NO: 9099 - protein, 233 aa, Legionella sainthelensi
MKMKLVTAAIMGLAMSTAMAATDATSLTTDKDKLSYSIGADLGKNFKNQGIDINPDVLAKGMQDGMSGAQLILTEEQMKDVLSKFQKDLMAKRSAEFNKKAEENKAKGEAFLSANKSKPGIVVLPSGLQYKIIDAGTGAKPGKSDTVTVEYTGTLIDGTVFDSTEKAGKPATFQVSQVIPGWTEALQLMPSGSTWEVYVPADLAYGPRSVGGPIGPNETLIFKIHLISVKKAA

SEQ ID NO: 9100 - protein, 234 aa, Legionella wadsworthii
MKMKLVNAAILGLAMSTAMAATDATSLVTDKDKLSYSIGADLGKNFKTQGIDINPDALAKGMQDGMSGAQLILTEQQMKDVLNKFQKDLMAKRSAEFNKKAEENKSKGDSFLSSNKSKSGVVVLPSGLQYKVIEAGTGNKPSKTDTVTVEYTGTLIDGTVFDSTEKTGKPATFQVSQVIPGWTEALQLMPAGSTWEIYVPSDLAYGPRSVGGPIGPNETLIFKIHLISVKKASA

SEQ ID NO: 9101 - protein, 79 aa, Neisseria subflava
HYTGWLEDGTKFDSSLDRRQPLTITLGVGQVIKGWDEGFGGMKEGGKRKLTIPSEMGYGEHGAGGVIPLHATLIFEVEL

SEQ ID NO: 9102 - protein, 249 aa, Legionella brunensis
MKMRLVAAAVIGLTMSTAIVAADASATATPAPATSATPTTSLNSDMDKLSYSIGADLGKNFKKQGIDINPSAMAKGLQDGMSGGQLLLTEQQMKDVLNKFQKDLMAKRTAEFSKKADENKAKGEAFLNQNKAKEGVVSLPSGLQYKIIQKGDGAKPSKEDTVTVEYTGTLIDGQVFDSTDKAGKPATFKVSQVIPGWTEALQLMPAGSTWEVYVPADLAYGPRSVGGPIGPNETLIFKIHLISVKKSDA

SEQ ID NO: 9103 - protein, 234 aa, Legionella oakridgensis
MKLKLVAAAVMGLAMSTAMAATDASSLTTDTDKLSYSIGIDLGKNFKRQGIEINPQAMVQGLQDGISGNKQQLTEEQMKDVLTKFQRDLMTKRTAEYNKKAEDNKKKGEEFLEQNKSKEGVVTLPSGLQYKILKAGDGQKPVKEDTVTVEYTGRLINGEVFDSTEKNGKPASFKLSQVIPGWTEALQLMPAGSVWEVYVPSDLAYGSRSVGGPIGPNETLIFKIHLISVKKSDA

SEQ ID NO: 9104 - protein, 117 aa, Ralstonia solanacearum
MTITTTQSGLQYEDVTVGDGAEATAGKYVTVHYTGWLYENGQAGRKFDSSKDRNDPFAFPLGAGHVIKGWDEGVQGMKVGGTRKLIIPAELGYGARGAGGVIPPNATLLFEVDLLEV

SEQ ID NO: 9105 - protein, 141 aa, Ralstonia solanacearum
MKRLSLLLCATSLALAAYNVQAASAVSAAPAESLPSGVTIQHVAKGSGPSPKATDTVKVHYRGTLADGTEFDSSYKRGQPISFPLNRVIPCWTEGVQKMQVGGKAKLTCPPATAYGARGVPGTIPPNATLNFEVELLGIGG

SEQ ID NO: 9106 - protein, 177 aa, Azotobacter vinelandii
MAARRVLSGRSGRLVESRTECFRWGFWGLIEHSSGRRLPIPATPEKKPPTGAAPNGPPTERERAMSSELQIEDIQPGDGKAVVKGALITTQYNGYLEDGTKFDSSYDRGKPFQCVIGTGRVIKGWDQGLMGMRVGGKRRLFVPARLAYGERQVGAQIKPNSNLIFEIELLEVLTRDD

SEQ ID NO: 9107 - protein, 250 aa, Azotobacter vinelandii
MRQHRLAAAMALVGLVLSGCDSQTNAELKTPAQKASYGIGLNMGKSLAQEGMDDLDSKAVAQGIEDAIGKKEQRLSDEELIEAFAALQKRAEERMAALGEENAKAGKKFLEENAKRTGVVTTASGLQYEVLKKADGAQPKPSDVVTVHYEGRLTDGSVFDSSIERGSPIDLPVSGVIPGWVEGLQLMHVGEKFKLYIPSDLAYGEQSPSPSIPANSVLVFELELLGIKDQPAEQPGGSAPDVEQGEAQGQ

SEQ ID NO: 9108 - protein, 242 aa, Azotobacter vinelandii
MDGGPWRARPSSSRSRSRSRSRACASLSGLFTDWKSVMSELNLSTDEARVSYGIGRQLGDQIRDNPPPGVELEAILAGLADAFGGQASRVEPAALSASFKVIRERMQAETQAKAEAAAASGVSFLAENARREGVTVLASGLQYEVLKAGEGRKPGREDRVRTHYHGTLIDGSVFDSSYQRGQPAEFPVNGVIAGWTEALQLMNSGSKWRLYVPSELAYGDQAIGSIPPHSVLVFDVELLDVL

SEQ ID NO: 9109 - protein, 304 aa, Plasmodium falciparum 3D7
MTTEQEFEKVELTADGGVIKTILKKGDEGEENIPKKGNEVTVHYVGKLESTGKVFDSSFDRNVPFKFHLEQGEVIKGWDICVSSMRKNEKCLVRIESMYGYGDEGCGESIPGNSVLLFEIELLSFREAKKSIYDYTDEEKVQSAFDIKEEGNEFFKKNEINEAIVKYKEALDFFIHTEEWDDQILLDKKKNIEISCNLNLATCYNKNKDYPKAIDHASKVLKIDKNNVKALYKLGVANMYFGFLEEAKENLYKAASLNPNNLDIRNSYELCVNKLKEARKKDKLTFGGMFDKGPLYEEKKNSAN

SEQ ID NO: 9110 - protein, 333 aa, Plasmodium falciparum 3D7
MGVKTSEDVYNFVKDSIKIKEELDNQKKVKKSERKICELKKKPSKYELDYSKFEECINDIENEEKEERHREEHKHDFINNKNPCSHDHSKERQLYEKSTKEKINASNLFNEEGKKAFYEKNYKLACVYFRKGLIQLDYSFPDTNEEEKEQRKLEINLHLNMALTKFHMSKFYECISECSTVLNIDKDNIKAYYRKGQAYMSLDLYDDAKREFLKVLEINPNDNNTKKSLIVLRQKIIIYNKKKKLVCAKFFSSNEKDTSINEKEKYINDKSSVEKNELNMMNRNINKNNIINNNNTIDNNKNRIHINENKNNFFIYISNIFKKCSNFFIAIDY

SEQ ID NO: 9111 - protein, 524 aa, Plasmodium falciparum 3D7
MVDDKNKDKNCSKKDEKNNKIDEDKEFDEKVKNMSFDDKVRKILDLKLEGNNDYKNKNYEKAINKYNEGMKYMKKIENKNEKIKELEIALYLNLSICYSNVEKYNEAYDNITKVLSLDKTNAKGMFRLCQIEFNRCNFDVAKDKIQEFIKIYPDNIEAKKLLKNIILKQNEHNKKQKEAFSKIFEKASGLYDDREKEIMRKKKEKYEKEMKERKEKNEDIIKFEEWEILDNEKRIKEDEEKRKEKEKEREKQNEKEKQKQKEMEKKNKNKNDSLMSSSTTNNNSSYLDIDEEDQKIINETKKMGYCYFKKDIKEDDKKFFEKNIPKKIDTTNYENSNTLYNNQNNKAISSWNAAGTTYEEKDMTKWAKNKIEECLKNIHFKNDDDSDFLNLNNQNGNNFSSVNYPDILPIQYLSKIQLNDVKNLSVDAQIVVIRGTKRHIFELSCNLDITIFINITELHVHKVLVEIKELSSELEAGKTWKNFITIKKNDKLKIPDNLFNDIYDFVIEKVQQQIKNFTQEYNKM

SEQ ID NO: 9112 - protein, 551 aa, Arabidopsis thaliana
MDANFEMPPVGGMNDDDDMDFGDGASFLKVGEEKEIQQGLKKKLLKEGEGYETPENGDEVEVHYTGTLLDGTKFDSSRDRATPFKFTLGQGQVIKGWDIGIKTMKKGENAVFTIPAELAYGESGSPPTIPANATLQFDVELLKWDSVKDICKDGGVFKKILAVGEKWENPKDLDEVLVKFEAKLEDGTVVGKSDGVEFTVKDGHFCPALTKAVKTMKKGEKVLLTVKPQYGFGEKGKPASAGEGAVPPNATLEINLELVSWKTVSEVTDDNKVVKKVLKEGDGYERPNEGAVVKVKLIGKLQDGTVFLKKGHGENEEPFEFKTDEEQVVDGLDRAVMKMKKGEVALVTIDPEYAFGSNESQQELAVVPPNSTVTYEVDLLTFDKERESWDMNTEEKIEAASKKKEEGNSKFKGGKYSLASKRYEKAVKFIEYDTSFSEEEKKQAKALKVACNLNDAACKLKLKDYKQAEKLCTKVLELESTNVKALYRRAQAYMELSDLDLAEFDVKKALEIDPNNREVKLEQKRLKEKMKEFNKKEAKFYGNMFAKLSKE

SEQ ID NO: 9113 - protein, 551 aa, Arabidopsis thaliana
MDANFEMPPVGGMNDDDDMDFGDGASFLKVGEEKEIQQGLKKKLLKEGEGYETPENGDEVEVHYTGTLLDGTKFDSSRDRATPFKFTLGQGQVIKGWDIGIKTMKKGENAVFTIPAELAYGESGSPPTIPANATLQFDVELLKWDSVKDICKDGGVFKKILAVGEKWENPKDLDEVLVKFEAKLEDGTVVGKSDGVEFTVKDGHFCPALTKAVKTMKKGEKVLLTVKPQYGFGEKGKPASAGEGAVPPNATLEINLELVSWKTVSEVTDDNKVVKKVLKEGDGYERPNEGAVVKVKLIGKLQDGTVFLKKGHGENEEPFEFKTDEEQVVDGLDRAVMKMKKGEVALVTIDPEYAFGSNESQQELAVVPPNSTVTYEVDLLTFDKERESWDMNTEEKIEAASKKKEEGNSKFKGGKYSLASKRYEKAVKFVEYDTSFSEEEKKQAKALKVACNLNDAACKLKLKDYKQAEKLCTKVLELESTNVKALYRRAQAYMELSDLDLAEFDVKKALEIDPNNREVKLEQKRLKEKMKEFNKKEAKFYGNMFAKLSKE

SEQ ID NO: 9114 - protein, 555 aa, Arabidopsis thaliana
MDANFEMPPVGGMNDDDDMDFGDGASFLKVGEEKEIQQGLKKKLLKEGEGYETPENGDEVEVHYTGTLLDGTKFDSSRDRATPFKFTLGQGQVIKGWDIGIKTMKKGENAVFTIPAELAYGESGSPPTIPANATLQFDVELLKWDSVKDICKDGGVFKKILAVGEKWENPKDLDEVLVKFEAKLEDGTVVGKSDGVEFTVKDGHFCPALTKAVKTMKKGEKVLLTVKPQYGFGEKGKPASAGEGAVPPNATLEINLELVSWKTVSEVTDDNKVVKKVLKEGDGYERPNEGAVVKVKLIGKLQDGTVFLKKGHGENEEPFEFKTDEEQVVDGLDRAVMKMKKGEVALVTIDPEYAFGSNESQQELAVVPPNSTVTYEVDLLTFDKERESWDMNTEEKIEAASKKKEEGNSKFKGGKYSLASKRYEKAVKFIEYDTSFSEEEKKQAKALKVACNLNDAACKLKLKDYKQAEKLCTKVLELESTNVKALYRRAQAYMELSDLDLAEFDVKKALEIDPNNREVKLEQKRLKEKMKEFNKKEAKFYGNMFAKLSVSISMV

SEQ ID NO: 9115 - protein, 578 aa, Arabidopsis thaliana
MEDDFDTQNQFPEEEPEEMDMDLPDNDEADSAPYLKIGEEMEIGKSGLKKKLVKECEKWDTPENGDEVEVHYTGTLLDGTKFDSSRDRGTPFKFTLGQGHVIKGWDLGIKTMKKGENAIFTIPPELAYGETGSPPTIPPNATLQFDVELIAWRSVKDICGDGGVSKKIIVEGEKWEKPKDLDEVYVKYEARLEDGTIVGKSDGVEFTVKEGHFCPALSKAVKTMKRGEKVLLTVKPQYGFGEFGRPASDGLQAAIPPNATLQIDLELVSWKTVVEVTDDRKVIKKILKEGEGYERPNEGAIVKLKLIGKLQDGTTVFVKKGHEEDEEPFEFKIDEEQVIEGLEKAVMGMKKGEVALITISPEYAFGSSESKQELAVIPPNSTVYYEVELVSFIKEKESWDMNTQERIEAAGKKKEEGNVLFKAGKYARASKRYERGVKYIEYDSTFDEEEKKKSKDLKIACNLNDAACKLKLKDYKEAAKLSTKVLEMDSRNVKAMYRRAHAYLETADLDLAELDIKKALEIDPDNKEVKIEYKKLKEKVKEYNKKDAKFYSNMLSKMLEPHKGTQKEAQAMSIDTKA

SEQ ID NO: 9116 - protein, 457 aa, Aotus nancymaae
MTTDEGAKNSRENPTATVAEQGEDVTSKKDRGVLKIVKRVGHGEETPMIGDKVYVHYNGKLSNGKKFDSSHDRNEPFVFSIGKGQVIKAWDIGVATMKKGEICHLLCKPEYAYGATGSLPKIPSNATLFFEIELLDFKGEDLLEDGGIIRRTKRRGEGYSNPNEGARVQIHLEGRCGGRVFDCRDVAFTVGEGEDHDIPIGIDKALEKMQREEQCILHLGPRYGFGEAGKPKFGIEPNAELIYEVTLKSFEKAKESWEMDTKEKLEQAAIVKEKGTLYFKGGKYVQAVIQYGKIVSWLEMEYGLSEKESKASESFLLAAFLNLAMCYLKLREYTKAVECCDKALGLDSANEKGLYRRGEAQLLMNEFESAKGDFEKVLEVNPQNKAARLQIFMCQKKAKEHNERDRRIYANMFKKFAEQDAKEEANKAMSKKTSEGVTNEKLAVSHAVEEEKPEGHV

SEQ ID NO: 9117 - protein, 582 aa, Glycine max
  unsure (1)..(582): unsure at all Xaa locations
MDEDFDMPTAEAMGEDFDFAGATGGDLDGSSSNPILKVGEEKEIEEGLKKKLLKEGEGWDTPEVGDEVQVHYTGTLLDGTKFDSSRDRGTPFSFTLGQGQVIKGWDQGIITMKKGENSLFTIPAELAYGETGSPPTIPPNATLQFDVELLSWTSVKDICKDGGLFKKILTKGEKWXENPKDPDEVLVKYEACLEDGTLVAKSDGVEFTVNDGYFCPALSKAVKTMKKGEKVLLTVKPQYGFGEKGKPAHDEEGAVPPNATLQITLELVSWKTVSEVTEDKKIIKKILKEGEGYERPNEGAIVKLKVIGKLQDGTLFLKKGHDDEGELFEFKTDEEQVIDGLDRAVLTMKKGEIALLIIGPEYAFGSSESQLELAVVPPNSTVYYEVELVSFEKEKESWDMDTPEKIEAAGKKKEEGNALFKAGKYARASKRYEKAVKFIEYDTAFSEEEKKSSKALKVACNLNNAACKLKLKDYKQAEKLCTKVLDLESTNVKALYRRAQAYIQLADLDLAEFDIKKALEIDPNNRDVKLEYKTLKEKMKEYNKKEAKFYGNMFNKLHKLDSLDSNKPASKDAQPMNIDSKA

SEQ ID NO: 9118 - protein, 566 aa, Glycine max
MGEDFEFPSAGNMEMPEEEEFESPILKVGEEKEIGKMGLKKKLLKEGEGWDTPDSGDQVEVHYTGTLLDGTKFDSSRDRGTPFKFKLGQGQVIKGWDEGIKTMKKGENALFTIPPELAYGESGSPPTIPPNATLQFDVELLSWTSVKDICKDGGILKNIITEGEKWDNPKDLDEVFVKFEARLEDGTVISKSDGVEFTVEEGYFCPALAKAVKTMKKGEKVLLNVKPQYAFGESGRPALGDEGAVPPNAYLQLDLELVSWKTVSDITKDRKVLKKTLKEGEGYERPNDGAVVQVKLIGKLQDGTVFVKKGYVDEQPFEFKIDEEQVIDGLDQAVKNMKKGEIALLIIQPEYAFGPSGSSQELANVPPNSTVYYEVELLSFVKEKESWDLNTQEKIEAAGKKKEEGNAFFKVGKYERASKRYEKAIKFVEYDSSFSDEEKQQTKALKITCNLNNAACKLKLKDYKQAEKMCTKVLELDSRNVKALYRRAQAYLHLVDLDLAEMDIKKALEIEPNNRDVKMEYKILKQKVREHNKKDAQFYGSIFAKMNKLEQATKQEPVPMTIDSKA

SEQ ID NO: 9119 - protein, 544 aa, Glycine max
MEEDFDIPGGEEMDLGEDRVGEEREIGSRGLKKKLLKEGQGWETPEVGDEVQVHYTGTLLDGTKFDSSRDRDSPFSFTLGQGQVIKGWDEGIKTMKKGENAIFTIPPELAYGESGSPPTIPPNATLQFDVELLSWTSVKDICKDGGIFKKIVTEGDKWENPKDPDEVLVKYEVHLENGKLVAKSDGVEFTVREGHYCPALSKAVKTMKKGEKVLLTVKPQYGFGEKGKPEQGDEGAVPPNATLQITLELVSWKTVSEVTDDKKVIKKILKEGEGYERPNEGAIVKVKLIGKLQDGAAFLKKGHDEEEKLFEFKTDEEQVVDGLDRAVLTMKKGEVALLTIAPEYAFGSSESQQELAVVPPNSTVYFEVELVSFEKEKESWDLNTEEKLEAAGKKKEEGNVLFKAGKHARASKRYEKAVKYIEYDSSFGEEEKKQAKTLKVACNLNNAACKLKLKDYKEAEKLCTKVLDLESTNVKALYRRAQAYMQLTDLDLAELDIKKALEIDPNNRDVKLEYRTLKEKVKANNRKEAQFYGNMINKMTKIGS

SEQ ID NO: 9120 - protein, 574 aa, Glycine max
  unsure (1)..(574): unsure at all Xaa locations
MDEDFDMAAAEPMGEDFDXSRGSGSNLLKVGEEKEIEEGLKKKLLKEGEGWDTPEAGDEVQVHYTGTLLDGTKFDSSRDRGTPFSFTLGQGQVIKGWDQGIITMKKGENALFTIPAELAYGESGSPPTIPPNATLQFDVELLSWTSVKDICKDGGLFKKILTXEGEKWENPKDPDEVLVKYEAHLEDGTLVAKSDGVEFTVNDGHFCPAFSKAVKTMKKGEKVLLTVKPQYGFGEKGKPAHGDEGAVPPNATLQITLELVSWKTVSEVTDDKKVIKKILKEGEGYEHPNEGAIVKLKVIGKLQDGTLFLKKGHDDEGGLFEFKTDEEQVIDGLDRAVLTMKKGEVALLTIAPEYAFGSSESQQELAVVPPNSTLYYEIELVSFEKEKESWDMDTPEKIEAAGKKKEEGNALFKAGKYARASKRYEKAVKFIEYDTAFSEEEKKSSKSLKVACNLNNAACKLKLKDYKQAEKLCTKVLDLESTNVKALYRRTQAYIQLADLDLAEFDIKKALELEPNNRDVKLEYVTLKEKMKEYNKKEAKFYGNMFNKLHKLDSLDNSKPASKDAQPINIDSKS

SEQ ID NO: 9121 - protein, 584 aa, Glycine max
  unsure (1)..(584): unsure at all Xaa locations
TRPGQQNSLEPLSHNSKEGKTKTKTPLSFSESSSERKAAMEEDFDIPGGEEMDLGEDXXVGEEREIGSGGLKKKLLKEGQGWETPEVGDEVQVHYTGTLLDGTKFDSSRDRDSPFSFTLGQGQVIKGWDEGIKTMKKGENAIFTIPPELAYGESGSPPTIPPNATLQFDVELLSWTSVKDICKDGGIFKKIITEGEKWENPKDPDEVLVKYEVHLENGKLLAKSDGEEFTVREGHYCPALSKAVKTMKKGEKVLLTVKPQYGFGEKGKPEQGDEGAVPPNATLQITLELVSWKTVSEVTDDKKVIKKILKEGEGYERPNEGAIVKVKLIGKLQDGTAFLKKGHDEEEKLFEFKTDEEQVVDGLDRAVLTMKKGEVALLTIAPDYAFGTSESQQELAVVPPNSAVYFEVELVSFEKEKESWDLNTEEKLEAAGKKKEEGNVLFKASKYARASKRYEKAVKYIEYDSSFGEEEKKQAKTLKVACNLNNAACKLKLKDYKEAEKLCTKVLDLESTNVKALYRRAQAHMQLTNLDLAELDIKKALDIDPNNRDVKLEYRTLKEKVKENNRKEAQFYGNMINKMTKIGS

SEQ ID NO: 9122 - protein, 568 aa, Glycine max
  unsure (1)..(568): unsure at all Xaa locations
MGEDFEFPSAGNMEMPEEEEFESPILKVGEEKEIGKMGLKKKLLKEGEGWDTPDSGDQVEVHYTGTLLDGTKFDSSRDRGTPFKFKLGQGQVIKGWDEGIKTMKKGENALFTIPPELAYGESGSPPTIPPNATLQFXDVELLSWTSVKDICKYGGILKNIITEEEKWDNPKELYEVVXVKFXARLKDAKVISKSEAVEFTVEEGYFCPALAKAVKTMKKGEKVLLNVKPQYAFGESGRPALGDEGAVPPNAYLQLDLELVSWKTVSDITKDRKVLKKTLKEGEGYERPNDGAVVQVKLIGKLQDGTVFVKKGYVDEQPFEFKIDEEQVIDGLDQAVKNMKKGEIALLIIQPEYAFGPSGSSQELANVPPNSTVYYEVELLSFVKEKESWDLNTQEKIEAAGKKKEEGNAFFKVGKYERASKRYEKAIKFVEYDSSFSDEEKQQTKALKITCNLNNAACKLKLKDYKQAEKMCTKVLELDSRNVKALYRRAQAYLHLVDLDLAEMDIKKALEIEPNNRDVKMEYKILKQKVREHNKKDAQFYGSIFAKMNKLEQATKQEPVPMTIDSKA

SEQ ID NO: 9123 - protein, 587 aa, Glycine max
  unsure (1)..(587): unsure at all Xaa locations
TRPGQQNSLEPLSHNSKEGKTKTKTPLSFSESSSERKAAMEEDFDIPGGEEMDLGEDXXVGEEREIGSGGLKKKLLKEGQGWXETPEVGDEVQVHYTGTLLDGTKFDSSRDRDSPFSFTLGQGQVIKGWDEGIKTMKKGENAIFTIPPELAYGESGSPPTIPPNATLQFDVELLSWTSVKDICKDGGIFKKIITEGEKWENPKDPDEVLVKYEVHLENGKLLAKSDGEEFTVREGHYCPALSKAVKTMKKGEKVLLTVKPQYGFGEKGKPEQGDEGAVPPNATLQITLELVSWKTVSEVTDDKKVIKKILKEGEGYERPNEGAIVKVKLIGKLQDGTAFLKKGHDEEEKLFEFKTDEEQVVDGLDRAVLTMKKGEVALLTIAPDYAFGTSESQQELAVVPPNSAVYFEVELVSFEKEKESWDLNTEEKLEAAGKKKEEGNVLFKASKYARASKRYEKAVKYIEYDSXSFGEEEKKQAQTLKVAXCNLNNAACKLKFKDYKEAEKLCTKVLDLESTNVKALYRRAQAHMQLTNLDLAELDIKKALDIDPNNRDVKLEYRTLKEKVKENNRKEAQFYGNMINKMTKIGS

SEQ ID NO: 9124 - protein, 517 aa, Glycine max
  unsure (1)..(517): unsure at all Xaa locations
MEEDFDIPGGEEMDLGEDKVGEEREIGSRGLKKKLLKEGQGWETPEVGDEVQVHYTGTLLDGTKFDSSRDRDSPFSFTLGQGQVIKGWDEGIKTMKKGENAIFTIPPELAYGESGSPPTIPPNATLQFDVELLSWTSVKDICKDGGIFKKIVTEGDKWENPKDPDEVLVKYEVHLENGKLVAKSDGVEFTVREGHYCPALSKAVKTMKKGEKVLLTVKPQYGFGEKGKPEQGDEGAVPPNATLQITLELVSWKTVXEVTDDKKVIKKILKEGEGYERPNEGAIVKVKLIGKLQDGAAFLKKGHDEEEKLFEFKTDEEQVVDGLDRAVLTMKKGEVALLTIAPEYAFGSSESQQELAVVPPNSTVYFEVELVSFEKEKESWDLNTEEKLEAAGKKKEEGNXLFKXSKYARXSXXYEKAVKYIEYDSSFXEEEKKQAKTLKVACNLNNXACKLKXKDXKEAEKLCTKVLDLESTNVKAXYRRAQAHMQLTNLDLXELDIXKAFDIDPNNRDVKLEXRXL

SEQ ID NO: 9125 - protein, 599 aa, Glycine max
  unsure (1)..(599): unsure at all Xaa locations
HLIVVLTIRGRLFENRLERKKHGGAVVGGGXIRRGARRGSGLKVGEEREFSGFKKKLFKPGQGLEFPNFDDVVTFAVLEXGTLLDGTTFDSTRERDQPRTFALGKDDIGAGLDRAIITMKKGEVALFTLPGXXGGDGDVSLDSDDSSAVRFEVELVSWITVVDVCKDGGVVKKILEKGSGIERPGDLDEVLVKYRVVLGDGTVVVETRGVEFHMKDGHLFPILPKVIMTMTRGEKAELILQPQYAFGEKGREAGSGLCSIPPNSVLHVNIELVSFKPVINVTGDSKVIKKILKEGEGAFTANEGANVTVSFTAMLEDGTVFEKRGIGETLPLEFITDEEQVITGLDRAVATMKKGERAIISIHPDYAFGDVEVRRDIAIVPPGSNVVYDIEMMDFIKEKAPWELNSKEKIEVAGRMKEEGNVLFKVGNYQRAGKKYEKAADFVDEDGSFGFDEQKQAQTLKVSCWLNSAACSLKLNDFPGAIKLCSQVLDVEFCNVKAFYRRAQAYIETGDYLLADVDIKKALVVDPQNRDVKVIQKKLKQLQADSDKKDAKLYENMLARKTKDPSMAIKRLKVEKDQGENEEVARMEIDEVADSAVIQ

SEQ ID NO: 9126 - protein, 199 aa, Glycine max
  unsure (1)..(199): unsure at all Xaa locations
NQTFLPTTPIPTFRQHGRGLRHADGSSSSNPILKVGEEKEIGKEGLKKKLLKEGEGWDTPEVGDEVQVHYTGTLLDGTKFDSSRDRGTPFSFTLGQGQVIKGWDQGIITMKKGENSLFTIPAELAYGETGSPPTIPPNATLQFDVELLSWTSVKDICKDGGLFKKILTKGEKWENPKDPDEVLVKYEACLEDGLLCKIX

SEQ ID NO: 9127 - protein, 216 aa, Glycine max
  unsure (1)..(216): unsure at all Xaa locations
XGDKKILKKIKNLGEGFDRPNEGSQVKVIYLCKGEDGMIIESKXXSEEEPFEFTTQEEQVPEGLERAIMTMKKGEQALVTVDAEYLCDYNNSKGNTAXXNKVLYYEVELVDFVKEKPFWKMDTQEKIEACERKKHDGNLLFKVENFRHASKKYEKAVKYIEFDHSFSEDEKCRANTLHLSCNLNNAACKLKLGEYIEASRLCTKVLEQDPLNIKAL

SEQ ID NO: 9128 - protein, 173 aa, Glycine max
  unsure (1)..(173): unsure at all Xaa locations
TKTYTSLFFSEPYSDRKAAREEDWHIPGRKEMDLGEHXXVCEEREIGSCGLNKKLLXEGHGWETPXEVGDEAQVHFRGTLLHGTKLDYSRERDSSLRLTLGQGQVIEGCDEGIXRTMMKGENAIMTIRAQLAYGESGSPTTIPANATLQLDVELVSXTSAQDICKDGGLFNNI

SEQ ID NO: 9129 - protein, 411 aa, Glycine max
  unsure (1)..(411): unsure at all Xaa locations
XRVSYVGPPPQQKEGLIKEILREGTGDEHPQSGLNVHVHYVGTLTNGKKFDSSRDRDEPFTFKLNAGQVIKGWDVGVSSMKRGELAKFTLQPDYAYGATGAGRDIPPNATLIFEVELLDWEDEEDISDARNESIKMKSLNRTGQSTVDVGDRVTVKIIARVLTVDDQNKPSVESEIETAELTFTIDDEEVLPAVEKSPKETTYLKHSETFLNAVKNLNNQRDRKLELEIEILNVEAYKGKSAESPKEKLEAAKSLKDEGNKLFQQGRYGIAKRKYKRATDLCDYLDSFEKDEIAASKDVQLPVYLNLAAVDLKEKDYKSAIDNSTKALAIDAKNVKGLYRRAQAHQGLGDLEQAKTDLAAALVAEPSNAAVQTLLNKIKQDIVNAKTKEKQLYGRMFKXINYYYXKKKKKX

SEQ ID NO: 9130 - protein, 145 aa, Glycine max
  unsure (1)..(145): unsure at all Xaa locations
LVSCKTVSEVTHDNKVIRKILKXGAGYERPNEGAIAKVQRVGKLQDGAAFLEKVHHTEEQTXFAFFPGEEQVADGLNRGVFPMKKGEVALMTIAPEYAFGSSKSQQEGLVVPPTPTVYLEVXVVSFEKEKESWDLFTKEKLEAAG

SEQ ID NO: 9131 - protein, 214 aa, Glycine max
  unsure (1)..(214): unsure at all Xaa locations
PEFPARPRVRTVQQTQRRGCCCFDNPRKMVVVLSDQDEFDEEPGEVVDSAPPQKVGEERQFSGFKKKLLKRGQGWEFPNFDDVVTVRCVGIGTLLDGTXRFDYTRERDRPRTFALGKDDVVLGWTVGFAPMKKGEGGICSRLPRRWVGXXGDFTRDSDGSVVRFEVELVSWITVVDVCKDGGVVKKIMEKGSGNERPGDLDEVLVKYQVVLDDG

SEQ ID NO: 9132 - protein, 159 aa, Glycine max
  unsure (1)..(159): unsure at all Xaa locations
KHTHFFCAERLALLDEDFDLPCGDVMDLGDYMVREERKITSRALQKTLLMVRKGLQTPNCLDETTXLYAGTLLDGTDDYISTDRDXACICALGQGRDIXGWGDGIKTMKKGENAILTIPPELFYGECGCNSTITANATLQIDAYLVSWTSVKDICKDGX

SEQ ID NO: 9133 - protein, 133 aa, Glycine max
  unsure (1)..(133): unsure at all Xaa locations
XARGLAPMEDDFYLLGGXEMDLGQYDVSEEREIGSGGLMKKLLTDCLGWDTLEFGDHVLVHYTGTLLDGTKFDSSRDRDLLLRLTLGHWHVTKGWDEGITTMKKCENAHFTVPTELAYGESGSHSTITTNATL

SEQ ID NO: 9134 - protein, 151 aa, Vicia faba
MKLFSIFLIFTIFIIASALVAAKSAADVTELQIGVKYKPASCEVQAHKGDKVKVHYRGKLTDGTVFDSSFERNSPIDFELGGGQVIKGWDQGLLGMCLGEKRKLKIPAKLGYGEQGSPPTIPGGATLIFDTELVGVNDKSLSEEKSTSSEL

SEQ ID NO: 9135 - protein, 583 aa, Oryza sativa (japonica cultivar-group)
MDDDFEMPPPGADDDLMMGEDGMGDFGGADGPPLKVGEEKEIGKQGLRKKLLKEGEGWETPEVGDEVEVHYTGTLLDGKKFDSSRDRGTPFKFKLGQGQVIKGWDLGIKTMKKGENAVFTIPPDLAYGESGSPPTIPASATLQFDVELLSWTSVKDICQDGGIFKKILKEGEKWENPKDLDEVFVKYEARLEDGTVISKSEGAEFTVKDGFFCPALAKAVKTMKKAEKVLLTVKPQYGFGENGRPAAGEEGAVPPNATLLVNLELVSWKTVTEIGDDKKILKKVLTEGTGYERPNEGAVVKVKITGKLQDGTIFTKKGHDEPEPFEFKTDEEEVIDGIDRAVLNMKNGEVALVTIPPEYAFGSTESKQDLAVVPPNSTVIYEVELVSFVKDKESWDLNNTEKIETAGAKKEEGNALFKLGKYVRASKRYEKAAKFIEYDSSFSEDEKKQSKQLKVTCNLNNAACKLKLKDYKQAEKLCTKVLELDSQNVKALYRRAQAYMQLADLELAEVDIKKALEIDPDNRQVLDVKLTYKNLKEKVKEYNKKDAKFYSNMFAKMTKQPAEDGKAGSGAESKQGSEPVTAA

SEQ ID NO: 9136 - protein, 552 aa, Oryza sativa (japonica cultivar-group)
MKLSELGKPDEYLFVWRGEIGRLENFGSERGGGRGSSPGFAKWTVQEPAGERFDWLETEGFYCCEAQVHFTGKRLDGTWFASTREDGVPLTFILGQENVMRGFSMAVSSMQAGEKAVFTIPPELAGTKSRCPVDIPGNIAPNEALRFDIELISLVTITDILDDEGILKKIIKRGLGSDKPCDLDEALVNYNACLEDGMSVSMSEGIEFNLAEGFFCPAFARAVETMTEGEEAVLIVKPEYGFGERGRPSIGDEAGVPPDATLYVYLQLMSWKTVRHIGENGTILKKTLCRGNLEGQQTENEAVVGVRLIGKLQDGAVFDQRGHEGDEPFKFMVDEEQVSEGLEEAVLTMREGEVSLFTIPPHRVQDQLLVVPVGSSVTYEIELVSVVNDKPPRLMSQAETIEAAAEKEKEGDKLFSSSKFLRAYRRYYKARQIILLRFGRGETDEEIKQMLISLTFKAAECANQLQRYEQAYHRYREILEYDPGNVKAREMTGRAFPEASLGIDTAAMHRGLDQVILARRKDPLEYKEYIVLLRLWPDAATAGMDDDGAQRS

SEQ ID NO: 9137 - protein, 589 aa, Oryza sativa (japonica cultivar-group)
MKSRSNKTWHKINGVHFTGELVDGTQFVSSRENDIPERFILGQEDVMHGFNLAVSSMQPGEKAIFTIPSALTMTKAGSPASIPSNIPPNQTLRFEIELIAMFTIIDIFKDEGILKKIVKNAEPDRKQSHSSDFVFVKYDACLMDGTSVSKSEGVEFSLTDGFFCPAFAHAVHTMKEGEEAVLIVKPKYAFGEQGRPSQGEEAAVPPDATLYVHLLFVCWIRRIGEDQAIAKKTLRIGNSQRIHTQSQAVVKVRLLGKLQDGTVFDRRGYGDDEPFEFVVDEGQVIDGLDESVMTMEEGEVAEFTIPPQHAFDAVGSDQHQFAFVPRNATVVYKIELLSVVNEKHPLYIPSRDEIVEYASRKEEEGDIYFNLGKHLRAHRRYFKARQIIEYSRFGVRRGKINLIKLLSIPTSEIDAQLEEMWISCTFKAAKCAIQLGCYMQASCYYSEVLNYDVANVQAQQQQTLLQEFPDGSSRDPDAMQRGFEQFPPEYESELQLNATFTPAAFSPRRKGEHPYRGEIIGFPDVQANSSQPASTPSTAPSTPNPATPQTNALATGTSGTPSGSAAQSSGTINTNRGFLFRCFGPSPTS

SEQ ID NO: 9138 - protein, 328 aa, Oryza sativa (japonica cultivar-group)
MAVSSMQAGEKAVFTIPPELAGTKSRCPADIPANLPPNQALQFDVELISLITITDILDNEGILKKTMKRGVGNDKPCDLDEVLVNYNACLEDGMSVSMSEGVEFNLAEGFFCPAFARAVETMTEGEEVVLIVKLEYGFGERGRPSIGDEAAVPPDATLYVYLQLMSWKTVRHIGQNGTILKKTLRRGNLEGQHTENQAVVGVRLIGKLHDGAVFDQRGHQGDEPFEFVVDEEQVSDGLEEAVLTMWEGEVSLFTIPPQCLQDQHVVVPPGSSVTYEIELVSVVNDKHPWLMSQAESVEAAVEKEKEGDKLFGSSKYLRAYRRYYKVLN

SEQ ID NO: 9139 - protein, 283 aa, Oryza sativa (japonica cultivar-group)
MRPGERAIFTIPPKLAITKSGSPASIPSSIPPEQTLRFEIELISLFAITDILENGSILKKIIKRPLPDKSPSNHADTVIVNYNACLEDGNSVSKSERLELNLASRTALKYAVKTMREGEEAIFIVKPRYAFGAQGRDSTGDQAAVPPDATLYLYVQLAERKTAKQNEAEEKGPFIDGPNEAKTTARALPKRRPVKPGFSLPVVQNDRPTYPGHVLFVPHVVEEEEADAGQAASTTTSGLATPPTTAADVGTSAATNSSAAQGSGIVKTETGFLFKRFRPWPAN

SEQ ID NO: 9140 - protein, 233 aa, Legionella tucsonensis
MKMKLVTAAVMGLAMSTVIAATDATSLVTDKDKLSYSIGADLGKNFKNQGIDINPDALAKGMQDGMSGAQLILTEQQMKDVLNKFQKELMAKRSAEFNKKAEENKSKGETFLSTNKSKSGVVVLPSGLQYKIIEAGTGNKPGKSDTVTVEYTGTLIDGTVFDSTEKAGKPATFQVSQVIPGWTEALQLMPAGSTWEIYVPSDLAYGPRSVGGPIGPNETLIFKIHLISVKKSA

SEQ ID NO: 9141 - protein, 213 aa, Legionella pneumophila
ATDATSLATDKDKLSYSIGADLGKNFKNQGIDVNPEAMAKGMQDAMSGAQLALTEQQMKDVLNKFQKDLMAKRTAEFNKKADENKVKGEAFLTENKNKPGVVVLPSGLQYKVINSGNGVKPGKSDTVTVEYTGRLIDGTVFDSTEKTGKPATFQVSQVIPGWTEALQLMPAGSTWEIYVPSGLAYGPRSVGGPIGPNETLIFKIHLISVKKSS

SEQ ID NO: 9142 - protein, 233 aa, Legionella pneumophila
MKMKLVTAAVMGLAMSTAMAATDATSLATDKDKLSYSIGADLGKNFKNQGIDVNPEAMAKGMQDAMSGAQLALTEQQMKDVLNKFQKDLMAKRTAEFNKKADENKVKGEAFLTENKNKPGVVVLPSGLQYKVINSGNGVKPGKSDTVTVEYTGRLIDGTVFDSTEKTGKPATFQVSQVIPGWTEALQLMPAGSTWEIYVPSGLAYGPRSVGGPIGPNETLIFKIHLISVKKSS

SEQ ID NO: 9143 - protein, 233 aa, Legionella pneumophila
MKMKLVTAAVMGLAMSTAMAATDATSLATDKDKLSYSIGADLGKNFKNQGIDVSPEAMAKGMQDAMSGAQLALTEQQMKDVLNKFQKDLMAKRTAEFNKKADENKVKGEAFLTENKNKPGVVVLPSGLQYKVINAGNGVKPGKSDTVTVEYTGRLIDGTVFDSTEKTGKPATFQVSQVIPGWTEALQLMPAGSTWEIYVPSGLAYGPRSVGGPIGPNETLIFKIHLISVKKSS

SEQ ID NO: 9144 - protein, 233 aa, Legionella pneumophila
MKMKLVTAAVMGLAMSTAMAATDATSLATDKDKLSYSIGADLGKNFKNQGIDVSPEALAKGMQDAMSGAQLALTEQQMKDVLNKFQKDLMAKRTAEFNKKADENKVKGEAFLTENKNKPGVVVLPSGLQYKVINAGNGVKPGKSDTVTVEYTGRLIDGTVFDSTEKTGKPATFQVSQVIPGWTEALQLMPAGSTWEIYVPAGLAYGPRSVGGPIGPNETLIFKIHLISVKKSS

SEQ ID NO: 9145 - protein, 233 aa, Legionella pneumophila
MKMKLVTAAVMGLAMSTAMAATDATSLATDKDKLSYSIGADLGKNFKNQGIDVNPEAMAKGMQDAMSGAQLALTEQQMKDVLNKFQKDLMAKRTAEFNKKADENKVKGEAFLTENKNKPGVVVLPSGLQYKVINAGNGVKPGKSDTVTVEYTGRLIDGTVFDSTEKTGKPATFQVSQVIPGWTEALQLMPAGSTWEIYVPSGLAYGPRSVGGPIGPNETLIFKIHLISVKKSS

SEQ ID NO: 9146 - protein, 221 aa, Dictyostelium discoideum
MWNYIKSNMKYHIQSINQKSPPHVPKLGVQTLNVDEYIEICANNQFKCGNYNIPLALHGVDENLPFRYHRLTHSPDRINNRRSYTKYNVKILSIFSNVSNHRVYDLLPFSQISSTNSNPNGVEITIIKEGKGNIPPVGSNVTVHHAGTLTNGTVFDSSRKRGQPFNFKLGAGQVIKGWDEGVAKMKVGETSKLTISPDFGYGARGAGGVIPPNATLVNNEK

SEQ ID NO: 9147 - protein, 233 aa, Fluoribacter bozemanae
MKMKLVTAAVMGLAMSTVIAATDATSLVTDKDKLSYSIGADLGKNFKNQGIDINPDALAKGMQDGMSGAQLILTEQQMKDVLNKFQKELMAKRSAEFNKKAEENKSKGEAFLSTNKSKSGVVVLPSGLQYKVIEAGTGNKPGKSDTVTVEYTGTLIDGTVFDSTEKTGKPATFQVSQVIPGWTEALQLMPAGSTWEIYVPSDLAYGPRSVGGPIGPNETLIFKIHLISVKKSA

SEQ ID NO: 9148 - protein, 246 aa, Legionella erythra
MKIKLVAAAVVSLAMTTAFAETTTPAAGTTTPATAATPATLTTDIDKLSYSIGADLGKNFKKQGIEISPSAMAKGLQDGMSGSQLLLTEDQMKDVLSKFQKDLMAKRNAEFTKKAEENKSKGEAFLSQNKTKEGVVTLPSGLQYKIIEKGNGAKPTKEDTVTVEYTGRLIDGQVFDSTDKTGKPATFKVSQVIPGWTEALQLMPAGSVWEVYVPASLAYGPRSVGGPIGPNETLIFKIHLISVKKS

SEQ ID NO: 9149 - protein, 249 aa, Legionella hackeliae
MKMRLVAAAVIGLTMSTAIIAADASATATTAPATSATPATSLNSDMDKLSYSIGADLGKNFKKQGIDISPAAMAKGLQDGMSGGQLLLTEQQMKDVLNKFQKDLMAKRNADFNKKAEENKAKGDAFLNQNKAKDGVVSLPSGLQYKILQKGDGAKPSKDDTVTVEYTGTLIDGQVFDSTDRTGKPATFKVSQVIPGWTEALQLMPAGSTWEVYVPADLAYGPRSVGGPIGPNETLIFKIHLISVKKSDA

SEQ ID NO: 9150 - protein, 233 aa, Legionella longbeachae
MKMKLVTAAIMGLAMSTAMAATDATSLTTDKDKLSYSIGADLGKNFKNQGIDINPDVLAKGMQDGMSGAQLILTEEQMKDVLSKFQKDLMAKRSAEFNKKAEENKAKGDAFLSANKSKPGIVVLPSGLQYKIIDAGTGAKPGKSDTVTVEYTGTLIDGTVFDSTEKAGKPATFQVSQVIPGWTEALQLMPAGSTWEVFVPADLAYGPRSVGGPIGPNETLIFKIHLISVKKAA

SEQ ID NO: 9151 - protein, 234 aa, Legionella adelaidensis
MKMKLVAAAAMGLAMTTSIAATNNTQLTTEMDKLSYSIGTDLGKNFKRQGIDINPDMMAKGLKDGMNGGTLLLTDDQMKEVLNKFQKDLMAKRTAEFNKKAEQNKTKGESFLKENKQKQGVVTLPSGLQYKIITAGNGEKPNKEDTVTVEYTGRLIDGEVFDSTERTGKPATFNLSQVIPGWTEALQLMPAGSTWEIYVPADLAYGTRSVGGPIGPNETLIFNIHLISVKKNNA

SEQ ID NO: 9152 - protein, 241 aa, Legionella fairfieldensis
MKMRLVAAAVMSLAMSTTIAATDAATVAPSATSLNSDMDKLSYSIGADLGKNFKKQGIDISPAAMAKGLQDGMNGSQLLLTEDQMKDVLNKFQKDLMMKRTAEFNKKSEENKTKGEAFLNANKTKEGVVSLPSGLQYKIIEKGEGAKPAKEDTVTVEYTGRLIDGQVFDSTDKTGKPATFKVSQVIPGWTEALQLMPAGSTWEVYVPSALAYGPRSVGGPIGPNETLIFKIHLISVKKSDA

SEQ ID NO: 9153 - protein, 233 aa, Legionella gratiana
MKMKLVTAAIMGLAMSTAMAATDATSLATDKDKLSYSIGADLGKNFKNQGIEVNPEVLAKGMQDGMSGAQLILTEEQMKDVLSKFQKDLMAKRSAEFNKKAEENKAKGDAFLSANKAKPGVVALPSGLQYKIIDAGNGTKPGKSDTVTVEYTGTLIDGTVFDSTEKAGKPATFQVSQVIPGWTEALQLMPAGSTWEVYVPSDLAYGPRSVGGPIGPNETLIFKIHLISVKKEA

SEQ ID NO: 9154 - protein, 249 aa, Legionella lansingensis
MKMRLVAAAVMGLAMTTAIAASNTPNAATPTTPAAATSATSLNSDTDKLSYSIGADLGKNFKKQGIDINPSAMAKGLQDGMSGGQLLLTEQQMKEVLNKFQKDLMAKRNAEFTKKAEENKIKGEAFLTANKNKDGVISLPSGLQYKVLEKGNGAKPTKNDTVTVEYTGKLIDGQVFDSTERTGKPATFKVSQVIPGWTEALQLMPAGSTWEVYVPADLAYGPRSVGGPIGPNETLIFKIHLISVKKSEA

SEQ ID NO: 9155 - protein, 229 aa, Legionella londiniensis
VAAAAMSLAMTTTMAATTTPALDSDIDKLSYSIGIDLGKNFKRQGIDVNPEILVKGLQDGISGNKSLLTEDQMRDVLDKFQKDLMAKRTAEYKKQAEENKAKGEAFLKENKAKEGVVTLPSGLQYKIIKSGSGKKPGKEDTVTVEYTGRLINGEVFDSTEKTGKPATFKLSQVIPGWTEALQLMSEGAIWEIYVPSDLAYGPRSVGGPIGPNETLIFKIHLLEVNKSEA

SEQ ID NO: 9156 - protein, 202 aa, Legionella londiniensis
AAAAMSLAMTTTMAATTTPALDSDIDKLSYSIGIDLGKNFKRQGIDVNPEILVKGLQDGISGNKSLLTEDQMRDVLDKFQKDLMAKRTAEYKKQAEENKAKGEAFLKENKAKEGVVTLPSGLQYKIIKSGSGKKPGKEDTVTVEYTGRLINGEVFDSTEKTGKPATFKLSQVIPGWTEALQLMSEGAIWEIYVPSDLAYGPR

SEQ ID NO: 9157 - protein, 241 aa, Legionella nautarum
MKMRLVAAAAMSLAMSTTIAANATATSTPSAASLSTDTDKLSYSIGADLGKNFKKQGIDISPAAMAKGLQDGMSGGQLLLTEEQMKEVLNKFQKELMMKRSAEFNKKSEENKSKGEAFLKDNKSKDGVVSLPSGLQYKILEKGDGAKPAKDDTVTVEYTGRLINGQVFDSTEKTGKPATFKVSQVIPGWTEALQLMPSGSTWEVYIPSDLAYGPRSVGGPIGPNETLIFKIHLISVKKTDA

SEQ ID NO: 9158 - protein, 233 aa, Legionella parisiensis
MKMKLVTAAVMGLAMSTVMAATDATSLVTDKDKLSYSIGADLGKNFKNQGIDINPDALAKGMQDGMSGAQLILTEQQMKDVLNKFQKELMAKRSAEFNKKAEENKSKGDAFLSTNKSKSGVTVLPSGLQYKVIEAGTGNKPGKSDTVTVEYTGTLIDGTVFDSTEKTGKPATFQVSQVIPGWTEALQLMPAGSTWEIYVPSDLAYGPRSVGGPIGPNETLIFKIHLISVKKSA

SEQ ID NO: 9159 - protein, 233 aa, Legionella quinlivanii
MKMKLVAAATMSLAMSTAIAASDVTLSTDMDKLSYSIGADLGKNFKKQGIEVNPAAMAKGLQDGMAGSQLMLTDDQMKEVLNKFQKDLMSKRNAEFSKKSEENKSKGEAFLNQNKTKEGVVSLPSGLQYKVIETGSGAKPAKEDTVTVEYTGKTIDGQVFDSTDKSGKPATFKVSQVIPGWTEALQLMPAGSTWEIYIPSNLAYGPRSVGGPIGPNETLIFKIHLISVKKAAA

SEQ ID NO: 9160 - protein, 233 aa, Legionella santicrucis
MKMKLVTAAIMGLAMSTAMAATDATSLTTDKDKLSYSIGADLGKNFKNQGIDINPEALAKGMQDGMSGAQLILTEEQMKDVLSKFQKDLMAKRSAEFNKKAEENKAKGDAFLSANKSKPGIVVLPSGLQYKIIDAGTGSKPGKSDTVTVEYTGTLIDGTVFDSTEKAGKPATFQVSQVIPGWTEALQLMPSGSTWEVYVPADLAYGSRSVGGPIGPNETLIFKIHLISVKKAA

SEQ ID NO: 9161 - protein, 234 aa, Legionella shakespearei
MKMKLVTAAVMGLALSTAMAAPDATSLPTDKDKLSYSIGADLGKNFKTQGIDINPEALAKGMQDGMSGTQLILTEQQMKDVLNKFQKDLMAKRTSEFNKKADENKSKGEAFLVENKGKTGVVVLPSGLQYKIIDAGTGAKPGKSDTVTVEYTGRLIDGTVFDSTDKTGKPATFQVSQVIPGWTEALQLMPAGSTWEIYVPSALAYGSRSVGGPIGPNETLIFKIHLISVKKTEA

SEQ ID NO: 9162 - protein, 233 aa, Legionella worsleiensis
MKMKLVAAAVLGLAMSGAMAADATSLTTDKDKLSYSIGADLGKNFKNQGIDVNPEALAKGMQDGMSGTQLILTEQQMKDVLNKFQKDLMAKRTSEFNKKADENKLKGEAFLTANKTKAGVVVLPSGLQYKILDAGTGTKPGKSDTVTVEYTGRLIDGTIFDSSDKTGKPATFQVSQVIPGWTEALQLMPAGSTWEIYVPAALAYGSRSIGGPIGPNETLIFKIHLISVKKSDA

SEQ ID NO: 9163 - protein, 243 aa, Tatlockia micdadei
MKMRLVAAAAMGLAMSTTIAATATTDATTSAPGTSLTTDTEKLSYSIGADLGKNFKKQGIEISPAAMAKGLQDGMSGGQLLLTDDQMKDVLNKFQKDLMMKRSAEFNKKAEENKSKGEAFLNENKSKEGVVSLPSGLQYKILERGDGAKPTKDDVVTVEYTGKLIDGQVFDSTEKTGKPATFKVSQVIPGWTEALQLMPAGSTWEVYIPSNLAYGPRSVGGPIGPNETLIFKIHLISVKKSDA

SEQ ID NO: 9164 - protein, 243 aa, Tatlockia micdadei
MKMRLVAAAAMGLAMSTTIAATATTDATTSAPGTSLTTDTEKLSYSIGADLGKNFKKQGIEISPAAMAKGLQDGMSGGQLLLTDDQMKDVLNKFQKDLMMKRSAEFNKKAEENKSKGEAFLNENKSKEGVVSLPSGLQYNILERGDGAKPTKDDVVTVEYTGKLIDGQVFDSTEKTGKPATFKVSQVIPGWTEALQLMPAGSTWEVYIPSNLAYGPRSVGGPIGPNETLIFKIHLISVKKSDA

SEQ ID NO: 9165 - protein, 213 aa, Tatlockia micdadei
AAAAMGLAMSTTIAATATTDATTSAPGTSLTTDTEKLSYSIGADLGKNFKKQGIEISPAAMAKGLQDGMSGGQLLLTDDQMKDVLNKFQKDLMMKRSAEFNKKAEENKSKGEAFLNENKSKEGVVSLPSGLQYKILERGDGAKPTKDDVVTVEYTGKLIDGQVFDSTEKTGKPATFKVSQVIPGWTEALQLMPAGSTWEVYIPSNLAYGPRSV

SEQ ID NO: 9166 - protein, 235 aa, Legionella spiritensis
MKMKLVAAAALGLAMSTTHAVTDTTTNLNTDTDKLSYSIGADLGKNFKKQGIDISPAAMAKGIQDGMSGGELMMTDQQMKDVLNKFQKDLMARRSAEFAKKSEENKARGETFLSQNKTKDGVVTLPSGLQYKVIEKGNGAKPSKDDVVTVEYTGRLIDGQVFDSTEKTGKPATFKVSQVIPGWTEALQLMPAGSTWEVYIPASLAYGSRSVGGPIGPNETLIFKIHLISVKKTDA

SEQ ID NO: 9167 - protein, 205 aa, Legionella spiritensis
AAAALGLAMSTTHAVTDTTTNLNTDTDKLSYSIGADLGKNFKKQGIDISPAAMAKGIQDGMSGGELMMTDQQMKDVLNKFQKDLMARRSAEFAKKSEENKARGETFLSQNKTKDGVVTLPSGLQYKVIEKGNGAKPSKDDVVTVEYTGRLIDGQVFDSTEKTGKPATFKVSQVIPGWTEALQLMPAGSTWEVYIPASLAYGSRSV

SEQ ID NO: 9168 - protein, 237 aa, Legionella feeleii
MKMRLVAAAVISMAMSTTIAAADATATTSLNSDMDKLSYSIGADLGKNFKKQGIEISPAAMAKGLQDGMSGGQLLLTEQQMKDVLNKFQKDLMAKRNAEFTKKAEENKAKGEAFMSQNKAKEGVVSLPSGLQYKIIQAGTGAKPAKDDTVTVEYTGKLIDGQVFDSTEKTGKPATFKVSQVIPGWTEALQLMPAGSTWEVYVPAGLAYGPRSVGGPIGPNETLIFKIHLISVKKSDA

SEQ ID NO: 9169 - protein, 586 aa, Oryza sativa
MDDDFEMPPPGADDDLMMGEDGMGDFGGADGPPLKVGEEKEIGKQGLRKKLLKEGEGWETPEVGDEVEVHYTGTLLDGKKFDSSRDRGTPFKFKLGQGQVIKGWDLGIKTMKKGENAVFTIPPDLAYGESGSPPTIPASATLQFDVELLSWTSVKDICQDGGIFKKILKEGEKWENPKDLDEVFVKYEARLEDGTVISKSEGAEFTVKDGFFCPALAKAVKTMKKAEKVLLTVKPQYGFGENGRPAAGEEGAVPPNATLLVNLELVSWKTVTEIGDDKKILKKVLTEGTGYERPNEGAVVKVKITGKLQDGTIFTKKGHDEPEPFEFKTDEEEVIDGIDRAVLNMKNGEVALVTIPPEYAFGSTESKQDLAVVPPNSTVIYEVELVSFVKDKESWDLNNTEKIETAGAKKEEGNALFKLGKYVRASKRYEKAAKFIEYDSSFSEDEKKQSKQLKVTCNLNNAACKLKLKDYKQAEKLCTKVLELDSQNVKALYRRAQAYMQLADLELAEVDIKKALEIDPDNRDVKLTYKNLKEKVKEYNKKDAKFYSNMFAKMTKQPAEDGVSSSSHLNCETLKLYTFHNPQSLF

SEQ ID NO: 9170 - protein, 580 aa, Oryza sativa
MDDDFEMPPPGADDDLMMGEDGMGDFGGADGPPLKVGEEKEIGKQGLRKKLLKEGEGWETPEVGDEVEVHYTGTLLDGKKFDSSRDRGTPFKFKLGQGQVIKGWDLGIKTMKKGENAVFTIPPDLAYGESGSPPTIPASATLQFDVELLSWTSVKDICQDGGIFKKILKEGEKWENPKDLDEVFVKYEARLEDGTVISKSEGAEFTVKDGFFCPALAKAVKTMKKAEKVLLTVKPQYGFGENGRPAAGEEGAVPPNATLLVNLELVSWKTVTEIGDDKKILKKVLTEGTGYERPNEGAVVKVKITGKLQDGTIFTKKGHDEPEPFEFKTDEEEVIDGIDRAVLNMKNGEVALVTIPPEYAFGSTESKQDLAVVPPNSTVIYEVELVSFVKDKESWDLNNTEKIETAGAKKEEGNALFKLGKYVRASKRYEKAAKFIEYDSSFSEDEKKQSKQLKVTCNLNNAACKLKLKDYKQAEKLCTKVLELDSQNVKALYRRAQAYMQLADLELAEVDIKKALEIDPDNRDVKLTYKNLKEKVKEYNKKDAKFYSNMFAKMTKQPAEDGKAGSGAESKQGSEPVTAA

SEQ ID NO: 9171 - protein, 557 aa, Oryza sativa
  unsure (1)..(557): unsure at all Xaa locations
MDDDFEMPPPGADDDLMMGEDGMGDFGGADGPPLKVGEEKEIGKQGLRKKLLKEGEGWETPEVGDEVEVHYTGTLLDGKKFDSSRDRGTPFKFKLGQGQVIKGWDLGIKTMKKGENAVFTIPPDLAYGESGSPPTIPASATLQFDVELLSWTSVKDICQDGGIFKKILKEGEKWENPKDLDEVFVKYEARLEDGTVISKSEGAEFTVKDGFFCPALAKAVKTMKKAEKVLLTVKPQYGFGENGRPAAGEEGAVPPNATLLVNLELVSWKTVTEIGDDKKILKKVLTEGTGYERPNEGAVVKVKITGKLQDGTIFTKKGHDEPEPFEFKTDEEEVIDGIDRAVLNMKNGEVALVTIPPEYAFGSTESKQDLAVVPPNSTVIYEVELVSFVKDKESWDLNNTEKIETAGAKKEEGNALFKLGKYVRASKRYEKAAKFIEYDSSFSEDEKKQSKQLKVTCNLNNAACKLKLKDYKQAEKLCTKVXIQFFLQKTHLLCVLVNXRDVKLTYKNLKEKVKEYNKKDAKFYSNMFAKMTKQPAEDGKAGSGAESKQGSEPVTAA

SEQ ID NO: 9172 - protein, 242 aa, Legionella israelensis
MKLKLVAATVMSMAISTAIAATDASSLNTDVEKLSYSIGADLGKNFKKQGIEIDPQAMAAGMKDGMSGDKLKLTEQQMRDVLNKFQQELMAKRNAEFNKKAAENKAKGEAFLEQNKGKEGVVTLPSGLQYKILEKGTGTKPSKSDTVTVEYTGRLINGQVFDSSERVGKPATFKVSQVIPGWTEALQLMPAGSTWEIYVPSDLAYGPRSIGGPIGPNETLIFKIHLISVKKDKDTDTAQKDA

SEQ ID NO: 9173 - protein, 219 aa, Legionella jamestowniensis
AAAVIGLTMSTAIVAADASTPATTTTPATSAPATSLNSDMDKLSYSIGADLGKNFKKQGIDINPAAMAKGLQDGMTGGQLLLTEQQMKDVLNKFQKDLMAKRNAEFNKKADENKAKGEAFLNQNKAKDGVVTLPSGLQYKILQKGDGAKPAKEDTVTVEYTGKLVDGQVFDSTERTGKPATFKVSQVIPGWTEALQLMPAGSTWEVYVPADLAYGPRSV

SEQ ID NO: 9174 - protein, 225 aa, Legionella jamestowniensis
MKMRLVAAAVIGLTMSTAIVAADASTPATTTTPATSAPATSLNSDMDKLSYSIGADLGKNFKKQGIDINPAAMAKGLQDGMTGGQLLLTEQQMKDVLNKFQKDLMAKRNAEFNKKAEENKAKGEAFLNQNKAKDGVVTLPSGLQYKVLQKGDGAKPAKEDTVTVEYTGKLVDGQVFDSTERTGKPATFKVSQVIPGWTEALQLMPAGSTWEVYVPADLAYGPRSV

SEQ ID NO: 9175 - protein, 219 aa, Legionella jamestowniensis
AAAVIGLTMSTAIVAADASTPATTTTPATSAPATSLNSDMDKLSYSIGADLGKNFKKQGIDINPAAMAKGLQDGMTGGQLLLTEQQMKDVLNKFQKDLMAKRNAEFNKKAEENKAKGEAFLNQNKAKDGVVTLPSGLQYKVLQKGDGAKPAKEDTVTVEYTGKLVDGQVFDSTERTGKPATFKVSQVIPGWTEALQLMPAGSTWEVYVPADLAYGPRSV

SEQ ID NO: 9176 - protein, 251 aa, Legionella jordanis
MKMRLVAAAVMGLAMTSAIAANDATNTATSATPASNTATSATSLNSDMDKLSYSIGADLGKNFKKQGIDINPAAMAKGLQDGMSGVQLQLTEQQMKDVLNKFQKDLMAKRNAEFSKKADENKSKGEAFLNANKSKEGVVSLPSGLQYKILEKGNGVKPSKDDTVTVEYTGKLIDGQVFDSTERTGKPATFKVSQVIPGWTEALQLMPAGSTWEVYVPADLAYGPRSVGGPIGPNETLIFKIHLISVKKSDA

SEQ ID NO: 9177 - protein, 559 aa, Triticum aestivum
MDDDFDIPAGDDMMMGDGMGDFGGAEGPGMKVGEENEIGKQGLKKKLLKEGEGWDTPEVGDEVEVHYTGTLLDGKKFDSSRDRDDTFKFKLGQGQVIKGWDQGIKTMKKGENALFTIPPELAYGESGSPPTIPANATLQFDVELLSWTSVRDIAKDGGIFKKILKEGDKWENPKDPDEVFVKYEARLEDGTVVSKSEGVEFTVKDGHLCPALAKAVKTMKKGEKVLLAVKPQYGFGEMGRPAAGEGGAVPPNASLVIDLELVSWKTVTEIGDDKKILKKVLKEGEGYERPNEGAVVTVKITGKLQDGTVFLKKGHDEQEPFEFKTDEEAVIEGLDRAVLNMKKGEVALVTIPPEYAYGSTESKQDAIVPPNSTVIYEVELVSFVKDKESWDLNNSEKIEAAGTKKEEGNALFKSGKYARASKRYEKAAKFIEYDTSFSEDEKKQSKQLKITCNLNNAACKLKLKDYKQAEKLCTKVLELDSRNVKALYRRAQAYTQLADLELAEVDIKKALEIDPENRDVKLTYKTLKEKIKEINKKDAKFYSNMFSKMTKPSAEESKA

SEQ ID NO: 9178 - protein, 559 aa, Triticum aestivum
  unsure (1)..(559): unsure at all Xaa locations
MDDDFDIPAGDDMMMGDGMGDFGGAEGPGMKVGEENEIGKQGLKKKLLKEGEGWDTPEVGDEVEVHYTGTLLDGKKFDSSRDRDDTFKFKLGQGQVIKGWDQGIKTMKKGENALFTIPPELAYGESGSPPTIPANATLQFDVELLSWTSVRDIAKDGGIFKKILKEGDKWENPKDPDEVFVKYEARLEDGTVVSKSEGVEFTVKDGHLCPALAKAVKTMKKGEKVLLAVKPQYGFGEMGRPAAGEGGAVPPNASLVIDLELVSWKTVTEIGDDKKILKKVLKEXEGYERPNEGAVVTVKITGKLQDGTVFLKKGHDEQEPFEFKTDEEAVIEGLDRAVLNMKKGEVALVTIPPEYAYGSTESKQDAIVPPNSTVIYEVELVSFVKDKESWDLNNSEKIEAAGTKKEEGNALFKSGKYARASKRYEKAAKFIEYDTSFSEDEKKQSKQLKITCNLNNAACKLKLKDYKQAEKLCTKVLELDSRNVKALYRRAQAYTQLADLELAEVDIKKALEIDPENRDVKLTYKTLKEKIKEINKKDAKFYSNMFSKMTKPSAEESKA

SEQ ID NO: 9179 - protein, 248 aa, Legionella rubrilucens
MKIKLVAAAVVGLAMTTAFADTNTTAPSTTTPATAATPATLNTDIDKLSYSIGADLGKNFKKQGIEISPSAMAKGLQDGMSGSQLLLTEDQMKDVLSKFQKDLMAKRNAEFTKKAEENKSKGEAFLSQNKSKEGVVTLPSGLQYKIIEKGNGAKPTKDDTVTVEYTGRLIDGQVFDSTDKTGKPATFKVSQVIPGWTEALQLMPAGSVWEVYVPASLAYGPRSVGGPIGPNETLIFKIHLISVKKSDA

SEQ ID NO: 9180 - protein, 232 aa, Legionella steigerwaltii
MKMKLVTAAIMGLAMSTAMAATDATSLVTDKDKLSYSIGADLGKNFKNQGIDINPDALAKGMQDGMSGAQLILTEQQMKDVLNKFQKDLMAKRSAEFNKKAEENKAKGEAFLSSNKSKSGVVVLPSGLQYKIIEAGTGNKPGKSDTVTVEYTGTLIDGTVFDSTEKTGKPATFQVSQVIPGWTEALQLMPAGSTWEIFVPSDLAYGPRSVGGPIGPNETLIFKIHLISVKKA

SEQ ID NO: 9181 - protein, 234 aa, Fluoribacter dumoffii
MKMKLVTAAIMGLAMSTAMAATDATSLVTDKDKLSYSIGADLGKNFKNQGIDINPEALAKGMQDGMSGAQLILTEQQMKDVLNKFQKDLMAKRSAEFNKKAEENKAKGEAFLSSNKSKSGVVVLPSGLQYKVIEAGSGAKPGKSDTVTVEYTGTLIDGTVFDSTEKAGKPATFQVSQVIPGWTEALQLMPAGSTWEIYVPSNLAYGPRSVGGPIGPNETLIFKIHLISVKKASA

SEQ ID NO: 9182 - protein, 204 aa, Fluoribacter dumoffii
TAAIMGLAMSTAMAATDATSLVTDKDKLSYSIGADLGKNFKNQGIDINPEALAKGMQDGMSGAQLILTEQQMKDVLNKFQKDLMAKRSAEFNKKAEENKAKGEAFLSSNKSKSGVVVLPSGLQYKVIEAGSGAKPGKSDTVTVEYTGTLIDGTVFDSTEKAGKPATFQVSQVIPGWTEALQLMPAGSTWEIYVPSNLAYGPRSV

SEQ ID NO: 9183 - protein, 232 aa, Fluoribacter gormanii
MKMKLVTAAIMGLAMSTAMAATDATSLVTDKDKLSYSIGADLGKNFKNQGIDINPEALAKGMQDGMSGAQLILTEQQMKDVLNKFQKDLMAKRSAEFNKKAEENKSKGEAFLSTNKSKSGVVVLPSGLQYKVIEAGTGSKPGKSDTVTVEYTGTLIDGTVFDSTEKTGKPATFQVSQVIPGWTEALQLMPAGSTWEIYVPSDLAYGPRSVGGPIGPNETLIFKIHLISVKKA

SEQ ID NO: 9184 - protein, 204 aa, Fluoribacter gormanii
TAAIMGLAMSTAMAATDATSLVTDKDKLSYSIGADLGKNFKNQGIDINPEALAKGMQDGMSGAQLILTEQQMKDVLNKFQKDLMAKRSAEFNKKAEENKSKGDAFLSTNKSKSGVVVLPSGLQYKVIEAGTGNKPSKSDTVTVEYTGTLIDGTVFDSTEKSGKPATFQVSQVIPGWTEALQLMPAGSTWEIYVPSDLAYGPRSV

SEQ ID NO: 9185 - protein, 244 aa, Tatlockia maceachernii
MKMRLVAAAAMGLAMSTTIAASATTTDTATSAPATSLATDTEKLSYSIGADLGKNFKKQGIEISPAAMAKGLQDGMSGGQLLLTDEQMKEVLNKFQKDLMMKRSAEFNKKAEDNKAKGEAFLNDNKSKEGVVSLPSGLQYKIIERGDGAKPTKEDVVTVEYTGKLIDGQVFDSTDKTGKPATFKVSQVIPGWTEALQLMPAGSTWEVYIPANLAYGPRSVGGPIGPNETLIFKIHLISVKKSDA

SEQ ID NO: 9186 - protein, 79 aa, Neisseria lactamica
HYTGWLEDGTKFDSSLDRRQPLTITLGVGQVIKGWDEGFGGMKEGGKRKLTIPSEMAYGAHGAGGVIPPHATLIFEVEL

SEQ ID NO: 9187 - protein, 79 aa, Neisseria lactamica
HYTGWLEDGTKFDSSLDRRQPLTITLGVGQVIKGWDEGFGGMKEGGKRKLTIPSEMGYGAHGAGGVIPPHATLIFEVEL

SEQ ID NO: 9188 - protein, 109 aa, Neisseria meningitidis
MGSLIIEDLQESFGKEAVKGKEITVHYTGWLEDGTKFDSSLDRRQPLTITLGVGQVIKGWDEGFGGMKEGGKRKLTIPSEMGYGAHGAGGVIPPHATLIFEVELLKVYE

SEQ ID NO: 9189 - protein, 105 aa, Neisseria meningitidis
IIEDLQESFGKEAVKGKEITVHYTGWLEDGTKFDSSLDRRQPLTITLGVGQVIKGWDEGFGGMKEGGKRKLTIPSEMGYGAHGAGGVIPPHATLIFEVELLKVYE

SEQ ID NO: 9190 - protein, 79 aa, Neisseria meningitidis
HYTGWLEDGTKFDSSLDRRQPLTITLGVGQVIKGWDEGFGGMKESGKRKLTIPSEMAYGAHGAGGVIPPHATLIFEVEL

SEQ ID NO: 9191 - protein, 79 aa, Neisseria polysaccharea
HYTGWLEDGTKFDSSLDRRQPLTITLGVGQVIKGWDEGFGGMKEGGKRKLTIPSEMAYGVHGAGGVIPPHATLIFEVEL

SEQ ID NO: 9192 - protein, 79 aa, Neisseria sicca
HYTGWLEDGTKFDSSLDRRQPLTITLGVGQVIQGWDEGFGGMKEGGKRKLTIPSEMGYGARGAGGVIPPHATLIFEVEL

SEQ ID NO: 9193 - protein, 114 aa, Saccharomyces cerevisiae
MSEVIEGNVKIDRISPGDGATFPKTGDLVTIHYTGTLENGQKFDSSVDRGSPFQCNIGVGQVIKGWDVGIPKLSVGEKARLTIPGPYAYGPRGFPGLIPPNSTLVFDVELLKVN

SEQ ID NO: 9194 - protein, 113 aa, Saccharomyces cerevisiae
SEVIEGNVKIDRISPGDGATFPKTGDLVTIHYTGTLENGQKFDSSVDRGSPFQCNIGVGQVIKGWDVGIPKLSVGEKARLTIPGPYAYGPRGFPGLIPPNSTLVFDVELLKVN

SEQ ID NO: 9195 - protein, 142 aa, Desulfitobacterium hafniense
MQAKTKAEAAAAGEKNLKEGKAFLEENKKVKGVFATGSGLQYMILRQGSGERPKPTDKVSVNYKGTLLSGKTFDSSYDRGQPAEFPVNGVIQGWQEGLAMMPVGSKFKFWIPSELAYGPNGAPPSIGPNAVLTFEVELLDIL

SEQ ID NO: 9196 - protein, 185 aa, Podospora anserina
MQGLLLSLSLLASAAVGVLASDDLKIDVTLPVECDRVTKKGDKINVHYKGTLKSNGEKFDSSYDRQSPFSFKLGAGMVIKGWDEGLVDMCIGEKRTLTIGPSYGYGDRNVGPIPAGSTLVFETELVGIEGVPKPESIVTKSATDAPESTASAKVVEKVASVAKQAAEVVETIIADTDDTQEHNEL

SEQ ID NO: 9197 - protein, 124 aa, Candida albicans
MSEELPQIEIVQEGDNTTFAKPGDTVTIHYDGKLTNGKEFDSSRKRGKPFTCTVGVGQVIKGWDISLTNNYGKGGANLPKISKGTKAILTIPPNLAYGPRGIPPIIGPNETLVFEVELLGVNGQ

SEQ ID NO: 9198 - protein, 124 aa, Candida albicans
MSEELPQIEIVQEGDNTTFAKPGDTVTIHYDGKLTNGKEFDSSRKRGKPFTCTVGVGQVIKGWDISLTNNYGKGGANLPKISKGTKAILTIGPNLAYGPRGIPPIIGPNETLVFEVELLGVNGQ

SEQ ID NO: 9199 - protein, 244 aa, Guillardia theta
MIKAFVNSFLIFKYTTKNRKLNSIYSQKNSRVSNKNKLTYIQALNKESEIINLTNDKGVKKKIFKQGSGDLVNEGMIVKINYEGKLENGQIFDSSIIRDEPYMFILGEDKVIKGWNIGIQSMKVGEIAEITIDPEYGYKKKGIPPIIPPNSRLIFNIELTNAEIDSNSRKKINFSNSKNLQANMNSNQKISKYDNFKPFIISPFGDLAKDRKNFLLNPFITFSIITILMFCLFFIVVKSGGIHS

SEQ ID NO: 9200 - protein, 108 aa, Suberites domuncula
MGVDIEEITPGDGTTFPKTGQTVVVHYTGTLTNGKKFDSSRDRGKPFKFKIGKGQVIRGWDEGVAKMSVGQRAKLTCSSDYAYGEKGHPGVIPPNATLIFDVELLGLE

SEQ ID NO: 9201 - protein, 206 aa, Escherichia coli
MTTPTFDTIEAQASYGIGLQVGQQLSESGLEGLLPEALVAGIADALEGKHPAVPVDVVHRALREIHERADAVRRQRFQAMAAEGVKYLEENAKKEGVNSTESGLQFRVINQGEGAIPARTDRVRVHYTGKLIDGTVFDSSVARGEPAEFPVNGVIPGWIEALTLMPVGSKWELTIPQELAYGERGAGASIPPFSTLVFEVELLEIL

SEQ ID NO: 9202 - protein, 432 aa, Leishmania major
MSDQPISSSASAVSEASQPPMEVAYPLNEEVEVPGTDGGLYKTVLVEGAGSQPVKGAKVTVHYVGTLLDGTTFDSSRDRGDCFEFTLGRGQVIKGWDKGVSTMRTGEKALLKCSPEYAYGAAGSPPTIPANATLLFEVELFHWTREVDISAAKDKSLMMSVLKDGVDYENPDFESSVTMDLLIYVGEFDPENKDKYTPVKTMSDWKAVVGVTSLPPHLEAFLYKMRKRESAACRVRSDLICDAVPEFAIPSSAERGHCDVTYVVEISELSHVKTYDFTGAAKVAEGEKRKNSGNDAFKAGKLDLAERFYRRAMEFIGQDYGFDDTVKPECHRVRIGVMGNLAQVLLMRNKYTESADFSRKVLSLDSNNTKALFRLAKALDGLQDWDEASKCVAHILAIDPGNADAANLKVRLMQEQRTFDQKQKSMFKKMFA

SEQ ID NO: 9203 - protein, 196 aa, Trypanosoma cruzi
MHRENYFSKIAFCLLGVLFLSCITSVQTVSGDAASHEERMNNYRKRVGRLFMEQKAAQPDAVKLPSGLVFQRIARGSGKRAPAIDDKCEVHYTGRLRDGTVFDSSRERGKPTTFRPNEVIKGWTEALQLMREGDRWRLFIPYDLAYGVTGGGGMIPPYSPLEFDVELISIKDGGKGRTAEEVDEILRKAEEDREDM

SEQ ID NO: 9204 - protein, 167 aa, Trypanosoma cruzi
SGDAASHEERMNNYRKRVGRLFMEQKAAQPDAVKLPSGLVFQRIARGSGKRAPAIDDKCEVHYTGRLRDGTVFDSSRERGKPTTFRPNEVIKGWTEALQLMREGDRWRLFIPYDLAYGVTGGGGMIPPYSPLEFDVELISIKDGGKGRTAEEVDEILRKAEEDREDM

SEQ ID NO: 9205 - protein, 109 aa, Tetrahymena thermophila
MSELQVVTKKPGDGKTYPKKGQTVTVHYVGTFTDGRKFDSSRDRKEPFQFNIGSGQVIKGWDEGVARMSLGEVAVITCPYQYAYGEKGYPGVIPPKATLVFEVELLGMQ

SEQ ID NO: 9206 - protein, 108 aa, Schistosoma mansoni
MGVTVDTYKPGDGKRIPKKGQRVVVHYTGTLMDGKKFDSSRDRNKPFEFVIGTGKVIRGWDEGVIQMSVGERAYLTCTPDYAYGSKGVDKVIPPNATLKFDVELIDIL

SEQ ID NO: 9207 - protein, 430 aa, Schistosoma mansoni
MADNDGQESGAQQRVEDEYLKDFMDLSPSGDRGILKKVLREGYSDVKPCDGDTVIVHYVGTNYGGEKHGEVFDSSRARNEKFEFTIGNGSVIKAWDVGVATMKLGEICELIASPDYAYKDGKTLKFEVELFETLGSDVSRNKDGSIRKSIIRKGKDIYHPVAGAEATIVFRNLTDSTEDVEVTYCVGDPPLTVPEELDQCLRHMSTDEFCRVVVCKDKNSAAEVADKSRVVYELTLKSFEKTKHLSGISPFSEQMAYRNVLKEKANNFLKDSKFDSAIELYKRLDDELQYIVANGPAEQKELSAVIVAVRLNLGLTYLKLCKPDKCIEFCRKVLDVFGNNEKALFRMGQAHLLRNDHDEALVYFKKIVAKNPNNASAVKLLHMCEEEIQKAKDMAKKRFRSIFERCKDSGLDGVEEHKDGVALNGEKSAL

SEQ ID NO: 9208 - protein, 430 aa, Schistosoma mansoni
MADNDGQESGAQQRVEDEYLKDFMDLSPSGDRGILKKVLREGYSDVKPCDGDTVIVHYVGTNYGGEKHGEVFDSSRARNEKFEFTIGNGSVIKAWDVGVATMKLGEICELIASPDYAYKDGKTLKFEVELFETLGSDVSRNKDGSIRKSIIRKGKDIYNPVAGAEATIVFRNLTDSTEDVEVTYCVGDPPLTVPEELDQCLRHMSTDEFCRVVVCKDKNSAAEVADKSRVVYELTLKSFEKTKHLSGISPFSEQMAYRNVLKEKANNFLKDSKFDSAIELYKRLDDELQYIVANGPAEQKELSAVIVAVRLNLGLTYLKLCKPDKCIEFCRKVLDVFGNNEKALFRMGQAHLLRNDHDEALVYFKKIVAKNPNNASAVKLLHMCEEEIQKAKDMAKKRFRSIFERCKDSGLDGVEEHKDGVALNGEKSAL

SEQ ID NO: 9209 - protein, 431 aa, Caenorhabditis elegans
MSGEKIDITPKKDGGVLKLIKKEGQGVVKPTTGTTVKVHYVGTLENGTKFDSSRDRGDQFSFNLGRGNVIKGWDLGVATMTKGEVAEFTIRSDYGYGDAGSPPKIPGGATLIFEVELFEWSAEDISPDRDGTILRTIIVEGSKNSFPNDTSKVLAHCVGTYQGTEFYNREVNFHIGEGSEEGLPEGVERALRRFQLGEKSKIEIRGHKYTYGNSPPAGSNIPVNATLEFTIFLKEFEKVPATWEMTAEEKLDAAKQAKDRGTMYLQKGNLKLAYNKYKRAEEVLEYEKSTDPEKMAERETILNGAYLNLSLVCSKQNEQLECIKWCDKVLETKPGNVKALYRKATALLTMNEVRDAMKLFEKIVEVEPENKAAAQQIIVCRNTIREQNERDKKRFKNLFAKISTEEDKPTNTVEDEDEIVASTSGSSTSNA

SEQ ID NO: 9210 - protein, 426 aa, Brugia malayi
MAAVDGTDITPEKNGGVLKKILVEGKGEHRPSKGDSVYVHYVGILENGQQFDSSRDRNESFNFTLGNGQVIKGWDLGVATMKKGEKCDLICRADYAYGQNGSPPKIPGGATLKFEIELLSWQGEDISPDRDGTITRSIIVEGEKYSSPTEGSTVKVCAVGSYNGQVFYDKEVSFILAEGSEVGLPEGVDRALRRFNKGEKSIIHLKGNRFTFGATPPPEYGLPPHAEIDFTLFLKDYDKVKASWELTGEEKLDAAEAAKERGTMFFKQGKMRLPAAKYMRVIELLEYEKSLENETKSRRDALLLAGYLNSALVYAKQDETVECIKNCDKALEVDPKCVKALYRKALALQEQIDADEAIIKYKKVLEYEPDNKAAIAQIAACKKMLAEIREKEKKRYKGMFERFAAKEKVETNEDLETASPKSEVVN

SEQ ID NO: 9211 - protein, 137 aa, Onchocerca volvulus
MIKFSVSSLLLVLVVVDCDDRELARLQIGVKKREDNCEIRSRKGDIVNVHYVGMLEDGTEFDNIRFRNKPFIFTLGMGQVIKGWDQGLLNMCEGEQRRLALPSDLAYGSFGSSPKIPSDASLKFDIELLKIERGGDL

SEQ ID NO: 9212 - protein, 166 aa, Nostoc punctiforme
MAFMLVCVVLLAVGQVGSKQNTAIAAQLTQTPPAATTVTENNILIASNTMSDANAVTTPSGLKYVELKEGTGATPQPGQTVEVHYVGTLEDGTKFDSSRDRGQPFSFKIGVGQVIKGWDEGVSTIKVGGRRKLIIPSELGYGARGAGGVIPPNATLIFDVELLGVK

SEQ ID NO: 9213 - protein, 268 aa, Aeromonas hydrophila
MNNFLKVSLLAAAVAVSLTACQKDEKTAANTAEVKAEASKPAEAPKAEAKSFEEQSGYAIGLSMGRYIANTLERQQELGIKLDNSVILKGVTDGLGKEAKMTDEEIQKVLQQYDAKINELTKAKADKDAVENQKKGEEYLAANAKKEGVKSTESGLQYQVEKMGTGAKPKATDIVKVHYTGTLTDGTKFDSSVDRGEPATFPLNQVIPGWTEGVQLMPVGSKFKFFLPSKLAYGEHGAGSIPANAVLVFDVELLAIEKPAADGDNAKK

SEQ ID NO: 9214 - protein, 157 aa, Vibrio cholerae
MSKIIIPLVVFLLAGFMIYRTWTNHKSADANFSAGQQFLAENGQRENVITTDSGLQYEVLQAGTGTEHPGPKSRVKVHYHGELLDGTVFDSSVERGEPISFGLNQVIKGWQEGVQLMVVGEKTRFYIPSNLGYGKNGAGPIPPSAVLIFDVELLAIE

SEQ ID NO: 9215 - protein, 259 aa, Vibrio cholerae
MKSLFKVSLLAATVMLAVGCQKEEAPKTETTPAAQTAAAKTVEFKSEDDKAAYAIGVSFANYLKTSIEKPSEIGIDLNKDLVLKGIEHVFAGNPEMSEEETRAALEALDKRVAETMQAKAAEKAAENKKKGDEFRAQFEKESGVVKTQSGLLYQVMTPAEGDKPKDTDTVQVHYKGTLIDGSQFDSSYERGEPATFPLNRVIPGWTEGVQLMSVGSKFKLVIPPELAYGEQDTPTIPANSTLVFEVELLKIENGKDAAQ

SEQ ID NO: 9216 - protein, 209 aa, Vibrio cholerae
MTFMSEVKFETVEQKASYGIGLQMGQQLAGSGLEGLNVAAIAAGIATALVGEQPAISIDEINQALHAIHMRAEEARQEAAKVAASEGEAFLKDNALRPEVTVLESGLQYEVLVEGNGAIPTSDKSVRVHYHGQLVDGTVFDSSVSRGQPAEFPVTGVIRGWVEALQLMPVGSKWKLYIPHNLAYGERGAGAAIPPFAALVFEVELLDIL

SEQ ID NO: 9217 - protein, 204 aa, Legionella sainthelensi serogroup 2
TAAIMGLAMSTAMAATDATSLTTDKDKLSYSIGADLGKNFKNQGIDINPDVLAKGMQDGMSGAQLILTEEQMKDVLSKFQKDLMAKRSAEFNKKAEENKAKGEAFLSANKSKPGIVVLPSGLQYKIIDAGTGAKPGKSDTVTVEYTGTLIDGTVFDSTEKAGKPATFQVSQVIPGWTEALQLMPSGSTWEVYVPADLAYGPRSV

SEQ ID NO: 9218 - protein, 219 aa, Legionella sp. E
AAAVIGLTMSTAIVAADASATATPAPATSATPTTSLNSDMDKLSYSIGADLGKNFKKQGIDINPSAMAKGLQDGMSGGQLLLTEQQMKDVLNKFQKDLMAKRTAEFSKKADENKAKGEAFLNQNKAKEGVVSLPSGLQYKIIQKGDGAKPSKEDTVTVEYTGTLIDGQVFDSTDKAGKPATFKVSQVIPGWTEALQLMPAGSTWEVYVPADLAYGPRSV

SEQ ID NO: 9219 - protein, 200 aa, Legionella sp. H
MGLAMSTTMAATTAPSLNSDVDKLSYSIGIDLGKNFKRQGIDINPEALTKGLQDGINDAPSLLTEQQMREVLSKFQHDLMAKRTAEFNKKAEENKAKGEAFLKENKAKEGVVTLPSGLQYKIIKAGTGDKPGKDDTVTVEYTGRLINGEVFDSTDKAGKPATFKLSQVIPGWTEALQLMPSGSTWEIYVPADLAYGPRTV

SEQ ID NO: 9220 - protein, 204 aa, Legionella sp. I
AAALMSVAMTTTMAANDVQTLQTEKDKLSYSIGIDLGKNFQRQGIDVNPEVLAKGMQDGLTGGKQLLTDQQMKEVLTKFQKDLMEKRTAEFNKNAEENKQKGETFLKENKAKDGIVTLPSGLQYKILEAGKGKKPTKDDTVTVEYTGRLINGEVFDSTEKTGKPATFKLSQVIPGWTEALQLMPEGSTWEIYVPADLAYGPRSV

SEQ ID NO: 9221 - protein, 204 aa, Legionella sp. A
AAAMGLAMSTTILAATTAPSLNSDVDKLSYSIGIDLGKNFKRQGIEVNPEALTKGLQDGINGAPSLLTEQQMRDVLSKFQRDLMAKRTAEFNKKAEENKARGEAFLKENKGKEGVVSLPSGLQYKIIKAGTGEKPGKEDTVTVEYTGRLINGEVFDSTDKAGKPATFKLSQVIPGWTEALQLMPAGSTWEIYVPADLAYGPRAV

SEQ ID NO: 9222 - protein, 204 aa, Legionella sp. B
AAAVMGLAMSTTMAATDASSLNTEVDKLSYSIGIDLGKNFKRQGIDISPEAMVQGLQDGMSGNKQLLTEQQMKDVLTKFQRDLMAKRTAEYNKKAEDNKKKGEEFLEQNKSKEGVVSLPSGLQYKIIKSGDGQKPGKEDTVTVEYTGRLINGEVFDSTEKTGKPASFKLSQVIPGWTEALQLMPAGSVWEVYVPADLAYGSRSV

SEQ ID NO: 9223 - protein, 204 aa, Legionella bozemanii serogroup 2
TAAVMGLAMSTVIAATDATSLVTDKDKLSYSIGADLGKNFKNQGIDINPDALAKGMQDGMSGAQLILTEQQMKDVLNKFQKELMAKRSAEFNKKAEENKSKGEAFLSTNKSKSGVVVLPSGLQYKIIEAGTGNKPGKSDTVTVEYTGTLIDGTVFDSTEKTGKPATFQVSQVIPGWTEALQLMPAGSTWEIYVPSDLAYGPRSV

SEQ ID NO: 9224 - protein, 233 aa, Legionella pneumophila serogroup 1
MKMKTVTAAVMGLAMSTAMAATDATSLATDKDKLSYSIGADLGKNFKNQGIDVNPEAMAKGMQDAMSGAQLALTEQQMKDVLNKFQKDLMAKRTAEFNKKADENKVKGEAFLTENKNKPGVVVLPSGLQYKVINSGNGVKPGKSDTVTVEYTGRLIDGTVFDSTEKTGKPATFQVSQVIPGWTEALQLMPAGSTWEIYVPSGLAYGPRSVGGPIGPNETLIFKIHLISVKKSS

SEQ ID NO: 9225 - protein, 236 aa, Legionella pneumophila serogroup 8
MKMKLVTAAVMGLAMSTAMAATDATSLATDKDKLSYSIGADLGKNFKNQGIDVNPEAMAKGMQDAMSGAQLALTEQQMKDVLNKFQKDLMAKRTAEFNKKADENKVKGEAFLTENKNKPGVVVLPSGLQYKVINSGNGVKPGKSDTVTVEYTGRLIDGTVFDSTEKTGKPATFQVSQVIPGWTEALQLMPAGSTWEIYVPSGLAYGPRSVGGPIGPNETLIFKIHLISVKKSSKFF

SEQ ID NO: 9226 - protein, 152 aa, Bombyx mori
YDRDQPFTFQIGVGQVIKGWDQGLLDMCVGEKRKLTIPASLGYGERGAGNVIPPHATLHFEVELINIGDSPPATNVFKEIDADKDNMLSREEVSDYLKKQMVPADGGEVSEDIKQMLESHDKLVEEIFQHEDKDKNGFISHEEFSGPKHDEL

SEQ ID NO: 9227 - protein, 108 aa, Manduca sexta
MGVTVDTITPGDESTYPKNGQTVVVHYTGTLTSGKKFDSSRDRGKPFKFRIGKGEVIRGWDEGVAKMSVGERAKLTCTPDYAYGQQGHPGVIPPNSTLIFDVELLRLE

SEQ ID NO: 9228 - protein, 241 aa, Actinobacillus actinomycetemcomitans
MLKMKKISVPVLILSAVVSSGVLAESKTDAKFTDDSSYAVGVLFGSDLQGLINAQKGMIDYNNAKVIAGISDVLNGKVKLEGNKEIASTLQGINAKLKAENEKRVAVMVKKAEEEGKKFTAEFAKKDGVKKTASGLLYRVEKEGSGDAIKAADVVKVHYTGKLPDGTVFDSSRERGTPAEFPLNQVIKGWTEGLQLVKKGGQIELVIPADLGYGEDGAGDKIPPHSTLYFDIEVLDVTPAK

SEQ ID NO: 9229 - protein, 241 aa, Haemophilus influenzae Rd
MLKIQKLSIAALMVSAVISGQVFAEDNTFDEKAASYAVGTLMGSQMKDLVDSHKEVIKYDNARILDGLKDALEGKVDVRKDEKIQKTLESIEAKLVAASKAKAESIAKQAKEEGDKFRAEFAKGKDVKTTQSGLMYKIESAGKGDTIKSTDTVKVHYTGKLPNGKVFDSSVERGQPVEFQLDQVIKGWTEGLQLVKKGGKIQFVIAPELGYGEQGAGASIPPNSTLIFDVEVLDVNPKSEK

SEQ ID NO: 9230 - protein, 439 aa, Drosophila melanogaster
MPEGNKIDLSGDGGVLKEILKEGTGTETPHSGCTVSLHYTGRLVDGTEFDSSLSRNEPFEFSLGKGNVIKAFDMGVATMKLGERCFLTCAPNYAYGAAGSPPAIPPDATLIFELEMLGWKGEDLSPNQDGSIDRTILEASDKKRTPSDGAFVKAHISGSFEGRVFEDRDVEFDYGEGKAIGIIDGVEIALEKMNVGETSRIKIQAKYAFGAKGNEEFKIPPNATVEYTVKLVDCGKGLEEWKLSDEERLAEAKVYKEKGTNYFKKENWALAIKMYTKCKNILPTTVHTNEEVKKIKVATHSNIALCHQKSNDHFEAKQECNEVLALDKNNVKALYRRGQCNLTINELEDALEDFQKVIQLEPGNKAAANQVIICKQKLKESKNKEKKLYANMFTKLAANDKETEPPRETDVLSKCGEWSEEDAKREAELTLERDNIIMI

SEQ ID NO: 9231 - protein, 439 aa, Drosophila melanogaster
MPEGNKIDLSGDGGVLKEILKEGTGTETPHSGCTVSLHYTGRLVDGTEFDSSLSRNEPFEFSLGKGEVIKAFDMGVATMKLGERCFLTCAPNYAYGAAGSPPAIPPDATLIFELEMLGWKGEDLSPNQDGSIDRTILEASDKKRTPSDGAFVKAHISGSFEGRVFEDRDVEFDYGEGKAIGVIDGVEIALEKMNVGETSRIKIQAKYAFGAKGNEEFKIPPNATVEYTVKLVDCGKGLEEWKLSDEERLAEAKVYKEKGTNYFKKENWALAIKMYTKCKNILPTTVHTNEEVKKIKVATHSNIALCPQKSNDHFEAKQECNEVLAWDKNNVKALYRRGQCNLTINELEDALEDFQKFIQLEPGNKAAANQVIICKQKLKESKNKEKKLYANMFTKLAANDKETEPPRETDVLSKCGEWSEEDAKREAELTLERDNIIMI

SEQ ID NO: 9232 - protein, 108 aa, Drosophila melanogaster
MGVQVVPIAPGDGSTYPKNGQKVTVHYTGTLDDGTKFDSSRDRNKPFKFTIGKGEVIRGWDEGVAQLSVGQSAKLICSPDYAYGSRGHPGVIPPNSTLTFDVELLKVE

SEQ ID NO: 9233 - protein, 166 aa, Drosophila melanogaster
MGVQVVPIAPGDGSTYPKNGQKVTVHYTGTLDDGTKFDSSRDRNKPFKFTIGKGEVIRGWDEGVAQLSVGQRAKLICSPDYAYGSRGHPGVIPPNSTLTFDVELLKVDRRTGCPMCIPQTKSQGVADRRTGDEPKNIIIGTRTIQQHLPTQNNNDNFIHSSKLELI

SEQ ID NO: 9234 - protein, 108 aa, Drosophila melanogaster
MGVQVVPIAPGDGSTYPKNGQKVTVHYTGTLDDGTKFDSSRDRNKPFKFTIGKGEVIRGWDEGVAQLSVGQRAKLICSPDYAYGSRGHPGVIPPNSTLTFDVELLKVE

SEQ ID NO: 9235 - protein, 306 aa, Plasmodium yoelii yoelii
MENIENIENLEKIHLTDDGGVIKTILRKGDEGEENVPKKGNEVTVHYVGKLESDGSIFDSSRQRDVPFKFHLGNGEVIKGWDICVASMKKNEKCSVRLDSKYGYGKEGCGETIPGNSVLIFEIELLSFKEAKKNIYDYTDEEKIQAAFELKDEGNEFFKKNEINEAIAKYKEALDYFMHTDEWEDELLEKKQNIQIICNLNLSTCYNKNKDYPNAIEHASKVLKLDKNNVKGLYKLGVANMNFGFLEEAKINLYKAASLNPKNLDIRNSYELCIAKLKEARKKDQITFGGMFNKGSLYEEKKTNPI

SEQ ID NO: 9236 - protein, 509 aa, Plasmodium yoelii yoelii
MVCTEEDKKKREENEKELEEKIKNMSFDERIKNALDAKLDGNNDFKNKDYENGINKYKTGLRYIKDMEDKNDKIKELEIALYLNLSICYYNMENYNDAHEYVTKVLNIDKTNKKGMFRLCQIEFNRCSFDVAKEKIQEFLKIYPENLDAKKLLKNVIIKQNEDNKKQKEAFSKIFEKASGLYDDREKEIIQKKKEKYEQDMKKKKENNEEIIDFEEWEIQENEKRKKEDEEQKKKQREKEMEREKEREKNNKKKQYNKKNESISSNTTHNSSDLEIDEEDQKIINETKKMGYCYFKKDIKEDDKKLFEKNIPRKIEEANDIDLNSQQTSNKAISSWNSGGTTYEEKDMTKWVKNKLDYYLKNISFKNTEESDYLNLNNQNEFNLTNISYPEILPVQYLNKIKINEVKDLSAEAQIVVIRGTKRHIFEFSCNLHVSLYINLPEFHVHKIIVQIKELSSELEAGKTWKNYIFIKKNDKLKIPDKLFDNIYTFVINDIETQIKKFTEEYSTM

SEQ ID NO: 9237 - protein, 201 aa, Legionella sp. K
TAAVLGLAMSTAMAADALVTDKDKLSYSIGADLGKNFKSQGIDINPEVLAKGMQDGMSGAQLILTEQQMKDVLNKFQKDLMAKRSAEFNKKAEENKSKGEAFLSSNKAKAGVVVLPSGLQYKILEAGTGAKPGKEDTVTVDYTGTLIDGTVFDSTQKTGKPATFQVSQVIPGWTEALQLMPAGSTWEIFVPADLAYGPRSV

SEQ ID NO: 9238 - protein, 204 aa, Legionella sp. L
AAAAMGLAMTTTIAATDVQSLKNDKDKLSYSIGIDLGKNFRKQGIEVNPEVLAKGMQDGLSGSKQLLTDEQMKEVLSNFQKSLMAKRTAEFNKKAEENKQKGEAFLKENKSKEGVVALPSGLQYKILQEGKGKKPTKEDVVTVEYTGRLINGDVFDSTEKSGKPATFKLSQVIPGWTEALQLMPEGSTWEIYVPSDLAYGPRSV

SEQ ID NO: 9239 - protein, 210 aa, Pasteurella multocida
MSQQFFDQVSLESLSAKGSYGIGLQIGQQLLESQLEVSAEAVAKGIFDVLNQNPPALELNEVSHALQTLQQQATEAQQAKFKEIEAVGAQFLAENAQKAGVNTTESGLQYEVLVAGEGQIPAREDKVRVHYTGTLIDGTVFDSSVKRGQPAEFPVNGVIAGWIEALSMMPVGSKWRLTIPHNLAYGERGAGASIPPFSTLVFEVELLAIL

SEQ ID NO: 9240 - protein, 94 aa, Ciona intestinalis
  unsure (1)..(94): unsure at all Xaa locations
MGIDKKVIKEGNGTSFPKANQTVKXHYTGTLESGKKFDSSRDRNKPFTFKIGCGQVIRGWDEGVIQMSVGERATLTCSPDYAYGSKGIGGVIPT

SEQ ID NO: 9241 - protein, 230 aa, Coxiella burnetii
MKRLILPFLSVGLLLGTTAHAATPLKTEQDKLSYSMGVMTGKAFRKHDIKIDPQTFSMGLSDAYLGKETQMTEAEMRQTLQQFEKQSLQKMQHKMKQTAQQNAEKSRAFLTANKNKPGVKTLANGLQYKVLQAGQGQSPTLNDEVTVNYEGRLINGTVFDSSYKRGNPATFPLKSVIKGWQEALTRMKPGAIWEIYVPPQLAYGEQGAPGVIGPNEALIFKVNLISVKKK

SEQ ID NO: 9242 - protein, 449 aa, Danio rerio
MTAEEVVNEGCSIPIEGEDITPKKDGGVLKLVKKEGTGTELPMIGDKVFVHYVGTLLDGSQFDSSRDRGEKFSFELGKGQVIKAWDIGVATMKIGEICQLTCKPEYAYGAAGSPPKIPPNATLLFQVELFDFRGEDITDDEDGGITRRIITKGEGYTKPNEGATVEVWLEGSHEDRVFDERELKFEVGDGENLGLPLGVEKALQAMEQGEEALFTIKPKYGFGTAGSEKYNIPPNATLQYKIKMKAFEKAKESWEMNTIEKLEQSVIVKEKGTQYFKEGKYKQAIVQYKRIVSWLEHESSMQPDDEEKAKALRLAAYLNLAMCYLKLQDANPALENCDKALELDANNEKALFRRGEALVVMKEFDMAKVDFQRVIELYPANKAAKSQISICQKHMREQHEKDKRLYANMFQKFAERDAKEADQEKEQDKKQNGSAMEIDENAAQEQTAA

SEQ ID NO: 9243 - protein, 453 aa, Danio rerio
MSSLEDIFSTNQCPTAVFTSRGTAVTPNGDSGVCKIVKQHGVEGERPMIGDRVFVHYTGRLLSGKKFDSSLDRKEPFVFNVGKGQVIKAWDICVCSMQKGEVCLMLCKPEYAYGSAGSPPKVPPNSTLVFEIELLNFRGEELTEDGGIVRRIKVKGEGYSNPNEGATVHVHLEGWCGGRLFDSRDVTFAVGESEDVGVPLGVDRAMEKLQKGECCLLYLKPKYAFGKEGRKEHDIGSNAELLYEVTLKDFEKAKETWEMDLKEKLERAVLVKQKGTQYFKAGRYNYAVIQYQRIVNWLEMECGNGKEQLQAIQALLLVAHLNLALCYLRLREYSQTVENCNKVMELDPENEKALYRRGEARLLRNEFSLALMDFKQVLQVNSFNRAARSQILICQHKIREHHERDKKIYANMFQRFAEHDAKVCRLKRKKEESVISDQNKQGLKRARLSQDGS

SEQ ID NO: 9244 - protein, 614 aa, Danio rerio
MQRRKKVPEATSQLKIFHVYTFELLLQESTNHCRVRSACKLDSHSTLLTMLQKIILSLLLATWFSVDCNPGPIDDILIDRYFVPKRCVREVKSGDFVRYHYNGTFTDGKRFDSSYERGTAFFGQVGQRWQIAGVDKGILGMCINERRKITVPPHLAHGSKGAGDTVPPDTTLVFDLVLLDIFNRADQVQTKVISTPKDCRRSVMRTDFVRFHFNGTLLDGTVFDSSYKRSQTQDSVVGKGLLIKGLDEGLLGMCVGEIRHFIIPPFLAFGEQGYGTGIPPHASVEYHILLEDLHNPKDDIIVETLKLPEPCARKSVAGDFIRYHYNASFLNGIMFDSSYQQNQTYNTYIGMGYMIAGIDKGLQGVCAGEWRRIILPPHLAYGQQGAGKDIPGSAVLVFDIHVIDFHNIKDPVQVDVLHRSEACNESSEVNDFIQYHYNCSLLDGTLLFSSHDYETPQNVLLGGDKIIDGLDEALRNMCVGERRTVIVPPHLGHGEKGAGIVPGSAVLRFELELLSLQKGVPEGYLFIWLQDSPVQPFEALDINKDHQVPLDEFSQFIKQQVSEGKGRLKPVRDPDSVIRDMFKNQDRNADGLITADELKLKVDEDSEKTRHEEL

SEQ ID NO: 9245 - protein, 187 aa, Danio rerio
MAAAPERQWSDEQLKSEEVPKKELIKFIQDSAAHSFLAEHKLLGNIKNVSKTAKKEQLIEAYNQLFQSQGPPKFTKSILKKGDKTNFPKKGETVSCWYTGTLEDGTVFDTNIPATAKKKKQSKPLSFKVGMGKVIRGWDEGLLTMSKGETARLEIESEWAYGKKGLPDAKIPPNAKLIFEVELVAVD

SEQ ID NO: 9246 - protein, 243 aa, Chlamydia trachomatis
MKNILSWMLMFAVALPIVGCDNGGGSQTSATEKSMVEDSALTDNQKLSRTFGHLLARQLSRTEDFSLDLVEVIKGMQSEIDGQSAPLTDTEYEKQMAEVQKASFEAKCSENLASAEEFLKENKEKAGVIELEPNKLQYRVVKEGTGRVLSGKPTALLHYTGSFIDGKVFDSSEKNKEPILLPLTKVIPGFSQGMQGMKEGEVRVLYIHPDLAYGTAGQLPPNSLLIFEVKLIEANDDNVSVTE

SEQ ID NO: 9247 - protein, 243 aa, Chlamydia trachomatis
MKNILSWMLMFAVALPIVGCDNGGGSQTSATEKSMVEDSALTDNQKLSRTFGHLLSRQLSRTEDFSLDLVEVIKGMQSEIDGQSAPLTDTEYEKQMAEVQKASFEAKCSENLASAEKFLKENKEKAGVIELEPNKLQYRVVKEGTGRVLSGKPTALLHYTGSFIDGKVFDSSEKNKEPILLPLTKVIPGFSQGMQGMKEGEVRVLYIHPDLAYGTAGQLPPNSLLIFEVKLIEANDDNVSVTE

SEQ ID NO: 9248 - protein, 119 aa, Gillichthys mirabilis
CGNNPEDTAEELQVDTLVKPETCDVLSVMGDTLQIHYTGKLMDGKVIDTSLSRDPLVVELGKRTVIAGLEQSLVGVCAGQKIKATIPAHLAYGKKGYPPTIPGDAVLEFEVEVISVTQQ

SEQ ID NO: 9249 - protein, 270 aa, Escherichia coli K12
MKSLFKVTLLATTMAVALHAPITFAAEAAKPATAADSKAAFKNDDQKSAYALGASLGRYMENSLKEQEKLGIKLDKDQLIAGVQDAFADKSKLSDQEIEQTLQAFEARVKSSAQAKMEKDAADNEAKGKEYREKFAKEKGVKTSSTGLVYQVVEAGKGEAPKDSDTVVVNYKGTLIDGKEFDNSYTRGEPLSFRLDGVIPGWTEGLKNIKKGGKIKLVIPPELAYGKAGVPGIPPNSTLVFDVELLDVKPAPKADAKPEADAKAADSAKK

SEQ ID NO: 9250 - protein, 270 aa, Escherichia coli O157:H7
MKSLFKVTLLATTMAVALHAPITFAAEAAKPATTADSKAAFKNDDQKSAYALGASLGRYMENSLKEQEKLGIKLDKDQLIAGVQDAFADKSKLSDQEIEQTLQAFEARVKSSAQAKMEKDAADNEAKGKEYREKFAKEKGVKTSSTGLVYQVVEAGKGEAPKDSDTVVVNYKGTLIDGKEFDNSYTRGEPLSFRLDGVIPGWTEGLKNIKKGGKIKLVIPPELAYGKAGVPGIPPNSTLVFDVELLDVKPAPKADAKPEADAKAADSAKK

SEQ ID NO: 9251 - protein, 259 aa, Escherichia coli O157:H7
MMSVVNPPLLYSYGILLLFLFPWDLSSFPRQSFTQRSVADMLPATLYPKKGNTMTTPTFDTIEAQASYGIGLQVGQQLSESGLEGLLPEALVAGIADALEGKHPAVPVDVVHRALREIHERADAVRRQRFQAMAAEGVKYLEENAKKEGVNSTESGLQFRVINQGEGAIPARTDRVRVHYTGKLIDGTVFDSSVARGEPAEFPVNGVIPGWIEALTLMPVGSKWELTIPQELAYGERGAGASIPPFSTLVFEVELLEIL

SEQ ID NO: 9252 - protein, 585 aa, Xenopus laevis
MAFRQRTSPAAFPSSVVLGNRWPVLALQAAFLVSFVTCNDAPPVPDDQLHIEKRWVPDTCQRHVTEGDFVRYHYHGTFPDGTKFDSSYDRGSTYNVFVGKGQIIAGMDKALLGMCVNERRFVKIPPTLAYGSKGVADVIPPDAILHFDVLLLDIWNPTDTVQVETYYKPENCTRQVEVSDFIRYHYNGSLMDGTLFDSSHNRMRTYDTYVGIGWLIPGMDKGLLGMCVGEKRMITVPPFLGYGEDGDGKDIPSQASLVFDVVLLDLHNPKDGITVESHYVPEDCERKTQVGDFIRYHYNGSLLDGTFFDSSYSRKRTYDTYIGKGYVIAGMDEGLLGLCTGEKKRVIIPPHLGYGEEGKGKIPGSAVLVFDIHVIDFHNPQDSVGIVSLFKPSNCSVLSKKGDYVKYHYNATLMDGTVLDSTHQYGKTYNIVLGSGQVVMGMDIGLQDMCIGEKRSIVIPPHLGYGEAGVEGEVPGSAVLAFDIELLDLIPGLPDGYMFVWNGEVSPNLFEDIDKDKNGEVVLDEFSEYIDTQVKVGKGKLAPGFDANKIIENMFTNQDRNQDGKITEEEFKLKDQEDKEIHDEL

SEQ ID NO: 9253 - protein, 564 aa, Xenopus laevis
MLFNSLVVSLHFLVLYVACDSGPLEDVVIDRYDIPKICPREVQMGDFVRYHYNGTFKDGQKFDASYDRGVAVAGFVGVGRLITGLDRGILGMCVNEKRKLIVPPHLGYGSIGVPGMIPADATLYFDILLQDIWNKNDEVQITTIHKASPCNRSVQDSDFVRYHYNGTLLDGTYFDSSYSRSTTYDTYVGSGWLIKGMDMGLLGMCAGEKRRITIPPFLAYGEKGYGTIIPAQASLVFHVLLIDFHNPKDGITVQNQVVPQVCKRKAVTGDYVRYHYNGTLMDGALFDSSYSRNTTYNTYIGMGYVISGMDAGLQGVCVGEWRRIIIPPHLGYGESGSGNSIPGSAVLVFDVHIVDFHNPKDSVDIEVMHKPDSCNTTSKKGDFIKYHYNCSMLDGTLLFSSHEYETPQQVTLGSSKVIEGLDTGLLGMCVGERRTVLVPPHLAHGESGARGVPPSAVLKFDLELLHIEEGIPDGYLFIWLQDTPENLFEIMDLDKNGEVPEEEFSDFLKAQVSEGKGRFLPGVDREKSIADMFVNQDRNKDGKITADELKLKTEEETELVHEEL

SEQ ID NO: 9254 - protein, 133 aa, Xenopus laevis
RRAEKQEAKNSSDRQTDRQTDRQTDMGVDLETISPGDGRTFPKKGQTCVVHYTGMLQNGKKFDSSRDRNKPFKFKIGRQEVIKGWEEGVAQMSLGQRAKLTCSPDVAYGATGHPGVIPPNATLIFDVELIRIE

SEQ ID NO: 9255 - protein, 108 aa, Xenopus laevis
MGVQVETITEGDGRTFPKKGQTVVVHYVGSLENGKKFDSSRDRNKPFKFIIGRCEVIRGWEEGVAQMSVGQRARLTCSPDFAYGATGHPGIIPPNATLTFDVELLRLE

SEQ ID NO: 9256 - protein, 255 aa, Chlamydophila caviae
MKKRWHLMIITMVVSFSIASCDSSSQRGNQIAQVEEKSAANDSQLSVNQQISRTFGHLLARQLRKSEDIMMDIAEVAKGLQGELECKSAPLTESEYEEKMAEIQKLVFEKKAKENLYLAERFLQENKKNSGVVEVQADKLQYRIVKEGTGRAISGKPSALLHYKGTFIDGQVFSSSEANKEPILLPLAQTIPGFALGMQGMKEGETRILYIHPDLAYGTSGQLPPNSLLIFEINLIETTDDSVAAQNTENENTAS

SEQ ID NO: 9257 - protein, 261 aa, Chlamydia muridarum
MVLKKARLRNRVQLRKKRMKNILSWMLMFAVALPILGCDNNGGSQTSAMGKDMVEDSVLTDNQKLSRTFGHLLARQLSSTEDFTLDLTEVIKGMQSEIEGKSAPLTDSEYETQMALVQKASFEKKCSENLASAEKFLKENKDKEGVIELEPNKLQYRIVKEGTGRVLTGKPNALLHYTGSFINGKVFDTSEKNKDPILLPLTKVISGFSQGMQGMREGEVRVLYIHPDLAYGTSGQLPPNSLLIFEVKLIEANDDNVSVAE

SEQ ID NO: 9258 - protein, 243 aa, Chlamydia muridarum
MKNILSWMLMFAVALPILGCDNNGGSQTSAMGKDMVEDSVLTDNQKLSRTFGHLLARQLSSTEDFTLDLTEVIKGMQSEIEGKSAPLTDSEYETQMALVQKASFEKKCSENLASAEKFLKENKDKEGVIELEPNKLQYRIVKEGTGRVLTGKPNALLHYTGSFINGKVFDTSEKNKDPILLPLTKVISGFSQGMQGMREGEVRVLYIHPDLAYGTSGQLPPNSLLIFEVKLIEANDDNVSVAE

SEQ ID NO: 9259 - protein, 195 aa, Porphyromonas gingivalis
MDKVSYALGLSIGNNFKSSGIDSVVMDDFMQGLSDVLEEKAPQLSYDEAKREIEAYFMDLQQKAVKLNKEAGEEFLKINAHKEGVTTLPSGLQYEVIKMGEGPKPTLSDTVTCHYHGTLINGIVFDSSMDRGEPASFPLRGVIAGWTEILQLMPVGSKWKVTIPSDLAYGDRGAGEHIKPGSTLIFIIELLSINK

SEQ ID NO: 9260 - protein, 276 aa, Porphyromonas gingivalis
MKKTIAIIASALLALGAVGCKKNADTTAVSEKDSIALSMGILYGQDFANQFEMSRLQGQPIDSVAFLDGFKYGIDTTRFSYNLGAIYASNIARQLAHDSIDIDKFYAAMRAALLKDTVSIAMKPADAQAFMQRIQARKQRENNMKQFGQNIEKGNEYIDTFKKEDGVTVTTSGLAYKTLQEGTGATPSLADTVRVKYVGTLVDGKEFDKNEEGIEFAVTGVIKGWTEMLQLMKVGQKVRVVIPQELAYGETGNYTIEPFSTLTFEMELIGIKPGKK

SEQ ID NO: 9261 - protein, 577 aa, Gallus gallus
MPRRGVGCGALLLLPALLVSWAACQAPPVPAAEPPWDGADVHVERRFVPERLPRAVRRGDFVRYHYLGSFPDGTRFDSSYDRGSTFNVFVGKGQLIAGMDKALVGMCVNERRFVKIPPKLAYGSEGVSGVIPPNAVLHFDVLLIDLWNSEDEVQVETYFKPEKCTRRVQVSDFVRYHYNGTFLDGTLFDSSHNRMRTYDTYVGIGWLIPGMDQGLLGMCIGEKRIITIPPFLAYGEEGDGKEIPGQASLVFDVVLLDLHNPKDGITIENQLVPESCERRTQTGDFIRYHYNGTLLDGTLFDSSYSRNRTYDTYVGKGYVIAGMDEGLLGVCTGERRRIIIPPHLGYGEEGRGKIPGSAVLVFDIHVADFHNPSDSVSITVNYKPSNCSLLSKKGDYLKYHYNASLLGWHSASLDTQSWQDLQHSSGSGQVVIGMDMGLQDMCVGERRTVVIPPHLGYGEDGVEGEVPGSAVLVFDIELLELVSGLPEGYMFVWNGEVSPNLFEEIDQNHDGEVLLEEFSEYIQAQVDSGKGKLAPGFDFEKIVKNMFTNQDRDGNGKVTAEEFKLKDQEAKEGHDEL

SEQ ID NO: 9262 - protein, 108 aa, Gallus gallus
MGVEIETISPGDGRTFPKKGQTCVVHYTGMLQNGKKFDSSRDRNKPFRFKIGRQEVIKGFEEGVTQMSLGQRAKLTCTPEMAYGATGHPGVIPPNATLLFDVELLRLE

SEQ ID NO: 9263 - protein, 108 aa, Gallus gallus
MGVHVETIAPGDGRTFPKRGQTCVVHYTGMLEDGKKFDSSRDRNKPFKFVMGKQEVIRGWEEGVAQMSVGQRAKMTISPDYAYGSTGHPGIIPPNATLIFDVELMKLE

SEQ ID NO: 9264 - protein, 272 aa, Salmonella enterica subsp. enterica serovar Typhi
MKSLFKATLLATTMAVAMHVPITFAADAAKPAATADSKAAFKNDDQKAAYALGASLGRYMENSLKEQEKLGIKLDKDQLIAGVQDAFADKSKLSDQEIEQTLQTFEARVKSAAQAKMEKDAADNEAKGKTFRDAFAKEKGVKTSSTGLLYKVEKEGTGEAPKDSDTVVVNYKGTLIDGKEFDNSYTRGEPLSFRLDGVIPGWTEGLKNIKKSGKIKLVIPPALAYGKTGVPGIPANSTLVFDVELLDIKPAPKADAKPADAADAKAADAAKK

SEQ ID NO: 9265 - protein, 220 aa, Salmonella enterica subsp. enterica serovar Typhi
MLPATFLISDEGKIMATPTFDTIEAQASYGIGLQVGQQLSESGLEGLLPEALVAGIADALEGKHPAVPVDVVHRALREIHERADAVRRERFKAMAAEGVKYLEENREKDGVNSTESGLQFRVLTQGEGAIPARTDRVRVHYTGKLIDGTVFDSSVARGEPAEFPVNGVIAGWIEALTLMPVGSKWELTIPQELAYGERGAGASIPPFSTLVFEVELLEIL

SEQ ID NO: 9266 - protein, 228 aa, Legionella gresilensis
AAAISLVVSTAFAAPDSTNATNSTNSSANSTNASATTTSNTSTNLSSDMDKLSYSIGADLGRNFKKQGIDISPSAMAKGLQDGMSGGQLQLTDDQMKDVLNKFQKDLMTKRNAEFTKKAEENKAKGDAFLNQNKSKDGVVALPSGLQYKPLETGKGAKPGKDDTVTVEYTGKLIDGQVFDSTEKSGKPAEFKVSQVIPGWTEVLQLMPAGSTWEVYLPPSLAYGPRGI

SEQ ID NO: 9267 - protein, 457 aa, Saguinus oedipus
MTTDEGAKSSRENPAATVAEQGEDVTSKKDRGVLKIVKRVGHGEETPMIGDKVYVHYNGKLSNGKKFDSSHDRNEPFVFSIGKGQVIKAWDIGVSTMKKGEICHLLCKPEYAYGATGSLPKIPSNATLFFEVELLNFKGEDLLEDGGIIRRTKRRGEGYSNPNEGARVQIHLEGRCGGRVFDCRDVAFTVGEGEDHDIPIGIDKALEKMQREEQCILHLGPRYGFGEAGKPKFGIEPNAELIYEVTLKSFEKAKESWEMDTKEKLEQAAIVKEEGTVYFKGGKYVQAVIQYGKIVSWLEMEYGLSEKESKASESFLLAAFLNLAMCYLKLREYAKAVECCDKALGLDSANEKGLYRRGEAQLLMNEFESAKGDFEKVLEVNPQNKAARLQIVVCQKKAKEHNERDRRIYANMFKKFAEQDAKEEANKAVSKKTSEGVTNEKLTVSHAVEEEKPEGHV

SEQ ID NO: 9268 - protein, 457 aa, Cercopithecus aethiops
MTTDEGAKNSGESPTATVAEQGEDITSKKDRGVLKIVKRVGNGEETPMIGDKVYVHYKGKLSNGKKFNSSHDRNEPFVFSLGKSQVIKAWDIGVATMKKGEICHLLCKPEYAYGSAGSVPKIPSNATLFFEIELLDFKGEDLLEDGGIIRRTKRKGEGYSNPNEGATVEIHLEGRCGERMFDCRDVAFTVGEGEDHDIPIGIDKALEKMQREEQCILYLGPRYGFGEAGKPKFGIEPNAELIYEVTLKSFEKAKESWEMDTKEKLEQAAIVKEKGTVYFKGGKYMRAVIQYGKIVSWLEMEYGLSEKESKASESFLLAAFLNLAMCYLKLREYTKAVECCDKALGLDSANEKGLYRRGEAQLLMNEFESAKGDFEKVLEVNPQNKAARLQISMCQKKAKEHNERDRRIYANMFKKFAEQDAKEEANKAMGKKTSEGVTNEKGTDSSAVEEEKAEGHV

SEQ ID NO: 9269 - protein, 330 aa, Cercopithecus aethiops
MADIIARLREDGIQKRVIQEGRGELPDFQDGTKATFHYRTLHSDNEGTVLDDSRVRGKPMELIIGKKFKLPVWETIVCTMREGEIAQFLCDIKHVVLYPLVAKSLGNIAVGKDPLEGQRHCCGVAQMHEHSSLGHADLDALQQNPQPLVFHMEMLKVESPGTYQQDPWAMTDEEKAKAVPLIHQEGNRLYREGHVKEAAAKYYDAIACLKNLQMKEQPGSPEWIQLDQQITPLLLNYCQCKLVAEEYYEVLDHCSSILNKYDDNVKAYFKRGKAHAAVWNAQEAQADFAKVLELDPALAPVVSRELRALEARIRQKDEEDKARFRGIFSH

SEQ ID NO: 9270 - protein, 233 aa, Macaca fascicularis
MELGLLSMRRGELARFLFKPNYAYGTLGCPPLIPPNTTVLFEIELLDFLDSAESDKFCALSAEQQDQYPLQKVLKVAATEREFGNYLFRQNRFCDAEVRYKRALLLLRRRSAPSEAQHLVEAAKLPVLLNLSFTYLKLDRPTIALRYGEQALIIDQKNAKALFRCGQACLLLTEYQKARDFLVRAQREQPFNHDINNELKKLASDYRDYVDKEKEMWHRMFARCGDGSTAGES

SEQ ID NO: 9271 - protein, 392 aa, Macaca mulatta
MDAALLLNVEGVKKTILHGGTGELPNFITGSRVIFHFRTMKCDEERTVIDDSRQVDQPMHIIIGNMFKLEVWEILLTSMRVHEVAEFWCDTIHTGVYPILSRSLRQMAQGKDPTEWHVHTCGLANMFAYHTLGYEDLDELQKEPQPLIFVIELLQVDAPSDYQRETWNLSNHEKMKVVPVLHGEGNRLFKLGRYEEASSKYQEAIICLRNLQTKEKPWEVQWLKLEKMINTLTLNYCQCLLKKEEYYEVLEHTSDILRHHPGIVKAYYVRARAHAEVWNEAEAKADLQKVLELEPSMQKAVRRELRLLENRMAEKQEEERLRCRNMLSQGATQPPAEPPAQPPTAPPAELSTGPPADPPAEPPTAPPAELSTGPPAEPPAELPLSPGHSLQH

SEQ ID NO: 9272 - protein, 372 aa, Papio cynocephalus
MDAALLLNVEGVKKTILHGGTGELPNFITGSRVIFHFRTMKCDEERTVIDDSRQVDQPMHIIIGNMFKLEVWEILLTSMRVHEVAEFWCDTIHTGVYPILSRSLRQMAQGKDPTEWHVHTCGLANMFAYHTLGYEDLDELQKEPQPLIFVIELLQVDAPSDYQRETWNLSNHEKMKVVPVLHGEGNRLFKLGRYEEASSKYQEAIICLRNLQTKEKPWEVQWLKLEKMINTLTLNYCQCLLKKEEYYEVLEHTSDILRHHPGIVKAYYVRARAHAEVWNEAEAKADLQKVLELEPSMQKAVRRELRLLENRMAEKQEEERLRCRNMLSQGATQPPTEPPAEPHTAPPAELSTGPPAEPPAELPLSPGHSLQH

SEQ ID NO: 9273 - protein, 384 aa, Pan paniscus
MDAALLLNVEGVKKTILHGGTGELPNFITGSRVIFHFRTMKCDEERTVIDDSRQVGQPMHIIIGNMFKLEVWEILLTSMRVHEVAEFWCDTIHTGVYPILSRSLRQMAQGKDPTEWHVHTCGLANMFAYHTLGYEDLDELQKEPQPLVFVIELLQVDAPSDYQRETWNLSNHEKMKAVPVLHGEGNRLFKLGRYEEASSKYQEAIICLRNLQTKEKPWEVQWLKLEKMINTLILNYCQCLLKKEEYYEVLEHTSDILRHHPGIVKAYYVRARAHAEVWNEAEAKADLRKVLELEPSMQKAVRRELRLLENRMAEKQEEERLRCRNMLSQGATQPPAEPPTEPPAQSSTEPPAEPPPAPSAELSAGPPAETATEPPPSPGHSLQH

SEQ ID NO: 9274 - protein, 459 aa, Homo sapiens
MTAEEMKATESGAQSAPLPMEGVDISPKQDEGVLKVIKREGTGTEMPMIGDRVFVHYTGWLLDGTKFDSSLDRKDKFSFDLGKGEVIKAWDIAIATMKVGEVCHITCKPEYAYGSAGSPPKIPPNATLVFEVELFEFKGEDLTEEEDGGIIRRIQTRGEGYAKPNEGAIVEVALEGYYKDKLFDQRELRFEIGEGENLDLPYGLERAIQRMEKGEHSIVYLKPSYAFGSVGKEKFQIPPNAELKYELHLKSFEKAKESWEMNSEEKLEQSTIVKERGTVYFKEGKYKQALLQYKKIVSWLEYESSFSNEEAQKAQALRLASHLNLAMCHLKLQAFSAAIESCNKALELDSNNEKGLFRRGEAHLAVNDFELARADFQKVLQLYPNNKAAKTQLAVCQQRIRRQLAREKKLYANMFERLAEEENKAKAEASSGDHPTDTEMKEEQKSNTAGSQSQVETEA

SEQ ID NO: 9275 - protein, 457 aa, Homo sapiens
MTTDEGAKNNEESPTATVAEQGEDITSKKDRGVLKIVKRVGNGEETPMIGDKVYVHYKGKLSNGKKFDSSHDRNEPFVFSLGKGQVIKAWDIGVATMKKGEICHLLCKPEYAYGSAGSLPKIPSNATLFFEIELLDFKGEDLFEDGGIIRRTKRKGEGYSNPNEGATVEIHLEGRCGGRMFDCRDVAFTVGEGEDHDIPIGIDKALEKMQREEQCILYLGPRYGFGEAGKPKFGIEPNAELIYEVTLKSFEKAKESWEMDTKEKLEQAAIVKEKGTVYFKGGKYMQAVIQYGKIVSWLEMEYGLSEKESKASESFLLAAFLNLAMCYLKLREYTKAVECCDKALGLDSANEKGLYRRGEAQLLMNEFESAKGDFEKVLEVNPQNKAARLQISMCQKKAKEHNERDRRIYANMFKKFAEQDAKEEANKAMGKKTSEGVTNEKGTDSQAMEEEKPEGHV

SEQ ID NO: 9276 - protein, 449 aa, Homo sapiens
NNEESPTATVAEQGEDITSKKDRGVLKIVKRVGNGEETPMIGDKVYVHYKGKLSNGKKFDSSHDRNEPFVFSLGKGQVIKAWDIGVATMKKGEICHLLCKPEYAYGSAGSLPKIPSNATLFFEIELLDFKGEDLFEDGGIIRRTKRKGEGYSNPNEGATVEIHLEGRCGGRMFDCRDVAFTVGEGEDHDIPIGIDKALEKMQREEQCILYLGPRYGFGEAGKPKFGIEPNAELIYEVTLKSFEKAKESWEMDTKEKLEQAAIVKEKGTVYFKGGKYMQAVIQYGKIVSWLEMEYGLSEKESKASESFLLAAFLNLAMCYLKLREYTKAVECCDKALGLDSANEKGLYRRGEAQLLMNEFESAKGDFEKVLEVNPQNKAARLQISMCQKKAKEHNERDRRIYANMFKKFAEQDAKEEANKAMGKKTSEGVTNEKGTDSQAMEEEKPEGHV

SEQ ID NO: 9277 - protein, 457 aa, Homo sapiens
MTTDEGAKNNEESPTATVAEQGEDITSKKDRGVLKIVKRVGNGEETPMIGDKVYVHYKGKLSNGKKFDSSHDRNEPFVFSLGKGQVIKAWDIGVATMKRGEICHLLCKPEYAYGSAGSLPKIPSNATLFFEIELLDFKGEDLFEDGGIIRRTKRKGEGYSNPNEGATVEIHLEGRCGGRMFDCRDVAFTVGEGEDHDIPIGIDKALEKMQREEQCILYLGPRYGFGEAGKPKFGIEPNAELIYEVTLKSFEKAKESWEMDTKEKLEQAAIVKEKGTVYFKGGKYMQAVIQYGKIVSWLEMEYGLSEKESKASESFLLAAFLNLAMCYLKLREYTKAVECCDKALGLDSANEKGLYRRGEAQLLMNEFESAKGDFEKVLEVNPQNKAARLQISMCQKKAKEHNERDRRIYANMFKKFAEQDAKEEANKAMGKKTSEGVTNEKGTDSQAMEEEKPEGHV

SEQ ID NO: 9278 - protein, 314 aa, Homo sapiens
ARGGIIRRIQTRGEGYAKPNEGAIVEVALEGYYKDKLFDQRELRFEIGEGENLDLPYGLERAIQRMEKGEHSIVYLKPSYAFGSVGKEKFQIPPNAELKYELHLKSFEKAKESWEMNSEEKLEQSTIVKERGTVYFKEGKYKQALLQYKKIVSWLEYESSFSNEEAQKAQALRLASHLNLAMCHLKLQAFSAAIESCNKALELDSNNEKGLFRRGEAHLAVNDFELARADFQKVLQLYPNNKAAKTQLAVCQQRIRRQLAREKKLYANMFERLAEEENKAKAEASSGDHPTDTEMKEEQKSNTAGSQSQVETEA

SEQ ID NO: 9279 - protein, 140 aa, Homo sapiens [sequence omitted]

SEQ ID NO: 9280 - protein, 517 aa, Homo sapiens
GDFVRYHYVGTFPDGQKFDSSYDRDSTFNVFVGKGQLITGMDQALVGMCVNERRFVKIPPKLAYGNEGVSGVIPPNSVLHFDVLLMDIWNSEDQVQIHTYFKPPSCPRTIQVSDFVRYHYNGTFLDGTLFDSSHNRMKTYDTYVGIGWLIPGMDKGLLGMCVGEKRIITIPPFLAYGEDGDGKDIPGQASLVFDVALLDLHNPKDSISIENKVVPENCERISQSGDFLRYHYNGTLLDGTLFDSSYSRNRTFDTYIGQGYVIPGMDEGLLGVCIGEKRRIVVPPHLGYGEEGRGNIPGSAVLVFDIHVIDFHNPSDSISITSHYKPPDCSVLSKKGDYLKYHYNASLLDGTLLDSTWNLGKTYNIVLGSGQVVLGMDMGLREMCVGEKRTVIIPPHLGYGEAGVDGEVPGSAVLVFDIELLELVAGLPEGYMFIWNGEVSPNLFEEIDKDGNGEVLLEEFSEYIHAQVASGKGKLAPGFDAELIVKNMFTNQDRNGDGKVTAEEFKLKDQEAKHDEL

SEQ ID NO: 9281 - protein, 582 aa, Homo sapiens
MFPAGPPSHSLLRLPLLQLLLLVVQAVGRGLGRASPAGGPLEDVVIERYHIPRACPREVQMGDFVRYHYNGTFEDGKKFDSSYDRNTLVAIVVGVGRLITGMDRGLMGMCVNERRRLIVPPHLGYGSIGLAGLIPPDATLYFDVVLLDVWNKEDTVQVSTLLRPPHCPRMVQDGDFVRYHYNGTLLDGTFFDTSYSKGGTYDTYVGSGWLIKGMDQGLLGMCPGERRKIIIPPFLAYGEKGYGTVIPPQASLVFHVLLIDVHNPKDAVQLETLELPPGCVRRAGAGDFMRYHYNGSLMDGTLFDSSYSRNHTYNTYIGQGYIIPGMDQGLQGACMGERRRITIPPHLAYGENGTGDKIPGSAVLIFNVHVIDFHNPADVVEIRTLSRPSETCNETTKLGDFVRYHYNCSLLDGTQLFTSHDYGAPQEATLGANKVIEGLDTGLQGMCVGERRQLIVPPHLAHGESGARGVPGSAVLLFEVELVSREDGLPTGYLFVWHKDPPANLFEDMDLNKDGEVPPEEFSTFIKAQVSEGKGRLMPGQDPEKTIGDMFQNQDRNQDGKITVDELKLKSDEDEERVHEEL

SEQ ID NO: 9282 - protein, 582 aa, Homo sapiens
MFPAGPPSHSLLRLPLLQLLLLVVQAVGRGLGRASPAGGPLEDVVIERYHIPRACPREVQMGDFVRYHYNGTFEDGKKFDSSYDRNTLVAIVVGVGRLITGMDRGLMGMCVNERRRLIVPPHLGYGSIGLAGLIPPDATLYFDVVLLDVWNKEDTVQVSTLLRPPHCPRMVQDGDFVRYHYNGTLLDGTSFDTSYSKGGTYDTYVGSGWLIKGMDQGLLGMCPGERRKIIIPPFLAYGEKGYGTVIPPQASLVFHVLLIDVHNPKDAVQLETLELPPGCVRRAGAGDFMRYHYNGSLMDGTLFDSSYSRNHTYNTYIGQGYIIPGMDQGLQGACMGERRRITIPPHLAYGENGTGDKIPGSAVLIFNVHVIDFHNPADVVEIRTLSRPSETCNETTKLGDFVRYHYNCSLLDGTQLFTSHDYGAPQEATLGANKVIEGLDTGLQGMCVGERRQLIVPPHLAHGESGARGVPGSAVLLFEVELVSREDGLPTGYLFVWHKDPPANLFEDMDLNKDGEVPPEEFSTFIKAQVSEGKGRLMPGQDPEKTIGDMFQNQDRNQDGKITVDELKLKSDEDEERVHEEL

SEQ ID NO: 9283 - protein, 470 aa, Homo sapiens
MFPAGPPSHSLLRLPLLQLLLLVVQAVGRGLGRASPAGGPLEDVVIERYHIPRACPREVQMGDFVRYHYNGTFEDGKKFDSSYDRNTLVAIVVGVGRLITGMDRGLMGMCVNERRRLIVPPHLGYGSIGLAGLIPPDATLYFDVVLLDVWNKEDTVQVSTLLRPPHCPRMVQDGDFMRYHYNGSLMDGTLFDSSYSRNHTYNTYIGQGYIIPGMDQGLQGACMGERRRITIPPHLAYGENGTGDKIPGSAVLIFNVHVIDFHNPADVVEIRTLSRPSETCNETTKLGDFVRYHYNCSLLDGTQLFTSHDYGAPQEATLGANKVIEGLDTGLQGMCVGERRQLIVPPHLAHGESGARGVPGSAVLLFEVELVSREDGLPTGYLFVWHKDPPANLFEDMDLNKDGEVPPEEFSTFIKAQVSEGKGRLMPGQDPEKTIGDMFQNQDRNQDGKITVDELKLKSDEDEERVHEEL

SEQ ID NO: 9284 - protein, 107 aa, Homo sapiens
GVQVETISPGDGRTFPKAGQTCVVHYTGMLEDGKKFDSSRDRNKPFKFMLGKQEVIRGWEEGVAQMSVGQRAKLTISPDYAYGATGHPGIIPPHATLVFDVELLKLE

SEQ ID NO: 9285 - protein, 481 aa, Homo sapiens
MDRGLMGMCVNERRRLIVPPHLGYGSIGLAGLIPPDATLYFDVVLLDVWNKEDTVQVSTLLRPPHCPRMVQDGDFVRYHYNGTLLDGTSFDTSYSKGGTYDTYVGSGWLIKGMDQGLLGMCPGERRKIIIPPFLAYGEKGYGTVIPPQASLVFHVLLIDVHNPKDAVQLETLELPPGCVRRAGAGDFMRYHYNGSLMDGTLFDSSYSRNHTYNTYIGQGYIIPGMDQGLQGACMGERRRITIPPHLAYGENGTGDKIPGSAVLIFNVHVIDFHNPADVVEIRTLSRPSETCNETTKLGDFVRYHYNCSLLDGTQLFTSHDYGAPQEATLGANKVIEGLDTGLQGMCVGERRQLIVPPHLAHGESGARGVPGSAVLLFEVELVSREDGLPTGYLFVWHKDPPANLFEDMDLNKDGEVPPEEFSTFIKAQVSEGKGRLMPGQDPEKTIGDMFQNQDRNQDGKITVDELKLKSDEDEERVHEEL

SEQ ID NO: 9286 - protein, 356 aa, Homo sapiens
MGQPPAEEAEQPGALAREFLAAMEPEPAPAPAPEEWLDILGNGLLRKKTLVPGPPGSSRPVKGQVVTVHLQTSLENGTRVQEEPELVFTLGDCDVIQALDLSVPLMDVGETAMVTADSKYCYGPQGSRSPYIPPHAALCLEVTLKTAVDGPDLEMLTGQERVALANRKRECGNAHYQRADFVLAANSYDLAIKAITSSAKVDMTFEEEAQLLQLKVKCLNNLAASQLKLDHYRAALRSCSLVLEHQPDNIKALFRKGKVLAQQGEYSEAIPILRAALKLEPSNKTIHAELSKLVKKHAAQRSTETALYRKMLGNPSRLPAKCPGKGAWSIPWKWLFGATAVALGGVALSVVIAARN

SEQ ID NO: 9287 - protein, 108 aa, Homo sapiens
MGVQVETISPGDGRTFPKRGQTCVVHYTGMLEDGKKFDSSRDRNKPFKFMLGKQEVIRGWEEGVAQMSVGQRAKLTISPDYAYGATGHPGIIPPHATLVFDVELLKLE

SEQ ID NO: 9288 - protein, 107 aa, Homo sapiens
GVQVETISPGDGRTFPKRGQTCVVHYTGMLEDGKKFDSSRDRNKPFKFMLGKQEVIRGWEEGVAQMSVGQRAKLTISPDYAYGATGHPGIIPPHATLVFDVELLKLE

SEQ ID NO: 9289 - protein, 107 aa, Homo sapiens
GVQVETISPGDGRTFPKRGQTCVVHYTGMLEDGKKFDSSRDKNKPFKFMLGKQEVIRGWEEGVAQMSVGQRAKLTISPDYAYGATGVPGIIPPHATLVFDVELLKLE

SEQ ID NO: 9290 - protein, 107 aa, Homo sapiens
GVQVETISPGDGRTFPKRGQTCVVHYTGMLEDGKKMDSSRDRNKPFKFMLGKQEVIRGWEEGVAQMSVGQRAKLTISPDYAYGATGHPGIIPPHATLVFDVELLKLE

SEQ ID NO: 9291 - protein, 107 aa, Homo sapiens
GVQVETISPGDGRTFPKRGQTCVVHYTGMLEDGKKVDSSRDRNKPFKFMLGKQEVIRGWEEGVAQMSVGQRAKLTISPDYAYGATGHPGIIPPHATLVFDVELLKLE

SEQ ID NO: 9292 - protein, 355 aa, Homo sapiens
MGQPPAEEAEQPGALAREFLAAMEPEPAPAPAPEEWLDILGNGLLRKKTLVPGPPGSSRPVKGQVVTVHLQTSLENGTRVQEEPELVFTLGDCDVIQALDLSVPLMDVGETAMVTADSKYCYGPQGRSPYIPPHAALCLEVTLKTAVDGPDLEMLTGQERVALANRKRECGNAHYQRADFVLAANSYDLAIKAITSSAKVDMTFEEEAQLLQLKVKCLNNLAASQLKLDHYRAALRSCSLVLEHQPDNIKALFRKGKVLAQQGEYSEAIPILRAALKLEPSNKTIHAELSKLVKKHAAQRSTETALYRKMLGNPSRLPAKCPGKGAWSIPWKWLFGATAVALGGVALSVVIAARN

SEQ ID NO: 9293 - protein, 412 aa, Homo sapiens
MASCAEPSEPSAPLPAGVPPLEDFEVLDGVEDAEGEEEEEEEEEEEDDLSELPPLEDMGQPPAEEAEQPGALAREFLAAMEPEPAPAPAPEEWLDILGNGLLRKKTLVPGPPGSSRPVKGQVVTVHLQTSLENGTRVQEEPELVFTLGDCDVIQALDLSVPLMDVGETAMVTADSKYCYGPQGRSPYIPPHAALCLEVTLKTAVDGPDLEMLTGQERVALANRKRECGNAHYQRADFVLAANSYDLAIKAITSSAKVDMTFEEEAQLLQLKVKCLNNLAASQLKLDHYRAALRSCSLVLEHQPDNIKALFRKGKVLAQQGEYSEAIPILRAALKLEPSNKTIHAELSKLVKKHAAQRSTETALYRKMLGNPSRLPAKCPGKGAWSIPWKWLFGATAVALGGVALSVVIAARN

SEQ ID NO: 9294 - protein, 108 aa, Homo sapiens
MGVEIETISPGDGRTFPKKGQTCVVHYTGMLQNGKKFDSSRDRNKPFKFRIGKQEVIKGFEEGAAQMSLGQRAKLTCTPDVAYGATGHPGVIPPNATLIFDVELLNLE

SEQ ID NO: 9295 - protein, 108 aa, Homo sapiens
MGVHVETISPGDWRTFPKRSQTCVMHYTGMLEDGKKFDSSRDRNKPFKFMLGKQEVIRGWEEGVVQMSVGQRAKLTISPDYAYGATGHPGIIPPHATLVFDVELLKLE

SEQ ID NO: 9296 - protein, 209 aa, Legionella drozanskii
AMSLAMSTTIAATADTATSAPSATSLSTDTDKLSYSIGADLGKNFKKQGIDISPAAMAKGLQDGMSGGQLLLTEDQMKEVLNKFQKELMMKRSAEFNKKSEENKSRGEAFLKDNKSKDGVVSLPSGLQYKILEKGDGAKPAKEDTVTVEYTGRLINGQVFDSTEKTGKPATFKVSQVIPGWTEALQLMPSGSTWEVYIPSDLAYGPRSV

SEQ ID NO: 9297 - protein, 197 aa, Legionella rowbothamii
VLGLAMSTAMAADALVTDKDKLSYSIGADLGKNFKSQGIDINPEALAKGMQDGMSGGQLILTEQQMKDVLNKFQKDLMAKRSAEFNKKAEENKSKGEAFLSTNKAKTGVVVLPSGLQYKILEAGTGAKPGKSDTVTVEYTGTLIDGTVFDSTQKTGKPATFQVSQVIPGWTEALQLMPAGSTWEIFVPADLAYGHVV

SEQ ID NO: 9298 - protein, 194 aa, Legionella rowbothamii
LAMSTAMAADALVTDKDKLSYSIGADLGKNFKSQGIDINPEALAKGMQDGMSGGQLILTEQQMKDVLNKFQKDLMAKRSAEFNKKAEENKSKGEAFLSTNKAKTGVVVLPSGLQYKILEAGTGAKPGKSDTVTVEYTGTLIDGTVFDSTQKTGKPATFQVSQVIPGWTEALQLMPAGSTWEIFVPADLAYGHVV

SEQ ID NO: 9299 - protein, 198 aa, Legionella lytica
VLGLAMSTAMAADALVTDKDKLSYSIGADLGKNFKGQGIDINTEALAKGMQDGMSGAQLILTEQQMKDVLNKFQKDLMAKRSAEFNKKAEENKSKGEAFLSSNKAKTGVVVLPSGLQYKILEAGTGAKPGKADTVTVDYTGTLIDGTVFDSTQKTGKPATFQVSQVIPGWTEALQLMPAGSTWEVFVPADLAYGPRSV

SEQ ID NO: 9300 - protein, 199 aa, Legionella lytica
AVLGLAMSTAMAADALVTDKDKLSYSIGADLGKNFKGQGIDINPEALAKGMQDGMSGAQLILTEQQMKDVLNKFQKDLMAKRSAEFNKKAEENKSKGEAFLSSNKAKTGVVVLPSGLQYKILEAGTGAKPGKADTVTVDYTGTLIDGTVFDSTQKTGKPATFQVSQVIPGWTEALQLMPAGSTWEVFVPADLAYGPRSV

SEQ ID NO: 9301 - protein, 297 aa, Cytophaga hutchinsonii
MNKVYIILGFCFLSISVFAQKKQKTPSKASLFHEKDVAYTPSGLAYKYRLDVPGKTGAVGDVVKLHFVLRNSKDSILRSTIEEDRMVITTIQKPRYAASFEEGLGMLSKGDSCAFWISADSLFKKGIGAEMPPFIEKGSFLRFEVKMYDVLTMAEYVEEQEIMAKKVKADEDAALASYIKTNNIPAVLDTATGVYYQVVQAGTGAKPKKGNKVIVHYTGHLLNGEIFDSSLDRGDPFDFIIGQGRVIEGWDEGIPLMRKGEKGILYIPSYRGYGEQRAGSIPPNSTLIFEVELLDIK

SEQ ID NO: 9302 - protein, 295 aa, Cytophaga hutchinsonii
MLKKSLSLLAGAVMLASITSCNKFEKTESGLEYKILKDSSGEDYPEKGGFITFWFEIQNDKDSTLDTQFKDPNPVGIPTPDVAHKPSIEEGFMLLTEGDSAVFLLNADSLYANTFHQKLPAHIKSGSNVKMVVRMGKVYSKSFVDSVMAVQEQQMANQMLAETEVYKKDSLAIQNYLTKNKLKGQPTIGGVYVVKLKQNNATDLFIAPGDSIETSYVGKLLIEGTEFDKSRDGQPFKFTVGMGQVIKGWDEGFQKLKRGEKALLLIPSRLAYGSRGAQGAIPPNSPLLFEVEVKK

SEQ ID NO: 9303 - protein, 305 aa, Cytophaga hutchinsonii
MNRISIFLFLFCACILNVYAQNKKTPATGKAEPSYLKTASGLEYKIIKEGPGNQRPEQGGYISFWFQLQTLQDSIIDSQFGDPNPVGIPTQEALHKPGIEEGFLLLTEGDSAVFLLNADSLYINSFHQKRPDYLKPQSKVKMIVKMGTVYSKQFVDSVMAQQKIAMAEQSKGETDVYTKDSIAIQNYLKQNHLSGVATPGGAYVVILEKSTFSKADLKAGEDVQTTYIGSLLSNGSVFDKSAPGDYFKFRLGSGQVIQGWDQGFLKLKHGDKALILIPSRLAYGTRGAGGSIPPNAPLVFEVQVK

SEQ ID NO: 9304 - protein, 219 aa, Cytophaga hutchinsonii
MFCFLKSELTDSKLILFKTMAFTTEKDTVSYSLGVNIATSLKNQGFDDLNLDALTTALSDVFGNKTLQIDEAKGGQILNAYFQGMQERKQKKNIEEGVAFLKANGAKADVITLPSGLQYKVLVEGNGPKPTATDKVTTHYHGTLINGTVFDSSVERGQPATFPVNGVIAGWIEALQLMPTGSKWQLYVPSDLAYGARGASELIGPHTTLIFDVELISIN

SEQ ID NO: 9305 - protein, 136 aa, Cytophaga hutchinsonii
MIKKILTGMLCALCCIISLCASAADTLTTNSGIKYVRIKEGDGIHPKAGQTVKVIYSRKSSTGRVVETNEGGKPFKFQVDNHEVIPGWDEAVKLMSKGEKWYCIIPSELGYGKKGIEGVVAPNSTLYFLIEIVDIK

SEQ ID NO: 9306 - protein, 108 aa, Bos taurus
MGVQVETISPGDGRTFPKRGQTCVVHYTGMLEDGKKFDSSRDRNKPFKFVLGKQEVIRGWEEGVAQMSVGQRAKLTISPDYAYGATGHPGIIPPNATLIFDVELLKLE

SEQ ID NO: 9307 - protein, 107 aa, Bos taurus
GVQVETISPGDGRTFPKRGQTCVVHYTGMLEDGKKFDSSRDRNKPFKFVLGKQEVIRGWEEGVAQMSVGQRAKLTISPDYAYGATGHPGIIPPNATLIFDVELLKLE

SEQ ID NO: 9308 - protein, 107 aa, Bos taurus
GVEIETISPGDGRTFPKKGQTCVVHYTGMLQNGKKFDSSRDRNKPFKFRIGKQEVIKGFEEGAAQMSLGQRAKLTCTPDVAYGATGHPGVIPPNATLIFDVELLNLE

SEQ ID NO: 9309 - protein, 272 aa, Salmonella typhimurium LT2
MKSLFKATLLATTMAVAMHAPITFAADAAKPAATADSKAAFKNDDQKAAYALGASLGRYMENSLKEQEKLGIKLDKDQLIAGVQDAFADKSKLSDQEIEQTLQTFEARVKSAAQAKMEKDAADNEAKGKTFRDAFAKEKGVKTSSTGLLYKVEKEGTGEAPKDSDTVVVNYKGTLIDGKEFDNSYTRGEPLSFRLDGVIPGWTEGLKNIKKGGKIKLVIPPELAYGKTGVPGIPANSTLVFDVELLDIKPAPKADAKPADAADAKAADAAKK

SEQ ID NO: 9310 - protein, 458 aa, Oryctolagus cuniculus
MTAEEMKAAESGAQSAPLPLEGVDISPKQDEGVLKVIKREGTGTETPMIGDRVFVHYTGWLLDGTKFDSSLDRKDKFSFDLGKGEVIKAWDIAVATMKVGELCRITCKPEYAYGSAGSPPKIPPNATLVFEVELFEFKGEDLTDDEDGGIIRRIRTRGEGYARPNDGAIVEVALEGYYKDRLFDQRELRFEVGEGESLDLPCGLEKAIQRMEKGEHSILYLKPSYAFGNAGKEKFQIPPYAELKYEVHLKSFEKAKESWEMSSEEKLEQSAIVKERGTVYFKEGKYKQALLQYKKIVSWLEYESSFSSEEVQKAQALRLASHLNLAMCHLKLQAFSAAVESCNKALELDSNNEKGLFRRGEAHLAVNDFDLARADFQKVLQLYPSNKAAKAQLAVCQQRIRKQIAREKKLYANMFERLAEEENKAKAEVAAGDHPMDTEMKDERNDVAGSQSQVETEA

SEQ ID NO: 9311 - protein, 149 aa, Oryctolagus cuniculus
EEMDIKAAESGAQSAPLPLEGVDISPKQDEGVLKVIKREGTGTETPMIGDRVFVHYTGWLLDGTKFDSSLDRKDKFSFDLGKGEVIKAWDIAVATMKVGELCRITCKPEYAYGSAGSPPKIPPNATLVFEVELFEFKGEDLTDDEDGVP

SEQ ID NO: 9312 - protein, 108 aa, Oryctolagus cuniculus
MGVEIETISPGDGRTFPKKGQTCVVHYTGMLQNGKKFDSSRDRNKPFKFRIGKQEVIKGFEEGAAQMSLGQRAKLTCTPDVAYGATGHPGVIPPNATLIFGVELLNLE

SEQ ID NO: 9313 - protein, 543 aa, Cricetulus griseus
MEQVNELKEKGNKALSAGNIDDALQCYSEAIKLDPQNHVLYSNRSAAYAKKGDYQKAYEDGCKTVDLKPDWGKGYSRKAAALEFLNRFEEAKRTYEEGLKHEANNLQLKEGLQNMEARLAERKFMNPFNLPNLYQKLENDPRTRTLLSDPTYRELIEQLRNKPSDLGTKIQDPRIMTTLSVLLGVDLGSMDEEEEAATPPPPPPSKKEAKPEPMEEDLPENKKQALKEKEMGNEAYKKKDFDMALKHYDRAKELDPTNMTYITNQAAVHFEKGDYNKCRELCEKAIEVGRENREDYRQIAKAYARIGNSYFKEERYKDAIHFYNKSLAEHRTPDVLKKCQQAEKILKEQERLAYINPDLALEEKNKGNECFQKGDYPQAMKHYTEAIKRNPKDAKLYSNRAACYTKLLEFQLALKDCEECIQLEPTFIKGYTRKAAALEAMKDYTKAMDVYQKALELDSSCKEAADGYQRCMMAQYNRHDSPEDVKRRAMADPEVQQIMSDPAMRLILEQMQKDPQALSEHLKNPVIAQKIQKLMDVGLIAIR

SEQ ID NO: 9314 - protein, 543 aa, Mus musculus
MEQVNELKEKGNKALSAGNIDDALQCYSEAIKLDPQNHVLYSNRSAAYAKKGDYQKAYEDGCKTVDLKPDWGKGYSRKAAALEFLNRFEEAKRTYEEGLKHEANNLQLKEGLQNMEARLAERKFMNPFNLPNLYQKLENDPRTRSLLSDPTYRELIEQLQNKPSDLGTKLQDPRVMTTLSVLLGVDLGSMDEEEEAATPPPPPPPKKEPKPEPMEEDLPENKKQALKEKELGNDAYKKKDFDKALKHYDRAKELDPTNMTYITNQAAVHFEKGDYNKCRELCEKAIEVGRENREDYRQIAKAYARIGNSYFKEEKYKDAIHFYNKSLAEHRTPDVLKKCQQAEKILKEQERLAYINPDLALEEKNKGNECFQKGDYPQAMKHYTEAIKRNPRDAKLYSNRAACYTKLLEFQLALKDCEECIQLEPTFIKGYTRKAAALEAMKDYTKAMDVYQKALDLDSSCKEAADGYQRCMMAQYNRHDSPEDVKRRAMADPEVQQIMSDPAMRLILEQMQKDPQALSEHLKNPVIAQKIQKLMDVGLIAIR

SEQ ID NO: 9315 - protein, 543 aa, Mus musculus
MEQVNELKEKGNKALSAGNIDDALQCYSEAIKLDPQNHVLYSNRSAAYAKKGDYQKAYEDGCKTVDLKPDWGKGYSRKAAALEFLNRFEEAKRTYEEGLKHEANNVQLKEGLQNMEARLAERKFMNPFNLPNLYQKLENDPRTRSLLSDPTYRELIEQLQNKPSDLGTKLQDPRVMTTLSVLLGVDLGSMDEEEEAATPPPPPPPKKEPKPEPMEEDLPENKKQALKEKELGNDAYKKKDFDKALKHYDRAKELDPTNMTYITNQAAVHFEKGDYNKCRELCEKAIEVGRENREDYRQIAKAYARIGNSYFKEEKYKDAIHFYNKSLAEHRTPDVLKKCQQAEKILKEQERLAYINPDLALEEKNKGNECFQKGDYPQAMKHYTEAIKRNPRDAKLYSNRAACYTKLLEFQLALKDCEECIQLEPTFIKGYTRKAAALEAMKDYTKAMDVYQKALDLDSSCKEAADGYQRCMMAQYNRHDSPEDVKRRAMADPEVQQIMSDPAMRLILEQMQKDPQALSEHLKNPVIAQKIQKLMDVGLIAIR

SEQ ID NO: 9316 - protein, 542 aa, Mus musculus
  unsure (1)..(542): unsure at all Xaa locations
MEQVNELKEKGNKAPSAGNIDDALQCYSEAIKLDPQNHVLYSNRSAAYAKKGDYQKAYEDGCKTVDLKPDWGKGYSRKAAALEFLNRFEEAKRTYEEGLKHEANNLQLKEGLQNMEARLAERKFMNPFNLPNLYQKLENDPRTRSLLSDPTYRELIEQLQNKPSDLGTKLQDPRVMTTLSVLLGVDLGSMDEEEEAATPPPPPPPKKEPKPEPMEEDLPENKKQALKEKELGNDAYKKKDFDKALKHYDRAKELDPTNMTYITNQAAVHFEKGRLYKCTELCEKAIESGRENREDYRQIAKAYAPNWQFLFKEEXVQDAIHFYNKSLAEHRTQMCSRSASSQRNSEEQERLAYINPDLALEEKNKGNECFQKGDYPQAMKHYTEAIKRNPRDAKLYSNRAACYTKLLEFQLALKDCEECIQLEPTFIKGYTRKAAALEAMKDYTKAMDVYQKALDLDSSCKEAADGYQRCMMAQYNRHDSPEDVKRRAMADPEVQQIMSDPAMRLILEQMQKDPQALSEHLKNPVIAQKIQKLMDVGLIAIR

SEQ ID NO: 9317 - protein, 543 aa, Rattus norvegicus
MEQVNELKEKGNKALSAGNIDDALQCYSEAIKLDPQNHVLYSNRSAAYAKKGDYQKAYEDGCKTVDLKPDWGKGYSRKAAALEFLNRFEEAKRTYEEGLKHEANNLQLKEGLQNMEARLAERKFMNPFNLPNLYQKLENDPRTRTLLSDPTYRELIEQLQNKPSDLGTKLQDPRVMTTLSVLLGVDLGSMDEEEEAATPPPPPPPKKEAKPEPMEEDLPENKKQALKEKELGNDAYKKKDFDKALKHYDKAKELDPTNMTYITNQAAVHFEKGDYNKCRELCEKAIEVGRENREDYRQIAKAYARIGNSYFKEERYKDAIHFYNKSLAEHRTPDVLKKCQQAEKILKEQERLAYINPDLALEEKNKGNECFQKGDYPQAMKHYTEAIKRNPRDAKLYSNRAACYTKLLEFQLALKDCEECIQLEPTFIKGYTRKAAALEAMKDYTKAMDVYQKALDLDSSCKEAADGYQRCMMAQYNRHDSPEDVKRRAMADPEVQQIMSDPAMRLILEQMQKDPQALSEHLKNPVIAQKIQKLMDVGLIAIR

SEQ ID NO: 9318 - protein, 354 aa, Rattus norvegicus
MEQVNELKKKGNKALSAGNIEDALQCYSESIKLDPQNHVLYSNRSAAYAKKGDYQKAAALEFLNRFEEAKRTYGGFKHEANNIQLKEDLQNMEARLAERKFMNPFNLPNLYHKLENDPRIRALLSDPTYRELIEQLQSKPSDLGTKLQDPRVMTTLTVLLGVDLGSVDEKEEAETPPPPSPSKKEAKSEPMEEDLPENKKQALKEKELGNDAYKKKDFNKAQKHYDRAKELNLPSNQATSYTKLLEFHLALKDCEECIQLEPNFIKGYTWKSAALEVMKDYTKAMDVYQKALDLDSSCKEAADGSNYMMAQYNRHGSPEHVKQRAMADPEVQQLLRDPAMRLILEQIQKDPSRL

SEQ ID NO: 9319 - protein, 327 aa, Anopheles gambiae str. PEST
AKMATPESKQLALQEKDLGNAAYKKKDFETALQHYRTALTHDPTDITFHNNIAAVYFEQKEFKKCIEECEKAVEVGRENRADYKLIAKAFTRTGNAYRKLEDYKSAKTYFEKSLSEHRTPEVKSLLSDTEKKIKEMERLAYIDPSKAEEEKEKGNEYFKQGDYSTAVKHYSEAIKRNPDDAKLYSNRAACYTKLAAFDLGLKDCETCCRLDETFIKGWIRKGKILQVMQKSSEALTAYQKALEIDPNNAEALEGYRACTMAVHADPKEVWKKAMNDPEVQQILKDPAMRVILEQMQNDPKAVQEHLKNPQVASKIQKLLESGIIQIY

SEQ ID NO: 9320 - protein, 587 aa, Giardia lamblia ATCC 50803
MSAEEFKAQGNQAAKEGRLADAIDCYTKAINIDGSNHVYYSNRANIYHQLEDYDAAVADAEKCIELKPSFGKGFLRKADALAAMGKREEAVEVLRDGIESCGNTEPLLSQRLSSLEASAGGFGGAPGAGDPGAFMRNMFNAEGMAKIRANPKTAKYLADDPSLEQKLTLVASNPQMMMQVAGADPRLMECMLVAMGIDPDMMKDMPQAPGAPSFDAKPANPEPPAPKEPEKVLTPEEIEANKLKDEGNDLFKEKKYAEAIEKYEAAFAKHKSILFLNNISTALLKMEKITEAEEKAMEAYNYGRDNPGTATFEELGKALTKAASAQYARKDYEKAIKTLKSAMLEHRSKQTLALLTKVEDEWELIKKQNAYSPEKAERAKNEGNELFKAGKYQEAVDKYTEGLKALPLDPEREYRDDNEKFTANKTLLTSLLNNRANAYFKLGQMNLSYDDADHIVSLIKDTTNTKALLRKGQIERLRRQYYKAVETYKKVLEHEKYNNQEALEGYRKTTEKIQELQRNPDSKEAKEVTEIAMADEEIQKIASDPGLAEVIKQISTNPQAAQQYLSDPNISSRIEKLINAGIIRTGQ

SEQ ID NO: 9321 - protein, 293 aa, Giardia lamblia ATCC 50803
MTTRLAAKRLVVEYLLYLRAAQAVEDTDNLDVAIDCLRDCFGLKDVRHGNGDLEQILSGAKAPAVSSTSSSELKAQGNAAFKAEDFQEAIRLFTQAIEVSAANNEPPDQRAVYFANRAAARLGLKAEEETALAAKDCEESVRLCPSYHKAWFRLGNIRESAGNKPEAYRAYSQALTADPSNPKYREARDRVSEGRPEQATPDLSALANNPLFSQLRDDPEIIALMQNPKVADLLSKVNSNPMAIMGAMSDPELAPIFQRLVQKLGPQLSSMLGGLGGLFGGGGANSPPSGMYS

SEQ ID NO: 9322 - protein, 558 aa, Fusobacterium nucleatum subsp. vincentii ATCC 49256
MDEKEKEELLKKIEEYSKKIEEYSKKIEKNPNDASNYYNRGNAYYNRGNTFISLEKFQEAVDDDFEKAIEDYNRAIELNPNNTSYYYNRGKVFYNLKKYKKAITDFNKAIKLNPNDKEYFYIRGSSYYNLNIFNKAIIDFDKAIMITSDNEDYYNSRGSAYANLGNFNKAIADFNKAIELNPNFSDAYNNRGITYAYLKNYKEAIVNFNKAIDLNPSDEGYYYNRGLAYNNFNNYKMAIINFDKAIELNPNFSVAYNNRGITYAYLKNYKEAIVNFDKAIDLNPSDSLAFNLKEITIEIFEKEKSNKTEEFKKLLSEGNFNKLKEFISKEQDLKDSNNDAIKEFDLIENIIKDKSSKLKGYLIFADILGWKGIWKKQDKLDELVTILFVIKSILEKETKTLKDSHNINLISDTFIIYSKTFKTTNKLSKKLIELCLENNLVIRGAISYGECYNKDTVYVGPAVDEAASWHDEGEEIGIFYTPSGKQEIINNPKIKNSNLLEDIIKIKSGEIKTFFIDWYNDKTKKKFYELFNTIDKTSIKVYLKYLNTEKKFASYANS

SEQ ID NO: 9323 - protein, 564 aa, Plasmodium falciparum 3D7
MVNKEEAQRLKELGNKCFQEGKYEEAVKYFSDAITNDPLDHVLYSNLSGAFASLGRFYEALESANKCISIKKDWPKGYIRKGCAEHGLRQLSNAEKTYLEGLKIDPNNKSLQDALSKVRNENMLENAQLIAHLNNIIENDPQLKSYKEENSNYPHELLNTIKSINSNPMNIRIILSTCHPKISEGVEKFFGFKFTGEGNDAEERQRQQREEEERRKKKEEEERKKKEEEEMKKQNRTPEQIQGDEHKLKGNEFYKQKKFDEALKEYEEAIQINPNDIMYHYNKAAVHIEMKNYDKAVETCLYAIENRYNFKAEFIQVAKLYNRLAISYINMKKYDLAIEAYRKSLVEDNNRATRNALKELERRKEKEEKEAYIDPDKAEEHKNKGNEYFKNNDFPNAKKEYDEAIRRNPNDAKLYSNRAAALTKLIEYPSALEDVMKAIELDPTFVKAYSRKGNLHFFMKDYYKALQAYNKGLELDPNNKECLEGYQRCAFKIDEMSKSEKVDEEQFKKSMADPEIQQIISDPQFQIILQKLNENPNSISEYIKDPKIFNGLQKLIAAGILKVR

SEQ ID NO: 9324 - protein, 558 aa, Arabidopsis thaliana
MAEEAKSKGNAAFSSGDYATAITHFTEAINLSPTNHILYSNRSASYASLHRYEEALSDAKKTIELKPDWSKGYSRLGAAFIGLSKFDEAVDSYKKGLEIDPSNEMLKSGLADASRSRVSSKSNPFVDAFQGKEMWEKLTADPGTRVYLEQDDFVKTMKEIQRNPNNLNLYMKDKRVMKALGVLLNVKFGGSSGEDTEMKEADERKEPEPEMEPMELTEEERQKKERKEKALKEKGEGNVAYKKKDFGRAVEHYTKAMELDDEDISYLTNRAAVYLEMGKYEECIEDCDKAVERGRELRSDFKMIARALTRKGSALVKMARCSKDFEPAIETFQKALTEHRNPDTLKKLNDAEKVKKELEQQEYFDPTIAEEEREKGNGFFKEQKYPEAVKHYSEAIKRNPNDVRAYSNRAACYTKLGALPEGLKDAEKCIELDPSFTKGYSRKGAIQFFMKEYDKAMETYQEGLKHDPKNQEFLDGVRRCVEQINKASRGDLTPEELKERQAKAMQDPEVQNILSDPVMRQVLVDFQENPKAAQEHMKNPMVMNKIQKLVSAGIVQVR

SEQ ID NO: 9325 - protein, 571 aa, Arabidopsis thaliana
MADEAKAKGNAAFSSGDFNSAVNHFTDAINLTPTNHVLFSNRSAAHASLNHYDEALSDAKKTVELKPDWGKGYSRLGAAHLGLNQFDEAVEAYSKGLEIDPSNEGLKSGLADAKASASRSRASAPNPFGDAFQGPEMWSKLTADPSTRGLLKQPDFVNMMKEIQRNPSNLNLYLQDQRVMQALGVLLNIQIRTQQAGDDMEIGEEEMAVPSRKEPEVEKKRKPEPEPEPEPEFGEEKQKKLKAQKEKELGNAAYKKKDFETAIQHYSTAMEIDDEDISYITNRAAVHLEMGKYDECIKDCDKAVERGRELRSDYKMVAKALTRKGTALGKMAKVSKDYEPVIQTYQKALTEHRNPETLKRLNEAERAKKELEQQEYYDPNIGDEEREKGNDFFKEQKYPDAVRHYTEAIKRNPKDPRAYSNRAACYTKLGAMPEGLKDAEKCIELDPTFLKGYSRKGAVQFFMKEYDNAMETYQKGLEHDPNNQELLDGVKRCVQQINKANRGDLTPEELKERQAKGMQDPEIQNILTDPVMRQVLSDLQENPAAAQKHMQNPMIMNKIQKLISSGIVQMK

SEQ ID NO: 9326 - protein, 571 aa, Arabidopsis thaliana
MADEAKAKGNAAFSSGDFNSAVNHFTDAINLTPTNHVLFSNRSAAHASLNHYDEALSDAKKTVELKPDWGKGYSRLGAAHLGLNQFDEAVEAYSKGLEIDPSNEGLKSGLADAKASASRSRASAPNPFGDAFQGPEMWSKLTADPSTRGLLKQPDFVNMMKEIQRNPSNLNLYLQDQRVMQALGVLLNIQIRTQQAGDDMEIGEEEMAVPSRKEPEVEKKRKPEPEPEPEPEFGEEKQKKLKAQKEKELGNAAYKKKDFETAIQHYSTAMEIDDEDISYITNRAAVHLEMGKYDECIKDCDKAVERGRELRSDYKMVAKALTRKGTALGKMAKVSKDYEPVIQTYQKAITEHRNPETLKRLNEAERAKKELEQQEYYDPNIGDEEREKGNDFFKEQKYPDAVRHYTEAIKRNPKDPRAYSNRAACYTKLGAMPEGLKDAEKCIELDPTFLKGYSRKGAVQFFMKEYDNAMETYQKGLEHDPNNQELLDGVKRCVQQINKANRGDLTPEELKERQAKGMQDPEIQNILTDPVMRQVLSDLQENPAAAQKHMQNPMIMNKIQKLISSGIVQMK

SEQ ID NO: 9327 - protein, 572 aa, Arabidopsis thaliana
MAEEAKAKGNAAFSSGDFTTAINHFTEAIALAPTNHVLFSNRSAAHASLHQYAEALSDAKETIKLKPYWPKGYSRLGAAHLGLNQFELAVTAYKKGLDVDPTNEALKSGLADAEASVARSRAAPNPFGDAFQGPEMWTKLTSDPSTRGFLQQPDFVNMMQEIQKNPSSLNLYLKDQRVMQSLGVLLNVKFRPPPPQGDEAEVPESDMGQSSSNEPEVEKKREPEPEPEPEVTEEKEKKERKEKAKKEKELGNAAYKKKDFETAIQHYSTAIEIDDEDISYLTNRAAVYLEMGKYNECIEDCNKAVERGRELRSDYKMVARALTRKGTALTKMAKCSKDYEPAIEAFQKALTEHRNPDTLKRLNDAERAKKEWEQKQYFDPKLGDEEREKGNDFFKEQKYPEAIKHYTEAIKRNPNDHKAYSNRAASYTKLGAMPEGLKDAEKCIELDPTFSKGYSRKAAVQFFLKEYDNAMETYQAGLEHDPSNQELLDGVKRCVQQINKANRGDLTPEELKERQAKGMQDPEIQNILTDPVMRQVLSDLQENPSAAQKHMQNPMVMNKIQKLISAGIVQMK

SEQ ID NO: 9328 - protein, 594 aa, Arabidopsis thaliana
MADEAKAKGNAAFSSGDFNSAVNHFTDAINLTPTNHVLFSNRSAAHASLNHYDEALSDAKKTVELKPDWGKGYSRLGAAHLGLNQFDEAVEAYSKGLEIDPSNEGLKSGLADAKASASRSRASAPNPFGDAFQGPEMWSKLTADPSTRGLLKQPDFVNMMKEIQRNPSNLNLYLQDQRVMQALGVLLNIQIRTQQAGDDMEIGEEEMAVPSRKEPEVEKKRKPEPEPEPEPEFGEEKQKKLKAQKEKELGNAAYKKKDFETAIQHYSTAMEIDDEDISYITNRAAVHLEMGKYDECIKDCDKAVERGRELRSDYKMVAKALTRKGTALGKMAKVSKDYEPVIQTYQKALTEHRNPETLKRLNEAERAKKELEQQEYYDPNIGDEEREKGNDFFKEQKYPDAVRHYTEAIKRNPKDPRVRRIHHHISFNVVLKKSSVFDCFNNFNRAACYTKLGAMPEGLKDAEKCIELDPTFLKGYSRKGAVQFFMKEYDNAMETYQKGLEHDPNNQELLDGVKRCVQQINKANRGDLTPEELKERQAKGMQDPEIQNILTDPVMRQVLSDLQENPAAAQKHMQNPMIMNKIQKLISSGIVQMK

SEQ ID NO: 9329 - protein, 530 aa, Arabidopsis thaliana
MAEEAKSKGNAAFSSGDYATAITHFTEAINLSPTNHILYSNRSASYASLHRYEEALSDAKKTIELKPDWSKGYSRLGAAFIGLSKFDEAVDSYKKGLEIDPSNEMLKSGLADASRSRVSSKSNPFVDAFQGKEMWEKLTADPGTRVYLEQDDFVKTMKEIQRNPNNLNLYMKDKRVMKALGVLLNVKFGGSSGEDTEMKEADERKEPEPEMEPMELTEEERQKKERKEKALKEKGEGNVAYKKKDFGRAVEHYTKAMELDDEDISYLTNRAAVYLEMGKYEECIEDCDKAVERGRELRSDFKMIARALTRKGSALVKMARCSKDFEPAIETFQKALTEHRNPDTLKKLNDAEKVKKELEQQEYFDPTIAEEERKKGNGFFKEQKYPEAVKHYSEAIKRNPNDVRAYSNRAACYTKLGALPEGLKDAEKCIELDPSFTKGYSRKGAIQFFMKEYDKAMETYQEGLKHDPKNQEFLDGVRRCVEQINKASRGDLTPEELKERQAKAMQDPEVQNILSDPVMRQVKAVASIVF

SEQ ID NO: 9330 - protein, 584 aa, Glycine max
  unsure (1)..(584): unsure at all Xaa locations
MADEAKAKGNAAFSSGDYPAAIHHFSDAIALAPSNHVLYSNRXSAAYASLKNYADALADAKKTVELKPDWSKGYSRLGAAHLGLSQYDDAISAYKRGLEIDPHNEPLKSGLADAQKALAAASRPPNPFGDAFSGPEMWARLTADPTTRAYLXQQPDFVKMMQDIQRDPNNLNLHLKDQRIMQALGVLLNVKIQXXPPTGADTDMPDSPSPSAAASERKRAAEAEPAKQPEPEPEPEPVPMELTGEEKDAKQKKAEALKEKEAGNAAYKKKDFDTAIQHYTKALELDDEDISYLTNRAAVYLEMGKYEECIKDCDKAVERGRELRSDFKMIARALTRKGNALVKMAKCSKDYESAIETYQKALTEHRNPDTLKKLNEAEKAKKELEQQEYFDPKLADDEREKGNEFFKQQKYPDAVKHYTESIRRNPKDPRAYSNRAACYTKLGAMPEGLKDAEKCIELDPTFVKGYTRKGAVQYFMKEYDKALETYREGLKYDSNNQELLEGIRTCIQQINKASRGDLSPDELKERQAKAMQDPEIQNILQDPVMRQVLIDFQENPKAAQEHTKNPMVMNKIQKLVSAGIVQMK

SEQ ID NO: 9331 - protein, 566 aa, Glycine max
  unsure (1)..(566): unsure at all Xaa locations
MADEAKAKGNAAFSSGDYPAAIHHFSDAIALAPTNHVLYSNRSAAYASLQNYTDALADAKKTVELKPDWSKGYSRLGAAHLGLSQYGDAVSAYEKGLKIDPNNEPLKSGLADAQKALAAASRPRSSAANPFGDAFSGPEMWARLTADPTTRAYLQQPDFVKMMQDIQRDPNNLNLHLKDQRIMQALGVLLNVKIQTPPTGADTDMPDSQPESEPEPEPESMELTGEEKGAKQRKAEALKEKDAGNAAYKKKDFDTAIQHYTKALELDDEDISYLTNRAAVYLEMGKYEECIKDCDKAVERGRELRSDFKMIARALTRKGNALVKXAKXCSKDYEPAIETYQKALTEHRNPDTLKKLNEAEKAKKELEQQEYFDPKLADEEREKGNEFFKQQKYPEAVKHYTESIRRNPKDPRAYSNRAACYTKLGAMPEGLKDAEKCIELDPTFVKGYTRKGAVQYFMKEYEKSLETYREGLKYDSNNQELLEGIRTCIQQINKASRGDLSPEELKERQAKAMQDPEIQNILQDPVMRQVLIDFQENPKAAQEHTKNPMVMNKIQKLVSAGIVQMK

SEQ ID NO: 9332 - protein, 570 aa, Glycine max
  unsure (1)..(570): unsure at all Xaa locations
MAEEAKAKGNAAFSAGDFAAAVRHFSDAIALSPSNHVLYSNRSAATLPPELRGGPSRRQKTVDLKPDWPKAYSRLGAAHLGLRRHRDASPPTKPASNSNPDNAALKSGLADAQAAASRPPPTSPFATAFSGPDMWARSPPTPPHVQPPGPRVRQDHAGHPEGPQQVQPAFEYQRVMHAIGVLLNVKIQTPNHDENDHDADDDVSEDEVVSQPEPEHEPEAAVEVAEEEEEEEKETRDRKGQAQKEKEAGNAAYKKKDFETAIGHYSKALELDDEDISYLTNRAAVYLEMGKFEDCIKDCEKAVERGKELRSDYKMIARALTRKGTALAKMAKCSKDFEPAIEIFQKALTENRNPDTLKKLNEAEKAKKELEQQEYFDPKLADEAREKGNELFKQQKYPEATKHYTEAIKRNPKDAKAYSNRAACYTKLGAMPEGLKDAEKCIELDPTFSKGYTRKGAVQFSMKEYDKALETYREGLKHDPNNQELLDGIRRCVEQINKASRGDFTPEELKERQAKAMQDPEIQSILQDPVMTQVLTDFQENPRAAEEHVKNPMVMNKTQNVTVPGLXQMR

SEQ ID NO: 9333 - protein, 569 aa, Glycine max
MAEEAKAKGNAAFSAGDFAAAVRHFSDAIALSPSNHVLYSNRSAATLPPELRGGPSRRQKTVDLKPDWPKAYSRLGAAHLGLRRHRDASPPTKPASNSNPDNAALKSGLADAQAAASRPPPTSPFATAFSGPDMWARSPPTPPHVQPPGPRVRQDHAGHPEGPQQVQPAFEYQRVMHAIGVLLNVKIQTPNHDENDHDADDDVSEDEVVSQPEPEHEPEAAVEVAEEEEEEEKETRDRKGQAQKEKEAGNAAYKKKDFETAIGHYSKALELDDEDISYLTNRAAVYLEMGKFEDCIKDCEKAVERGKELRSDYKMIARALTRKGTALAKMAKCSKDFEPAIEIFQKALTENRNPDTLKKLNEAEKAKKELEQQEYFDPKLADEAREKGNELFKQQKYPEATKHYTEAIKRNPKDAKAYSNRAACYTKLGAMPEGLKDAEKCIELDPTFSKGYTRKGAVQFSMKEYDKALETYREGLKHDPNNQELLDGIRRCVEQINKASRGDFTPEELKERQAKAMQDPEIQSILQDPVMTQVLTDFQENPRAAEEHVKNPMVMNKTQNVTVPGCQMR

SEQ ID NO: 9334 - protein, 569 aa, Glycine max
MAEEAKAKGNAAFSAGDFAAAVRHLSDAIALSPSNHVLYSNRSAATLPPELRGGPSRRQKTVDLKPDWPKAYSRLGAAHLGLRRHRDASPPTKPASNSNPDNAALKSGLADAQAAASRPPPTSPFATAFSGPDMWARSPPTPPHVQPPGPRVRQDHAGHPEGPQQVQPAFEYQRVMHAIGVLLNVKIQTPNHDENDHDADDDVSEDEVVSQPEPEHEPEAAVEVAEEEEEEEKETRDRKGQAQKEKEAGNAAYKKKDFETAIGHYSKALELDDEDISYLTNRAAVYLEMGKFEDCIKDCEKAVERGKELRSDYKMIARALTRKGTALAKMAKCSKDFEPAIEIFQKALTENRNPDTLKKLNEAEKAKKELEQQEYFDPKLADEAREKGNELFKQQKYPEATKHYTEAIKRNPKDAKAYSNRAACYTKLGAMPEGLKDAEKCIELDPTFSKGYTRKGAVQFSMKEYDKALETYREGLKHDPNNQELLDGIRRCVEQINKASRGDFTPEELKERQAKAMQDPEIQSILQDPVMTQVLTDFQENPRAAEEHVKNPMVMNKTQNVTVPGCQMR

SEQ ID NO: 9335 - protein, 178 aa, Glycine max
  unsure (1)..(178): unsure at all Xaa locations
MEQVNALKDKGNAALQQGNYTEAIKFYSDAIALDPTNHVLFSNRSAAYAKYEQFELTYADSEKTVTLKPDWGKGYSRKGSALAYLGRTDEAIEAYEDRLIIDPTNAQLAEGLKEVNAKNPPLPDAGFADLXRSPDLFAKLQSNPQTRALLYDPEYLKICTKLHTDPAAQLDMYDDPRX

SEQ ID NO: 9336 - protein, 582 aa, Oryza sativa (japonica cultivar-group)
MEAEDDERAEAEAEARREKEAGNAAYRKLYLETAVRHYTRGALLDPRDISFLTNRAAAYLLMSKYKECVRDCDEAVEKGRELRADNKLVARALARKASALLKLAACAADYDPAIRALQQSLAEHYSEETLAKLGEAEEARKEIEERERLDQEAADHHRDRGNDFFKQKRYQEAAMHYTEAMKKNPKDPRVFSNRAQCHIYLGALPEGLEDADKCIALDPTFLKGYLRKAKVQLLMGNYEIALATYVEGLKCDPNNLEVLDGLRRCAACIKRANGGDSRAEDLREILIGEGGFGCVYKGILRNMTVAIKVLRPDSLQGQSQFEQEVSILSRVRHPHLVTLLGACSESSTLVYEFLPNGSLEDFLMCSDKRQTLTWQARIRIIAEICSALIFLHKNKPHPVVHGDLKPANILLGVNLVSKLSDFGISRLLIQSSTNNTTLYRTMHPVGTPLYMDPEFLSTGELTPQSDVYSFGIVVLRLLTGKPPVGIKNIVEDAMEKGDLNSVIDTSVGEWPHLHIEQLAYLALRCTELSRRCRPDLSGEVWAIVEAIRDAALSSPSSSRSAQDQNSPPSYFICPISQGYKIF

SEQ ID NO: 9337 - protein, 428 aa, Oryza sativa (japonica cultivar-group)
MAPAHSHRRGATEANEQMRRKKEKALREKEAGDDDFDEGRYKRAVEHYARAAALDPGDISFPIKCAKSYFHMDQYEECVRRCDEAVERGRELRAKKSLVALALLLKGTALLNLADCASDCKAAIRALKQSLDEHYHKGTEAILDEAESAMEEMEELEKEAAKHHREKKELLSKKKYKEAAIQFTKAIKRNPLNPRNFSDRAKCRIELNALAEGLEDADKCIEVDPTFWKGYFCKGEVQFLMHNYEDAMTTYLDGLKYGPQKTTIYDGIKCLEQIKMAKDRDVRDKDLWEAFKKSSSSQVEKLTMQRDVVTVELKSAKERNANLELQLSEQIGRIERLLSIQNSEPPHFICPISQEVMNDPHFAADGHTYEAEHIRKWLNDGHDTSPMTNERLQHKKLTPNHALRSAIREWHQHRNMRHTSPRRQQLFL

SEQ ID NO: 9338 - protein, 258 aa, Oryza sativa (japonica cultivar-group)
MTVQAGADVNYAYPNTPLVVSTTAGLTDCIKYLLEVHADPNIPDKQSGLTPIEIAASVGRRDHVEILFPFTSPVRAVTNWTVEGIIAHGKSRRLIPKFQILKIKRSLDSSGHDHLNPHYFLQGESCSKVSDRKAELKSQGEKAVKRKDYLAASKIYTKALELDYFDATLYSNRSLCYLQIGKAQKALLDAKKCVKLRPKWMKGHYREGAALMLLKEHKKAFEAFLNALKLDPANAEIEKVMWEAVEAMKKDDAAEDKT

SEQ ID NO: 9339 - protein, 389 aa, Oryza sativa
MLNIKIQRPEASESSQPSSSPPSQPQEQPEAKAREVEPEPEPEPMEVTDEEKERKERKSSAQKEKEAGNAAYKKKDFETAIQHYTKAMELDDEDISYLTNRAAVYIEMGKYDECIKDCDKAVERGRELRADFKMISRALTRKGTALAKLAKTSKDYDIAIETFQKALTEHRNPDTLKKLNEAERAKKELEQQEYYDPKLADEEREKGNQLFKEQKYPDAVKHYTEAIRRNPKDPKVYSNRAACYTKLGAMPEGLKDAEKCIELDPTFSKGYTRKGAIQFFMKEYDKAMETYQAGLKHDPNNPELLDGVKRCIEQINKANRGDLTQEEIQERQNKAMQDPEIQNILTDPIMRQVLVDLQENPRASQEHLKNPGVMQKIQKLVSAGIVQMR

SEQ ID NO: 9340 - protein, 304 aa, Oryza sativa
  unsure (1)..(304): unsure at all Xaa locations
XLQYDECIKDCDKAVERGRELRADFKMISRALTRKGTALAKLAKTSKDYDIAIETFQKALTEHRNPDTLKKLNEAERAKKELEQQEYYDPKLADEEREKGNQLFKEQKYPDAVKHYTEAIRRNPKDPKVISFGPHASLNIXLLGVSIIYRCXSNRAACYTKLGAMPEGLKDAEKCIELDPTFSKGYTRKGAIQFFMKEYDKAMETYQAGLKHDPNNPELLDGVKRCIEQINRANRGDLTQEEIQERQNKAMQDPEIQNILTDPIMRQVLVDLQENPRASQEHLKNPGVMQKIQKLVSAGIVQMR

SEQ ID NO: 9341 - protein, 231 aa, Oryza sativa
MADEAKAKGNAAFSAGRYEEAARHFTDAIALAPGNHVLYSNRSAALASVHRYSEALADAEKTVELKPDWAKGYSRLGAAHLGLGDAASAVAAYEKGLALDPTNEGLKAGLADAKKAAAAPPRRPPPSGVDGIGQMFQGPELWTKIASDPTTRAYLEQPDFMQMLRDVQRNPSSLNMYLSDPRMMQVLGLMLNIKIQRPEASESSQPSSSPPSQPQEQPEAKAREVEPEPEP

SEQ ID NO: 9342 - protein, 582 aa, Oryza sativa; identical to SEQ ID NO: 9336

SEQ ID NO: 9343 - protein, 477 aa, Oryza sativa
  unsure (1)..(477): unsure at all Xaa locations
MLQVNYMGMGTRWIPVTRTAIDIFREAVRCPHSGESSATSVGGFIVVIHVFSEVTALSRECVINRQQERELIAFRLLDRGRKASPLTHLASDDASHEGPYKKPTFRPIVVYGPRFQNGWTGNWAFQTRPDHDAAQSRPLLWAPPLTAGPRRRRRRRLPAGVQHIYSTMAPAHSHRRGATEANEQMRRKKEXXALREKEAGDDDFDEGRYKRAVEHYARAAALDPGDISFPIKCAKSYFHMDQHLPCSLQYEECVRRCDEAVERGRELRAKKSLVALALLLKGTALLNLADCASDCKAAIRALKQSLDEHYHKGTEAILDEAESAMEEMEELEKEAAKHHREKGKELLSKKKYKEAAIQFTKAIKRNPLNPRNFSDRAKCRIELNALAEGLEDADKCIEVDPTFWKGYFCKGEVQFLMHNYEDAMTTYLDGLKYGPQKTTIYDGIKRCLEQIKMAKDRDVRDKDLWEVLRGANSFFCX

SEQ ID NO: 9344 - protein, 106 aa, Oryza sativa
  unsure (1)..(106): unsure at all Xaa locations
MADEAKAKGNAAFSAGRYEEAARHFTDAIALAPGNHVLYSNRSAALALVHRYSEALADAXKTVELKPDWAKGYSRLGAAHLAFRGSQSAVFXAYEKGFRPQPPPTE

SEQ ID NO: 9345 - protein, 271 aa, Oryza sativa
  unsure (1)..(271): unsure at all Xaa locations
XELAPGADPEALEVARECLESIFTGMRKSGRKRASLGDLAEFFKSKGNESMRSKQHLKAVELYTCAIALSRNNAIYYCNRAAAYTLLNMFNEAVEDCLKSIEIDPNYSKAYSRLGSAYFALGKYHDALYKGYLKASELDPSNENVWQNIENTYAPQSQASHGQFPGQSSSGVPFTFFPPGNSPTPEFFANIINXXPPPFSFTGSTEGNRPQQTSSGHEGEHGQPGMHRDAGIQINLAGPEQAADAMRAVMEMLAPHMSQREGAPGSARGPG

SEQ ID NO: 9346 - protein, 428 aa, Sorghum bicolor
MAPPLVGCKLHRHRLLQAAAHGDLRRFKRIASALDGGKGRIREAVEVVVDGNGAGALHVAAAHGRTRVCAYLVEELQMDVNDTAVLSGDTPLTYAVRSKKNVDAVRYLLDHDADPNKRVHHGCTPLSIAVGKGICVMVELLLSKGADVNSLSCGGTPLHVAAMENHGAVMKILLDYNADCNKEFFILFTPLFTALRARSLNCVKHLIKAGADVMKGIHKFTPLILAAYEGLTDFYECLLEAGADPNVPDDSGLLPIEIAAFQNRRKDVEILFRVTSRIPSVHDWSVDGVLTFFKYVKSFLTDQDDPMYKMDLADLKLEGSKAYNEKDYSTAVKLYSVAIMKADSGDATLLSNRSLCFIRMGEGDKALVDAEACRALQPYWPKACFRQGAAHMLLKDYEKACDAFLDGLKLDPANDEMENALRWSIHDD

SEQ ID NO: 9347 - protein, 438 aa, Sorghum bicolor
MNRRPAYIGTCKGNDRCNAAADGNLRVFKRIASALDGGKGRIREAVEAVRDELGDGVLHVAAALGRTRVCAYLVEELHMDINAAAVSGQTPLSYAVCSDDNVEVVRYLLDHDADPDKPVYHGCNSLHIAVAKGLCVMVELLLSKGADVNSMSYCGTPLNVAAMENQGAVMKILLDYNADCNKEYSTIFTPLSTALCARSLSCVKLLIKAGADVTTKGTHKFSPLIFAANEGLTDFYECLLEAGADPNVPDDSGLLPIEIAALENRRKDVEILLRVTARIPSVPDWSVDGVLAYVKSIPTDEDDPVYKMNLADLKLEGNKAFKKKDYYTAVKFYSVAIMKNANSVDATLFSNRSLCWIKMGEGNKALIDAEACRLFQPYWAKACYRQGAAHMFLKDYEKACGAFLDGLKLDPANAELENELRESLNSLTISRGTTKVSE

SEQ ID NO: 9348 - protein, 261 aa, Triticum aestivum
RADFKMVSRALTRKGTALAKLAKSSKDYDVAIETFQKALTEHRNPDTLKRLNDAERAKKELEQQEYYDPKLADEEREKGNEFFKQQKYPEAVKHYTEALRRNPKDPKVYSNRAACYTKLGAMPEGLKDAEKCIELDPTFSKGYTRKGAIQFFMKEYDKAMETYQEGLKHDPSNQELLDGVKRCIQQINKANRGDLTPEELKERQGKAMQDPEIQNILTDPVMRQVLIDFQENPRAAQEHLKNPGVKQKIQKLVSAGIVQMK

SEQ ID NO: 9349 - protein, 195 aa, Triticum aestivum
  unsure (1)..(195): unsure at all Xaa locations
MAADEAKAKGNAAFSAGRFEEAAGHFGDAIALAPDNHVLFSNRSAAYASLHRYKEALADAERTVALKPDWAKGYSRLGAARLGSGDAAGAVEAYEKGLALDPSNAALKDGLAQARSALPRRPASGADAIGKIFQGPDLWSKIAADPTTRAYLDQPDFMQMLRDLQRNPGNLNNYLSDPRMMQVLNLMLNVKVHNX

SEQ ID NO: 9350 - protein, 171 aa, Triticum aestivum
MADEAKAKGNAAFSAGRFEEAAGHFSDAIALAPANHVLYSNRSAALASIHRYSDALADAEKTVELKPDWAKGYSRLGAAHLGLGDAASAAAAYEKGLALDPSNEGLKAGLADAKKAAGAPPRRAPSGGADAIGQMFQGPELWTKIASDPATRAYLDQPDFMQMLREVQRNP

SEQ ID NO: 9351 - protein, 332 aa, Triticum aestivum
  unsure (1)..(332): unsure at all Xaa locations
PSAAAAAAMADGGGGRAAELKDQGNEQFKSGNYLKAAALYTQAIKLDSDNPTLYSNRAAAFLQLVKLNKALADAETTIKLKPEWEKGYFRKGCVLEAMEQYEEAISAFQIALQHNPQNTEVARKIKRLTQLAREQKRAVDVENLRSNIDIRKNLQSLKKELATKYGDAEMGQNIFSFVISVIETAIKAWHDTGKXVDAKVNFLLDDQKTDTEKYAPVVNIEKAFESPHTHGSCFAYLRQYSEESFSKAACMVAPKSIISYPQVWKGQGSRKWKLDQSDGFFVQFESXPILRKIWFVASTAEKGRALCRSPEPLDITIHEILPRIFKENETSA

SEQ ID NO: 9352 - protein, 580 aa, Zea mays
MTEEAEAKAKGNAAFAAGRFEEAVQHFSDAIALAPDNHVLYSNRSAAYASLWRYAEALDDAKRTVALKPDWAKGYSRLGAAHLGLGDAPKAVEAYEKGLALEPSNEALKSGLAQARQSASAPRRPVGSGADAVGKMFQGPELWSKVAADPTTRGYLDQPDFVQMLREVQRNPGRLNSYLSDQRMVQVLTLMLNIKFQNQSSGAPDPAAAQSNPPPPKQQPEAKAREPEPDPEPEPMEVTEEDKEQKERKASAQKEKEAGNAAYKRKDFDTAIQHYTEAMELDDEDISYITNRAAVYLEMGKYDECIKDCDKAVERGRELHADFKMISRALTRKGTALAKLAKSSQDYDAAIEIFQKALTEHRNPDTLKKLNDAERAKKELEQQEYYDPRIADEEREKGNEFFKQQKYPEAVKHYTEALRRNPKDPRVYSNRAACYTKLGALPEGLKDAEKCIELDPTFSKGYTRKGAIQFFMKEYDKALETYQAGLKHDPKNQELLDGVRRCVEQINKASRGELSEEELKERQNKAMQDPEIQNILTDPIMQQVLTDLQENPRAAQAHLKNPGVMQKIQKLVSAGIVQMK

SEQ ID NO: 9353 - protein, 581 aa, Zea mays
  unsure (1)..(581): unsure at all Xaa locations
MADEAKAKGNAAFSAGRFEEAXARHFTDAIALAPDNHVLYSNRSAALASLHRYSDALADAQKTVDLKPDWAKGYSRLGAAHLGLGDAASAVAAYEKGLELDPSNEGLKAGLQDAKKAAAAPRSSGPDAIGQMFQGPELWSKIASDPSTRAYLNEPDFMHMMREVXQRNPSSISMYLSDPRMMQVLSLMLNVKIQRPEASDSLPRRRRSSSSSSRRPPSETKARDVEPXEPEAEPDGFDXXEEKDRKQTKAAAQKEKELGNAAYKKKDFEVAIQHYTKALELDDEDISYLTNRAAVYIEMGKYDECIKDCDKAVERGRELRADFKMISRALTRKGTALVKLAKTSKDFDIAIETFQKALTEHRNPDTLKKLNEAEKAKKELEQQEYYDPKLADEEREKGNEFFKEQKYPEAIKHYTEALKRNPKDPRVYSNRAACYTKLGAMPEGLKDXAEKCLELDPTFTKGYTRKGAIQFFMKEYDKAVETYQAGLKHDPNNQELLDGVKRCVEQINKANRGEISQDELQERQNKAMQDPEIQNILTDPIMRQVLIDFQENPSAAQEHLKNPGVMQKIQKLVSAGIVQMR

SEQ ID NO: 9354 - protein, 654 aa, Zea mays
  unsure (1)..(654): unsure at all Xaa locations
MVIGYSVDYTFENWDATMQARSWAPLGFIKTSKLFALIPIKPPDISGRTLLRPSQPLSPLEPSRARSDRSPWPWADEXAKAKGNAAFSAGRFEEAARHFTDAIALAPGNHVLYSNRSAALASLHRYSDALADAQKTVELKPDWAKGYSRLGAAHLGPRRXAASAVAAYEKGLALDPSNEGLKAGLEDAKKARRRPARAAPTPSAQMFQGPELWSKIASDPTTRAYLNEPDFMQMLREVQRNPSSISMYLSDPRMMQVLSLMLNVKIQRPEASEPSQSTXTAAAAAAAAEQTSPLQTKAREVEPEPEPEPMDFTDEEKERKERKAAAQKEKELGNTAYKKKDFEAAIQHYTKALEHDDEDISYLTNRAAVYIEMGKYDECIKDCDKAVERGRELRADFKMISRALTRKGTALVKLAKTSKDFDIAIETYQKALTEHRNPDTLKKLNEAERAKKELEQQEYYDPKLADEEREKGNEFFKEQKYPEAIKHYTEALKRNPKDPRVYSNRAACYTKLGAMPEGLKDAEKCLELDPTFTKGYTRKGAIQFFMKEYDKAMETYQAGLKHDPKNQELLDGVRRCIEQINKANRGEISQDELQERQNKAMQDPEIQNILTDPIMRQVLNDFQENPRAAQEHLKNPGVMQKIQKLVSAGIVQMR

SEQ ID NO: 9355 - protein, 471 aa, Zea mays
  unsure (1)..(471): unsure at all Xaa locations
MADEAKAKGNAAFSAGRFEEAARHFTDAIALAPDNHVLYSNRSAALASLHRYSDALADAQKTVELKPDWAKGYSRLGAAHLGLGDAASAVAAYEKGLELDPSNEGLKAGLQDAKKAAAAPRSSGPDAIGQMFQGPELWSKIASDPXXRAYLNEPDFMHMMREVQRNPSSISMYLSDPRMMQVLSLMLNVKIQRPEASEPSQSTPPPPKQQQQQQTPPSETKARDVEPEPEAEPMDLTDEEKDRKQTKAAAQKEKELGNAAYKKKDFEVAIQHYTKALELDDEDISYLTNRAAVYIEMGKYDECIKDCDKAVERGRELRADFKMISRALTRKGTALVKLAKTSKDFDIAIETFQKALTEHRNPDTLKKLNEAEKAKKELEQQEYYDPKLADEEREKGNEFFKEQKYPEAIKHYTEALKRNPKDPRVVILPLFYTVCLCYSITYEIFGKLGYXYCMTLLFVXYKFHQKRKKRX

SEQ ID NO: 9356 - protein, 440 aa, Zea mays
  unsure (1)..(440): unsure at all Xaa locations
XVAADPTTRGYLDQPDFVQMLREVQRNPGRLNSYLSDQRMVQVLTLMLNIKFQNQSSGAPDPAAAQSNPPPPKQQPEAKAREPEPDPEPEPMEVTEEDKEQKERKASAQKEKEAGNAAYKRKDFDTAIQHYTEAMELDDEDISYITNRAAVYLEMGKYDECIKDCDKAVERGRELHADFKMISRALTRKGTALAKLAKSSQDYDAAIEIFQKALTEHRNPDTLKKLNDAERAKKELEQQEYYDPRIADEEREKGNEFFKQQKYPEAVKHYTEALRRNPKDPRVYSNRAACYTKLGALPEGLKDADKCIELDPTFSKGYTRKGAIQFFMKEYDKALETYQAGLKHDPKNQELLDGVRRCVEQINKASRGELSGEELKERQNKAMQDPEIQNILTDPIMQQLAMQVLTDLQENPRAAQAHLKNPGVMQKIQKLVSAGIVQMK

SEQ ID NO: 9357 - protein, 313 aa, Zea mays
  unsure (1)..(313): unsure at all Xaa locations
MTEEAEAKAKGNAAFAAGRFEEAVQHFSDAIALAPDNHVLYSNRSAAYASLWRYAEALDDAKRTVALKPDWAKGYSRLGAAHLGLGDAPKAVEAYEKGLALEPSNEALKSGLAQARQSASAPRRPVGSGADAVGKMFQGPELWSKVAADPTTRGYLDQPDFVQMLREVQRNPGRLNSYLSDQRMVQVLTLMLNIKFQNQSSGAPDPAAAQSNPPPPKQQPEAKAREPEPDPEPEPMEVTEEDKEQKERKASAQKEKEAGNAAYKRKDFDTAIQHYTEAMELDDEDISYITNRAAVYLEMGKHPICSNSCLSPX

SEQ ID NO: 9358 - protein, 209 aa, Zea mays
  unsure (1)..(209): unsure at all Xaa locations
MADEAKAKGNAAFSAGRFEEAARHFTDAIALAPGNHVLYSXRYSDALADAQKTVELKPDWAKGYSRLGAAHLGLGDAASAVAAYEKGLALDPSNEGLKAGLEDAKKAAAAPRPSGPDAIGQMFQGPELWSKIASDPTTRAYLNEPDFMQMLREVQRNPSSISMYLSDPRMMQVLSLMLNVKIQRPEASEPSQSTPPPPPPQQQQTSPLQ

SEQ ID NO: 9359 - protein, 215 aa, Zea mays
  unsure (1)..(215): unsure at all Xaa locations
MEQVNELKEKGNKALSAGNIDDALQCYSEAIKLDPQNHVLYSNRSAAYAKKGDYQKAYEDGCKTVDLKPDWGKGYSRKAAALEFLNRFEEAKRTYEEGLKHEANNLQLKEGLQNMEARLAERKFINPFNLPNLYQKLENDPRTRSLLSDPTYRELIEQLQNKPSDLGTKLQDPRVMTTLSVLLXVDXGSMDEEEEAXTPPPPPPPXKEPKPEPMX

SEQ ID NO: 9360 - protein, 90 aa, Zea mays
MADEAKAKGNAAFSAGRFEEAARHFTDAIALAPGNHVLYSNRSAALASLHRYSDALADAQKTVELKPDWAKGYSRLGAAHLGVKRLGDDG

SEQ ID NO: 9361 - protein, 184 aa, Zea mays
  unsure (1)..(184): unsure at all Xaa locations
RHRVVHPLGSHAMEEDKRAEEARRAKEAGNDAYRKSFLETAVEHYTRGALLDPRDISFLTNRAAAYFHMGEYKECVRDCEGAVERGRDLSAANKLIAKALLRKASALLELATCSGDYAPAIRALQQSLTEHYSEETHEKLNKAVVVKKEFEEQERLDQETVYXHRERGLDVARLKRXRTAGMQX

SEQ ID NO: 9362 - protein, 126 aa, Zea mays
  unsure (1)..(126): unsure at all Xaa locations
MAKAGNATTNAENATVRFXDVERHFTDTIEIATDNHHIYSCRLEELVSLHHYSDDLADAQKTAEVKPDWAKGYSRLGAVYXGLGDADSAVAAYEKVLALEPSNEGLKAGLEDAKKAXRRPAASRPX

SEQ ID NO: 9363 - protein, 187 aa, Zea mays
  unsure (1)..(187): unsure at all Xaa locations
RAMQADEQAEAXXRRAKEAGNDAYRKSLLEEAVEHYTLGALLDPSDIAFLTNRAAAYLRMGKYEECVRDCDEAVKRGRELSSGSELIAKALSRKASALLELACCAADYAPAIGALKLSLAENYSEETLEKLNDAQSVRKEVEEQERLDQEAANQCREEGLDFFKHHVSNSXVLVACHTMIQLPKCCX

SEQ ID NO: 9364 - protein, 591 aa, Schizosaccharomyces pombe
MAEELKAKGNAAFSKKDYKTAIDYFTQAIGLDERNHILYSNRSACYASEKDYADALKDATKCTELKPDWAKGWSRKGAALHGLGDLDAARSAYEEGLKHDANNAQLLNGLKSVEAAQTQAASGAGGFNPFAKLGSQLSDPKFMEKLASNPETASLLADSAFMAKLQKIQQNPGSIMAELNDPRMMKVIGMLMGIDINMNAGEGAAEEQEKKEEFAPSSSTPSADSAKPETTNPPPQPQASEPMEEDKTAEELEEAATKEALKKKADQEKQIGNENYKKRNFPVAIEQYKKAWDTYKDITYLNNLAAAYFEADQLDDCIKTCEDAIEQGRELRADFKLIAKALGRLGTTYQKRGDLVKAIDYYQRSLTEHRTPDILSRLKDAEKSKELQDREAYIDPDKAEESRVKGNELFKSGDFANAIKEYTEMTKRAPSDPRGFGNRAAAYLKVMAPAECIRDCNKAIELDPNFAKAYVRKAQALFMLKDYNKCIDACNEASEVDRREPNTGKNLREIESQLSKCMSAMASQRQNETEEETMARIQKDPEVLGILQDPAMQAILGQARENPAALMEHMKNPTVKSKIEKLIASGVIRLG

SEQ ID NO: 9365 - protein, 591 aa, Schizosaccharomyces pombe
MAEELKAKGNAAFSKKDYKTAIDYFTQTIGLDERNHILYSNRSACYASEKDYADALKDATKCTELKPDWAKGWSRKGAALHGLGDLDAARSAYEEGLKHDANNAQLLNGLKSVEAAQTQAASGAGGFNPFAKLGSQLSDPKFMEKLASNPETASLLADSAFMAKLQKIQQNPGSIMAELNDPRMMKVIGMLMGIDINMNAGEGAAEEQEKKEEFAPSSSTPSADSAKPETTNPPPQPQASEPMEEDKTAEELEEAATKEALKKKADQEKQIGNENYKKRNFPVAIEQYKKAWDTYKDITYLNNLAAAYFEADQLDDCIKTCEDAIEQGRELRADFKLIAKALGRLGTTYQKRGDLVKAIDYYQRSLTEHRTPDILSRLKDAEKSKELQDREAYIDPDKAEESRVKGNELFKSGDFANAIKEYTEMTKRAPSDPRGFGNRAAAYLKVMAPAECIRDCNKAIELDPNFAKAYVRKAQALFMLKDYNKCIDACNEASEVDRREPNTGKNLREIESQLSKCMSAMASQRQNETEEETMARIQKDPEVLGILQDPAMQAILGQARENPAALMEHMKNPTVKSKIEKLIASGVIRLG

SEQ ID NO: 9366 - protein, 240 aa, Thermoplasma volcanium
MKKGIFMVDEFKLNNKEQLADDYNERGISYFNIGKYDKAVEEFTKAISIINDDADLYHNRGMAYYSMKAYDQAIEDFERSISLDPNSSDYHNALGSVYEDMGNYEKALEEFNSAIRLEDDLPDYYYNRGNVYWKLGEIEKAIQDYSKAADLDYTDQIYVYKKYEALTSLGRYDEALETVDKAIKVVPANYNYLAMKAELLIKMKRYEEARPVIEEVEKLNPGNPDAARLMAQINMKRQNK

SEQ ID NO: 9367 - protein, 242 aa, Thermoplasma volcanium
MYLKKGIFMVDEFKLNNKEQLADDYNERGISYFNIGKYDKAVEEFTKAISIINDDADLYHNRGMAYYSMKAYDQAIEDFERSISLDPNSSDYHNALGSVYEDMGNYEKALEEFNSAIRLEDDLPDYYYNRGNVYWKLGEIEKAIQDYSKAADLDYTDQIYVYKKYEALTSLGRYDEALETVDKAIKVVPANYNYLAMKAELLIKMKRYEEARPVIEEVEKLNPGNPDAARLMAQINMKRQNK

SEQ ID NO: 9368 - protein, 578 aa, Neurospora crassa
MSTADELKALGNKAIAEKNFDEAIDKFTQAIALDPSNHILYSNRSAAYASKKDWDNALKDAEKTTEIKPDWPKGWGRKGTALFGKGDLLGANDAYEQGLKIDPNNAGMKKDFEAVQRAMQQEAGGGDLSGGIGQMFADPNLIQKLAGNPKTAAFLSDPAFMAKLQAVKQNPSNAQDLFSDPRMIQVLGVLMGVDMELRDSDVPPGAPQEDVNMTDAPAPKQETPPKPKTPEPEPEPELDEEELEKKKAKEAADKEKALGTECYKKRNFDEAIKHYQAAWDLYKDIVYLNNLGAAYFEKGDYQACIDTCKKAAEEGRARYADFKVIAKSLARIGSAYEKLGDLTNAIEYYNQSLREHRTPEVISKVRAAERNKIEAARKAYIDPVKAEEAREEGNKKFKEMDWPGAVAAYSEMIKRAPDDPRGYSNRAAAFMKLLEFPSALEDCETAIKKDPKFIRAYIRKAQIYFGMREYSKCVDACTEARKIDAEYHNGANAREIEQLEQKAFNAMYAARENETEEQTRERLARDPEIMGIMSDPVMQAILQQAQSDPAALAEHMRNPNVRTKIQKLIAAGVIRVGR

SEQ ID NO: 9369 - protein, 545 aa, Leishmania major
DATELKNKGNEEFSAGRYVEAVNYFSKAIQLDEQNSVLYSNRSACFAAMQKYKDALDDADKCISIKPNWAKGYVRRGAALHGMRRYDDAIAAYEKGLKVDPSNSGCAQGVKDVQVAKAREARDPIARVFTPEAFRKIQENPKLSLLMLQPDYVKMVDTVIRDPSQGRLYMEDQRFALTLMYLSGMKIPNDGDGEEEERPSAKAAETAKPKEEKPLTDNEKEALALKEEGNKLYLSKKFEEALTKYQEAQVKDPNNTLYILNVSAVYFEQGDYDKCIAECEHGIEHGRENHCDYTIIAKLMTRNALCLQRQRKYEAAIDLYKRALVEWRNPDTLKKLTECEKEHQKAVEEAYIDPEIAKQKKDEGNQYFKEDKFPEAVAAYTEAIKRNPAEHTSYSNRAAAYIKLGAFNDALKDAEKCIELKPDFVKGYARKGHAYFWTKQYNRALQAYDEGLKVDPSNADCKDGRYRTIMKIQEMASGQSADGDEAARRAMDDPEIAAIMQDSYMQLVLKEMQNDPTRIQEYMKDSGISSKINKLISAGIIRFGQ

SEQ ID NO: 9370 - protein, 565 aa, Trypanosoma cruzi
MDATELKNRGNQEFSSGRYKEAAEFFSQAINLDPSNHVLYSNRSACHAALHQYPNALQDAEKCVSIKPDWVKGYVRKGAALHGLRRYETAAAYNKGLSLDPSSAACTEGIAAVEKDKVASRMQNPFANVFGPDAIGKIQAHPKLSLFLLQPDYVRMIDEVMKDPSSVQKYLKDQRFMATFMVLSGLELPEDEDEEEEKVRRQQQKQKEKEMKEEQEKKKAAATELSPEAKEALRKKEEGNALYKQRKFDEALQKYQEALSKDSTNTVYLLNITAVIFEKGEYAACVEKCEEALEHGRENRCDYTVLAKLMTREALCLQRLKRFDEAIALFKKALVEHRNPDTLAKLTACEKEKEKFEIEAYLDPEIALQKKEEGNTFFKSDKFPEAVEAYTEAIKRNPDEHTTYSNRAAAYLKLGAYSQALADAEKCISLKPEFVKAHARRGHAFFWTKQYNKALQAYDEGLKHDKENAECKEGRMRTLMKIQEWLLATLPTEMKWQNAPWQIQRLLLSCRTAICSWYWVRCSGTPHASKNTCGIRRLPQRSTPLFLLESFALESKREAKQAMIR

SEQ ID NO: 9371 - protein, 564 aa, Acanthamoeba castellanii
MADIALEEKNKGNAAMSAGDFKAAVEHYTNAIQHDPQNHVLYSNRSAAYASLKDYDQALADGEKTVELKPDWSKGYSRKGAALCYLGRYADAKAAYAAGLEVEPTNEQLKQALQEAEEQEQASGGGPDIGNVFGQMLQGDIWTKLRQSDLTRAYLDDPAFVSLLSRLQKNPNELPMYIQSDPRIANVFAVILGISQKPPGAETQEPAQQPKKEEPKKEEKPKAEEKPKEPEPELPTEKKQALEEKELGNQAYKKKDFDTAIVHYKKAFELDPDNMTYLTNLAAVYMEQKNYEECVNTCTEAIEVGRRVFADYKLISRAFHRKGNAYMKMEKYAEAIDSYNRALTEHRNPDSLNALRKAEQLKKESEEKNYVNPEISQQEKEKGNDCFRNAQYPDAIKHYTEAIRRNPTDHVLYSNRAACYMKLGRVPMAVKDCDKAIELSPTFVKAYTRKGHCQFFMKQYHKCLETYEQGLKVEPNNEELNEGLRRTMEAINKRQEGSSKAEDKEAMAAAASDPEIQKILGDPMMKKVLSELGTNPAAVQSYMKDPVIMNNIQKLIAAGIIKVK

SEQ ID NO: 9372 - protein, 253 aa, Plasmodium falciparum
MVNKEEAQRLKELGNKCFQEGKYEEAVKYFSDAITNDPLDHVLYSNLSGAFASLGRFYEALESANKCISIKKDWPKGYIRKGCAEHGLRQLSNAEKTYLEGLKIDPNNKSLQDALSKVRNENMLENAQLIAHLNNIIENDPQLKSYKEENSNYPHELLNTIKSINSNPMNIRIILSTCHPKISEGVEKFFGFKFTGEGNDAEERQRQQREEEERRKKKEEEERKKKEEEEMKKQNRTPEQIQGDEHKLKVMNS

SEQ ID NO: 9373 - protein, 252 aa, Plasmodium falciparum
MVNKEEAQRLKELGNKCFQEGKYEEAVKYFSDAITNDPLDHVLYSNLSGAFASLGRFYEALESANKCISIKKDWPKGYIRKGCAEHGLRQLSNAEKTYLEGLKIDPNNKSLQDALSKVRNENMLENAQLIAHLNNIIENDPQLKSYKEENSNYPHELLNTIKSINSNPMNIRIILSTCHPKISEGVEKFFGFKFTGEGNDAEERQRQQREEEERRKKKEEEERKKKEEEEMKKQNRTPEQIQGDEHKLKVMN

SEQ ID NO: 9374 - protein, 233 aa, Encephalitozoon cuniculi
MDLKEIERYFSKRRQYLSREEYRTVVGVLRKLERAEKTSNRCLAEEMKNKGNEEYNNGDFQSAVDSYTQAILYDPTNAVYLSNRAAAYSKLGMTESAIEDCESGLKIDDRFVKLYIRLGTLYLDRDRNKAQEIFRRGLEVDPENKTMKKHLDLLSKEAPEGIPEAAQSSSLEDMVKSIGMGGFKDSKIDFNSLFNNKSIKDVLDTVIKDKSPDDLMDMVKNMIGAMGPQDTGK

SEQ ID NO: 9375 - protein, 320 aa, Caenorhabditis elegans
MTDAAIAEKDLGNAAYKQKDFEKAHVHYDKAIELDPSNITFYNNKAAVYFEEKKFAECVQFCEKAVEVGRETRADYKLIAKAMSRAGNAFQKQNDLSLAVQWFHRSLSEFRDPELVKKVKELEKQLKAAERLAYINPELAQEEKNKGNEYFKKGDYPTAMRHYNEAVKRDPENAILYSNRAACLTKLMEFQRALDDCDTCIRLDSKFIKGYIRKAACLVAMREWSKAQRAYEDALQVDPSNEEAREGVRNCLRSNDEDPEKAKERSLADPEVQEILRDPGMRMILEQMSNDPGAVREHLKNPEIFQKLMKLRDAGVIQMR

SEQ ID NO: 9376 - protein, 490 aa, Drosophila melanogaster
MDKVNELKEKGNQALSAEKFDEAVAAYTEAIALDDQNHVLYSNRSAAFAKAGKFQEALEDAEKTIQLNPTWPKGYSRKGAAAAGLNDFMKAFEAYNEGLKYDPTNAILLQGRMETTASALSFMQSQGDIPMDVDPQQARSRRAPSPPPAKPAEPPKPAEPRVEDMTEEQKNKYFARKEKELGNAAYKKKDFETALKHYHAAIEHDPTDITFYNNIAAVHFERKEYEECIKQCEKGIEVGRESRADFKLIAKSFARIGNTYRKLENYKQAKVYYEKAMSEHRTPEIKTSLSEVEAKIKEEERMAYINPEKAEEEKEQGNLFFKKGDYSTAVKHYTEAIKRNPDDPKLYSNRAACYTKLAAFDLGLKDCDTCIKLDEKFIKGYIRKGKILQGMQQQSKAQAAYQKALELDPNNAEAIEGYRQCSMNFQRNPQEVLKNAMSDPEIQQILKDPAMRMILEQMQSDPNAVKEHLQNPAIADKIMKLLESGIIQIH

SEQ ID NO: 9377 - protein, 489 aa, Drosophila melanogaster
MDKVNELKEKGNQALSAEKFDEAVAAYTEAIALDDQNHVLYSNRSAAFAKAGKFQEALEDAEKTIQLNPTWPKGYSRKGAAAAGLNDFMKAFEAYNEGLKYDPTNAILLQGRMETTASALSFMQSQGDIPMDVDPQQARSRRAPSPPPKPAEPPKPAEPRVEDMTEEQKNKYFARKEKELGNAAYKKKDFETALKHYHAAIEHDPTDITFYNNIAAVHFERKEYEECIKQCEKGIEVGRESRADFKLIAKSFARIGNTYRKLENYKQAKVYYEKAMSEHRTPEIKTSLSEVEAKIKEEERMAYINPEKAEEEKEQGNLFFKNGDYSTAVKHYTEAIKRNPDDPKLYSNRAACYTKLAAFDLGLKDCDTCIKLDEKFIKGYIRKGKILQGMQQQSKAQAAYQKALELDPNNAEAIEGYRQCSMNFQRNPQEVLKNAMSDPEIQQILKDPAMRMILEQMQSDPNAVKEHLQNPAIADKIMKLLESGIIQIH

SEQ ID NO: 9378 - protein, 559 aa, Plasmodium yoelii yoelii
MINKEEAQRLKELGNKCFQEGKFEDSVKYFSDAIKNDPSDHVLYSNLSGAYSSLGRFYEALESANKCINIKNDWPKGYIRKACAEHGLRQLDNSEKTYLEGLKLDPNNKSLKDGLEKVRKDKEMENMEYINHINNIINNDAKLKSYKEENSNYPIELLNTIKAINANPMNIRFILSSCNPKISEGVEKFFGIKFNDEASYEAERERQRKKEEEEKKEKERKMKEEEKKKNRTPEEILGEEHKLKGNDFYKQKKFEEALKEYDEAIKVNPNDIMYYYNKAAVYLEMKSYEKCIETCIYAIENRYNFKAEFSQVAKVYNRLAIGYINIKNYDKAIEAYRKSLVEDNNRATRNALKELERKKEKEEREAYIDPVKAEEHKNKGNEFFKNNDFPNAKKEYDEAIRRNPNDAKLYSNRAAALTKLIEYPSALEDVMKAIELDPKFVKAYSRKGNLHFFMKDYYKAIQAYNKGLELDPNNKECIEGYQRCVYKIDEMSKSEKVDEEQIKKSMADPEIQQIISDPQFQIILQKINENPNSISEYIKDPKIFNGLQKLIAAGILTVR

SEQ ID NO: 9379 - protein, 320 aa, Danio rerio
MADTKHIAFSIIQFLRDELSSGGLSSDAQESLEVAIQCLETTFGISVDDQNLAVSQSLPELFAFATKQTGTTQENTFETTGSPYEHQLAEAERLKTDGNDQMKVENFSAAVEFYSKAIQLNPQNAVYFCNRAAAYSKLGNYAGAVQDCERAIGIDANYSKAYGRMGLALASLNKYSEAVSYYKKALELDPDNDTYKVNLQVAEQKVKETQPSTAGGLGGVDLAGLLSNPGFMNMASNLMNNPQVQQLVSGMMSGSYSPVSSATSPTAAGAGGGGANDLSSLIQAGQQFAQQMQQQNPELIEQLRSQMRSRPPSSAGNDEP

SEQ ID NO: 9380 - protein, 543 aa, Xenopus laevis
MEAANALKEKGNKALSAGNLDEAVKCYTEAIKLDPKNHVLYSNRSAAYAKKKEFTKALEDGSKTVELKADWGKGYSRKAAALEFLNRFEEAKKTYEEGLRHEPTNAQLKEGLQNMEARLAEKKFMNPFNSPNLFQKLESDPRTRALLSDPSYKELIEQLRNKPSDLGTKLQDPRVMTTLSVLLGVELGNVDEEEEDTPPPPPPQPKKETKPEPMEEDLPENKKQAQKEKELGNEAYKKKDFETALKHYGQARELDPANMTYITNQAAVYFEMGDYSKCRELCEKAIEVGRENREDYRLIAKAYARIGNSYFKEEKNKEAIQFFNKSLAEHRTPEVLKKCQQAEKILKEQERVAYINPDLALEAKNKGNESFQKGDYPQAMKHYSEAIKRNPNDAKLYSNRAACYTKLLEFLLAVKDCEECIRLEPSFIKGYTRKAAALEAMKDFTKAMDAYQKAMELDSTSKEATDGYQRCMMSQYNRNDNPEDVKRRAMADPEVQQIMSDPAMRLILEQMQKDPQALSDHLKNPVIAQKIQKLMDVGLIAIR

SEQ ID NO: 9381 - protein, 543 aa, Xenopus laevis
MEAANALKEKGNKALSAGNLDEAVKCYTEAIKLDPKNHVLYSNRSAAYAKKKEFTKALEDGSKTVELKADWGKGYSRKAAALEFLNRFEEAKKTYEEGLRHEPTNAQLKEGLQNMEARLAEKKFMNPFNSPNLFQKLESDPRTRALLSDPSYKELIEQLRNKPSDLGTKLQDPRVMTTLSVLLGVELGNVDEEEEDTPSPAPSQPKKETKPEPMEEDLPENKKRAQKEKELGNEAYKKKDFETALKHYGQARELDPANMTYITNQAAVYFEMGDYSKCRELCEKAIEVGRENREDYRLIAKAYARIGNSYFKEEKNKEAIQFFNKSLAEHRTPEVLKKCQQAEKILKEQERVAYINPDLALEAKNKGNESFQKGDYPQAMKHYSEAIKRNPNDAKLYSNRAACYTKLLEFLLAVKDCEECIRLEPSFIKGYTRKAAALEAMKDFTKAMDAYQKAMELDSTSKEATDGYQRCMMSQYNRNDNPEDVKRRAMADPEVQQIMSDPAMRLILEQMQKDPQALSDHLKNPVIAQKIQKLMDVGLIAIR

SEQ ID NO: 9382 - protein, 577 aa, Macaca fascicularis
MDADQEKDLQKFLKNVDEITNLIQEMNSDDPVVQQNAVLETEKRLLLMEEDQEEDECRTTLNKTVISPPQTAVKSAEEVNSEAFLASVEKDAKERAKRRRENKVLADALKDKGNEAFAEGNYETAILHYSEGLEKLKDVKVLYTNRAQAYMKLKNYEKALVDCEWALKCDEKCTKAYFHMGRANLALKNYSVSRECYKKILEINPKLQTQVKDYLNQVDLQEKADLQEKEAHELLDSGKNTAVNTKNLLETLSKPDQIPLFYAGGIEILTEMIKECTEQTLFRMHDGFSIISDNEVVRRCFSTAGKDAIEETVCVSVLKLWQAVCCGNEENQRVLVMHPDRARLLATLLSSKVLAIRQQSLALLLQLAQTESGRSLIISHLDLTRLLEALVSFLDFSDKEANTAMGLFTDLALEERFQVWFQANLPGVLPAVTSVLKTDPKVSSSSALCQCIAIMGNLSAEPATRGHMAACEEFGDGCLSLLARCEENVALFREVIYTLLGLMMNLCLQAPFVSEVWAVEVSRRCLSLLNSQDGGILTRAAGVLSRTLSSSLKIVEEALQAGVVKKKKKKKKKKKKK

SEQ ID NO: 9383 - protein, 543 aa, Homo sapiens
MEQVNELKEKGNKALSVGNIDDALQCYSEAIKLDPHNHVLYSNRSAAYAKKGDYQKAYEDGCKTVDLKPDWGKGYSRKAAALEFLNRFEEAKRTYEEGLKHEANNPQLKEGLQNMEARLAERKFMNPFNMPNLYQKLESDPRTRTLLSDPTYRELIEQLRNKPSDLGTKLQDPRIMTTLSVLLGVDLGSMDEEEEIATPPPPPPPKKETKPEPMEEDLPENKKQALKEKELGNDAYKKKDFDTALKHYDKAKELDPTNMTYITNQAAVYFEKGDYNKCRELCEKAIEVGRENREDYRQIAKAYARIGNSYFKEEKYKDAIHFYNKSLAEHRTPDVLKKCQQAEKILKEQERLAYINPDLALEEKNKGNECFQKGDYPQAMKHYTEAIKRNPKDAKLYSNRAACYTKLLEFQLALKDCEECIQLEPTFIKGYTRKAAALEAMKDYTKAMDVYQKALDLDSSCKEAADGYQRCMMAQYNRHDSPEDVKRRAMADPEVQQIMSDPAMRLILEQMQKDPQALSEHLKNPVIAQKIQKLMDVGLIAIR

SEQ ID NO: 9384 - protein, 429 aa, Homo sapiens
MTYITNQAAVYFEKGDYNKCWELCEKSIEVGRENREDYLQIAKVCARIGNSYFKEEKYKDAIHFYNKSLAEHRTPDVLKKCQQAEKILKEQERLAYINPDLALEEKNKGNECFQKGDYPHAMKHYTEAIKRNPKDAKLYSNRAACYTKLLDSSWHSRTVKNGYTRKAVALEAMKDYTKVMDVYRKALDPDSSCKEAADGYQRCMMAQYNRHHSPEDVKRRAMADPEVQQIMSDIAMHLILEQMQKDPPGTQRTLKESCNRKEDPEADGCGSDCNSTMTCPSPLPFALMRKEERGPRQAARSGRESRGREGLTSLYLYPSRLENVASLQMLETLFSVFRNATAAPFSTIPISLGFSDPLELVPGAQGLLSVPCYGSYSIIEITIKELLAVCESSQERLRILYTKIFDVPEKMPKNATYRRPIFDDFRVAK

SEQ ID NO: 9385 - protein, 131 aa, Homo sapiens
GKQALKEKELGNDAYKKKDFDTALKHYDKAKELDPTNMTYITNQAAVYFEKGDYNKCRELCEKAIEVGRENREDYRQIAKAYARIGNSYFKEEKYKDAIHFYNKSLAEHRTPDVLKKCQQAEKILKEQERL

SEQ ID NO: 9386 - protein, 386 aa, Mus musculus
MESSEPEPTEDASMDAFLEKFQSQPYRGGFREDQWEEEFDKIPLFMKKAPSEIDPEEFPDLACLQSMIFDDDRYPEEQAKTYKDEGNDYFKEKDYKKAVLSYSEGLKKKCADPDLNAVLYTNRAAAQYYLGNVRSSLNDVLAAKKLKPGHLKAIIRGALCHLELKHFAEAVNWCDEGLQIDAKEKKLLEIRAKADKLKRMEERDLRKAKLKEKKEQHQNEALLQAIKARNIRLVSESASEDEDSASNGPAEILLDGLSSENPYGARLSIDDQGRLSWPVLFLYPEYAQSDFISAFHEDTRFIDHLMAMFSEAPSWDSEHKYHPENLEVYFEDEDRAELYQVSPDSTLLQVLQHPRCSMKALTPAFLVCVGSSPFCRNYLQGKKVHR

SEQ ID NO: 9387 - protein, 386 aa, Mus musculus
MESSEPEPTEDASMDAFLEKFQSQPYRGGFREDQWEEEFDKIPLFMKKAPSEIDPEEFPDLACLQSMIFDDDRYPEEQAKTYKDEGNDYFKEKDYKKAVLSYSEGLKKKCADPDLNAVLYTNRAAAQYYLGNVRSSLNDVLAAKKLKPGHLKAIIRGALCHLELKHFAEAVNWCDEGLQIDAKEKKLLEIRAKADKLKRMEERDLRKAKLKEKKEQHQNEALLQAIKARNIRLVSESAGEDEDSASNGPAEILLDGLSSENPYGARLSIDDQGRLSWPVLFLYPEYAQSDFISAFHEDTRFIDHLMAMFSEAPSWDSEHKYHPENLEVYFEDEDRAELYQVSPDSTLLQVLQHPRCCVKALTPAFLVCVGSSPFCRNYLQGKKVHR

SEQ ID NO: 9388 - protein, 210 aa, Mus musculus
MESSEPEPTEDASMDAFLEKFQSQPYRGGFHEDQWEEEFDKIPLFMKKAPSEIDPEEFPDLACLQSMIFDDDRYPEEQAKTYKDEGNDYFKEKDYKKAVLSYSEGLKKKCADPDLNAVLYTNRAAAQYYLGNVRSSLNDVLAAKKLKPGHLKAIIRGALCHLELKHFAEAVNWCDEGLQIDAKEKKLLEIRAKADKLKRMEERDLRKAKL

SEQ ID NO: 9389 - protein, 382 aa, Anopheles gambiae str. PEST
KKVLSEQERLELAAQLDKDLDAFISSLEKKRYTEGWPEDRWEEEMAKHPFFMQKSPEPGEELSPLMEGLQQLKYDPQENTEQELADTYKEDGKFYMQHRKFRMAVLSYTEALRYKVGDAAYKAILYNNRSAANYMLKNYRTSLQDAQKALELNPDYDKARWRAAQCASALDRFELCVELCDTILQRDPTNTAAVEMRKACLAKKATQQRDSRKEARQEREKQERWDRLVTELKKRMVKFEERKALDDERFLRPRLAPLEDFMVSCDENGVLSWPVVFCYPEFQTTDFQQQLLETTTMQDVLEQLFEEPLECDKAGLYRAKKVNVYYENRILGLAYLVDKSKTIREIVAERTFVAFQGTLTFYILVKGSKQEESFITQTRIPL

SEQ ID NO: 9390 - protein, 497 aa, Anopheles gambiae str. PEST
IPAKLTLQHRAAECFTMEEVVAIERLAEEKKNSGNDEYKLKRYEAALHLYSEAIHLSPGTAAYYGNRSACYMMLGDYRSALNDVKTAITIDEKYEKGYVRMAKCSLMLGDVIGTEQAIRKFLTLDPSNTALREEIASLKQLRDLNEKAAACYDKKDYRTCLYHCDNAIKIAPGSIQNKLLKAECLAMLERFEEACNIAISIMQTHSTNADAIYVRGLTLYYSDNLEKGLLHFERALMLDPDHKKAKAMRQKAKQLKEKKESGNELWKSGKYRDALATYTEALELDPQNKDINSKLYYNRALVNSKLGNLREAIADCSSALALNEKYMKALLQRAKLYYNMENYEEAVKDYEKALKSDRSPEVKNLLRDAKFQLKKSKRKDYYKILGVTKQASEDEIKKAYRKRALVHHPDRHANATDEEKKEQERKFKELGEAYTILSDPVKKSRYDSGQDLEEMNHSADIDPQQIYRQFFFPSDYGFGGFQGGGGGNSSNFSFHFG

SEQ ID NO: 9391 - protein, 360 aa, Arabidopsis thaliana
MALWMDAGATPTTEKEKADLEAISALKESTAIEFKEEGNECVRKGKKHYSEAIDCYTKAISQGVLSDSETSILFSNRSHVNLLLGNYRRALTDAEESMRLSPHNVKAVYRAAKASMSLDLLNEAKSYCEKGIENDPSNEDMKKLLKLVNSKKQEKEQHEAQASQAVVEAKACLSAIENRGVKIGKAMYRELTGLKKPMLDKNNILHWPVLLLYAEAMTSDFVEDFCETDMFATHLDMMFSEDSPPLPWDKNNEYSRDVIELYYEASSGTPLPRSRVLQYLLEGTKGSQAETTGEEDTSATKTPSYLKGSSGMVKVNERRTLHDVLKEPKFVIPEIPVFYIVSKRSKFYKDFTAGKWTPPN

SEQ ID NO: 9392 - protein, 427 aa, Arabidopsis thaliana
MALWMDAGATPTTEKEKADLEAISALKESTAIEFKEEGNECVRKGKKHYSEAIDCYTKAISQGVLSDSETSILFSNRSHVNLLLGNYRRALTDAEESMRLSPHNVKVAVYRAAKASMSLDLLNEAKSYCEKGIENDPSNEDMKKLLKLVNSKKQEKEQHEAQASQAVVEAKACLSAIENRGVKIGKAMYRELTGLKKPMLDKNNILHWPVLLLYAEAMTSDFVEDFCETDIPPLPWDKNNEYSRDVIELYYEASSGTPLPRSRVLQYLLEGTKGSQAETTGEEDTSATKTPSYRSSGMVKVNERRTLHDVLKEPKFVIPEIPVATDFVCVINASLLVFWLVTVFYIVSKSFFLLLVVVIYYCYRSKTQTCSELWLGLRHVQTFLGNESKKPRGKKRSYRGKNVVTILVTNYNINLSNKKTSFFFTFF

SEQ ID NO: 9393 - protein, 164 aa, Arabidopsis thaliana
MNNGEKIEAANRKKEEGNLLYKTQKYERAAKKYNKAAECIENGKFEGGDEKQVKALRVSCFLNGAACSLKLKNFLETIVLCSEVLDIEFQNVKALYRRAQSYIEVGDLISAEMDINRALEADPENREVKSLYKAMKLSKAESDRRDAKLYANMFALSKVRTHFP

SEQ ID NO: 9394 - protein, 372 aa, Oryza sativa
  unsure (1)..(372): unsure at all Xaa locations
MALLMDPGAGGPLTESEKADLDAIAAIKESAAAEYKEKGNRLVKMGRSHYADAVDCYTKAIAQMELPSPDASVLFANRAHVNLLLGNHRRALDDAARAVQLSPSNVKAYYRAAKAAIALGLLPEAAAFCRRGIEQDPANEELKKLLAQVDAQQSEQDRHRAKVAQAVSAAKDIVAAIEKRGLKLGKAAYQELTGVKKPKLDEQGVLHWPVLLLYPEVMSSDFIEDFPETDTFVPHLDVMFSESSPPLPWDDKHAYTRDAVELYYQAGVGTVLSKSEILKILLEGTMDSKSLPESLLDEEDGENDDGKSSTITSSDKGSVKWINVKEGKTLQEVLQHKDFIIPAIPVFFVVSRKSTFYRKFKAGNWSLPXCLA

SEQ ID NO: 9395 - protein, 267 aa, Oryza sativa
  unsure (1)..(267): unsure at all Xaa locations
MALLMDPGAGGPLTESEKADLDAIAAIKESAAAEYKEKGNRLVKMGRSHYADAVDCYTKAIAQMELPSPDASVLFANRAHVNLLLGNHRRALDDAARAVQLSPSNVKAYYRAAKAAIALGLLPEAAAFCRRGIEQDPANEELKKLLAQVDAQQSEQDRHRAKVAQAVSAAKDIVAAIEKRGLKLGKAAYQELTGVKKPKLDEQGVLHWPVLLLYPEVMSSTVLSXXSEILKILLEGTMDSKSLPESLLDEEDGENDDGKSSTITSSX

SEQ ID NO: 9396 - protein, 398 aa, Oryza sativa
  unsure (1)..(398): unsure at all Xaa locations
MALLMDPGAGGPLTESEKADLDAIAAIKESAAAEYKEKGNRLVKMGRSHYADAVDCYTKAIAQMELPSPDASVLFANRAHVNLLLGNHRRALDDAARAVQLSPSNVKVAYYRAAKAAIALGLLPEAAAFCRRGIEQDPANEELKKLLAQVDAQQSEQDRHRAKVAQAVSAAKDIVAAIEKRGLKLGKAAYQELTGVKKPKLDEQGVLHWPVLLLYPEVMSSDFIEDFPETDSPPLPWDDKHAYTRDAVELYYQAGVGTVLSKSEILKILLEGTMDSKSLPESLLDEEDGENDDGKSSTMINVKEGKTLQEVLQHKDFIIPAIPVFAVMLSVIQFGTFGRXLVRYAYDQRRKAGHLVILVWFYMLLYRMMRCVLSWEKARNVSPQVANKNGRPRAWRWV

SEQ ID NO: 9397 - protein, 215 aa, Oryza sativa
  unsure (1)..(215): unsure at all Xaa locations
MDPGAGGPLTESEKADLDAIAAIKESAAAEYKEKGNRLVKMGRSHYADAVDCYTKAIAQMELPSPDASVLFANRAHVNLLLGNHRRALDDAARAVQLSPSNVKAYYRAAKAAIALGLLPEAAAFCRRGIEQDPANEELKKLLAQVDAQQSEQDRHRAKVAQAVSAAKDIVAAIEKRGLKLGKAAYQELTGVKKPKLDEQGTMDSKSLLVFAVMLX

SEQ ID NO: 9398 - protein, 456 aa, Triticum aestivum
  unsure (1)..(456): unsure at all Xaa locations
MALLMEPGSEPLTEGEKADLDAIAAIKESAAREYREEGNQFVKKGRKHYPDAVDCYTKAIAQMGALSDPDASVLFANRAHVNLLLGNHRRALDDAEQAVRLSPSNLKAHYRAAKAALALDQLPQAASFCRRGLEQDPANEELKKFLAQVEAQQRERDLKRAKVAQAISAAKDLAAAIEKRGLRLGKAAYQELTGXLKKPKLDEQGVLHWPVLLLYPEVMSSDFIEDFPETDMFSDHLDLMFSESSPPLPWDENHAYTRDAIELYCQAGDGTPFSKSEMLKYLLEGTVDSGSLTESLDGEDDDTVKGSTAISPSQGKWIKVREGKTLQEALQHKDYIIPAVPVFFVVSRKSAFHSKFKAGNWSLPXSCRVVVQFTISGRGQGCYGYMIRKEEAGNCQLPYGPRRLYYLREDELCLISTCVSYKFFQPLLGWLMAQDCVSRGRSNRICNFSCVCSGHD

SEQ ID NO: 9399 - protein, 365 aa, Zea mays
  unsure (1)..(365): unsure at all Xaa locations
MALLMEPGAEPLTESEQADLAGIAAIKESAAREYKEQGNQFVRMGRRHYAAAVSCYTKAIAQNASAAADASVLFANRAHVNILLGNHRRALDDAEQAIRLSPSSVKAYYRAVKAALALDLLTDAASFCRKGLEQDPPNEEFKKLLSEVDSKLREQDRQRAKVAQAIAKAKDLAAAMGKRGVKLGKAAYQELTGVKKPVLDEQGVLHWPVLLLYPEVMSSDFIEDFPDTDTFSPHLDVMFSETSPPLPWDDNHVYTRDSIELYYQGGFGKPLSRSEVLRYLLEGNVDSKAREDEEHDSTKCTTVTSTDSSSKWIKVKEGKTLQEVLQDKGYIVPAIPVFFVVSRKSTFYKDFKAGNWSLPXNRTGH

SEQ ID NO: 9400 - protein, 400 aa, Zea mays
  unsure (1)..(400): unsure at all Xaa locations
RNMNPRPETSRPSGTSSKSFRDLYNMXXYSSYLNDEPMPDATSEKEQGNEYFKQKKFTDAIECYSRSIGLSPTAVTFANRAMAYLKLRRFKEAEDDCTEALNLDDRYIKAYSRRITARKELGKLKEAMDDAEFAISLDPNNSELRKQYSEIKALHMEKMAKKVPVPAKRAVSGIDKTADVTSHPPTISQKDTIMEVDLPVRDAMKIKESASVKSNGGSGVIINGNNVQQLQGRDANQKTGPEVSVQDLAARAASRYMAGTVKSIKTPKTAYDFEVSWRALSDDTAQQIQLLKSIPPASLPEIFKNALSAPFLIDIVKCAASIFRDAEALAVSILDNLARVPRFDLIIMCLSSMHKFELRKIWDQVFLAEKALADDQMEALRQLRGRYIPGGWQDSMLTSS

SEQ ID NO: 9401 - protein, 320 aa, Zea mays
  unsure (1)..(320): unsure at all Xaa locations
RNMNPQPETSRPSGTSSKSFRDLYNMXXYSSYLNDEPMPDATSEKEQGNEYFKQKKFTDAIECYSRSIGLSPTAVTFANRAMAYLKLRRFKEAEDDCTEALNLDDRYIKAYSRRITARKELGKLKEAMDDAEFAISLDPNNSELRKQYSEIKALHMEKMAKKVPVPAKRAVSGIDKTADVTSHPPTISQKDTIMEVDLPVRDAMKIKESASVKSNGGSGVIINGNNVQQLQGRDANQKTGPEVSVQDLAARAASRYMAGTVKSIKTPKTAYDFEVSWRALSDDTAQQIQLLKSIPPAYRHREVCSLNFPGCGGISCQYFG

SEQ ID NO: 9402 - protein, 358 aa, Schizosaccharomyces pombe
MAGFQSSEVDPNTKNKNAEEMFNELNKVPFFMQSLEDVGDESENNVQLDALKALAYEGEPHEVAQNFREHGNECFASKRYKDAEEFYTKALAQKCGDKDIEIACYSNRAACNLLFENYRQVLNDCAQVLQRDSTHAKAYYRSAKALVALKRYDEAKECIRLCSLVHPNDPAILALSKELQKKSDDFEKRESEKKRVAQEKVIAAKTVLLALQERHIKTKTTEHPPDLGDAMISLSTFDDPKSELFFPTILLYPLVYQSDFVPSVSENCTPLELLKTVFQSPAPWDVHQLYNPDSLDVFATTDTLGLIKVGKNVPILKALTHPKVTLIDGLVQLHVVPHHLASDWISSWKKNKQENAKN

SEQ ID NO: 9403 - protein, 471 aa, Neurospora crassa
MEDVTKSAESLNISNDNDASESSAPAVIGPAPPPPGADLSALFGNLPPGALAANAKPMTVQETFEEMNKHPLFMTSLPSDEDNEELAALQALAYEGTPLENAQNFKEQGNECFKAKQWKDAKEFYGKGIAVLVKADRERRDPAFKAKVEEEKRKREEEARKAREEGDAKAKMEADLENVKAEMPIAEAKEDKEEKKEDELSEEETIKQEASLLETLYCNRAACHLSLANYRSCTLDCAAALRLNPSNLKALYRSGRALLSVSKIAEADDACARGLEIDPSNAALKQLARDLIAKNEEITRKQRAEEARLEKERRKKTLKKAALEARGIKTRSTDDPPSMEDACIQLVPDPLDPQSELSFPVMLLYPLKLESDFIKEFRETESVGQHLEYILPDMPWDEEGDYDRPDKVECYMESVSGGLIRVPQKASLLRVLSSGKTEVVDELVRIFVVPKGEKAEGWIKEWKEKKAGEKK

SEQ ID NO: 9404 - protein, 300 aa, Schistosoma japonicum
MGNQLFNSCQYSEAVQCYTSAINQQPSISSYYSNRALCYIQMQEYSKVLSDCRKAIDLDRNNLKAHFFAGQAYLGLNQYEEALAKLVHAHNLALEQHRNFGDDITSVIRLARRKRFEAMDEDRKKEEISLQAYLNKLIVEDAARQKQAIFHKTSNRTSDSLSNVKSTEGVSLDSLSDEDIKNVENISPQHQEIISKIDSTAQKYIAELNELFCKVDERREKREIPDYLCGRISFDLMRDPVITPCGITYDRPSIISHLRQVGHFDPVSRQPLVEDQLVPNLSMREVVQAFLNENPWAETF

SEQ ID NO: 9405 - protein, 419 aa, Caenorhabditis elegans
MDLPQKKKFTESERAALAKKLDDDLDQFMEEMAARKSDKKEERKPFDFDDWCKEIDQHPAFMTEMPTDGKYQDTIEALQSMKYDKEDDEDKQMNAEHHKEEGNKHFKFKKYRWATDCYSNGIKENSPDRKLNAVLYFNRAAAQKHLGNLRSAIKDCSMGRKFDPTHLKGVIRGAECLLELEYAKDALNWIESSKKIFAFTKETSDTPDLTDDEKKFIDQLETLRVKSVELSLKEERDKRKSRAEERKETESKKQLLDALKERNLNLCPRVPFDRPELMDMARLTVSLPLMHSHECVKFDDDLNLVWPILLQYPEAGQTDVLTETNELTTVGELLKEVLNSPAQWDPEHKFNFENVRFFVSDEYDEYLMEVYEWNDFKSVLSMPGYQIKQGLPVIMIMTKEKAASSLEALAEDENRYVAK

SEQ ID NO: 9406 - protein, 379 aa, Caenorhabditis elegans
MDLPQKKKFTESERAALAKKLDDDLDQFMEEMAARKSDKKEERKPFDFDDWCKEIDQHPAFMTEMPTDGKYQDTIEALQASIKENSPDRKLNAVLYFNRAAAQKHLGNLRSAIKDCSMGRKFDPTHLKGVIRGAECLLELEYAKDALNWIESSKKIFAFTKETSDTPDLTDDEKKFIDQLETLRVKSVELSLKEERDKRKSRAEERKETESKKQLLDALKERNLNLCPRVPFDRPELMDMARLTVSLPLMHSHECVKFDDDLNLVWPILLQYPEAGQTDVLTETNELTTVGELLKEVLNSPAQWDPEHKFNFENVRFFVSDEYDEYLMEVYEWNDFKSVLSMPGYQIKQGLPVIMIMTKEKAASSLEALAEDENRYVAK

SEQ ID NO: 9407 - protein, 393 aa, Drosophila melanogaster
MAAQKAWTDEERLELAAQLDAELDAFIDGLEKKRYEEGWPEDRWQEEMDKHPFFMKRAPQPGDDVHPMFEGLQKLKYDPEENTRDELALNYKEDGNFYMKHKKFRMAIYSFTEGIKTKTDNPDVLAVLYNNRSAAHFFIKNYRSSLSDAQRALFYKPDYTKARWRSAQCAYELERFDLCTQMCEELLEVDVDNEVAIALLHKNKMKKLEIERNQRKEAAEAKRRLTRFHRLRDAIEQRAIKFDDQKVGKKDVLSEELLYPKFLPLEDHPVHLDEDGSTLIWPAAFSYPEFLYSDFYQQLPETTTMRDCLATLLTEKLPYDKAHNYRLGNVHVYYENRKVGCVHKVDEEKQLAEIIAEKGFFVSGGALLFYVVHKDSRVEQEFINERRRPMVYS

SEQ ID NO: 9408 - protein, 947 aa, Drosophila melanogaster
MTNTINSEEVSDAGSYKDKGNEAFKASRWEEAVEHYGKAIKAGSKHKELAVFYKNRAAAYLKLGKYENAVEDCTESLKAAPGDPKALFRRAQAYEALEKFEEAYKDATALFKADPGNKTVQPMLQRLHVVVEERSARNAKTSTKVKQMMDLTFDLATPIDKRRAAANNLVVLAKEQTGAELLYKDHCIAKVASLTKVEKDQDIYVNMVHLVAALCENSVERTKGVLTELGVPWFMRVLDQKHENCVSTAQFCLQTILNALSGLKNKPDSKPEKELCTRNNREIDTLLTCLVYSITDRTISGAARDGVIELITRNVHYTALEWAERLVEIRGLCRLLDVCSELEDYKYESAMDITGSSSTIASVCLARIYENMYYDEAKARFTDQIDEYIKDKLLAPDMESKVRVTVAITALLNGPLDVGNQVVAREGILQMILAMATTDDELQQRVSCECLIAASSKKDKAKALCEQGVDILKRLYHSKNDGIRVRALVGLCKLGSYGGQDAAIRPFGDGAALKLAEACRRFLIKPGKDKDIRRWAADGLAYLTLDAECKEKLIEDKASIHALMDLARGGNQSCLYGVVTTFVNLCNAYEKQEMLPEMIELAKFAKQHIPEEHELDDVDFINKRITVLANEGITTALCALAKTESHNSQELIARVLNAVCGLKELRGKVVQEGGVKALLRMALEGTEKGKRHATQALARIGITINPEVSFSGQRSLDVIRPLLNLLQQDCTALENFESLMALTNLASMNESVRQRIIKEQGVSKIEYYLMEDHLYLTRAAAQCLCNLVMSEDVIKMFEGNNDRVKFLALLCEDEDEETATACAGALAIITSVSVKCCEKILAIASWLDILHTLIANPSPAVQHRGIVIILNMINAGEEIAKKLFETDIMELLSGLGQLPDDTRAKAREVATQCLAAAERYRIIERSDNAEIPDVFAENSKISEIIDD

SEQ ID NO: 9409 - protein, 947 aa, Drosophila melanogaster
MTNTINSEEVSDAGSYKDKGNEAFKASRWEEAVEHYGKAIKAGSKHKELAVFYKNRAAAYLKLGKYENAVEDCTESLKAAPGDPKALFRRAQAYEALEKFEEAYKDATALFKADPGNKTVQPMLQRLHVVVEERSARNAKTSTKVKQMMDLTFDLATPIDKRRAAANNLVVLAKEQTGAELLYKDHCIAKVASLTKVEKDQDIYVNMVHLVAALCENSVERTKGVLTELGVPWFMRVLDQKHENCVSTAQFCLQTILNALSGLKNKPDSKPDKELCTRNNREIDTLLTCLVYSITDRTISGAARDGVIELITRNVHYTALEWAERLVEIRGLCRLLDVCSELEDYKYESAMDITGSSSTIASVCLARIYENMYYDEAKARFTDQIDEYIKDKLLAPDMESKVRVTVAITALLNGPLDVGNQVVAREGILQMILAMATTDDELQQRVACECLIAASSKKDKAKALCEQGVDILKRLYHSKNDGIRVRALVGLCKLGSYGGQDAAIRPFGDGAALKLAEACRRFLIKPGKDKDIRRWAADGLAYLTLDAECKEKLIEDKASIHALMDLARGGNQSCLYGVVTTFVNLCNAYEKQEMLPEMIELAKFAKQHIPEEHELDDVDFINKRITVLANEGITTALCALAKTESHNSQELIARVLNAVCGLKELRGKVVQEGGVKALLRMALEGTEKGKRHATQALARIGITINPEVSFSGQRSLDVIRPLLNLLQQDCTALENFESLMALTNLASMNESVRQRIIKEQGVSKIEYYLMEDHLYLTRAAAQCLCNLVMSEDVIKMFEGNNDRVKFLALLCEDEDEETATACAGALAIITSVSVKCCEKILAIASWLDILHTLIANPSPAVQHRGIVIILNMINAGEEIAKKLFETDIMELLSGLGQLPDDTRAKAREVATQCLAAAERYRIIERSDNAEIPDVFAENSKISEIIDD

SEQ ID NO: 9410 - protein, 408 aa, Plasmodium yoelii yoelii
MDVDENSYNAQENDKLTNKQKESLERENDEVDKLNNERIEKREFDDESTSNGHEKINFKNEDYNEDIKMSENFNRNTIETISDLDNINSNDDKNKKNEFYENVNLVEEKKSVITEEIHENDTTKKDNKIVSDKEDNVNNANRENEDYNSNDATNNTRNYYSDNYINNDEKNSSESEDTSEDEYYSGEESLNEDSSEEYSDSDNEKSSYIPSDEEEFEEDEEESEKTTDHELSNKNVEEIKEIGNGYFKKCDYKNAIYYYSKALKQCKDKNIKSILYSNRAACNVLLQNWNLVIDDCTKSINCDENYVKSYIRRSNAYEHLEKYNDASNDLNKAISIDSSLLNTYEAKQKKLKILAEQQLSKEKEEMVGKLKDFGNMLLGKVGLSLDNFEVQKNPNNDGSFNIQFKQNK

SEQ ID NO: 9411 - protein, 399 aa, Danio rerio
MAAPTQGEDSDDGMDEFMEKFKTQKYHNAFNESNWEEEFDKVPMFMKTAPENIDPEKHPDLACIQHIIHDDDRTPEEKARSLKDEGNEYFKEKKYKKAVVSYTEGLKTSCVNPELNAVLYTNRAAAHFHLGNMRSALNDATAAKKLKPDHNKAIIRGAQCLLELRNYAGALQWCDEGLKLFPTDKKLQELRATADKQKREADRDARKAKVKAKKQQNEKEALLAAIKERGIKLLKTEKPPHRASDSEDEDGDEDTSRALADLQLDGISSQEATGARVYMDEQGVLHWPVLFLYPEHSQTDFISAFSENASFIDQLAVMFGEELPPWDIDRKYQPQNLQLFFEDPEKGNLYQVDLQEPLLRVLQHQRCSVKAGTPSFIVLVSESPFSRQFLSGKKVQRLK

SEQ ID NO: 9412 - protein, 387 aa, Homo sapiens
MEQPGQDPTSDDVMDSFLEKFQSQPYRGGFHEDQWEKEFEKVPLFMTRAPSEIDPRENPDLACLQSIIFDEERSPEEQAKTYKDEGNDYFKEKDYKKAVISYTEGLKKKCADPDLNAVLYTNRAAAQYYLGNFRSALNDVTAARKLKPCHLKAIIRGALCHLELKHFAEAVNWCDEGLQIDAKEKKLLEMRAKADKLKRIEQRDVRKANLKEKKERNQNEALLQAIKARNIRLSEAACEDEDSASEGLGELFLDGLSTENPHGARLSLDGQGRLSWPVLFLYPEYAQSDFISAFHEDSRFIDHLMVMFGETPSWDLEQKYCPDNLEVYFEDEDRAELYRVPAKSTLLQVLQHQRYFVKALTPAFLVCVGSSPFCKNFLRGRKVYQIR

SEQ ID NO: 9413 - protein, 356 aa, Homo sapiens
MEQPGQDPTSDDVMDSFLEKFQSQPYRGGFHEDQWEKEFEKVPLFMSRAPSEIDPRENPDLACLQSIIFDEERSPEEQAKTYKDEGNDYFKEKDYKKAVISYTEGLKKKCADPDLNAVLYTNRAAAQYYLGNFRSALNDVTAARKLKPCHLKAIIRGALCHLELIHFAEAVNWCDEGLQIDAKEKKLLEMRAKADKLKRIEQRDVRKANLKEKKERNQNEALLQAIKARNIRLSEAACEDEDSASEGLGELFLDGLSTENPHGARLSLDGQGRLSWPVLFLYPEYAQSDFISAFHEDSRFIDHLMVMFGETPSWDLEQKYCLIIWRSTLRMRTGQNYTGCLPRAPCYRFYSTRGTL

SEQ ID NO: 9414 - protein, 418 aa, Homo sapiens
METGQAPVGATAQAFVEAHGINSEKGVMEFTLRYFLKELQDWLPGWAALERPQMPRALSVEPASPDDATDLFLEKFQSQPYRGGFHEDQWEEEFEKVPLFMKKAPSEIDPRENPDLACLQSIIFDGEHSPEQAKTYKDEGNDYFKEKDYKKAVISYTEGLKKKCANPDLSAVLYTNRAAAQYYLGNFHSALRDVTAAKKLKPCYLKAIIRDAKEKKLLEMRAKVDKLKLIEQRDVRKANLKEKERNQNEVLLQDTKARNIRLSEAACEDEVSASEGLGELFLDGLSSENPHGARLSLDDQGRLSWPVLFLYPEYAQSDFISAFHEDSRFIDHLMVMFGETPSWDLEQKYCPDNLEVYIEDEDRAELYWVPAKSTLLQDLQHHRHFVKALTPAFLAAQAGWPGGWAGEYLFERLTFKYN

SEQ ID NO: 9415 - protein, 931 aa, Homo sapiens
MAEVEAVQLKEEGNRHFQLQDYKAATNSYSQALKLTKDKALLATLYRNRAACGLKTESYVQAASDASRAIDINSSDIKALYRRCQALEHLGKLDQAFKDVQRCATLEPRNQNFQEMLRRLNTSIQEKLRVQFSTDSRVQKMFEILLDENSEADKREKAANNLIVLGREEAGAEKIFQNNGVALLLQLLDTKKPELVLAAVRTLSGMCSGHQARATVILHAVRIDRICSLMAVENEEMSLAVCNLLQAIIDSLSGEDKREHRGKEEALVLDTKKDLKQITSHLLDMLVSKKVSGQGRDQALNLLNKNVPRKDLAIHDNSRTIYVVDNGLRKILKVVGQVPDLPSCLPLTDNTRMLASILINKLYDDLRCDPERDHFRKICEEYITGKFDPQDMDKNLNAIQTVSGILQGPFDLGNQLLGLKGVMEMMVALCGSERETDQLVAVEALIHASTKLSRATFIITNGVSLLKQIYKTTKNEKIKIRTLVGLCKLGSAGGTDYGLRQFAEGSTEKLAKQCRKWLCNMSIDTRTRRWAVEGLAYLTLDADVKDDFVQDVPALQAMFELAKAGTSDKTILYSVATTLVNCTNSYDVKEVIPELVQLAKFSKQHVPEEHPKDKKDFIDMRVKRLLKAGVISALACMVKADSAILTDQTKELLARVFLALCDNPKDRGTIVAQGGGKALIPLALEGTDVGKVKAAHALAKIAAVSNPDIAFPGERVYEVVRPLVRLLDTQRDGLQNYEALLGLTNLSGRSDKLRQKIFKERALPDIENYMFENHDQLRQAATECMCNMVLHKEVQERFLADGNDRLKLVVLLCGEDDDKVQNAAAGALAMLTAAHKKLCLKMTQVTTQWLEILQRLCLHDQLSVQHRGLVIAYNLLAADAELAKKLVESELLEILTVVGKQEPDEKKAEVVQTARECLIKCMDYGFIKPVS

SEQ ID NO: 9416 - protein, 191 aa, Anopheles gambiae str. PEST
LAVCSCVSIGVQNLTYSTEVFMTKDMTSEAAVPPPAVWAQRSDVLFLTLNVECSDPVYKFTEDSMSFTGVGKPEGKKYELNVEFFSKINPDKVASKNIKRCIEFVIAKAEPQETYWPRLLKDKTKPHWLKVDFNRWEDEGSNDEEGGADQMDLMQMLNASQNSNKLSFDDLSDEPEGEDSDDESIPGLTDS

SEQ ID NO: 9417 - protein, 241 aa, Arabidopsis thaliana
MSRHPEVKWAETTEKIFLTVVLADTKDTKVNLDPEGVFDFSAKVGPENHVYELKLELADKVNVEESKINIGERSIFCIIEKAEPERWNKLLRVKKPPHYVKVDWDKWVDEDDEGSAGAADMDMAGMEGMGGMGGMGGMGGMGGMGGMGGMGGMEGMDFSKLMGGMGGMGGMGGLEGLGGMGGMGGMGGMGGMGGMEEFEDSDDEEETAKSGDKKDDAVKEEGLATEKAPAAEETTSVKEDK

SEQ ID NO: 9418 - protein, 241 aa, Arabidopsis thaliana
MSRHPEVKWAETTEKIFLTVVLADTKDTKVNLDPEGVFDFSAKVGPENHVYELKLELADKVNVEESKINIGERSIFCIIEKAEPERWNKLLRVKKPPHYVKVDWDKWVDEDDEGSAGAADMDMAGMEGMGGMGGMGGMGGMGGMGGMGGMGGMGGMEGMDFSKLMGGMGGMGGLEGLGGMGGMGGMGGMGGMGGMEEFEDSDDEEETAKSGDKKDDAVKEEGPATEKAPAAEETTSVKEDK

SEQ ID NO: 9419 - protein, 262 aa, Arabidopsis thaliana
MFVIVIRHPEVKWAETTEKIFLTVVLADTKDTKVNLDPEGVFDFSAKVGPENHVYELKLELADKVNVEESKINIGERSIFCIIEKAEPERWNKLLRVKKPPHYVKVDWDKWVDEDDEGSAGAADMDMAGMEGMGGMGGMGGMGGMGGMGGMGGMGGMEGMDFSIYLALRNDLILDPCFVQKLMGGMGGMGGMGGLEGLGGMGGMGGMGGMGGMGGMEEFEDSDDEEETAKSGDKKDDAVKEEGLATEKAPAAEETTSVKEDK

SEQ ID NO: 9420 - protein, 236 aa, Triticum aestivum
  unsure (1)..(236): unsure at all Xaa locations
MSRHPEVRWAQRIDKVYITVQLPDAKDAKVNLEPDGVFSFFATAGTDGNSYESKLDLNDKVNVEASKVSVGVRSIFCILEKADAKWWNKLVRDDQKAPHFVKVDWDKWVDEDDDGADVNVDGMDFSNMGGMGGMPGMEGLGGMGGMGGMPGMXXVLGGMGGLAGMMGGMGGMGGMGMPPGMEGLGGMGMDDFEDESDDEGEVSKPQDAGKSDAAEISEVEGKAGTAAQSNXRLSTQ

SEQ ID NO: 9421 - protein, 267 aa, Triticum aestivum
  unsure (1)..(267): unsure at all Xaa locations
MPSRGAPCHSKTSQNPRSPHSPPPPPPPPVPSKMSRHPEVRWAQRIDKVYITVQLPDAKDAKVKLEPDGVFSFFATAGTDGNSYESKLDLNDKVNVEASKVSVGVRSIFCILEKADAKWWNKLVHDQKAPHFVKVDWDKWVDEDDDGADVNVDGMDFSNMGGMGGMPGMEGLGGMGGMPGMEGLGGMGGMGGLAGMMGGMGGMGGMGMPPGMEGLGGMGMDDFEDESDDEGEVSKPQDAGKSDAAEISEVEGKAGTAAQSNXRLSTQ

SEQ ID NO: 9422 - protein, 205 aa, Triticum aestivum
  unsure (1)..(205): unsure at all Xaa locations
MSRHPEVRWAQRIDKVYITVQLPDAKDAKVNLEPDGVFSFFATAGTDGNSYESKLDLNDKVNVEASKVSVGVRSIFCILEKADAKWWNKLVRDDQKAPHFVKVDWDKWVDEDDDGADVNVDGMDFSNMGGMGGMPGMEGLGGMGGMGGMPGMEGLGGMGGSXGGLAGMMXXEWPEGLGAXHGEECINALSDIFSILQLASLMWHF

SEQ ID NO: 9423 - protein, 106 aa, Triticum aestivum
  unsure (1)..(106): unsure at all Xaa locations
MSRHPEVRWAQRIDKVYITVQLPDAKDAKVNLEPDGVFSFFATAGTDGNSYESKLDLNDKVNVEASKKAPHFVKVDWXKWVDEDDDGADVNVDGMDFSNMGGMGGX

SEQ ID NO: 9424 - protein, 152 aa, Triticum aestivum
  unsure (1)..(152): unsure at all Xaa locations
MSENPEGRRAKRINKVYITLAMDXDAKDANVNLKPDGAFFFFGTDVTDGNYYESKLDVNDKRDVVAKQVRVDVRSIFSILEKTNAKWWNKLVREDQKAPHYENVHWDKWKDHDGADVNGDGMDFTNMSGTVTDAWHDTFTTACDGNGWYALD

SEQ ID NO: 9425 - protein, 239 aa, Zea mays
  unsure (1)..(239): unsure at all Xaa locations
MSRHPEVKWAQRIDKVYITVQLPDAKDAKVNLDPDGVFTFSGSAGTNLYELKLDLNDKVNVEASKISVGVRSIFCIVEKAEAKWWKKLVRDDQRAPHFVKVDWDKWVDEDDDGADINMDGMDFSNFGGMGGMGGMGGMGDMAGMGGLGGMGGMGGLGGMGGMGMDDFEDESDDEEVSKPQAADKAVEAEETESAETKIEAAQSSXRCLXSKLDCILMLILLNRRTNLTFMVLASPSGVP

SEQ ID NO: 9426 - protein, 219 aa, Zea mays
  unsure (1)..(219): unsure at all Xaa locations
MSGIVFCSRHPEVKWAQRIDKVYITVQLPDAKDAKVNLDPDGVFTFSGSAGTNLYELKLDLNDKVNVEASKISVGVRSIFCIVEKAEAKWWKKLVRDDQRAPHFVKVDWDKWVDEDDDGADINMDGMDFSNFGGMGGMGGMGGMGDMAGMGGLGGMGGMGGLGGMGGMGMDDFEDESDDEEEVSKPQAADKAVEAEETXSQRKPRLRRLRAVEDAYDLS

SEQ ID NO: 9427 - protein, 213 aa, Zea mays
  unsure (1)..(213): unsure at all Xaa locations
MSRHPEVKWAQRIDKVYITVQLPDAKDAKVNLDPDGVFTFSGSAGTNLYELKLDLNDKVNVEASKISVGVRSIFCIVEKAEAKWWKKLVRDDQRAPHFVKVDWDKWVDEDDDGADINMDGMDFSNFGGMGGMGGMGGMGDMAGMGGLGGMGGMGDLGGMGGMGMDDFEDESDDEEELSKPQAADKAVEAEETXSQRKPRLRRLRAVEDAYDLS

SEQ ID NO: 9428 - protein, 212 aa, Zea mays
  unsure (1)..(212): unsure at all Xaa locations
MSRHPEVKWAQMIDKVYITVQLPDAKDAKVNLDPDGVFTFSGSAGTNLYELKLDLNDKVNVEASKISVGVRSIFCIVEKAEAKWWKKLVRDDQRAPHFVKVDWDKWVDEDDDGADINMDGMDFSNFGGMGGXMGGMGDMAGMGGLGGMGGMGGLGGMGGMGMDDFEDESDDEEEVSKPQAAGHAAEAEKTESAEAKTESAQSSXRCFRHDLN

SEQ ID NO: 9429 - protein, 200 aa, Zea mays
MSRHPEVKWAQRIDKVYITVQLPDAKDAKVNLEPDGVFTFSGSVGTNLYELKLDLNDKVNVEASKISVGVRSIFCIVEKAEAKWWKKLVRDDQRAPHFVKVDWDKWVDEDDDGADVNLDGMDFSNFGGMGGMGGMGDMAGLGGLGGMGGMGGMGGMGFSMDDFEDDSDEEEVSKPQAAGHAAEAEKTESAEAKTESAQSS

SEQ ID NO: 9430 - protein, 197 aa, Zea mays
MSRHPEVKWAQRIDKVYITVQLPDAKDAKVNLDPDGVFTFSGSAGTNLYELKLDLNDKVNVEASKISVGVRSIFCIVEKAEAKWWKKLVRDDQRAPHFVKVDWDKWVDEDDDGADINMDGMDFSNFGGMGGMGDMGGLGGMGGMGGLGGMGGMGMDDFEKDESDDEEEVSKPQAADKAVEAEETESAETKTEAAQSS

SEQ ID NO: 9431 - protein, 259 aa, Zea mays
  unsure (1)..(259): unsure at all Xaa locations
MSRHPEVKWAQRIDKVYITVQLPDAKDAKVNLDPDGVFTFSGSAGTNLYELKLDLNDKVNVEASKISVGVRSIFCIVEKXAEAKWWKKLVRDDQRAPHFVKVDWDKWVDEDDDGADINMDGMDFSNFGGMGGXGMGGMGGMGGMGGMGDMAGMGGLGGMVGMGGXLGGMGGMGMDDFEDESDDXKKKCRNLKLRTRPVEAEETESAETKIEAGSEQLKMLMIXARLYPHVNSAESEDNPYIYGAGQVPVACHENLRSVF

SEQ ID NO: 9432 - protein, 198 aa, Zea mays
  unsure (1)..(198): unsure at all Xaa locations
MSRHPEVKWAQRIDKVYITVQLPDAKDAKVNLEPDGVFTFSGSAGTNLYELKLDLNDKVNVEASKISVGVRSIFCIVEKAEAKWWKKLVRDDQRAPHFVKVDWDKWVDEDDDGADVNLDGMDFSNFGGMGGMGGMGDMAGLGGLGGMGGMGMDDFEDYSKFXADSDEEEVSKPQAAGHAAEAEKTESAEAKTESAQSS

SEQ ID NO: 9433 - protein, 163 aa, Zea mays
  unsure (1)..(163): unsure at all Xaa locations
MSRHPEVKWAQRIDKVYITVQLPDAKDAKVNLEPDGVFTFSGSAGTNLYELKLDLNDKVNVEASKISVGVRSIFCIVEKAEAKWWKKLVRDDQRAPHFVKVDWDKWVDEDDDGADINMDGMDFSNFGGMGGMGGMGGMGDMAGLGGLGGMGGMGGMDNNKLLX

SEQ ID NO: 9434 - protein, 160 aa, Xenopus laevis
MQPASAKWYDRRDYVFLEFCVEDSKNVKTDFDKNKLTFSCLGGADSVKYLNEVELFQSIDPNASKHKRTDRSVLCCLRKGEPGKSWPRLTKEKAKLNWLSVDFNNWKDWEDDSDEDMSNFDHFSEMMNNMGGDEDVDLPEVDGADDDSPDSDDEKMPDLE

SEQ ID NO: 9435 - protein, 160 aa, Gallus gallus
MQPASAKWYDRRDYVFIEFCVEDSKDVNVNFEKSKLTFSCLGGSDNFKHLNEIDLFNNIDPNESKHKRTDRSILCCLRKGESGQAWPRLTKERAKLNWLSVDFNNWKDWEDDSDEDMSNFDRFSEMMNNMGGDDDVDLPEVDGADDDSPDSDDEKMPDLE

SEQ ID NO: 9436 - protein, 203 aa, Arabidopsis thaliana
MSRNPEVLWAQRSDKVYLTVALPDAKDISVKCEPQGLFSFSALGAQGERFEFSLELYGKIMTEYRKNVGLRNIIFSIQKEERSWWTRLLKSEEKPAPYIKVDWNKWCDEDEEVNSETASDDESAFVNQDSESSDDDGLLFLVSAKYKSELVCTDLTNNIIFGQIFLIWKRQETSSLTATTTNQPTLEDEEKVKDYELKHSALG

SEQ ID NO: 9437 - protein, 186 aa, Glycine max
  unsure (1)..(186): unsure at all Xaa locations
MSRYPEVLWAQRSDKVYLTVALPDAKNVSVKCEPQGLFTFSASGVQEEAYSFSLELYGCIEPEGCKTTGLRNILCSIQKGEKGWWKRLLKSEEKPAPYLKVDWNKWCDEDDEESTSDLVSNDDAQFVGEDDRSSDDEGMLYLPDLEKARAXSSSYCTERFRKHGXHGIIFIWNYLHRGRDRLLDKX

SEQ ID NO: 9438 - protein, 169 aa, Glycine max
MSRYPEVLWAQRSDKVYLTVALPDAKNVSVKCEPQGLFTFSASGVQEEAYSFSLELYGCIEPEGCKTTGLRNILCSIQKGEKGWWKRLLKSEEKPAPYLKVDWNRWCDEDDEESTSDLVSDDDARFVGEDDGSSDDEGMLYLPDLEKARDLICHFKVATFIRNSIFLLF

SEQ ID NO: 9439 - protein, 189 aa, Glycine max
PGNERPKWPRTKLDVVLKSLQFHTHIPLSLEHSRFRLLPSHSANENVSVKCEPQGLFTFSASGVQEEAYSFSLELYGCIEPEGCTTKSGLRNILCSIQKGEKGWWKRLLKSEEKPAPYLKVDWNRWCDEDDEESTSDLVSDDDARFVGEDDGSSDDEGMLYLPDLEKARDLICHFRVATFIRNSIFLLF

SEQ ID NO: 9440 - protein, 99 aa, Glycine max
  unsure (1)..(99): unsure at all Xaa locations
MSRHPEVLWAQRSDKVYLTVALPDAKDVFVKCEPQGLFAFSASGVQDKAYSFSLELYGSIEPEKGEKGWWKRLLKSEEKPAPYLKVDWNKWCDEDDEEX

SEQ ID NO: 9441 - protein, 133 aa, Oryza sativa
  unsure (1)..(133): unsure at all Xaa locations
MSRQPEVLWAQRSEKIYLTISLPDAKDVVLKTEPQGLFSFLAVANGXXPFSFTLELFDSVLXEGSKTKTKSGNIMLLIQKEKKGWWKRLLKSEEKHPYIKVDWNKWCDEDEESDAPLDSDDAFDEGFEKKKKX

SEQ ID NO: 9442 - protein, 155 aa, Triticum aestivum
  unsure (1)..(155): unsure at all Xaa locations
MSRQPEVLWAQRSEKVYLTISVPDAEDVVIKTEPQGIFSFSAVAHGESFSLNLELFDSVLPEGSKTKTKVGSRNIICSIQKDKKCWWKRLLKSEAKXXPYIKVDWNKWCDEDEESENSGSDDDFDGGEENDESDADDGMLYLPDCQYXLEKLRGK

SEQ ID NO: 9443 - protein, 160 aa, Mus musculus
MQPASAKWYDRRDYVFIEFCVEDSKDVNVNFEKSKLTFSCLGGSDNFKHLNEIDLFHCIDPNDSKHKRTDRSILCCLRKGESGQSWPRLTKERAKLNWLSVDFNNWKDWEDDSDEDMSNFDRFSEMMDHMGGDEDVDLPEVDGADDDSQDSDDEKMPDLE

SEQ ID NO: 9444 - protein, 160 aa, Mus musculus
MQPASAKWYDRRDYVFIEFCVEDSKDVNVNFEKSKLTFSCLGGSDNFKHLNEIDLFHCIDPNDSKHKRTDRSILCCLRKGESGQSWPRLTKERAKLNWLSVDFNNWKNWEDDSDEDMSNFDRFSEMMDHMGGDEDVDLPEVDGADDDSQDSDDEKMPDLE

SEQ ID NO: 9445 - protein, 160 aa, Mus musculus
MQPASAKWYDRRDYVFIEFCVEDSKDVNVNFEKSKLTFSCLGGSDNFKHLNEIDLFHCIDPNDSKHKRTDRSILCCLRKGESGQSWLGLTKERAKLNWLSVDFNNWKDWEDDSDEDMSNFDRFSEMMDHMGGDEDVDLPEVDGADDDSQDSDDEKMPDLE

SEQ ID NO: 9446 - protein, 140 aa, Mus musculus
MQPASAKWYDRRDYVFIEFCVEDSKDVNVNFEKSKLTFSCLGGSDNFKHLNEIDLFHCIDPNDSKHKRTDRSILCCLRKGESGQSWPRLTKERAKLNWLSVDFTNWRDWEDDSDEDMSNFERFSEMMDHMGGDEDVDLPK

SEQ ID NO: 9447 - protein, 181 aa, Rattus norvegicus
MERFSAPHLVEAVDSRQSPRLQVSVTGQHARTLWYDRPKYVFMEFCVEDSTDVSVLIEDHRIVFSCRNGDGVELYNEIEFYAKVNSKDSQDKRSGRSITCFVRKWKEKVPWPRLTKKDIKPVWLSVDFDNWRDWEGDDEMELAQVEHYAELLNKVSTKRPPPAMDDLDNRSAYTLQSSNTI

SEQ ID NO: 9448 - protein, 190 aa, Glycine max
  unsure (1)..(190): unsure at all Xaa locations
MSRHPSVKWAQTSDVLYLTVELPDAQDVKLKLEPEGKFYFSATAGAEKIPYEVDIDLFDKIDVNNSKASVGSRNICYLVKKAENKWWDRLLKQGGKSPVFLKVDWDKWVDEDEEQDNKPAASDMDFGDIDFSKLGMGGGEGLDSDXXAGNDDADESDTEEEFVAEASASKEQDTKDAVSSDAKDAPDTKA

SEQ ID NO: 9449 - protein, 175 aa, Triticum aestivum
  unsure (1)..(175): unsure at all Xaa locations
MSRHPSTKWAQRLDKVYLTIELPDAKDVKLNLRPDGHFNFSAKAPADDMQYELDLELFDAVSVEESQAAVAPRTICYLVKKAEGKWWPRLLKKEGRPPVFLKVDWDKWQDEDDEDXPDLXDFGDMDFSKLDMGGGDDDDDDEIEEEDEENVVDSANKADVDAETEPGSKGGVALL

SEQ ID NO: 9450 - protein, 185 aa, Triticum aestivum
  unsure (1)..(185): unsure at all Xaa locations
MSRHPSTKWAQRLDKVYLTIELPDAKDVKLNLRPDGHFNFSAKAPADGMQYELDLELFDAVSVEESQAAVAPRAICYLVKKAEAKWWPRLLKKEGRPPVFLKVDWDKWQDEDDEDAGFXXDFGDMDFSKLDMGGGDDDDDDEIEEDDDEDNVVXXSANKGDVDAETEPGSKGGEAPSAAGEEAKP

SEQ ID NO: 9451 - protein, 184 aa, Triticum aestivum
  unsure (1)..(184): unsure at all Xaa locations
MSRHPSTKWAQRLDKVYLTIELPDAKDVKLNLRPDGHFNFSAKAPADDMQYELDLELFDAVSVEESQAAVXPRAICYLVKKAEGKWWPRLLKKEGRPPVFLKVDWDKWQDEDDEDXPDLXDFGDMDFSKLDMGGGDDDDDEIEEEEDEDNVVXXSANKGDVDAETEPGSKGGEAPSAAGEEAKP

SEQ ID NO: 9452 - protein, 178 aa, Triticum aestivum
  unsure (1)..(178): unsure at all Xaa locations
MSRHPSTKWAQRLDKVYLTIELPDAKDVKLNLRPDGHFNFSAKAPADXDMQYELDLELFDAVSVEESQAAVAPRAICYLVKKAEGKWWPRLLKKEGRPPVFLKVDWDKWQDEDDEDXPDLXDFGDMDFSKLDMGGGDDDDDDEIEEXGDEDNVVXXSANKGDVDAETEPGSKGGVALL

SEQ ID NO: 9453 - protein, 180 aa, Zea mays
  unsure (1)..(180): unsure at all Xaa locations
MSRHPITKWAQRSDRVFLTIELPDAKDVKLNLKPEGHFNFSAXXGSDDLPYEFDLELFDAVNVEESKAAVAPRTICYLIKKAESKWWPRLLKKEGKAPVFLKVDWDKWQDEDDEDVGFNDFSDMDFSKLDMGGADDDDFEDDEDDVVESANKDEEGGKTEKSNGEEEAAAAAAAAEEVKP

SEQ ID NO: 9454 - protein, 177 aa, Zea mays
  unsure (1)..(177): unsure at all Xaa locations
MSRHPITKWAQRSDRVFLTIELPDAKDVKLNLKSEGHFNFSAXXGSDDLPYEFDIELFDAVNVEESKAAVAPRTICYLIKKAKSGWWPRLLKQEGKPPVFLKVDWDKWQDEDDEDAGFNDFGGMDFSKLDIGGADDDDIGDDEDDVVESANKDEEGGKTEESKEEEAAPAAAEEVKP

SEQ ID NO: 9455 - protein, 177 aa, Zea mays
  unsure (1)..(177): unsure at all Xaa locations
MSRHPITKWAQRSDRVFLTIELPDAQDVKLNLKPEGHFNFSAXXGSDDLRYEFDIELFDAVNVEESKAAIAPRTICYLIKKAKSGWWPRLLKQEGKPPVFLKVDWDKWQDEDDEDAGFNDFGGMDFSKLDIGGADDDDIGDDEDDVVESANKDEEGGKTEESKEEEAAPAAAEEVKP

SEQ ID NO: 9456 - protein, 177 aa, Zea mays
  unsure (1)..(177): unsure at all Xaa locations
MSRHPITKWAQRSDRVFLTIELPDAKDVKLNLKSEGHFNFSAXXGSDDLPYEFDIELFDAVNVEESKAAVAPRTICYLIKKAKSGWWPRLLKQEGKPPVFLKVDWDKWQDEDDEDAGFNDFGGMDFSKLDIGGADDDDIGDDEDDVVESANKDEQGGKTEESKEEEAAPAAAEEVKP

SEQ ID NO: 9457 - protein, 155 aa, Zea mays
  unsure (1)..(155): unsure at all Xaa locations
MSRHPSTKWAQRLDKVYLTIELPDAKDVKLNLRPDGHFNFSAKAPADDMQYELDLELFDAVSVEESQAAVAPRAICYLVKKAEGKWWPRLLKKEGRPPVFLKVDWDKWQDEDDEDXPDLXDFGDMDFSKLDMGGGDDDDDEIEEEDEDNVVDSAX

SEQ ID NO: 9458 - protein, 184 aa, Drosophila melanogaster [sequence omitted]

SEQ ID NO: 9459 - protein, 146 aa, Gallus gallus
VFIEFCVEDSKDVNVNFEKSKLTFSCLGGSDNFKHLNEIDLFNNIDPNESKHKRTDRSILCCLRKGESGQAWPRLTKERAKLNWLSVDFNNWKDWEDDSDEDMSNFDRFSEMMNNMGGDDDVDLPEVDGADDDSPDSDDEKMPDLE

SEQ ID NO: 9460 - protein, 160 aa, Homo sapiens
MQPASAKWYDRRDYVFIEFCVEDSKDVNVNFEKSKLTFSCLGGSDNFKHLNEIDLFHCIDPNDSKHKRTDRSILCCLRKGESGQSWPRLTKERAKLNWLSVDFNNWKDWEDDSDEDMSNFDRFSEMMNNMGGDEDVDLPEVDGADDDSQDSDDEKMPDLE

SEQ ID NO: 9461 - protein, 160 aa, Homo sapiens [sequence omitted]

SEQ ID NO: 9462 - protein, 273 aa, Oryza sativa
  unsure (1)..(273): unsure at all Xaa locations
MTNQTNQSKIAENNRFRPHRNGKLAIGSPYLQYSSRRKFQKVREACVRLGVEWKRSGKRREEEEAKEGGGGGGGGGREERTTSHRARPNRRSCFPEEKNMSRHPSTKWAQRSDKVFLTIELPDARDVKLNLKPEGQFIFSAKGPADDTPYELDLELFDAVNVEESKAAVAARSICYLIKKAESKWWPRLLKKEGKPPVFLKVDWDKWQDEDDEDIGLXXDFGDMDFSKLGMGGPDDDLEDDDEDDTADSANKDDEDIKAEGSGEQEAAGEAKP

SEQ ID NO: 9463 - protein, 172 aa, Oryza sativa
  unsure (1)..(172): unsure at all Xaa locations
MSRHPSTKWAQRSDKVFLTIELPDARDVKLNLKPEGQFIFSAKGPADDTPYELDLELFDAVNVEESKAAVAARSICYLIKKAESKWWPRLLKKEGKPPVFLKVDWDKWQDEDDEDIGLXXDFGDMDFSKLGMGGPDDDLEDDDEDDTADSANKDDEDIKAEGSGEAAGEAKP

SEQ ID NO: 9464 - protein, 129 aa, Oryza sativa
  unsure (1)..(129): unsure at all Xaa locations
VLCACSRHPSTKWAQRSDKVFLTIELPDARDVKLNLKPEGQFIFSAKGPADDTPYELDLELFDAVNVEESKAAVAARSICYLIKKAESKWWPRLLKKEGKPPVFLKVDWDKWQDEDDEDMVGNSKYDXD

SEQ ID NO: 9465 - protein, 263 aa, Arabidopsis thaliana
MRLSPHNVKAVYRAAKASMSLDLLNEAKSYCEKGIENDPSNEDMKKLLKLVNSKKQEKEQHEAQASQAVVEAKACLSAIENRGVKIGKAMYRELTGLKKPMLDKNNILHWPVLLLYAEAMTSDFVEDFCETDMFATHLDMMFSEDSPPLPWDKNNEYSRDVIELYYEASSGTPLPRSRVLQYLLEGTKGSQAETTGEEDTSATKTPSYLKGSSGMVKVNERRTLHDVLKEPKFVIPEIPVFYIVSKRSKFYKDFTAGKWTPPN

SEQ ID NO: 9466 - protein, 360 aa, Glycine max
MALWMEKGSEPLTETEKADLEAIAALKESAAFEFKEKGNQYVKMGKKHYSDAIDYYTRAIDQKALSDSETSILFANRAHVNLLLGNLRRALTDSNEALKLCPSNIKAIYRAAKASLSLNMLAEAREYCLKGLQFDPNNEDLKKLDRQIGLKISEKEKHEAEASKAVAETKKLVSAIENRGLKIGKAMYLELTGLRKPVLDKSNILHWPVLLLYAEVMSSDFIEDFCETDMFSVHLDMIFSEDQPLSWDVENNYKREFIELYYETGSGLCLSKEKLLHCLLEGTAAAHREGVGDEEKDTVEDYKQHMGSPKWIKVNERRTLHDVLKEPNFIIPGIPVFYVVSKRSSFYGKFKAGKWVPPSI

SEQ ID NO: 9467 - protein, 111 aa, Glycine max
  unsure (1)..(111): unsure at all Xaa locations
MALWMEKGPEPLTECEKADLEAIAALKESAAFEFKEKGNQYVKMGKKHYSDAIDCYTRAIDQKALSDSETSILFANRAHVNLLLGNLRRALTDSSEALKLCPSNIKAIYRX

SEQ ID NO: 9468 - protein, 78 aa, Glycine max
  unsure (1)..(78): unsure at all Xaa locations
CHFTLQIQEKGNQYVKMGKKHYSDAIDYYTRAIDQKALSDSETSILFANRAHVNLLLGNLRRALTDSNEALKLCPSNX

SEQ ID NO: 9469 - protein, 131 aa, Triticum aestivum
  unsure (1)..(131): unsure at all Xaa locations
XVRDENHAYTRDAIELYCQAGDGTPFSRSELLKYLLEGTVGSQKALMGKMENSSTAISSSQGSSGNWIKVREGKTLQEALQHKDYIIPAVPVFFVASRKSAFYSKFKAGNWSLPXSCSLVVLQFTIFVGRG

SEQ ID NO: 9470 - protein, 149 aa, Zea mays
  unsure (1)..(149): unsure at all Xaa locations
XCRKGLEQDPPNEEFKKLLSEVDSKLREQDRQRAKVAQAIAKAKDLAAAMGKRGVKLGKAAYQELTGVKKPVLDEQGVLHWPVLLLYPEVMSSDFIEDFPDTDTPPLPWDDNHVYTRDSIELYYQVCLGKPLLSAKHYDYRFFFQKAKX

SEQ ID NO: 9471 - protein, 102 aa, Zea mays
  unsure (1)..(102): unsure at all Xaa locations
XGGFGKPLSRSEVLRYLLEGNVDSKAREDEEHDSTKCTTVTSTDSSSKWIKVKEGKTLQEVLQDKGCIVPAIPVFFVVSRKSTFYKDFKAGNWSLPXNRTGH

SEQ ID NO: 9472 - protein, 385 aa, Saccharomyces cerevisiae; identical to SEQ ID NO: 472

SEQ ID NO: 9473 - protein, 386 aa, Saccharomyces cerevisiae
MSSVNRQMEDIPNQQKYVPGPGDPELPPQLSEFKDKTSDEILKEMNRMPFFMTKLDETDGAGGENVELEALKALAYEGEPHEIAENFKKQGNELYKAKRFKDARELYSKGLAVECEDKSINESLYANRAACELELKNYRRCIEDCSKALTINPKNVKCYYRTSKAFFQLNKLEEAKSAATFANQRIDPENKSILNMLSVIDRKEQELKAKEEKQQREAQERENKKIMLESAMTLRNITNIKTHSPVELLNEGKIRLEDPMDFESQLIYPALIMYPTQDEFDFVGEVSELTTVQELVDLVLEGPQERFKKEGKENFTPKKVLVFMETKAGGLIKAGKKLTFHDILKKESPDVPLFDNALKIYIVPKVESEGWISKWDKQKALERRSV

SEQ ID NO: 9474 - protein, 338 aa, Mus musculus
MAKWGEGDPRWIVEERADATNVNNWHWTERDASNWSTEKLKTLFLAVRVENEEGKCEVTEVNKLDGEASINNRKGKLIFFYEWTIKLNWTGTSKSGVQYKGHVEIPNLSDENSVDEVEISVSLAKDEPDTNLVALMKEDGVKLLREAVGIYISTLKTEFTQGMILPTVNGESVDPVGQPALKTETCKAKSALSKSQAKPVGVKIPTCKITLKETFLTSPEELYRVFTTQELVQAFTHAPAALEADRGGKFHMVDGNVTGEFTDLVPEKHIAMKWRFKSWPEGHFATITLTFIDKNGETELCMEGRGIPAPEEERTRQGWQRYYFEGIKQTFGYGARLF

SEQ ID NO: 9475 - protein, 338 aa, Mus musculus
MAKWGEGDPRWIVEERADATNVNNWHWTERDASNWSTEKLKTLFLAVRVENEEGKCEVTEVNKLDGEASINNRKGKLIFFYEWTIKLNWTGTSKSGVQYKGHVEIPNLSDENSVDEVEISVSLAKDEPDTNLVALMKEDGVKLLREAVGIYISTLKTEFTQGMILPTVNGESVDPVGQPALKTETCKAKSAPSKSQAKPVGVKIPTCKITLKETFLTSPEELYRVFTTQELVQAFTHAPAALEADRGGKFHMVDGNVTGEFTDLVPEKHIAMKWRFKSWPEGHFATITLTFIDKNGETELCMEGRGIPAPEEERTRQGWQRYYFEGIKQTFGYGARLF

SEQ ID NO: 9476 - protein, 331 aa, Mus musculus
MAKWGQGDPRWIVEEREDGTNVNNWHWTERDATIWSKGKLRGLLVGIAMENEAGRCEISELKQVEGEASCNSRKGKLIFFYEWNIKLAWKGTVKESGAKHKGLIEIPSLSEENEINDTEVNVSKKKGDGEILKDLMRTTGTAKVREALGEYLKALKTEFTTGMILPTKAVATQELTLQRKLNENKLQASPVALGVRIPTVALHLTELFDTTVEQLYSIFTVKELVQKFSKSPAVLEAERGGKFQMFDGNISGEYVELVTNRKIIMKWRCRNWPEEHYATVELNFVPAPGQTELQLDCKGVPVCKEENMKFCWQKQHFEEIKGLLELTAQNA

SEQ ID NO: 9477 - protein, 283 aa, Mus musculus
MENEAGRCEISELKQVEGEASCNSRKGKLIFFYEWNIKLAWKGTVKESGAKHKGLIEIPSLSEENEINDTEVNVSKKKGDGEILKDLMRTTGTAKVREALGEYLKALKTEFTTGMILPTKAVATQELTLQRKLNENKLQASPVALGVRIPTVALHLTELFDTTVEQLYSIFTVKELVQKFSKSPAVLEAERGGKFQMFDGNISGEYVELVTNRKIIMKWRCRNWPEEHYATVELNFVPAPGQTELQLDCKGVPVCKEENMKFCWQKQHFEEIKGLLELTAQNA

SEQ ID NO: 9478 - protein, 359 aa, Rattus norvegicus
MAKWGQGDPRWIVEEREDGTNVNNWHWTERDATVWSKGKLRELLVGLAMENEAGRCEISELKQVEGEASCNSRKGKLIFFYEWNIKLAWKGTVKESGAKHKGLIEIPSLSEENEVNDTEVNVSKKKGDGEILKDLMRTTGTAKVREALGEYLKALKTEFTTGMILPTKAGATQALTLERKLTENALQVRACGCTGRGWGGDTTRRHTGRTTTTPLASPVALGVRIPTVALHLTELFDTTVEQLYSIFTVKELVQGFSKSPAVLEAEKGGKFQMFDGNITGEYVELVTNRKIIMKWRCRNWPEEHYATVELNFVPAPGQTELQLDCKGVPVCKEEHMKFCWQKQHFEEIKGLLQLTTQNA

SEQ ID NO: 9479 - protein, 312 aa, Anopheles gambiae str. PEST
TAKRTVHCWFAATLNNHSNAFTVGPIDCKRRLRSSCTTRKQIDKMAKWGEGDPRWIVEERPDATNVNNWHWTEKNATPWSKDKLKVLLDGFVIAESGLECTVTKIDKLDGEATANNRKGKLIFFYEWNIVLLWKGRFNDEEVTGKVSIPNLSEENDVDEVELTVSVDSSNPASEKLKLFMYNIGRDKLRKQLDTYIRELKADFAKGLILPKKDEMNGTETAPQKKDKETVYASGFNKKKIDLETVTSSPDASKQKSVGCKLDLKTLQTTEKFQCRANELFDALTREDMVTAFTRGHVKHELFKGGDFVYFGA

SEQ ID NO: 9480 - protein, 140 aa, Plasmodium falciparum 3D7
MSFEITEEYYVPPEVLFNAFTDAYTLTRLSRGSLAEVDLKVGGKFSLFSGSILGEFTEITKPHKIVEKWKFRDWNECDYSTVTVEFISVKENHTKLKLTHNNIPASNKYNEGGVLERCKNGWTQNFLHNIEVILGYPKKK

SEQ ID NO: 9481 - protein, 360 aa, Arabidopsis thaliana
MAKFGEGDKRWIVEDRPDGTNVHNWHWSETNCLEWSRNFFTKQFSGVDILSGEGNLFIKVSKIEKVEGEAYVNVRKGKIIPGYELNVSLSWEGEAKDSDGKTLLKADGLVDMPYISDENADEDPEIRFSVKDEGPIGRTLKEAMVKKGKEIILEKVRVYVEAMARGGPCRDELESKKVAPKSVAAGSATVAVEKSGAAPVVSAAAVESKVVKEKKKAKTKEGFKTITMTEKFNCRARDLYEILMDENRWKGFTQSNAKISKDVNGPISVFDGSVTGINLELEEGKLIVQKWRFGSWPDGLDSTVKIVFEEPQPGVTIVNLTHTDVPEEDRYGNATVVENTERGWRDLIFHRIRAVFGFGI

SEQ ID NO: 9482 - protein, 360 aa, Arabidopsis thaliana
MAKFGEGDKRWIVEDRPDGTNVHNWHWSETNCLEWSRNFFTKQFSGVDILSGEGNLFIKVSKIEKVEGEAYVNVRKGKIIPGYELNVSLSWEGEAKDSDGKTLLKADGLVDMPYISDENADEDPEIRFSVKDEGPIGRTLKEAMVKKGKEIILEKVRVYVEAMARGGPCRDELESKKVAPKSVAAGSATVAVEKSGAAPVVSAAAVESKVVKEKKKAKTKEGFKTITMTEKFNCRARDLYEILMDENRWKGFTQSNAKISKDVNGPISVFDGSVTGMNLELEEGKLIVQKWRFGSWPDGLDSTVKIVFEEPQPGVTIVNLTHTDVPEEDRYGNATVVENTERGWRDLIFHRIRAVFGFGI

SEQ ID NO: 9483 - protein, 358 aa, Glycine max
  unsure (1)..(358): unsure at all Xaa locations
MARYGEGDKRWIVEDRPDGTNVHNWHWSETNCLDWSKTFFTSLLTNLPILDGEGNLFLKTTSLRSLDGEAYINVRKGKIIPGYEISLTLNWQGEAKDSLGTSLLKVDGTVEIPYISDENADEDPEVRVTVNDEGPVGMRIKDAMLSKGKPLILEKVRVWVQSMAKGGPVKDELEPKKVAPSSFSPSPAAXXQRQTTTPTTMKTTAAAPKKEEKKEKVKKGRKSISMTERFNCRAKDLFEILMDENRWKGFTQSNARISKEVGGEFSIFDGSVTGTNLELQEGKLIVQRWRFGSWNDGVQSTVRLEFEEPESGVTVVKLTHTDVPEEDRYGNATVVENTERGWRDLIFQRIRAVFGFGI

SEQ ID NO: 9484 - protein, 360 aa, Glycine max
  unsure (1)..(360): unsure at all Xaa locations
MARYGEGDKRWIVEDRPDGTNVHNWHWSETNCLDWSKTFFTSLLTNLPILDGEGNLFLKTTSLRSLDGEAYINVRKGKIIPGYEISLTLNWQGEAKDTLGTSLLKVDGTVEIPYISDENADEDPEVRVTVNDEGPVGMRIKDAMLSKGKPLILEKVRVWVQSMAKGGPVKDELEPKKVAPPPAAAVSXRXTTQPPQRQPTTTTTATKKEEKKEKEKEKEKKGRKSIGMTERFNCRAKDLYEILMDENRWKGFTQRAAGISKEVGGEFSIFDGSVTGTNLELQEGKLIVQRWRFGSWNDGVQSTVRLEFEEPESGVTVVKLTHTDVPEEDRYGNATVVENTERGWRDLIFQRIRAVFGFGI

SEQ ID NO: 9485 - protein, 147 aa, Glycine max
VKKNEGKKGFKVISLIEKFNCRARDLFEILMDENRWRGFTQSNARISKEVGGEFSIFDGSVTGKNLELDEGKLIVQGWRFGSWPDGIESMVRIVFEEPEDGVPVVKLPHSDVPEEDRYGNATVVENPERGWRDLIFQRIRTAFGFGI

SEQ ID NO: 9486 - protein, 357 aa, Oryza sativa
  unsure (1)..(357): unsure at all Xaa locations
MAKYGEGDARWIVQERADGTNVHNWHWAERDCLEWSRSRLTSLLAGLPVLSGEGGLALRTTALDKLDGEAYVNIRKGKVIPGYELSLTLAWEAEATTESGVVKVSGAAEVPYLADENADEDPELRVTVRGDDGPVARRAKDAFLTKGKPLVLEKIREYVAAMAKGGPAKDELDSKKTPTKAAAVEAGGAAXXAPAPAAEKKEEAPAVKEKKAKAKDKEGFKTIEMTEKFYCRAKDMYEILMDENRWKGFTQSNARISREVGGQFSLFDGSISGVNEELQEGKLIVQKWRFGSWPDGVHSTVRLVFDEPESGVTVISLKQTDVPEEDRYGNSTVVENTERGWRELIFQRIRGVFGFGI

SEQ ID NO: 9487 - protein, 178 aa, Oryza sativa
  unsure (1)..(178): unsure at all Xaa locations
XSVSLNVENVAIFFCKLIQTISLAXDKPKXXSYKMKRREYYSTCCRTQVFQTRAKAGSEMWMAEGKWEGFTQSNARISREVGGQFSLFDGSISGVNEELQEGKLIVQKWRFGSWPDGVHSTVRLVFDEPESGVTVISLKQTDVPEEDRYGNSTVVENTERGWRELIFQRIRGVFGFGI

SEQ ID NO: 9488 - protein, 357 aa, Triticum aestivum
MAKFGEGDARWIVQERADGANVHNWHWAERDCLDWSRALLSKLLAGLPVLSGEGGLTLRTTTLDKLDGEAYVNIRKGKVIPGYELSLTLAWEADATTESGVVKVTGTAEVPYLADENADEDPELRITVRGDDGPLARRAKDAFIAHGKPLVIAKIRDYVAAMANGGPAKDEIDSKKISTKAAPAAGGAAVAPAPSVKVTAAPVQAPAAKEKKASKDKEGFKTIEMTEKFNCRSKDIYEILMDENRWKGFTQSNARISKDVGGQFSLFDGSITGVNEELQEGKLIVQKWRFGSWADGVHSTVRLVFDEPESGVTIIKLKQTDVPEEDRYGNSTVVENTERGWKELIFQRIRAVFGFGV

SEQ ID NO: 9489 - protein, 336 aa, Schizosaccharomyces pombe
MSATSINPNNWHWTSKDCRVWSHEYFNKELPKIQASEGPTSARITQVNSCEGDVDVSMRKRKVITIFDLKIQMEFKGETKDGVEATGSITCPELSYDLGYSDYVFDIDIYSASKEKEPIKELVREKIIPQIRQLFSGFSQVLLQTHGDDVYLSTEEHNGNAARGLPVHSSFKQNNSSQTSSNKGTTTVAAGSGSDGSRVSAVVNTADISENYTFDAPANELYATFLDPARVAAWSRAPPQLDVRPQGAFSLFHGNVVGKFLVLEENKKIVQTWRLSSWPTGHYAEITFTFDQADSYTTLRMIMKGVPIGEEEVVQGNIQDYYIRPIKTVFGFGAVL

SEQ ID NO: 9490 - protein, 350 aa, Saccharomyces cerevisiae
MVVNNPNNWHWVDKNCIGWAKEYFKQKLVGVEAGSVKDKKYAKIKSVSSIEGDCEVNQRKGKVISLFDLKITVLIEGHVDSKDGSALPFEGSINVPEVAFDSEASSYQFDISIFKETSELSEAKPLIRSELLPKLRQIFQQFGKDLLATHGNDIQVPESQVKSNYTRGNQKSSFTEIKDSASKPKKNALPSSTSTSAPVSSTNKVPQNGSGNSTSIYLEPTFNVPSSELYETFLDKQRILAWTRSAQFFNSGPKLETKEKFELFGGNVISELVSCEKDKKLVFHWKLKDWSAPFNSTIEMTFHESQEFHETKLQVKWTGIPVGEEDRVRANFEEYYVRSIKLTFGFGAVL

SEQ ID NO: 9491 - protein, 326 aa, Neurospora crassa
MVLHNPNNWHWVNKDATSWAKQWFEDNLTKLEAKEGDVTAKISKVISMDGDVDVAQRKGKVITIFDVKLTLEYTGSTATDDNVSGTITVPEVSHELDEDEFVFDIDIYSDANEKRPVKDLVRNKLVPQLRKEFLKLSPALIAEHGKDIQHAPGSNPSSGFSTPKFVPQPASSSARAVTTTSSSSSSSAINTTTVVDSAEFRTSADELYATFTDPGRLAAFTRAPPKVFEGAKPGGKFVLFDGNVSGEYVELQEPTKIVQKWRLEQWPQGHYSTLKIEFDQNDVDKVTVMRVEWTGVPVGQEEIVKNNWNEYYVRSIKRTFGFGTIL

SEQ ID NO: 9492 - protein, 342 aa, Caenorhabditis elegans
MAKWGEGDPRWIVEERADATNVNNWHWSEKNATPWSLNRLRELLTGFSSEDGPIVVTIDEIKKIDGEATANNRKAKLIFLFEWVIEGTFIARVSGSEDEYKGTFDIPNLSDENDASEVDVNSSLSGNGPMAHQIRQVLNKSFIAKIQDVMGIYIRELKEEFSKGLILPTDKVKPQVVTTGKTSVVDKRQFQNTVVAEKDASTSGNEVFSTKEVSTSDTYKATPDRVFEALTETQFVRGWTNNSIGEWNFKEGGSFALFGENVTGTFEKIEPNKEIVKKWRLKKYPNNHHATIHFQLKDTGSGTDIKIIAKDVPTHLAEETQQGLDRYYLSSIGRTFGFSQRM

SEQ ID NO: 9493 - protein, 354 aa, Drosophila melanogaster
MAKWGEGDPRWIVEERPDATNVNNWHWTEKNATPWSKDRLHQLFQDFKIGQSDIECAVDSVDKCSGEATVNNRKGKLIFFYEWELVLKWSGKLLKNSKLIHKGKLTIPNLSEENELADVEITVTIDESNDESETLKQFMYNVGRDRVRQQLASYIRELKEEYSKNLILPKKGDEAGAGNTVANFKDANNTRNAAQNIALNSSVAAPRLKNSGIGCKLDVRTLSMTEEFHCSANDLYNALTKPEMVTAFTRAPAKVDAVRGGEFILYGGNVLGKFEELVPEKKIQQSWRLKNWTSGHYSNVVIELEETSSSTMMSLKQTGIPASEFDAMKTNWYRYYWHSIKQTFGFGTSISDAL

SEQ ID NO: 9494 - protein, 336 aa, Xenopus laevis
MAKWGEGDPRWIVEMRADATNVNNWHWTERDATSWSLAKIKELMMGIRVESEEGTCDITEVSKLEGEASINNRKGKLIFFYEWDIKLNWTGVSKSGVKYKGYVEIPNLSDENDPSEVEIRVSMAKDEPETNLIGVMRKQGSKQIREAVAQYISMLKSEFTQGMILPTANGVSHNISEIKQKTETNMPQTGKTQTCQNAGVKIPTCKVTIKDTFLTSPEELYRVLTRQELVQGFTHAPASLTADKGGKFQLLGGNVSGEFKELEPEKHIVMSWRFKSWPQGHHASITLTFTDKGGETELWMEARGVPQGEEERTKEGWKRYYFDGIKQTFGYGALLL

SEQ ID NO: 9495 - protein, 338 aa, Homo sapiens
MAKWGEGDPRWIVEERADATNVNNWHWTERDASNWSTDKLKTLFLAVQVQNEEGKCEVTEVSKLDGEASINNRKGKLIFFYEWSVKLNWTGTSKSGVQYKGHVEIPNLSDENSVDEVEISVSLAKDEPDTNLVALMKEEGVKLLREAMGIYISTLKTEFTQGMILPTMNGESVDPVGQPALKTEERKAKPAPSKTQARPVGVKIPTCKITLKETFLTSPEELYRVFTTQELVQAFTHAPATLEADRGGKFHMVDGNVSGEFTDLVPEKHIVMKWRFKSWPEGHFATITLTFIDKNGETELCMEGRGIPAPEEERTRQGWQRYYFEGIKQTFGYGARLF

SEQ ID NO: 9496 - protein, 284 aa, Leptospira interrogans serovar lai str. 56601
MINRVLGLFLIIGILIFVLNFFSTSGQSEDQYQAEGPSRIQSVVILIREFLWGKASHSNAAASVTTAENPQEIFKRAYRANEKKAYLNAVEEYSKYLKLVPNDASAYYNRGLVHYTLKRYNDAVRDFEKAVEIDPSKTYAFLYKGYAYEMISDCKQAIEDFEKAISLGENKNAELYGHKARCENRSKNYDEGFQDALKALNIDKKNAYAFFELAYAQYGLKKYSDSVESYTKVLQFSPNDGVAFHNRGLALVFLNKIPSACKDFQRSSEIGYFDSKKKLDEYCK

SEQ ID NO: 9497 - protein, 178 aa, Glycine max
  unsure (1)..(178): unsure at all Xaa locations
ILYQFDDCIKDCERAVERGKILRSDYKMIARALTRKGTALAKMAKCITQXFXPAIENFQKALTENRNTDTLKKLNEAEKAKKELEQQXKHYTKAIKRNPKDAKXEGLKHDPNNEDLLDGIRRXKAMQDPEIQSILQDPVMRQVLIDFQENPRAAEEHAKNPMVMNKIQKLISAEIVQM

SEQ ID NO: 9498 - protein, 134 aa, Glycine max
  unsure (1)..(134): unsure at all Xaa locations
XVEPNRLEPTDSERVPRGTGADQYFMQETDKALETSRAGLQYDSNNQELLDGIRTCIQQINKARRGDLSPDELTARQAKAMQDPEIQNILQDPVMRQVLIDFQENPKAAQEPTKNPMVMNKIQKLVSAGIVQMK

SEQ ID NO: 9499 - protein, 148 aa, Glycine max
  unsure (1)..(148): unsure at all Xaa locations
XARAETGKHVXFCKKDRDKAEERGREPRTDKKTTARARTRKGNATVKSEKRRKEKEPANETNQKAHTEHRNPDTTKKPNEAEKAKKELEQQEQLDPKQADEEREKGNEPIKQQKQPEADKHHTKAIPTKPKDPRAQSSKATSPHKTGG

SEQ ID NO: 9500 - protein, 593 aa, Pisum sativum
MKSMASPSSQIWVILGLGLAGIYVLTRKLTQAVKEDFGAFLLKLKLLPPPPPAPPKAPHPLSSLNFAISDIFDIEGHVSTFGHPEWARTHEPASSTASAVSALVESGATCIGTTVVDELAYGISGENKHFGTPTNPAVPNRVPGGSSSGAAVAVAANFVDFSLGVDTSGGVRVPAGFCGILGFRPSHGAVSHVGIIPVSTSLDTVGWFAKDPDVLRRVGHILLQAPFVMQRNPRQIIIADDCFQHLNVPLDRTSQVVIKATEKLFGKQVLKHINFEDYISSKVSSLKACSIQKSNGVLKSSSLKLLANVMQSLQRHEFEHTHSEWMSIVKPDLHPAVSAQLHEKFEVSELEIENSKSVRSELRVAVNSLLKDEGVLVIPTVADPPPKLGGKEFLSHDYQSRALSLLSIASISGCCQVTVPLGFFDKNPVSVSLIARHGGDRFLLDTLKTMYTVLQEQADIAAPSKSSKSVVSKEQSAEISKEKGNQAYKDKQWQKAIGFYTEAIKLCGNNATYYSNRAQAYLELGSYLQAEEDCTTAISFDKKNVKAYFRRGTAREMLGYYKEAIDDFKYALVLEPTNKRAASSAERLRKLFQ

SEQ ID NO: 9501 - protein, 189 aa, Triticum aestivum
  unsure (1)..(189): unsure at all Xaa locations
XYRADIYLAILHADDSIKDXDTRLARXGKASSGLLTMASSALTKNGPALAKLAETYRDYDDTIETIHNALTEHRNPDTLNRLNDAERATNELEQQEDYDPKLADDXERETGTELLXASQYPLAEQLYTEPLRRHPQDPNVYTLRAACYSKLPAMPVGLKDAHKRIELDPTVLQRIHRXKGAIXQFFMTX

SEQ ID NO: 9502 - protein, 317 aa, Schizosaccharomyces pombe
MSSNKVTAAIIDYLKQAITTGSISEEEKESLEVAAQCIQDSFKIKPEEIKPKSGDRLVAAFEEYEKLHPVEEDSTAHVNKEEAEKLKLEGNNAIAAKDYQKALDLYTKAIEIDPTSPVYYSNRAAAYNQLGQFENAVEDALTCLSLDPHHARAFGRLGRAKLSLGDAAAAADAYKKGLDFDPNNEVLKRGLEAANKQLNQPSDSSATSGADQARTSAGAAPDLGSIFGGGMPDLGSLMNNPAVMNMARNLMQSGALNNIMNDPNIANMARNFQSGGGMPDLSSLANNPQLQNLARNFMNNNNNGNTDNNNQGNPPPQ

SEQ ID NO: 9503 - protein, 589 aa, Saccharomyces cerevisiae; identical to SEQ ID NO: 471

SEQ ID NO: 9504 - protein, 346 aa, Saccharomyces cerevisiae
MSASKEEIAALIVNYFSSIVEKKEISEDGADSLNVAMDCISEAFGFEREAVSGILGKSEFKGQHLADILNSASRVPESNKKDDAENVEINIPEDDAETKAKAEDLKMQGNKAMANKDYELAINKYTEAIKVLPTNAIYYANRAAAHSSLKEYDQAVKDAESAISIDPSYFRGYSRLGFAKYAQGKPEEALEAYKKVLDIEGDNATEAMKRDYESAKKKVEQSLNLEKTVPEQSRDADVDASQGASAGGLPDLGSLLGGGLGGLMNNPQLMQAAQKMMSNPGAMQNIQKMMQDPSIRQMAEGFASGGGTPNLSDLMNNPALRNMAGNLFGGAGAQSTDETPDNENKQ

SEQ ID NO: 9505 - protein, 2444 aa, Drosophila melanogaster
MQLKPTNEPECTPELPAANRALFLEKVRQSNAACQSGDFATAVLLYTDALQLDPGNHILYSNRSAALLKQGQFTAALQDATQARDLCPQWPKAYFRQGVALQCLGRYGEALAAFASGLAQEPSNKQLMAGLVEASLKSPLRAALEPTLQQLRTMQLQESPFVVSSVVGQELLQATQYSAAVTVLEAALRIGSCSLKLRGSVFSALSSAHWALNHQGAHKEALTAHRYQLVLAMKCKDTQAAAAALTSLGHVYTASGDYPNALASHKQCVQLFKQLGDRLQEAREIGNVGAVYLALGECEAALDCHSQHLRLARKLHDQVEEARAYSNLGSAHHQRRQFTQAAACHEQVLRIAQALGDRSMEAAAYAGLGHAARCAGDASASKRFHERQLAMALAARDKLGEGRACSNLGIVYQMLGSHDAALKLHQAHLGIARSLGDRTGMGKAYGNMARMAHMAGSYEAAVKYHKQELAINQAMNDRSAEAATHGNLAVAYQALGAHDAALTHYRAHLATARSLKDTAGEACALLNLGNCLSGRQEYEEAVPHYESYLMLAQELGDVAAEGKACHLLGYAHFSLGNYRAAVRYYDQDLALAKDAQHRPNMGRAYCNLGLAHLALGHTAAALECQQLFLAVAHATNQLPAKFRALGNIGDILIRTGSHEEAIKLYQRQLALARAAGDRSMEAAACGALGLAHRLMRRWDKALGHHTQELTLRQELGDLSGECRAHGHLGAVHMALCSWTNAVKCYQEQLERAQEQRDAAVEAQAHGNLGIARLNMAHYEAAIGCLEAQLGTLERVSLPSTQADRARALGHLGDCYAALGDYEEALKCHDRQLQLALGLTSHRDQERAYRGLGQARRALGQLPAALVCLEKRLVVAHELHSPEIKALAYGDLGHVHAALGNHAQALNCLEHQRELAQGLQDRALESDAMCALGQVQQRMGQHAQALELHRQDLEICTELSAPALQARALSNLGSVHESLGQQAEALKCYERQLELSTDRLAKAMACLALGRVHHQLEQHNQAVDYLRQGLASAQTTGKSEEEAKIRHQLGLALRSSGDAEGAHIQLETAAQLLESVRHEQRSPETRQALYDLQTTCYQLLQVLLVALNRNEDALVAAERCKARGGADAVSGEGSKVPLADSESIQETVDRGRTTVLYYSLAGDQLFTWLLEPHVGIVRFHAAKIDAHSLQLPLSLSEEEEEEEDLEMERELKLNRDQNQDQSEDQGTSNKANRLLERYMSLVRDNLGVNSQSLLHEGDGSGWRASTEQLLEDLPGAGGSGGGGFLRMVSRNQLLNSSNYSLSSLFSVGSVGGSVASLQGSTRSVGSRSSRRAPGLPVWRGPSCLHILYNLLLAPFDDLLPAGEADTNRQGRRELVLVLDSSLYLVPFAILRAAQEDGEYLCERCAILTAPSLQSMRSRPRIRRDRARPPKALVVGGPRIPSNLAELWGWAGAESPAALQEAAMVADMLQATALAGSNATKESVLAELPSAECVHFAANISWQLGAVVLSPGDVVTAEQQEQKEPHEPQMTDFTLAAGELRQLRLSARLVVLSSYHSVEPITGDGVAQLAGGWLLAGAGVVLISLWPVPETAAKILLRAFYSALLQGARAARALAEAMQTVQHTKHFAHPANWAGFLLVGSNIRLSNKVAMGHALCELLRTPERCRDALRVCLHLVEKSLQRIHRGQKNAMYTTQQSIENKAGPVAGWKDLLMAVGFRVEPAANGIPASVFFPQADPEERLAQCSASLQALLALTPATLQALGKLVHVNSAEYAGDIIAVVRNILAQFPGSNPATGSSSTKSDAIAETCFIEMPLSVRLWRVAGCHELLASVGFDLTEVGADQVILRTGKQANRRQCQFVLQALLALFDTREAPKNLGLDRDSDHSSSCESLAEPEMDVASIPPAASSTPSVNGGNKAPLPLHPRSAFISYVRRRGEPDGGRTDAIGGVGSGALDSSLANTTDSEHSLSDGYVTQPGFGLSNPRLGYASMRAPVRVSRPGGGGESDAAFTPSPPVTDPSLSLALAHQTRIRSLYSQTSSAAIVPPVATTLNRRPDSSSSASSTTDWEGSGHATVLRRGVSTAIPQQQPPLPPPRPPTFHNLSVGAGGRSKPKIKLGSAQSSLAARVNKEHALFMDRLSVRTELSAPGSGNAMTSGSAARKPLALPEEEDVSNVVFNPSSLYFSQTDSDLLNEPKQEETPPPTKSSTKSLQDSMMRHMNRELTPSISEMYHDRNVGLGLAPPLSKLLLSPNYEEQEVVSITEACPQSGANLKTLVDAVSELELSGSSSGATMPTVVGGGANEVEGTSGTSAEATCPICGEPADVICRCKAVTIQKKSILKPWLSNVPDSSLVQASELTTADILERRLEIHTATSSELRSGAPYSVDLSRRDEGDGRSVADSQCSSNYKRVLASASGGALSLAGIGKGSEAEAQSASSGATCSSARLV

SEQ ID NO: 9506 - protein, 305 aa, Danio rerio
MPQKRRTQSWTDLKQAGNECFKAGQYGEAVTLYSQAIQQLEKSGQKKTEDLGILYSNRAASYLKDGNCNECIKDCTASLDLVPFGFKALLRRAAAFEALERYRQAYVDYKTVLQIDWNIPAAHDGVNRMTKAFTEMDGPSWREKLPPIPTVPMSVKEKLGQAASPASSSQQNNVIDDKKKAPGPDAVKKGRTLKEEGNALVKKGEHKKAMEKYTQSLAQDPTEVTTYTNRALCYLALKMYKDAISDCEEALRLDSANIKALYRRAQAYKELKNKKSCIEDLNSVLKIDPNNTAVQKLLQEVQKMK

SEQ ID NO: 9507 - protein, 420 aa, Gorilla gorilla
MPLQVSDYSWQQTKTVVFLSLPLKGVCVRDTDVFCTENYLKVNFPPFLFEAFLYAPIDDESSKAKIGNDTIVFTLYKKEAAMWETLSVTGVDKEMMQRIREKSILQAQERAKEATEAKAAAKREDQKYALSVMMKIEEEERKKIEDMKENERIKATKELEAWKEYQRKAEEQKEIQREEKLCQKEKQIKEERKKLKYKSLTRNLASRNLAPKGRNSENIFTEKLKEDSIPAPRSVGSIKINFTPRVFPTALRESQVAEEEEWLHKQAEARRAMNTDIAELCDLKEEEKNPEWLKDKGNKLFATENYLAAINAYNLAIRLNNKMPLLYLNRAACHLKLKNLHKAIEDSSKALELLMPPVTDNANARMKAHVRRGTAFCQLELYVEGLQDYEAALKIDPSNKIVQIDAEKIRNVIQGTELKS

SEQ ID NO: 9508 - protein, 420 aa, Pan paniscus
MPLQVSDYSWQQTKTAVFLSLPLKGVCVRDTDVFCTENYLKVNFPPFLFEAFLYAPIDDESSKAKIGNDTIVFTLYKKEAAMWETLSVTGVDKEMMQRIREKSILQAQERAKEATEAKAAAKREDQKYALSVMMKIEEEERKKIEDMKENERIKATKELEAWKEYQRKAEEQKKIQREEKLCQKEKQIKEERKKIKYKSLTRNLASRNLAPKGRNSENIFTEKLKEDSIPAPRSVGSIKINFTPRVFPTALRESQVAEEEEWLHKQAEARRAMNTDIAELCDLKEEEKNPEWLKDKGNKLFATENYLAAINAYNLAIRLNNKMPLLYLNRAACHLKLKNLHKAIEDSSKALELLMPPVTDNANARMKAHVRRGTAFCQLELYVEGLQDYEAALKIDPSNKIVQIDAEKIRNVIQGTELKS

SEQ ID NO: 9509 - protein, 420 aa, Pan troglodytes
MPLQVSDYSWQQTKTAVFLSLPLKGVCVRDTDVFCMENYLKVNFPPFLFEAFLYAPIDDESSKAKIGNDTIVFTLYKKEAAMWETLSVTGVDKEMMQRIREKSILQAQERAKEATEAKAAAKREDQKYALSVMMKIEEEERKKIEDMKENERIKATKELEAWKEYQRKAEEQKKIQREEKLCQKEKQIKEERKKIKYKSLTRNLASRNLAPKGRNSENIFTEKLKEDSIPAPRSVGSIKINFTPRVFPTALRESQVAEEEEWLHKQAEARRAMNTDIAELCDLKEEEKNPEWLKDKGNKLFATENYLAAINAYNLAIRLNNKMPLLYLNRAACHLKLKNLHKAIEDSSKALELLMPPVTDNANARMKAHVRRGTAFCQLELYVEGLQDYEAALKIDPSNKIVQIDAEKIRNVIQGTELKS

SEQ ID NO: 9510 - protein, 420 aa, Pongo pygmaeus
MPLQVSDYSWQQTKTAVFLSLPLKGVCVRDTDVFCTENYLKVNFPPFLFEAFLYAPIDDESSKAKIGNDTIVFTLYKKEAAMWETLSVTGVDKETMQRIREKSILQAQERAKEATEAKAAAKREDQKYALSVMMKIEEEERKKIEDMKENERIKATKELEAWKEYQRKAEEHKKIQREEKLCQKEKQIKEERKKLKYKSLTRNSASRNLAPKGRNSENIFTEKLKEDSIPAPRSVGSIKINFTPRVFPTALRESQVAEEEEWLHKQAEARRAMNTDIAELCDLKEEEKNPEWLKDKGNKLFATENYLAAINAYNLAIRLNNKMPLLYLNRAACHLKLKNLHKAIEDSSKALELLMPPVTDNANARMKAHVRRGTAFCQLELYVEGLQDYEAALKIDPSNKIVQIDAEKIRNVIQGTELKS

SEQ ID NO: 9511 - protein, 228 aa, Ferroplasma acidarmanus
MAGNYVYNKDDEADDYNERGISYFNVTQYPDAVKEFTKAINLIKTDPDYYINRALAYYSMHMYNEAIKDCKSAIALSADRGDYHNTLGSIYDDMNRFDDALGEFDAAIKIEDDVPDYYYNRGNVYWRKGDKDLALEDYNKAVYLNSADPVFLYKRSQIYTEMEKYEDALGDLEDCIKLARNPEYYKDEANIYIKMGDKAKALQAVDNALKNSPENLSLKELKSRIEKM

SEQ ID NO: 9512 - protein, 371 aa, Mus musculus
MDPRKVSELRAFVKMCRQDPSVLHTEEMRFLREWVESMGGKVPPATHKAKSEENTKEEKRDKTTEENIKTEELSSEESDLEIDNEGVIEPDTDAPQEMGDENAEITEEMMDEANEKKGAAIEALNDGELQKAIDLFTDAIKLNPRLAILYAKRASVFVKLQKPNAAIRDCDRAIEINPDSAQPYKWRGKAHRLLGHWEEAAHDLALACKLDYDEDASAMLREVQPRAQKIAEHRRKYERKREEREIKERIERVKKAREEHERAQREEEARRQSGSQYGSFPGGFPGGMPGNFPGGMPGMGGAMPGMAGMAGMPGLNEILSDPEVLAAMQDPEVMVAFQDVAQNPSNMSKYQSNPKVMNLISKLSAKFGGQS

SEQ ID NO: 9513 - protein, 271 aa, Mus musculus
MDPHKVSELRAFVKMCRQDLSILHTEEMCFLREWETGDENVEITDEMMDEANEKKGAAIEALNDAELQKAIDLFTDAIKLNPHLAILGKAHRLLGHWEEAAHDLALVCKLDYDKDASAILKDVQPRAQTIAKHWRKYEQKREEQERKEQIERVKMAREEHERAKREEKKPEDNRISVWLFSSGFPVGMARMGRAMPGMAGMAGMAGMPGLSEILSNPEVLASMQNPEVMVAFQDVAQNPSNLSKYQSNPKVVNLISKLSAKFGGQSCQSPC

SEQ ID NO: 9514 - protein, 901 aa, Mus musculus
MTAKAKDCPSLWGFGTTKTFKIPIEHLDFKYIENCSDVKHLEKILYVLRSGEEGYYPELTEFCEKCLTNLAPKSRALRKDKPAETASSFSAEEWEKIDSDLKSWVSEIKREENTCHFHDPENHPGVEDPLPPVRGSTCCPHSGKETYSKSKTAKKRIPRDYAEWDKFDVEKECSKIDEDYKEKTVINNKAHLSKIETKIETAGLTEKEKSFLANREKGKGNEAFYSGDYEEAVMYYTRSLSALPTAIAYNNRAQAEIKLQRWSSALEDCEKALELDPGNVKALLRRATTYKHQNKLQEAVDDLRKVLQVEPDNDLAKKTLSEVERDLKNSEPVSELQTKGKRMVIEEVENSGDEGGKGSADEREDGGSDEAAMGNIQKKLMVRRSEGGRRSRRGRTPGPRAEQQGGLRETATASTGDSHYPEEPRAADNPSGLKRRGNELFRGGQFAEAAAQYSVAIAQLEPTGSANADELSILYSNRAACYLKEGNCRDCIQDCNRALELHPFSVKPLLRRAMAYETLEQYRNAYVDYKTVLQIDCGIQLASDSANRIARILTELDGSKWRERLPPIPAVPTSEPLRVWLPAAETPDQDPCPNNCMPSITDEKMFQALKEEGNQLVKDKNYKDAISKYNECLKINSKACAIYTNRALCYLKLGQFEEAKLDCEQALQIDGENVKASHRLALAQKGLENCRESGVDPSQVLLSPDSSEAARHLDTKNDTAPPSKGRERRRIQVQEVDGSSDEEPERPAEASATSAPARDGVEDGGSAEPAEKLDVSKPTNAYEFGQVLSTISARKDEEACAHLLAITAPKDLPLLLSNKLEGDTFLLLIQSLKSHLVAKDPSLVYEHLLYLSKAERFKTMLTLINKGQKEQMAQLFDGLSDTQSDGLTAEDVQALRRQYEL

SEQ ID NO: 9515 - protein, 901 aa, Mus musculus
MTAKAKDCPSLWGFGTTKTFKIPIEHLDFKYIENCSDVKHLEKILYVLRSGEEGYYPELTEFCEKCLTNLAPKSRALRKDKPAETASSFSAEEWEKIDSDLKSWVSEIKREENTRHFHDPENHPGVEDPLPPVRGSTCCPHSGKETYSKSKTAKKRIPRDYAEWDKFDVEKECSKIDEDYKEKTVINNKAHLSKIETKIETAGLTEKEKSFLANREKGKGNEAFYSGDYEEAVMYYTRSLSALPTAIAYNNRAQAEIKLQRWSSALEDCEKALELDPGNVKALLRRATTYKHQNKLQEAVDDLRKVLQVEPDNDLAKKTLSEVERDLKNSEPVSELQTKGKRMVIEEVENSGDEGGKGSADERADGGSDEAAMGNIQKKLMVRRSEGGRRSRRGRTPGPRAEQQGGLRETATASTGDSYYPEEPRAADNPSGLKRRGNELFRGGQFAEAAAQYSVAIAQLEPTGSANADELSILYSNRAACYLKEGNCRDCIQDCNRALELHPFSVKPLLRRAMAYETLEQYRNAYVDYKTVLQIDCGIQLASDSANRIARILTELDGSKWRERLPPIPAVPTSEPLRVWLPAAETPDQDPCPNNCMPSITDEKMFQALKEEGNQLVKDKNYKDAISKYNECLKINSKACAIYTNRALCYLKLGQFEEAKLDCDQALQIDGENVKASHRLALAQKGLENCRESGVDPSQVLLSPDSSEAARHLDTKNDTAPPSKGRERRRIQVQEVDGSSDEEPERPAEASATSAPARDGVEDGGSAEPAEKLDVSKPTNAYEFGQVLSTISARKDEEACAHLLAITAPKDLPLLLSNKLEGDTFLLLIQSLKSHLVAKDPSLVYEHLLYLSKAERFKTMLTLINKGQKEQMAQLFDGLSDTQSDGLTAEDVQALRRQYEL

SEQ ID NO: 9516 - protein, 368 aa, Rattus norvegicus
MDPRKVSELRAFVKMCRQDPSVLHTEEMRFLREWVESMGGKVPPATHKAKSEENTKEEKRDKTTEDNIKTEEPSSEESDLEIDNEGVIEADTDAPQEMGDENAEITEAMMDEANEKKGAAIDALNDGELQKAIDLFTDAIKLNPRLAILYAKRASVFVKLQKPNAAIRDCDRAIEINPDSAQPYKWRGKAHRLLGHWEEAARDLALACKLDYDEDASAMLREVQPRAQKIAEHRRKYERKREEREIKERIERVKKAREEHEKAQREEEARRQSGSQFGSFPGGFPGGMPGNFPGGMPGMGGAMPGMAGMPGLNEILSDPEVLAAMQDPEVMVAFQDVAQNPSNMSKYQNNPKVMNLISKLSAKFGGHS

SEQ ID NO: 9517 - protein, 379 aa, Rattus norvegicus
MKKRAPLLLGHIGLLLGLASVLRSHPPPEASSLSTVDPRKGSELQALVKMYRQDPSVLHTEEMCFLREWVESMGVKYHLELSQKKILRKKKRDEMTEDNIKTEEPSSEESDLEIDNEGVIEPDTAAPQEMGDENAEITEEMMDEANENKGAAIDALIDGELQEAIDLFTDTIKLNPRLAILYAKRASVFVKLQKPNAAIRDCDRAIEINPDSAQPYKWRGKAHRLLGCQCNAEREVQPRAQKIAEHQRKYEQKRGEREIKERIERVKKAREEHEKAQREEEARRQSGSQYGSFPGGFPGGMPGNFPGGIPGMGGAMPGMAGMPGLNEILSDPVVLAVMQDPEVLVAFQDVAQNPSNMSKHQNNPKVMNLITKLSAKFGG

SEQ ID NO: 9518 - protein, 150 aa, Rattus norvegicus
MLREVQPRAQKIAEHRRKYERKREEREIKERIERVKKAREEHEKAQREEEARRQSGSQFGSFPGGFPGGMPGNFSGGMPGMGGAMPGMAGMPGLNEILSDPEVLAAMQDPEVMVAFQDVAQNPSNMSNYQNNPKVMNLISKLSAKFGGHS

SEQ ID NO: 9519 - protein, 236 aa, Rattus norvegicus
MDPHKVCELLAFLKMCRQGPRVLHTEGVGGERGGDGWVKYHLLLIELSQKKILKKKKKQSDRGKHKTEESSSEESDLEVDKEVVTEQDTDAPQEMGDKNAEITEEMMNEANEKKGAAIDTLNDGELQKAIDLFTDAIKLNPRLATLCAKRASVFVKLQKPNAAIRDSDRAIEINPDSVQSYEWRGKAQSPRFSEDPEVMVAFQDVAQNPSNMSKYQSNPKVMKLISKLPDKFGGQL

SEQ ID NO: 9520 - protein, 175 aa, Rattus norvegicus
MDPRKVSELRAFVKMCRQDPSVLHTEEMRFLREWVESMGGKVPPATHKAKSEENTKEEKRDKMTEDNIKTEEPSSEESDLEIDNEGVIEADTDAPQEMGDENAQITEAMMDEANEKKGAAIDSLNDGELQKAIDLFTDAIKLNPRLAILYAREPVFSSNYRSQMLPSETVTELLK

SEQ ID NO: 9521 - protein, 325 aa, Rattus norvegicus
MSDQKAAIESSGKEEQGKAAAPSKAASDPKDDHLPREREQCKTKHQHKREGIVDSRKRTQLPPHCVEHGYSEVRQPGSRGRKDFLRSPDKKSRRTHSRPPPEASTMDPLKVSELRAFVKMHRQDPSVLHTKEMHFLREWVESMGEMGDENAEITEEMMDEANEKKGAAIDALNDGELQKANDLFTDTIRLNPRLAILYAKGASVFVKLQKPNAAIRDCDRAIEINPDSAQPYKRRGEAHRLLVMQDPEVLVAFQDVAQNPSNMSKHQNNPKVMNLISKSSAKFGDFFLPRRVHFTKRSEHPVPSTTPGITDTASTLIAKAKSKTD

SEQ ID NO: 9522 - protein, 209 aa, Rattus norvegicus
MKQNKTSEKAMNGTVGAPLEEKRDNRTEENKDRVAISEENNLEIDNEVVIELDTDDPQEMGDENAQITEGMINEANEKTVLSSMLLMMKAREEHERTQREEEEARRQFELQYGSFPVDFPWVMPGNFPGGMPTMGMAMPGMAGMPGLNEILNDPEVLTARKDPENMVNFQDVAQNPPNMSKYQSNPKVMNLISKLSAKFSGQSKCQSPC

SEQ ID NO: 9523 - protein, 844 aa, Rattus norvegicus
MTAKVKDHPPLWGFGTTKTFKIPIEHLDFKYIENCSDVKQLEKILCVLRSGEEGYYPELTEFCEKRLTGLAPRSRALRKDKPAATASSFSAEEWEKIDSDLKVWSVTFFSTAVPFCSILLRVGCQKSKERKTHDTSMTLKNIQEWKILCLLFVAPTAVLAAARFDVEKECSKIDEDYKEKTVINNKAHLSKIETKIDTAGLTEKEKNFLANREKGKGNEAFYSGDYEEAVMYYTRSLSALPTATAYNNRAQAEIKLQRWSSALEDCEKALELEPGNIKALLRRATTYKHQNKFLEAVDDLRKVLQAEPDNDLAKKTLSEVERELKNSEPASELQTKGKRMVIEEVENSGDEGGKGDEDDHEDDAAMGNIQKKLMVRSQGGRRSRRARTPMPGAEQQEGQPETGTASTSDNHDLEERRAADSPGDLKSRGNELFRGGQFAEAAVQYSGAIAQLEPTGSENADELSILYSNRAACYLKEGNCRGCIQDCDRALELQPFAVKPLLRRAMAYETLEQYRSAYVDYITVLKIDCRIQLASDSVNRITRILTELDGPKWRERLPPIPAVPASEPLRVWHPAAETPDQDPCPNSCTPTITDEKMFQALKEEGNQLVKDKNYKDAISKYNECLKINSKACAIYTNRQVLSDMALCYLKLGQFEEAKLDCDKALQIDSKNVKASYRLELAQKGLEVDDSSDEEPERPAEASAVEEGWSAERAGKIEVCKPRNAYEFGQVLSTISARKDEEACAQLLVFTAPQDLPVLLSNKLEGDMLLLIMQSLKSHLVAKDPSLVCKHLLYLSKAERFEMMLALTSKDQKEQMAQLFDDLSDAQADCLTAEDIQALRRQYVL

SEQ ID NO: 9524 - protein, 385 aa, Vitis labrusca
MDDAKISELKQFVNSVKSDPSILHNPSLSFFKSYLQSLGARIPAKPDKCGCGTSDHGEHVDAKKTNLCSEDDKFEDDIVESDIELDDTDVVEPDNDPPQKMGDLSIDVTEENQDAAQMLKSKAMEAISEGKLDEARDNLTEAIMLNPSSAILYATRASVYVKLKKPNAAIRDADAALKINPDSAKGYKIRGMARAMLGLWEEAATDLHVASRLDYDEEIALVLKKVEPNARKIEEHRRKYARLCKERELRKYGHQKQQQQAQPHDPEAAAALKDGQVMAIHSSSELETKLKAASKTSRLAILYFTATWCGPCRYISPVFTSLSGKYPKVVFLKVDIDGAQDVAVSWNVSSVPTFFFIKNGKEIDKVVGVDKSALETKIAQYAGQS

SEQ ID NO: 9525 - protein, 382 aa, Anopheles gambiae str. PEST
GKLKKGVFPYSNNMECPINPAELQKLKVFINLCQMTPQLLNLPQLEFLKSFIESLGGKVPEGQPDLAGMMGGQKAPTGDGGAAPGKPASAEPEPKPSTAAAPESDPESDLELDNEGCVEPDTEPDQPMGVADKEPTEEEFDQANDLRAQAAAAYSEQKYDEAVKLFTEAIQLNPKSALYYAKRGQAYLKLQKPNACIRDCNRALEINPDSATAYKFRGRANRLLGRWEEAAKDLRQACKLDFDEEADEWLKEVTPNAKKIEQHKQKQERRRQEREFRERQERVRMAQEANRKAAEEGAGADGAPNAGGMPFGGGGGFGTEELLNAFRDPEMSAAMSDIFSNPANISKYQNNPKIMSVLMKLYSQGQGGGFPGFPGFPGGAAN

SEQ ID NO: 9526 - protein, 293 aa, Giardia lamblia ATCC 50803
MAEDPSSCSSCSELPDLEEMDLGTNETEQLLIDYRALSLGDPLKSYDDDAFEEAMQLRARALNAYPEKLNTAILLLTDAINLCPCSALMLMSRAQVLFDIGELAAAIRDLKAATERSPTHVGSFRLLGKAYTYLCHYGEALAAYQKAQSLDYSEDVAELIKGLNPKVEAEKREEAEAKRLFEEQQNKASAKAQEKKEQSFADRVYAEVETAKSKGGPLPEAFRVLDNLKSEAQSLSASTAQKLLSNNTTAQAMEDPEFTRKLDEVAKDPAAAAVHMRDPKFAKAFMEIINCFK

SEQ ID NO: 9527 - protein, 246 aa, Oceanobacillus iheyensis HTE831
MDYYNNYPYHQQPQQDQRQNNNLPGDMLNQYFNNQHDDYNQQQFTGAHPESSEGYYEVDESEANNPHGYFNDPGRIFPGGPGGGFPGGFPGGGPDGGPGGGFPGGFPGGGPGGGPGGGFPGGFPGGGPDGGPGGGFPGGIFDGFPGGGFPGGGFPGGGGQGGQQAPTSAPPNFTPEKPAFQTFAVDPGGIRRCLFRFTYIWPERGRGFWYFPTFVGRNSIAGFRWSGFRWVYFGMDLDRIESFQCY

SEQ ID NO: 9528 - protein, 458 aa, Plasmodium falciparum 3D7
MIDEKKVEDLKQFVTLCQENPSILLKPELGFFKKFIESFGGKVSKDKEFFEKSASDESTEEKSDEEEVEEDENDKDDVEEEEEDDVQEDEDEEEDDDERCKDFMVEETIECPPLAPIVDEDLSDEVLEEISNLKIEAAELVQDNKFEEALEKYNKIIAFGKPSAMIYTKRASVLLSLKRPKACIRDCTEALNLNIDSANAYKVRAKAYRHLGKWECAHADIEQGQKIDYDEDLWEMQKLIEEKYKKIYEKRRFKINREEEKKRKKREKELKKRLAARKAAEKAYKANNKRENYDSDSSDSSYSEPDFSGDFPGGMPGGMPGGMPGGMPGGFPGGFPGGMPGGMPGGFPGGMPGGMPGGMPGGMPGGMPGGMPSGMPGGMPSGMPGGMPGGMPGGMPDLNSPEMKELFNNPQFFQMMQNMMSNPQLISKYANDPKYKNLFENLKNSDFGNMMGKENGKN

SEQ ID NO: 9529 - protein, 441 aa, Arabidopsis thaliana
MDSTKLSELKVFIDQCKSDPSLLTTPSLSFFRDYLESLGAKIPTGVHEEDKDTKPRSFVVEESDDDMDETEEVKPKVEEEEEEDEIVESDVELEGDTVEPDNDPPQKMGDSSVEVTDENREAAQEAKGKAMEALSEGNFDEAIEHLTRAITLNPTSAIMYGNRASVYIKLKKPNAAIRDANAALEINPDSAKGYKSRGMARAMLGEWAEAAKDLHLASTIDYDEEISAVLKKVEPNAHKLEEHRRKYDRLRKEREDKKAERDRLRRRAEAQAAYDKAKKEEQSSSSRPSGGGFPGGMPGGFPGGMPGGFPGGMGGMPGGFPGGMGGMGGMPGGFPGGMGGGMPAGMGGGMPGMGGGMPAGMGGGGMPGAGGGMPGGGGMPGGMDFSKILNDPELMTAFSDPEVMAALQDVMKNPANLAKHQANPKVAPVIAKMMGKFAGPQ

SEQ ID NO: 9530 - protein, 627 aa, Arabidopsis thaliana
MRRTWVLAEESSVAIAPLLAEPQSTMFPEMTPECATVMPDLLEKCFATGSVTPTEDCCTDLKSATSTQVTCLCDNYIANPAVSNITGPYSKAITTKCGVFDKYSCDGTSKVISNKNGAFMVINGFWFCVVKEEKKRKEEAAVAMGVLTLLGLINGLIVAHGKTRQQNKPVCKLILFQFQHFGFCSIRFSANKKARSRSKTGDAYPFRNEKVLEQKPYSLPFVPQILEIETRLKTKKTRLLTLRPKPTLFLFLSLSRRSEADFSQKDGFNEAYLGAKIPTGVHEEDKDTKPRSFVVEESDDDMDETEEVKPKVEEEEEEDEIVESDVELEGDTVEPDNDPPQKMGDSSVEVTDENREAAQEAKGKAMEALSEGNFDEAIEHLTRAITLNPTSAIMYGNRASVYIKLKKPNAAIRDANAALEINPDSAKGYKSRGMARAMLGEWAEAAKDLHLASTIDYDEEISAVLKKVEPNAHKLEEHRRKYDRLRKEREDKKAERDRLRRRAEAQAAYDKAKKEEQSSSSRPSGGGFPGGMGGGMPGMGGGMPAGMGGGGMPGAGGGMPGGGGMPGGMDFSKILNDPELMTAFSDPEVMAALQDVMKNPANLAKHQANPKVAPVIAKMMGKFAGPQ

SEQ ID NO: 9531 - protein, 380 aa, Arabidopsis thaliana
MVDAIQVAELRRFVEQLKLNPSILHDPSLVFFKEYLRSLGAQVPKIEKTERDYEDKAETKPSFSPKHDDDDDDIMESDVELDNSDVVEPDNEPPQPMGDPTAEVTDENRDDAQSEKSKAMEAISDGRFDEAIEHLTKAVMLNPTSAILYATRASVFLKVKKPNAAIRDANVALQFNSDSAKGYKSRGMAKAMLGQWEEAAADLHVASKLDYDEEIGTMLKKVEPNAKRIEEHRRKYQRLRKEKELQRAERERRKQQEAQEREAQAALNDGEVISIHSTSELEAKTKAAKKASRLLILYFTATWCGPCRYMSPLYSNLATQHSRFVFLKVDIDKANDVAASWNISSVPTFCFIRDGKEVDKVVGADKGSLEQKIAQHSSSK

SEQ ID NO: 9532 - protein, 380 aa, Arabidopsis thaliana
MVDAIQVAELRRFVEQLKLNPSILHDPSLVFFKEYLRSLGAQVPKIEKTERDYEDKAETKPSFSPKHDDDDDDIMESDVELDNSDVVEPDNEPPQPMGDPTAEVTDENRDDAQSEKSKAMEAISDGRFDEAIEHLTKAVMLNPTSAILYATRASVFLKVKKPNAAIRDANVALQFNSDSAKGYKSRGMAKAMLGQWEEAAADLHVASKLDYDEEIGTMLKKVEPNAKRIEEHRRKYQRLRKEKELQRAERERRKQQEAQEREAQAALNDGEVISIHSTSELEAKTKAAKKASRLLILYFTATWCGPCRYMSPLYSNLATQHSRVVFLKVDIDKANDVAASWNISSVPTFCFIRDGKEVDKVVGADKGSLEQKIAQHSSSK

SEQ ID NO: 9533 - protein, 281 aa, Arabidopsis thaliana
MVDAIQVAELRRFVEQLKLNPSILHDPSLVFFKEYLRSFFVIDARSRLIVYSLGAQVPKIEKTERDYEDKAETKPSFSPKHDDDDDDIMESDVELDNSDVVEPDNEPPQPMGDPTAEVTDENRDDAQSEKSKAMEAISDGRFDEAIEHLTKAVMLNPTSAILYATRASVFLKVKKPNAAIRDANVALQFNSDSAKGYKSRGMAKAMLGQWEEAAADLHVASKLDYDEEIGTMLKKVEPNAKRIEEHRRKYQRLRKEKELQRAERERRKQQEAQVRPTHTHN

SEQ ID NO: 9534 - protein, 219 aa, Arabidopsis thaliana
MESDVELDNSDVVEPDNEPPQPMGDPTAEVTDENRDDAQSEKSKAMEAISDGRFDEAIEHLTKAVMLNPTSAILYATRASVFLKVKKPNAAIRDANVALQFNSDSAKGYKSRGMAKAMLGQWEEAAADLHVASKLDYDEEIGTMLKKVEPNAKRIEEHRRKYQRLRKEKELQRAERERRKQQEAQKSHRPDYLLPEREAQAALNDGKHFIHFFQRFSTS

SEQ ID NO: 9535 - protein, 402 aa, Glycine max
  unsure (1)..(402): unsure at all Xaa locations
MDASKLNQLKHFIEQCKSNPSLLSDPSLSFFRDYLESLGAKLPESAYSESTGVESDEDIEDVTEEQEKVEEEEEDDEIIESDVELEGETCQSDDDPPQKMGDPSVEVTEENRDASQMAKIKAMDAISEGKLEEAIENLTEAILLNPTSAIMYGTRASVYIKMKKPNAAIRDANAALEINPDSAKGYKSRGVARAMLGQWEEAAKDLHVASKLDYDEEINAVLKKVEPNAHKIEEHRRKYERLHKEREDKKKERERQRRRAEAQAAYEKAKKQEQSSSSRNPGGMPGGFPGGMPGGFPGAGGMPGGFPGAGGMPGGFPGXXGGMPGGGFPGAGGMPGGXXPGNIDFSKILSDPELMAAFSDPEVMAALQDVMKNPANFAKHQSNPKVGPVIAKMMTKLGGGPK

SEQ ID NO: 9536 - protein, 408 aa, Glycine max
  unsure (1)..(408): unsure at all Xaa locations
MDASKLNQLKHFIEQCKSNPSLLADPSLSFFRDYLQSLGAKLPESAYSESTGVERDEDIEDLTEEHEKVEEEEEEEEEDDVIIESDVELEGETCEPDDDPPQKMGDPSVEVTEENRDASQMAKIKAMDAISEGKLEEAIENLTEAISLNPTSAIMYGTRASVYIKMKKPNAAIRDANAALEINPDSAKGYKSRGIARAMLGQWEEAAKDLHVASKLDYDEEINAVLKKVEPNAHKIEEHRRKYERLHKEREDKKKERERQRRRAEAQAAYEKAKKQEQSSSSRNPGGMPGGFPGGFPGAGGMPGGFPRXPGGMPGGLPQGLXGMPGGFPRGXGGMPGGFPGAGGMPGNIDFSKILSDPELMASFGDPEIMAALQDVMKNPANFAKHQSNPKVAPVIAKMMTKLGGGPK

SEQ ID NO: 9537 - protein, 375 aa, Glycine max
  unsure (1)..(375): unsure at all Xaa locations
MEEGKLRELKQFIEICKSNPSLLHNPSLSFFKTYLLSLGARIPPQPXXTEPGDFDDKSDPPLSAQNDIVESDIELDNADVVEPDNDPPQKMGDPSAEITEEQRDAAQLAKSKAVDAMSQGNLDEALAQLTEAILLNPQSAILYATRASIYMKLKKPNAAIRDADTALKINPDSAKGYKIRGMSRAMLGLWEEAASDLHVASKLDYDEEISMALKKVEPNALKIEEHRRKYERLRKQKQLKTEAPIKKEQETEAQVQAALSALKDGQVMGIHSSGELEKKLSAASKTSRLAILYFTATWCGPCRFISPIYTSLAEKYPKVVFLKVDIDEARDVAAGWNISSVPTFFFVKNGKEVDSVVGADKSTLESKIAQHAGSL

SEQ ID NO: 9538 - protein, 375 aa, Glycine max; identical to SEQ ID NO: 9537
  unsure (1)..(375): unsure at all Xaa locations

SEQ ID NO: 9539 - protein, 187 aa, Glycine max
  unsure (1)..(187): unsure at all Xaa locations
XGACGSSCSERRSXTLNSVEGGVQRGEAKLLTENWEGAVEDLRSAAQKSQDMNIREAVMRAEKALKISKRKDYYKILGIKKALQWHPDKNVDKREEAEAKFREIAAAYEVLSDEDKRVRYDRGEDLEEMGTGGGGGGGGFNPFGGGGYTYTFEGGFPGGGFGGGFPGGGFGGGFPGGGGGGGFEFHF

SEQ ID NO: 9540 - protein, 272 aa, Glycine max
  unsure (1)..(272): unsure at all Xaa locations
LCYWSEFPHPIQLVLTNMETEKSNVSKAEEFKLLANEAFNARKFSQAIDLYTQAIELNSQNAVYFSNRAFAHLRLEEYGSAIQDATKAIEIDPKYSKGYYRRGAAHLGLGKFKEALKDFQQVKKMCPNDPDATKKLKECEKAVMKLKFEEAIAAPESERRSIAESIDFRTIDVEPQYSGARIEGDAVTLDFVKKMIEDFKNQKFLHKRYAFQIVLQTREMLQALPSLVDIHVPDGKHFTVCGDVHGQYYDLLNIFELNGLPSEENPYLFNGX

SEQ ID NO: 9541 - protein, 201 aa, Glycine max
GKDALDSCRRPLKIDEELVEALVQRGEAKLLTEDWEGAVEDLRSAAQKSQDMNIREAVMRAEKALKISKRKDYYKILGISKTASAADIKRAYKKLALQWHPDKNVDKREEAEAKFREIAAAYEVLSDEDKRVRYDRGEDLEEMGTGGGGGGGGFNPFGGGGYTYTFEGGFPGGGFGGGFPGGGFGGGFPGGGGGGGFEFHF

SEQ ID NO: 9542 - protein, 386 aa, Nicotiana tabacum
MDNEKIQDLKQFVELCKTNPSILQNPSLSFFKNVLESLGARVPPSVKSEKGGGEHSDELDEDIIESDVELDNTDTVEPDNDPPQKMGDYSGEVTEENRDAAQASKAKALDAISEGKLNEAINHLTEAILLNPNSAILYATRGSVFNKLKKPNAAIRDADAALKINSDSAKAYKVRGMARAMLGLWKEAASDLHVASTIDFDEEIAEILKKVEPNARKIEEHCRKYERLRQEKKQRKIERERQRRQAEAKAAYEKDEKKEQQSQHKASDPDSASVLNGGKIIGIHSVSELETKLNVASRASRLAILYFTATWCGPCRFISPVFTSLAEKYPKAAFLKADIDEARDAASRWNVSSVPAFFFIKNGKEVDRVVGADKNLLEKKIVQYAG

SEQ ID NO: 9543 - protein, 261 aa, Oryza sativa
  unsure (1)..(261): unsure at all Xaa locations
MDASRVGELRTFVEACKKDPSLLADPNLAFFRDYLESLGAHLPAGLHQEPKPSSMDDIDDEYDDDDDDDLNMRDATPEPDELDQDIVESDLELEGDIVESDHQDPPQKMGDPSIDVTEENRDASQEAKSKAMEAMSEGKLEEAIDHLTKAILLNPLSAIMYGTRASVFIKMKKPVAAIRDANAALEINPDSAKGYKTRGMAYAMLGKWEEAAHDLHTASNMDYDDEINAVLKKXVEPNAHKIMEHRRKYERLRKEREEKRX

SEQ ID NO: 9544 - protein, 157 aa, Oryza sativa
  unsure (1)..(157): unsure at all Xaa locations
XRLRKEREEKRAERDRFHRRAEAQAAYDKAKRKEQXXSSRSSGGASPRGGFPGGMPGGGFPGGMPGGGFPGGMPGGGFPGGMPGGFPGGAMPGGVPGNVDMSKILNDPDLMAAFGDPEVMAALQDVMNNPASFARHQANPKVGPIIAKMMAKFNGSQ

SEQ ID NO: 9545 - protein, 145 aa, Oryza sativa
  unsure (1)..(145): unsure at all Xaa locations
XRRRQEDRSAVDMATAGASSWEDEIMESDIELEGEAVEPDNDPPQKMGDGAVEVSYEKRDQAQLCKNKGVDAFSEGKLDEAIEHLTEAIVLNPTSAIAYATRAVIFVKSKKPNAAIRDADAALKINPDSAKGYKSRGMAKAMLGX

SEQ ID NO: 9546 - protein, 170 aa, Oryza sativa
  unsure (1)..(170): unsure at all Xaa locations
WTRGAATPASPRLRPSPRRPLIVALQLAGEGKAEQRRRQEDRSKASFEDEIMESDIELEGEAVEPDNDPPQKMGDPSVEVSDEKRDQAQLCKNKGVDAFSEXXAALKINPDSAKGYKSRGMAKAMLGKWEEAAQDLRMAAKLDYDEEIGAELKRGEPMYSKXEEHKEKYX

SEQ ID NO: 9547 - protein, 296 aa, Triticum aestivum
  unsure (1)..(296): unsure at all Xaa locations
XSAKLEINPTKGNKSWSSTAVAAEDEGEGEDDQDMRDPTPEPDELDEEIVESDLELDNDGVVHPDHDDAPQKMGDSSVEVTEESRDASQEAKGQAMEAMSEGKLEEAVVHLTKAILLNPTSAIMYGTRASVFIKMKKPAAAIRDANAALEINPDSAKGYKTRGMANAMLGKWEEAARDLHAASNIDYDDEINAVLKKVEPNAHKIVEHRRKYDRLRKERAEKKAERDRLRRRAEAQAAYEKAKRKEQSSSRSSGGMPGGMPGGFPGMGGGFPGGMGGGGPPGGGGGMPAGMGGGLX

SEQ ID NO: 9548 - protein, 342 aa, Triticum aestivum
  unsure (1)..(342): unsure at all Xaa locations
PFPQPFATDEEEEGEDDQDMRDPTPEPDELDEDIVESDLELDNDGVVHPDHDDAPQKMGDSSVDVTEQSREATQEAKGEAMAPKPEGELEESVVHLSKAILLSPTWAMMYGTSATVFIKMKKPAAPRRYGRPLLEVEYVMPEFLFTCWIVSSVREPGGGAALYRYAASILDXDDEFHAVLIRVEPNAHKIVEHRRKYDRLRKERAEKKAERDRLRRRAEAQAAYEKAKRKEQSSSRSXMGGGMPAGMGGGMPAGMGGGMPAGMGGGMPGMGGGMPGAGGAPGNVDMGDILNDPDLMAAFGDPEVMAALQDVMSNPANLAKHQANPKVGPIIAKMMAKMNGNR

SEQ ID NO: 9549 - protein, 193 aa, Triticum aestivum
  unsure (1)..(193): unsure at all Xaa locations
MDPSKLGELRSFVEACNKDPALLADPALAFFRDYLASLGATLPAAAAGSSAKPAPKARSMDDIDDDDEGDEEGEEDDQDMRDPTPEPGELDEEIVESDLELDDDGVDPDHDDAPQKMGDSSVEVTEESRDASQEAKGQAMEAMSEGKLEEAVEHLTKAILLNPTSAIMYGTRASVFIKMKKPAAAIRDANAAX

SEQ ID NO: 9550 - protein, 345 aa, Triticum aestivum
ILALARLLPGTASTSEDLLRAAAQEGMAKAGENSFEDEIMESDIELGGEVVEPDNDPLQKMGDPSVEVSEEMRDKAQLYKKKGVDALSEGKLDEAVEHLTEAILLNPTSAILYAARAGVFVKMKKPNAAILDAEAALQINPDSAKGYKSRGMAKAMLGKWEDAAHDLHLAAKLDFDEEISSELKKVEPNVHKIEEHKKKYERLRKERDMKKADLERQRRHAEEVSAASAVLKPGDVITIHSSNQLEEIFTAASKLSKLVILYFTATWCGPCRFMGPVYKSLSEQHRNVVFLKLDIDQQGNIAHRWNVSSVPTFSCVINGKEIDKVVGADKTGLERKIAEHGSLKH

SEQ ID NO: 9551 - protein, 329 aa, Triticum aestivum
  unsure (1)..(329): unsure at all Xaa locations
XRDWFFMLDAVSPSKNSFEDEIMESDIELXXGEVVEPDNDPLQKMGDPSVEVSEEMRDKAQLYKKKGVDALSEGKLDEAVEHLTEAILLNPTSAILYAARAGVFVKMKKPNAAILDAEAALQINPDSAKGYKSRGMAKAMLGKWEDAAHDLHLAAKLDFDEEISSELKKVEPNVHKIEEHKKKYERLRKERDMKKADLERQRRHAEEVSAASAVLKPGDVITIHSSNQLEEIFTAASKLSKLVILYFTATWCGPCRFMGPVYKSLSEQHRNVVFLKLDIDQQGNIAHRWNVSSVPTFSCVINGKEIDKVVGADKTGLERKIAQHGSRKH

SEQ ID NO: 9552 - protein, 214 aa, Triticum aestivum
  unsure (1)..(214): unsure at all Xaa locations
XAALKKVEPNAHKIVERPRKYDRLRKERAEKKAERDRLRRRAEAQAAYEKAKRKEQSSSRSSRGMPGGMPGGFPSGGMGGMPGGFPGGMPGGFPGGMGGMPGGMGGAFPGGMGGRLPAXGMGGGMPAGMGGGMPGMGGGRGMGGGMPGAGGAPGNVDMGDILNDPDLMAAFGDPEVMAALQDVMSNPANLAKHQANPKVGPIIAKMMAKMNGNR

SEQ ID NO: 9553 - protein, 253 aa, Triticum aestivum
  unsure (1)..(253): unsure at all Xaa locations
RKAVTARTYPAAPKKRPAALSAARASLLSVVLPSXGTAAVRGSNEQHRPSRPRTCSVQRXQEGMAKAAENSFEDEIMESDIELEGEVVEPDNDPLQKMGDPSVEVSEEMRDKAQLYKKKGVDALSEGKLDEAVEHLTEAILLNPTSAILYAARAGVFVKMKKPNAAILDAEAALQINPDSAKGYKSRGMAKAMLGKWEDAAHDLHLAAKLDFDEEISSELKKVEPNGCELSTHLINWKKYLQPRQNYKWQRDX

SEQ ID NO: 9554 - protein, 152 aa, Triticum aestivum
MDPSKLGELRSFVEACNKDPALLADPALAFFRDYLASLGATLPAAAAKPAPKARSMDDIDDDDDGEEDDQDMRDPTPEPGELDEEIVESDLELDDDGVDPDHDDAPQKMGDSSVEVTEESRDASQEAKGQAMEAMSEGKLEEAIEHLTKAIL

SEQ ID NO: 9555 - protein, 246 aa, Triticum aestivum
  unsure (1)..(246): unsure at all Xaa locations
AGDRETDPTAPTKNGRRLGRVYLGRSTKSKLGHGGRQGSNEEHRPSRPRGPXLRAAASAPRQDKTSEGMAKVGENSFEDEIMESDIELEGEVVEPDNDPLQKMGDPSVEVSEEMRDKAQLYKKKGVDALSEGKLDEAVEHLTEAILLNPTSAILYAARAGVFVKMKKPNAAILDAEAALQINPDSAKGYKSRGMAKAMLGKWEDAAHDLHLAAKLDFDEEISSELKKVGPYPLTSEKFENKYXGSI

SEQ ID NO: 9556 - protein, 318 aa, Triticum aestivum
  unsure (1)..(318): unsure at all Xaa locations
PRDRPDSSDXERPAALRAARASPAVLPRPSXRARRPSGLQRATPALSTSEDLLRAAAPAPRQDKKASEGMAKAGENSFEDEIMESDPXLEGEVVEPDNDPLQKMGDPSVEVSEEMRDKAQLYKKKGVDALSEGKLDEAVDTXTEAILLNPTSAILYAARAGVFVKMKKPNAAILDAEAALQINPDSAKGYKSRGMAKAMLGKWEDAAHDLHLAAKLDFDEEISSELKKVXVITIHSSNQLEEIFTAASKLSKLVILYFTATWCGPCRFMGPVYKSLSEQHRNVVFLKLDIDQQGNIAHRWNVSSVPTFXCVINGKEIX

SEQ ID NO: 9557 - protein, 98 aa, Triticum aestivum
  unsure (1)..(98): unsure at all Xaa locations
PXXGPIACGAPGMGAGMPGMAGARAMGAGMPGAGGAPGNVDMGDILNDPDLMAAFGDPEVMAALQDVMSNPANLAKHQANPKVGPIIAKMMAKMNGNR

SEQ ID NO: 9558 - protein, 86 aa, Triticum aestivum
  unsure (1)..(86): unsure at all Xaa locations
XSVFVNXITALRIVEPNAHLGGGHPRRDDTLSIERSAKKADRDRLRPRAEAQAVDEKANTNEQSSSRSLRGMPAGMPGGLPFPRGX

SEQ ID NO: 9559 - protein, 399 aa, Zea mays
MDASKLRELRDFVEACKKNPSLLADPNLSFFRDYLQSLGAKIPAAAPSFESPKRSSMDDIDDDGDDDDDLDMRDPTPERDELDEEIVESDLELEGEIVQSDHDDPPQKMGNPSVEVTEENRDASQEAKGKAMEAISEGKLEDAIEHLTNAIVLNPLSAIMYGTRASVFIKMKKPAAAIRDANAALEINPDSAKGYKTRGMAYAMLGKWEEAAHDLHTASNMDYDEEINAVLKKVEPNAHKIVEHRRKYERLRKEREEKRAQRDRLRQRAEAQAAYDKAKRKEQSSSRSSGGASPRGFPGGMPGGGFPRGMPGGCFPGGGMPGGFPGGGMPGGFPGGVPGNVDMSKILNDPDLMAAFSDPEVMAALQDVMNNPANFAKHQANPKVGPIIAKMMAKFNGSQ

SEQ ID NO: 9560 - protein, 370 aa, Zea mays
PTRPRDFPSPSPLSTPSLGAKIPAAAPSFESPKRSSMDDIDDDGDDDDDLDMRDPTPERDELDEEIVESDLELEGEIVQSDHDDPPQKMGNPSVEVTEENRDASQEAKGKAMEAISEGKLEDAIEHLTNAIVLNPLSAIMYGTRASVFIKMKKPAAAIRDANAALEINPDSAKGYKTRGMAYAMLGKWEEAAHDLHTASNMDYDEEINAVLKKVEPNAHKIVEHRRKYERLRKEREEKRAQRDRLRQRAEAQAAYDKAKRKEQSSSRSSGGASPRGFPGGMPGGGFPRGMPGGGFPGGGMPGGFPGGVPGNVDMSKILNDPDLMAAFSDPEVMAALQDVMNNPANFAKHQANPKVGPIIAKMMAKFNGSQ

SEQ ID NO: 9561 - protein, 258 aa, Zea mays
  unsure (1)..(258): unsure at all Xaa locations
MDPSKLGELRSFVEACKKDPALLADPALAFFRDYLTSLGATLPASAAAAGKPAPKARSMDDIDDDDDEEEEEDDQDMRDPTPEPDELDEEIVESDLELDNDGVDPDHDDAPQKMGDSSVEVTEESRDASQEAKGQAMEAMSEGKLEEAVEHLTKAILLNPTSAIMYGTRASVFIKMKKPAAAIRDANAALEINPDSAKGYKTRGMANAMLGKXEEAARDLHAASNIDYDDEINAVXQKVEPNAXQIVEHRRKYDRAEX

SEQ ID NO: 9562 - protein, 192 aa, Zea mays
  unsure (1)..(192): unsure at all Xaa locations
XPRVRPRVRPRVRASNMDYDQEINAVLKKVEPNAHKIVEHPRKYERLRKEREEKRAQRDRLRQRAEAQAAYDKAKRKEPSSSRSSGGGGFPXGGMPGGWFPLEGCPVEVSPGGGMPGAGGGMPGGFPGGVPGNVDMSKILNDPDLMAAFSDPEVMAAFQDVMNNPANFAKPQANPKVGPIIAKMMAKFNGSQ

SEQ ID NO: 9563 - protein, 175 aa, Zea mays
  unsure (1)..(175): unsure at all Xaa locations
XRCYVTHSXTMPRGILRHVSFCPQINPDSAKGYKTRGMAYAMLGKWEEAAHDLHTASNMDYDEEINAVLKKVEPNAHKIVEHRRKYERLRKEREEKRAQFDRLRQRAEAQAAYDKGQEEGAMVNWLIRSXDFPKGFLEGMPGGGFPRGMPGGGFPGGGMPGGFPGGGMPGGFPGX

SEQ ID NO: 9564 - protein, 113 aa, Zea mays
  unsure (1)..(113): unsure at all Xaa locations
MDASKLRELRDFVEACKKNPSLLADPNLSFFRDYLQSLGAKIPAXAPSFESPKPPRRSSMDDIDDDGDDDDDLDMRDPTPERDELDEEIVESDLELEGDVQSDHDDPPQKMGN

SEQ ID NO: 9565 - protein, 111 aa, Zea mays
  unsure (1)..(111): unsure at all Xaa locations
INAVLKKVXEPNAHKIMEHRMKYYRLRKEMDENISHRDPLRQRSHAQAAYDKANTNEQSSSRSSGGGFPGRMPPGGFPRRIPSXGFPWGXXMPXGFPGGVPGNVHMSKMLX

SEQ ID NO: 9566 - protein, 96 aa, Zea mays
  unsure (1)..(96): unsure at all Xaa locations
DVKHPTPERDELDDLRFEFDEHHARKIVQSDHDDPPQRIGKATFVVTEENRDASQEAKGKAMEAISEGKLEDAIEHLTNAIVLNPLSAIMYGTRGX

SEQ ID NO: 9567 - protein, 151 aa, Zea mays
  unsure (1)..(151): unsure at all Xaa locations
NGKKRKHREREREAYATVMDAXEVADLKLLVDQCKSNPSIIHTPSLSFFKSYLLSLGAQIPTDPRTDRGGVKMEEPEQHSDDKKPYFSNEEDDDIIESDVELDNNGVVEPDNNPPQKMGDSSVEVTEEKRDAAQSEKLKAMDAISGGKLDX

SEQ ID NO: 9568 - protein, 116 aa, Zea mays
MGLKNMDASKIRELSNLYESGYKSPSFLADHNLSLSAGSPPELGEPKFSTSTPYLKRTSRSIQDDMDDFSDDYDNLDMKNPTPERDKLDEYIAESDLEPQREIDQSDHGNPSQKMG

SEQ ID NO: 9569 - protein, 80 aa, Zea mays
  unsure (1)..(80): unsure at all Xaa locations
XGGMLVGSGGXLPGNVYISKILNDPGLMAAFSDPEVMWALQNVMNHPGVIGKPRTNHKGAPIIGKMMAKFSGXTVRVMSQ

SEQ ID NO: 9570 - protein, 71 aa, Zea mays
  unsure (1)..(71): unsure at all Xaa locations
XYGTRASVFIKMKKPAAAIRAFXEWIQHYCIGKVFNPLSAIMYGTRASVFIQMKKPAAAIRDANAALEINP

SEQ ID NO: 9571 - protein, 253 aa, Zea mays
  unsure (1)..(253): unsure at all Xaa locations
RTITIMDATANSDVQRAEEFKLKANDAFKANKFSQAIELYSQAIELNSSNAVYWANRAFAHTKLEEYGSAVQDATKAIEIDSRYSKGYYRRGAAYLAMGKFKEALKDFQQVKKICPNDPDATRKLKECEKAVQKIRFEEAISAGDDERRSVADSIDYHIIEVEPHYAGPRIDGEEITIEFVKAMLDEFKKQKCIHKRYAYQIVLKTLDLLRSMPSLVDVGXVPNGGHFTVCGDVHGQYFDLLNIFDPHXLPSX

SEQ ID NO: 9572 - protein, 476 aa, Schizosaccharomyces pombe
MTEVETTHMNAGTESQQEPAELAEKQKAIGNAFYKEKKYAEAIKAYTEAIDLGSDSALAIYYSNRAATYMQIGEFELALCDAKQSDRIKPDVPKTQSRIRQAYEGLSILNEAEVYLKNKQAGLALNALDRLQRRIDSTTQPPMSWMYLKAQVYIFQNDMDRAQKIAHDVLRLNPKNVEALVLRGKVMYYSGENAKAITHFQEALKLDPDCTTAKTLFKQVRKLENTKNQGNDLFRQGNYQDAYEKYSEALQIDPDNKETVAKLYMNRATVLLRLKRPEEALSDSDNALAIDSSYLKGLKVRAKAHEALEKWEEAVRDVQSAIELDASDANLRQELRRLQLELKKSKRKDHYKILGVSKEATDIEIKKAYRKLALVYHPDKNAGNLEAEARFKEVGEAYTILSDPESRRRFDSGVDLEPGMEGGAGMDPFDILRAYQAGGSFPGGGFPGGGFPGGSYNSQGFGMGGGFPGFTSFQFS

SEQ ID NO: 9573 - protein, 784 aa, Neurospora crassa
MRFFSKKSSRSSTSTDRVDADTRAGRYESTQPSGTSGPRSPYSHAKRSHSQSPPPPPPPPKSLRPPTQTQQHRLSPTKPVFSSPSGTRSPSAKKTHRSDSQPRRDHSPPTPPPHYNLPPTPPSGSTSRSASARDPTKHSSSSSSHQPRSSTSSRSSFGRHPVDPAAASDSRSRSTSFRRKKVDTDIHPLNLPPEQRKRFSDLSGFSVRNSMEFDNKENGAASAASPPPPPHKQQPQDQQAQQKPTPPAHGSTFTVPMSNGADAAQTNDGEVPTPPPHRSQPTTPVQSPAEQAEGFKNEGNKFFKAKDYNQAIVHYTKAIVLQPESATYLGNRAAAYMSAGKYKDALEDCTRAAELDPNNPKILLRLARIYTSLGRPEEAIATFGRIQPPPSAKDMAPARDMLNYIQAAQKALQEGTAASMVLHPLDMAERLLGIGASRPRKWVLMRGEALLRLGDINSLGEAQNIAMSLLRSNSQDPEALVIRGRALYASGENDKAIQHFRKALSCDPDFKDAIKWLRVVQKLDRMKGEGNDEYKAGRWQKALEKYTAALEIDPSNKGTNSKILQNRALCYTKLKQFDEAIADCERAISLDPSYLKARKTKANALGLAERWEDCVREWKALQELEPEDRTIAQEVKRAELELKKSQRKDYYKILGIDKNADETQIKKAYRKLAIVHHPDKNPGDASAEARFKDISEAYETLSDSQKRARYDSGDDLVDPSDMFGGGMGGGMGGIDPEIIIQMMGGQGGHGFGGGGFGGFGGGGFPGGGRSRGRGGFGGGGFHYQ

SEQ ID NO: 9574 - protein, 423 aa, Plasmodium berghei
MDIEKIEDLKKFVASCEENPSILLKPELSFFKDFIESFGGKIKKDKMGYEKMKSEDSTEEKSDEEEEDEEEEEEEEEDDDPEKLELIKEEAVECPPLAPIIEGELSEEQIEEICKLKEEAVDLVENKKYEEALEKYNKIISFGNPSAMIYTKRASILLNLKRPKACIRDCTEALNLNVDSANAYKIRAKAYRYLGKWEFAHADMEQGQKIDYDENLWDMQKLIQEKYKKIYEKRRYKINKEEEKQRLKREKELKKKLAAKKKAEKMYKENNKRENYDSDSSDSSYSEPDFSGDFPGGMPGGMPGMPGGMGGMGGMPGMPGGFPGMPGGMPGGMPGGMGGMPGMPGGMPGGMGGMPGMPGGMPDLNSPEMKELFNNPQFFQMMQNMMSNPDLINKYASDPKYKNIFENLKNSDLGGMMGEKPKP

SEQ ID NO: 9575 - protein, 376 aa, Plasmodium berghei
MGYEKMKSEDSTEEKSDEEEEDEEEEEEEEDDDPEKLELIKEEAVECPPLAPIIEGELSEEQIEEICKLKEEAVDLVENKKYEEALEKYNKIISFGNPSAMIYTKRASILLNLKRPKACIRDCTEALNLNVDSANAYKIRAKAYRYLGKWEFAHADMEQGQKIDYDENLWDMQKLIQEKYKKIYEKRRYKINKEEEKQRLKREKELKKKLAAKKKAEKMYKENNKRENYDSDSSDSSYSEPDFSGDFPGGMPGGMPGMPGGMGGMGGMPGMPGGFPGMPGGMPGGMPGGMGGMPGMPGGMPGGMGGMPGMPGGMPDLNSPEMKELFNNPQFFQMMQNMMSNPDLINKYASDPKYKNIFENLKNSDLGGMMGEKPKP

SEQ ID NO: 9576 - protein, 248 aa, Plasmodium berghei
MDIEKIEDLKKFVASCEENPSILLKPELSFFKDFIESFGGKIKKDKMGYEKMKSEDSTEEKSDEEEEDEEEEEEEEEDDDPEKLELIKEEAVECPPLAPIIEGELSEEQIEEICKLKEEAVDLVENKKYEEALEKYNKIISFGNPSAMIYTKRASILLNLKRPKACIRDCTEALNLNVDSANAYKIRAKAYRYLGKWEFAHADMEQGQKIDYDENLWDMQKLIQEKYKKIYEKRRYKINKEEEKQRLK

SEQ ID NO: 9577 - protein, 407 aa, Plasmodium chabaudi
MGYEKMKSEDSTEEKTEEEEEEEEEEEEEEEEEEEEEEEQDDPEELELIKEETEECPPLAPIIEGELSEEQIEEICKLKEEAVNLVGDKKYEEALEKYNKIISFGNPSAMIYTKRASILLNLKSRKACIRDCTEALNLNIDSANAYKIRAKAYRYLGKWEFAHADMEQGQKIDYDENLRDMQKLIQEKYKKIYERRRYKINKEEEKQRLKREKGLKKRLAAKKKAEKMYKEKTKRKNYDSDSSDSSYSEPDFSGDFPGGMPGGMPGGMPGGMPGGFPGGFPGGMPGGMPGGFPGGMPGGMPGGMPGGMPGGMPGGMPGGMPGGMPSGMPGGMPGGMPGGMPGGMPDLNSPEMKELFNNPQFFQMMQNMMSNPQLISKYANDPKYKNLFENLKNSDFGNMMGKENGKN

SEQ ID NO: 9578 - protein, 173 aa, Plasmodium falciparum
ELPTTLREEEKKRKKREKELKKRLAARKAAEKAYKANNKRENYDSDSSDSSYSEPDFSGDFPGGMPGGMPGGMPGGMPGGFPGGFPGGMPGGMPGGFPGGMPGGMPGGMPGGMPGGMPGGMPGGMPGGMPGGMPGGMPGGMPGGMPDLNSPEMKELFNNPQFFQMMQNMMSNP

SEQ ID NO: 9579 - protein, 125 aa, Schistosoma japonicum
MKKPSHAIADCNEAISLNPDVAQPYKWRGFANKMIGNWENAYLDLQASLKLDYTDDAYEAVKEVEPKHKRIFEHNMKYMHKRQEKLDREKRERIRKAREERERAEKETEKPDFEMPNNGNISRHG

SEQ ID NO: 9580 - protein, 422 aa, Caenorhabditis elegans
MDHVALLKQFVGMCQANPAVLHAPEFGFFKDYLVSLGATLPPKPADKPEGKCPMSEEPKKETPAAEATPEPEIPKPEEIPFPKIDNEGVIEPEEAVALPMGDSAKEATEDEIEKASEERGKAQEAFSNGDFDTALTHFTAAIEANPGSAMLHAKRANVLLKLKRPVAAIADCDKAISINPDSAQGYKFRGRANRLLGKWVEAKTDLATACKLDYDEAANEWLKEVEPNAHKIQEYNRAVERQKADIELAERRERVRRAQEANKKAAEEEAKRQAEQGDDFDFEGGFPGGMPGGFPGAGGMPGGFPGAPGGGAPGGMGAGIEQLFSDPEIAAAIQDPEVLPALMDIMQNPANMMKYINNPKVAKLISKLQSKGAGMPGMFGGAPPSAGGGCEDADCGGPCPGARGGASVPQQPPRRAPEPDLD

SEQ ID NO: 9581 - protein, 373 aa, Drosophila melanogaster
MQTGDLKKLKYFIDFALENPTFLNMPQLQFVKDFVEKFGGTVPPGQFNGGSAGGKCPFGGVAGAKANEPANAPEDSEDEKSLSDPESDVELDMEGVIEADSDPAQPMGNYSKKATEEEVEQASELRAQAASAYGQQKFDEAIALYTKAIELSPGNALFHAKRGQAFLKLKKPNACIRDCDVALELNSDLAAGYKFRGRARRLLGDFELAAHDLRQACKLDFDEETDEWLKEVTPNAKKIEQHRLKQERRQAERKIKERQRDQRRARKEQEKHNASSGGSSGEFSGGNPGNGNMSDILGAMSDPEVSAAIQDILSNPGNITKYASNPKIYNLIKKIVPGGDVGAAFGQAGEKAGKPSEPKPKKDSADFVDDGLD

SEQ ID NO: 9582 - protein, 377 aa, Drosophila melanogaster
MAFTMQTGDLKKLKYFIDFALENPTFLNMPQLQFVKDFVEKFGGTVPPGQFNGGSAGGKCPFGGVAGAKANEPANAPEDSEDEKSLSDPESDVELDMEGVIEADSDPAQPMGNYSKKATEEEVEQASELRAQAASAYGQQKFDEAIALYTKAIELSPGNALFHAKRGQAFLKLKKPNACIRDCDVALELNSDLAAGYKFRGRARRLLGDFELAAHDLRQACKLDFDEETDEWLKEVTPNAKKIEQHRLKQERRQAERKIKERQRDQRRARKEQEKHNASSGGSSGEFSGGNPGNGNMSDILGAMSDPEVSAAIQDILSNPGNITKYASNPKIYNLIKKIVPGGDVGAAFGQAGEKAGKPSEPKPKKDSADFVDDGLD

SEQ ID NO: 9583 - protein, 447 aa, Plasmodium yoelii yoelii
MDIEKIEDLKKFVASCEEDPSILLKPELSFFKEFIESFGGKIKKDKMGYEKMKSEDSTEEKSDEEDEEDEEDEEEDEDEEDEEEEKDDPEKLELIKEETIECPPLAPIIEGELTEEQIEEICKLKEEAVNLVENNKYDEALEKYNKIISFGNPSAMIYTKRASILLNLKRPKACIRDCTEALNLNVDSANAYKIRAKAYRYLGKWEFAHADMEQGQKIDYDENLWDMQKLIQEKYKKIYEKRRYKINKEEEKQRLKREKELKKKLAAKKKAEKMYKENNKRENYDSDSSDSSYSEPDFSGDFPGGMPGMPGGMGGMPGGMGGMPGMPGMPGGMGGMPGGMPGGMPGGMGGMPGGFPGMPGMPGGMPGGMPGGMPGGMPGGMPGGMPDLNSPEMKELFNNPQFFQMMQNMMSNPDLINKYASDPKYKNIFENLKNSDLGGMMGGKPKP

SEQ ID NO: 9584 - protein, 369 aa, Homo sapiens
MDPRKVNELRAFVKMCKQDPSVLHTEEMRFLREWVESMGGKVPPATQKAKSEENTKEEKPDSKKVEEDLKADEPSSEESDLEIDKEGVIEPDTDAPQEMGDENAEITEEMMDQANDKKVAAIEALNDGELQKAIDLFTDAIKLNPRLAILYAKRASVFVKLQKPNAAIRDCDRAIEINPDSAQPYKWRGKAHRLLGHWEEAAHDLALACKLDYDEDASAMLKEVQPRAQKIAEHRRKYERKREEREIKERIERVKKAREEHERAQREEEARRQSGAQYGSFPGGFPGGMPGNFPGGMPGMGGGMPGMAGMPGLNEILSDPEVLAAMQDPEVMVAFQDVAQNPANMSKYQSNPKVMNLISKLSAKFGGQA

SEQ ID NO: 9585 - protein, 369 aa, Homo sapiens
MDPRKVNELRAFVKMCKQDPSVLYTEEMRFLREWVESIGGKVPPATQKAISEENTKEEKPDSKKVEEDLKADEPSSEESDLEIDKEGVIEPDTDAPQEMGDENAEITEEMMDQANDKKVAAIEALNDGELQKAIDLFTDAIKLNPRLAILYAKRASVFVKLQKPNAAIRDCDRAIEINPDSAQPYKWRGKAHRLLGHWEEAAHDLALACKLDYDEDASAMLKEVQPRAQKIAEHRRKYERKREEREIKERIERVKKAREEHERAQREEEARRQSGAQYGSFPGGFPGGMPGNFPGGMPGMGGGMPGMAGMPGLNEILSDPEVLAAMQDPEVMVAFQDVAQNPANMSKYQSNPKVMNLISKLSAKFGGQA

SEQ ID NO: 9586 - protein, 369 aa, Homo sapiens
MDPCKVNELRAFVKMCKQDPSVLHTEEMRFLREWVESMGGKVPPATQKAKSEENTKEEKPDSKKVEEDLKADEPSTEESDLEIDKEGVIEPDTDAPQEMGDENVEITEEMMDQANDKKVAAIEVLNDGELQKAIDLFTDAIKLNPRLAILYAKRASVFVKLQKPNAAIQDCDRAIEINPDSAQPYKWRGKAHRLLGHWEEAAHDLAFACKLDYDEDASAMLKEVQPRAQKIAEHWRKYERKHEEREIKERIERVKKAQEEQERAQREEEARRQSGAHYGPFPGGFPGGMPGNFPGGMPGMGGDMPGMAGMPGLNEILSDPEALAAMQDPEVMVAFQDVAQNPANMSKYQSNPKVMNLISKLSAKFGGQA

SEQ ID NO: 9587 - protein, 369 aa, Homo sapiens [sequence omitted]

SEQ ID NO: 9588 - protein, 369 aa, Homo sapiens
MDPHKVNELWAFVKMCKQDPSILHTEEMHFLREWVESTVGKVPPATQKAKSEENTKEEKPDSKRVEEDLKADEQSSEKSDLEIDKEGVTEPDTDAPQEMGDENAEIMEEMMDQANDKKVAAIETLNDGELQKATDLFTDAIKLNPRLAILYAKRASVFVKLQKPNAAIRDCDRAIEINPDSAQPYKWRGKAHRLLGHWEEAAHDLALACKLDYDEDVSAMLKEVQPRAQKIEEHRRKYERKREEREIKERIERVKKAREKHERAQREEEARRQSGAQYGSFLGGFPGGMPANFPRGMPGMGGGMPGMAGMPGLNEILSDPEVLAAMQDPEVLVAFQDVAQNPANMSKYQSNPKVMNLISKLSVKFGGQV

SEQ ID NO: 9589 - protein, 240 aa, Homo sapiens
MDPRKVNELRAFVKMCKKDPSILHTQEMRFLREWVESMGGTATQKAKSEENTKEEKPDSKVEEDLKADEPSSEESDLEIDKEGVIEPDTDAPQEMGDENAEITEEVMDQANDKKVAAIEALNDGELQKAIDLFTDAIKLNPRLAILYAKRASVFVKLQKPNAAIRDCDRAIEINPDSAQPYKRRGKAHRLLGHWEEAAHDLALACKFDYDEDASAMLKEVQPRAQKIAEHQRKYERKREE

SEQ ID NO: 9590 - protein, 316 aa, Homo sapiens
MDPRKVNELRAFVKTCKQDPSVPHAEKMHFLRERVESMAGKVPPATQKAKSEENTKEEKPDSKKESDLEIDNEGVVEPGTDAPQEMGDENAEITEEMMDQANEKVAAIEALNDGELQTAIDLFPDAIKLNPHLAILYAKTAAQPYKCREKAHRLSLQLDYDEDASAMLKEVQPGAQKIAEHRRKYERKREEQEIKERIERVKKAQEEHERAQREEEARRQSGAQYCSFPSGFPAGVPGNCPRRMSGMGGGMAGMARIPGLNEILSDPEILAAMQDPEIMLAFQDVAQDPANMSKYQRNTKTMHLISRLSAKFGGQA

SEQ ID NO: 9591 - protein, 400 aa, Homo sapiens
MIQQSILKVGTSVRQKTTVSRKTSVGVGALSGGIKKAIIPKKAKSDENTKEEKPGSKKVEEDLKADKPSSEESDLEIDNEGVIEPDTDAPQEMRDENAEITEEMMDQANDKKVAAIEALNDGELQKAIDVFTDAIKLNPHLAILYAKRASVFVKLQKPNAAIQHCDRAIEINPDLAQPYKWRGKAHRLPGHWKGAAHDLALVCKLEYDKDASATLKEVQFRAQKIAEHRRKYEQKCEGMPGIGGGIPGVARMPGLNEILSDPEVLTAMQDPEVMVAFQDVAQNPANISKYQSNPKILALKTVMNISLSPSLQMHNSQTRTPAPLRVSSCTTLTLERRQLLRVLQLHDPPTARTSNYNISSSPGFQQQDTHTRKTPAPPGFYSCTTLKLKKHQLLSGSPAA

SEQ ID NO: 9592 - protein, 146 aa, Homo sapiens
MGGENAEITEEMMDQANDKKVAAIEALNDGELQKAIDLFTDAIKLNPRLAVLYAKRASVFVKLQKPNAAIRDCDRAIEINPDSAQPHKWRGKAHRLLGHWEEAAHDLALACKLDYDEDASVMLKEVQLRAQKIAEHQRKYEQKREE

SEQ ID NO: 9593 - protein, 142 aa, Homo sapiens
MQKIAEHQKKCERKHEEREIKERTERVKKAPEEHERAQIEEEPRGQSGVQYGSFPGGFPGGMPDNFHGGMLGMGGAISGVAGMPGLNEILSDPEVLAAKQDPKVIVAFQHVVQNPANMSKYQSNPKVMNLISKLSAKFGCQA

SEQ ID NO: 9594 - protein, 90 aa, Homo sapiens
MMNQANDKKVAAIEALSDGELQKAIDLFTDAIRLNPCLAILYAKRASHWEEAAHDLAFACKLDYDEDASAMLKEVQPRAQKIAEHQRKYE

SEQ ID NO: 9595 - protein, 184 aa, Homo sapiens
MVSRLEEHRTGWGSPQANFRVERHAKKERKVGLCHISGFYPNALQIEVNTLRAFVKMCKQDLSVLHTKEMCFLREWVESMGSKVPPASQKAKSEENTKEEKSGSKNVEEDLKADEPSSKESYLEINNEGVIEPDTDAPQEMGDENAEITEEMMDQANDKKVAAVEALNDGELQKAIDLSQIPSS

SEQ ID NO: 9596 - protein, 115 aa, Homo sapiens
MGGKVPPATQKAKSEENTKEEKPESKKVEEDLKAYETSNTDAPQEMADENAEITEEMMDQANDKKLAAVEALNDGELQKAIDLFTDAIKLNLHLAILYAKRASVFVKLQKPNAAI

SEQ ID NO: 9597 - protein, 122 aa, Homo sapiens
MDPPQSERAGPCENVKLNLKKIPRGKKKPDSKKVEENLKADKPSSEESDLEVDNEWSHEINPDSAQPYKWRGKAHRRLGHWEDVAHDLALACKLDYDEDASTMLKEVQPRAQEIAEESMSET

SEQ ID NO: 9598 - protein, 92 aa, Homo sapiens
MDPCKVNELPAFMKIYTDAPQEMGNENAEIAEEMMDQVNDKKVDATEALTDDELQKAIDPFTVSIKLNPPLAVLYTKRASVFVKLQKPNPAI

SEQ ID NO: 9599 - protein, 926 aa, Homo sapiens
MTTKDYPSLWGFGTTKTFKIPIEHLDFKYIEKCSDVKHLEKILCVLRSGEEGYYPELTEFCEKHLQALAPESRALRKDKPAATAASFTAEEWEKIDGDIKSWVSEIKKEEDKMHFHETETFPAMKDNLPPVRGSNSCLHVGKEKYSKRPTKKKTPRDYAEWDKFDVEKECLKIDEDYKEKTVIDKSHLSKIETRIDTAGLTEKEKDFLATREKEKGNEAFNSGDYEEAVMYYTRSISALPTVVAYNNRAQAEIKLQNWNSAFQDCEKVLELEPGNVKALLRRATTYKHQNKLREATEDLSKVLDVEPDNDLAKKTLSEVERDLKNSEAASETQTKGKRMVIQEIENSEDEEGKSGRKHEDGGGDKKPAEPAGAARAAQPCVMGNIQKKLTGKAEGGKRPARGAPQRGQTPEAGADKRSPRRASAAAAAGGGATGHPGGGQGAENPAGLKSQGNELFRSGQFAEAAGKYSAAIALLEPAGSEIADDLSILYSNRAACYLKEGNCSGCIQDCNRALELHPFSMKPLLRRAMAYETLEQYGKAYVDYKTVLQIDCGLQLANDSVNRLSRILMELDGPNWREKLSPIPAVPASVPLQAWHPAKEMISKQAGDSSSHRQQGITDEKTFKALKEEGNQCVNDKNYKDALSKYSECLKINNKECAIYTNRALCYLKLCQFEEAKQDCDQALQLADGNVKAFYRRALAHKGLKNYQKSLIDLNKVILLDPSIIEAKMELEEVTRLLNLKDKTAPFNKEKERRKIEIQEVNEGKEEPGRPAGEVSMGCLASEKGGKSSRSPEDPEKLPIAKPNNAYEFGQIINALSTRKDKEACAHLLAITAPKDLPMFLSNKLEGDTFLLLIQSLKNNLIEKDPSLVYQHLLYLSKAERFKMMLTLISKGQKELIEQLFEDLSDTPNNHFTLEDIQALKRQYEL

SEQ ID NO: 9600 - protein, 926 aa, Homo sapiens [sequence omitted]

SEQ ID NO: 9601 - protein, 304 aa, Mus musculus
MKGKEEKEGGARLGTGGGGTPDKSPSAQELKEQGNRLFVGRKYPEAAACYGRAITRNPLVAVYYTNRALCYLKMQQPEQALADCRRALELDGQSVKAHFFLGQCQLEMESYDEAIANLQRAYSLAKEQRLNFGDDIPSALRIAKKKRWNSIEERRIHQESELHSYLTRLIAAERERELEECQRNHEGHEDDGHIRAQQACIEAKHDKYMADMDELFSQVDEKRKKRDIPDYLCGKISFELMREPCITPSGITYDRKDIEEHLQRVGHFDPVTRSPLTQEQLIPNLAMKEVIDAFISENGWVEDY

SEQ ID NO: 9602 - protein, 304 aa, Mus musculus
MKGKEEKEGGARLGTGGGGSPDKSPSAQELKEQGNRLFVGRKYPEAAACYGRAITRNPLVAVYYTNRALCYLKMQQPEQALADCRRALELDGQSVKAHFFLGQCQLEMESYDEAIANLQRAYSLAKEQRLNFGDDIPSALRIAKKKRWNSIEERRIHQESELHSYLTRLIAAERERELEECQRNHEGHEDDGHIRAQQACIEAKHDKYMADMDELFSQVDEKRKKRDIPDYLCGKISFELMREPCITPSGITYDRKDIEEHLQRVGHFDPVTRSPLTQEQLIPNLAMKEVIDAFISENGWVEDY

SEQ ID NO: 9603 - protein, 304 aa, Rattus norvegicus
MKGKEEKEGGARLGTGGGGSPDKSPSAQELKEQGNRLFVGRKYPEAAACYGRAITRNPLVAVYYTNRALCYLKMQQPEQALADCRRALELDGQSVKAHFFLGQCQLEMESYDEAIANLQRAYSLAKEQRLNFGDDIPSALRIAKKKRWNSIEERRIHQESELHSYLTRLIAAERERELEECQRNHEGDEDDGHIRAQQACIEAKHDKYMADMNELFSQVDEKRKKRDIPDYLCGKISFELMREPCITPSGITYDRKDIEEHLQRVGHFDPVTRSPLTQEQLIPNLAMKEVIDAFISENGWVEDY

SEQ ID NO: 9604 - protein, 331 aa, Anopheles gambiae str. PEST
TRRPKSIRPQSGFLRESCARKKRSKQKETVPLCGPPKPAYIPTMSKHMYSTANLSDVELKDQGNRLFSARKYDDAVNLYTKAIIKNSTNATYFTNRALCHIKMKRWETACVDCRRALDMDPNLVKGHFFLGLSLMELESFDEAIKHLQRAHDLAKEQKLNFGDDIASQLRLARKKRWNIQEEKRICQEIELQSYLNRLITEDMENRMAKLKVDDTINEETLKEKAMEIEREGENHMTELNNLFAKVDDRRRKREVPDYLCGKISFELLVDPVITPSGMTYERKDIEEHLQRVGHFDPVTRVKLTQDQLISNYSMKEVVDAFLQENEWALDY

SEQ ID NO: 9605 - protein, 278 aa, Arabidopsis thaliana
MVTGVASAMAERLKEDGNNCFKKERFGAAIDAYTEAIALSPNVPAYWTNRALCHMKRKDWTKVEEDCRKAIQLVHNSVKAHYMLGLALLQKKEFTNGVKELQRALDLGRCSNPTGYMVEEIWEELSKAKYMEWELVSAMRSWELNSLKETCEAALNQQRALDMSRTEESSDEAYTAHTERLKALERVFKKAAEEDKPTEVPDYLCCNITLEIFRDPVISPSGVTYERAAILEHLKKVGKFDPITREKIDPANLVPNLAIKEAVAAYLEKHVWAYKMGC

SEQ ID NO: 9606 - protein, 315 aa, Glycine max
  unsure (1)..(315): unsure at all Xaa locations
MGPNAAAAKQAEKLRIDGNTYFKKDRFGAAIDAYTEAITLCPNVPVYWTNRALCHLKRNDWERVEEDSRKAIQLDSNSVKAHYMLGLALLQRQESAKGIKELEKALDLGRGANPKGYMVEEIWQELAKAKYLEWERSSSKRSWELQSLKEACESALKEKHFLDYSQMEGFVDDATTSHSEQLEALERVFNTAAEADIPTEVPDYLCCRITLDIFHDPVITPSGLTYERAVILEHLQKVGKFDPITREPLDPSQLVPNLAIKEAVEAFLDKHGWAYKIDXRKITLQINNVLVGLSVEQCSRMLCSASVAKVVCFNC

SEQ ID NO: 9607 - protein, 108 aa, Glycine max
MGPNAAAAKQAEKLRIDGNTYFKKDRFGAAIDAYTEAITLCPNVPVYWTNRALCHLKRNDWERVEEDSRNAIQLDSNSVKAHYILWLALLQRQQSVTGITELTKPFDL

SEQ ID NO: 9608 - protein, 586 aa, Oryza sativa (japonica cultivar-group)
MASSTAANLWVLLGLGIAGVLLAAKRLRRPARPDNGAFIARLELLPPPQPPPPQARHPLTGLCFAIADAFHVTGYITSFGSLEWAKTHDAATQTSLVVSSLVDGGAMCVGKTVIDEMAFSIHGENKHFGTPTNPAAPDRVPGGCSSGSAVAVAAGIVDFSLGIDTIGGVRVPGSYCGVLAFRPSHAVVPNNGVIPVAPSLDAIGWFARDPSVLRRVGHLLLRLPYADIRQPRHFYIADDCFEMSKVHARRLTQVVTKSVEKLFGRQVLGHVNLENYLASRIPSLRNNSNGHGDSKFSSLLALSRAMQFLHKHEFKDQHMEWINSVKPAVDACIVGNLSDDGESTINNSQDARKEVRAALGALLKDDGILVIPTVLGCPPKLNARELSSQDYNVQTSCLTSLASMSGCCQVTVPLGTHDKCPVSVSLIARHGGDRFLLDTIQTIYATIQEQVDALAKSNVSSKQAMSEEAAEAAKEKGNIAFKEKQWQKAINFYTEAIKLNNKVATYYSNRAAAFLELASYRQAEADCTSAIDIDPKIVKAYLRRGTAREMLGYYKEAVDDFSHALVLEPMNKTAGVAINRLKKLFP

SEQ ID NO: 9609 - protein, 556 aa, Lycopersicon esculentum
MPGMEAENSNASRAEELKQLANEAFKGHKYSQAIDLYTQAIELNGENAVYYANRAFAHTKLEEYGSAIQDGTRAIEIDPRYSKGYYRRGAAYLAMGKFKDALKDFQQVKKLCPNDPDATKKLKECEKAVMKLKFEEAISVPESQRRSVADSIDYRSVGSGPGSSYVPTKTTAVSAAAALMGVLVVYMGTKAATMVAAAASAALLVVLITFLWGRCSDGFFTKSRTLELEVEPQYAGARIEGDVVTLDFVKKMLDDFKNQKNLHKRYAYQIVLQTREMLRALPSLVDIVVPEGKHFTVCGDVHGQFYDLLNIFELNGLPSEDNPYLFNGDFVDRGSFSLEVILTLFAFKCMCPSAIHLARGNHESKSMNKIYGFEGEVRSKLSEIFVELFAEVFCCLPLAHVINEKVFVVHGGLFSVDGVKLSDIRAIDRFCEPPEEGLMCELLWSDPQPQPGRGPSKRGVGLSFGGDVTKRFLQENNLDLVVRSHEVKDEGYEIEHDGKLITVFSAPNYCDQMGNKGAFIRFEAPDMKPNIVTFSAVPHPDVKPMAYANNFLRMFS

SEQ ID NO: 9610 - protein, 485 aa, Lycopersicon esculentum
MPGMEAENSNASRAEELKQLANEAFKGHKYSQAIDLYTQAIELNGENAVYYANRAFAHTKLEEYGSAIQDGTRAIEIDPRYSKGYYRRGAAYLAMGKFKDALKDFQQVKKLCPNDPDATKKLKECEKAVMKLKFEEAISVPESQRRSVADSIDYRSVEVEPQYAGARIEGDVVTLDFVKKMLDDFKNQKNLHKRYAYQIVLQTREMLRALPSLVDIVVPEGKHFTVCGDVHGQFYDLLNIFELNGLPSEDNPYLFNGDFVDRGSFSLEVILTLFAFKCMCPSAIHLARGNHESKSMNKIYGFEGEVRSKLSEIFVELFAEVFCCLPLAHVINEKVFVVHGGLFSVDGVKLSDIRAIDRFCEPPEEGLMCELLWSDPQPQPGRGPSKRGVGLSFGGDVTKRFLQENNLDLVVRSHEVKDEGYEIEHDGKLITVFSAPNYCDQMGNKGAFIRFEAPDMKPNIVTFSAVPHPDVKPMAYANNFLRMFS

SEQ ID NO: 9611 - protein, 378 aa, Triticum aestivum
  unsure (1)..(378): unsure at all Xaa locations
TNSKGEEASRRTRRFFQTQISPHSPTHPPTPFLPRRHEARAAGDVAGGGQRIGIEAAXAELLKQEGNTCFKKDRISAAIDAYTGAIALCQNVAVYWTNRALCYKKRNEWAKVEEDCRMAIHYDSHSVKAHYMLGLALLNRQELAGGIKALEKSLELGRGAHPASYMVEEIWQELSKAKYIEWEGLSKMRSSQLHKLNATCKEALKSYNSLDNPTGDMSEEHLNELDEVFRKAAKADTPTEVPDHLCCKITLDIFRDPVITPSGITYERAVILDHLNRVGKFDPVTREPLEPFQLISNLAVKEAVDVFLKEHGWAYKIRXLICTIELVGYTLIGRLAIHSSVVLLTSRKLYILSSVVKLDWIIHRTCHGYMCKEIDMWV

SEQ ID NO: 9612 - protein, 296 aa, Zea mays
  unsure (1)..(296): unsure at all Xaa locations
MAPAAPYGGAESQRQADLLKQEGNAFFRKERLSAAIDAYTGAITLCPNVAVYWTNRALCYRKRNEWTRVEEDCRTAIQLDSQSVKAHYMLGLSLVNSQRLSEGIKSLEKSLELGRGAHPASYMVEEIWQELSKAKYIEWESLSRDRTCQLQKLKCICSVSFRVACKEALTSYNSLDNPAAGAPVEQLNELEEVFKKAAKTDTPAEVPDHLCCKITLDIFRDPVITPSGITYERAVLLDHLQTVGRFDPVTREALEPHQLVPNLAIKEAVHAFLSEHGWAYKIRXSLWNTGFGYCRM

SEQ ID NO: 9613 - protein, 174 aa, Leishmania donovani
MESMGKYDEAQKAFQKALQLSPGNEEVMDKLHTVNTKVRERNEKTKSQQCKTPEEAKQLGNSFFKDGKYDQAAEFYTRAIELQTEPVKEKAVYYTNRAACHQQTHMYSLMVDDCNAAIEIDPANVKAYLRRGIAYEGMEKWKLALEDYTKAQSISPGVAGASQGILRCQRVLRN

SEQ ID NO: 9614 - protein, 961 aa, Plasmodium falciparum
MENKDNKRRGFLKNWNINYLSTNFNNLIKHNENTHNTKHDQKNEHVDDNKTNKIYDINENIKFIKEKEIMRENNKIDVNNNININLSSSLSNKGYYDSINHNVKDCINVMNDSNTTTTTTTTTTTTNNNNNNNNNNNNNNKPTSYLDFCEAWSKFKFRNLASHANDQINKDKQSYNHGESQGNIQNIGLGNKNSCDNKGLLNCNMAHNNSNINYLNNHNNINNCINRDNNNIDHNKRNNYHNNNNNNKNNCSSNNSSNNNSSSNNNNNNGNNSDNHNNDNGNHFNRHNNFNNNHMNNYNGHNNNNNDDDDNGDHSDNNNEKNNKFYKNNDGSSVSSSSSVSSSSSFISNDSYAAKNPKTNNEQCKRKKKKKKEREKENNNNPPDMDTYNSNISVMNNMNSMNNMNNNMESNMRTDVNVHHNNMNRRNSFNNSSNLQHTYNNNYNQYDHKNSNDSYTRNERRNSLNNYNFRKPSLNPNNEFYNNNDYSSDLINSHPINYSNVPESNYNMNHPIHHMNSASHGMSNNTSHGMSNNTSHGMSNNTSHGMSNNTSHGMSNNTSHGMSNNTSHGMSNNTSHSMNNTSHSMNNTSHSMNNPSHHINHSSHNVMNKNCGNKRNYTSNNSGDYNESVKSNNYYNHAGNNTNYYNSNKNSISSENLNKQIKKGAEGGDADNVRYSIDKTEEVEKKNPNMINIEMLNPEDRKKEAEKYKVLGNQSYKLGYFESAIDYYTKAIQYDNTNHVYYTNRALCYKKQKLWKLANMDARQALNLEEESVKAHFILGLTLLHLNSLEEGLKKLTKAKTLSSYLKDSNESEINRYIMQAKKLIYLRDEQNKQLSYTELQSFFIDKINLLNQIGYITNEEKSLRIQQTEGIFKELLDSFQKKQVPDYLCCKISMCLMNEPVITPSGMTYDKIFLYEHVKHNGSFDPVSREQFSIREVIPNYAIKEATEHFLKANPWAFEE

SEQ ID NO: 9615 - protein, 266 aa, Caenorhabditis elegans
MSSGAEQHNTNGKKCYMNKRYDDAVDHYSKAIKVNPLPKYYQNRAMCYFQLNNLKMTEEDCKRALELSPNEVKPLYFLGNVFLQSKKYSEAISCLSKALYHNAVITNAPDIENALKRARHQKYEEEESKRIVQDVEFHTYLESLIEKDRQENSENPEELQRADMAKKRLTELTLATQEKRQNREVPEMLCGKITLELMKEPVIVPSGITYDREEIVQHLRRIGHFDPVTRKPLTENEIIPNYALKEVIEKFLDDNPWAKYEPGGMV

SEQ ID NO: 9616 - protein, 272 aa, Caenorhabditis elegans
MSSGAEQHNTNGKKCYMNKRYDDAVDHYSKAIKVNPLPKYYQNRAMCYFQLNNLKMTEEDCKRALELSPNEVKPLYFLGNVFLQSKKYSEAISCLSKALYHNAVITNAPDIENALKRARHQKYEEEESKRIVQDVEFHTYLESLIEKDRQENSENPEELQRADMAKKRLTELTLATQEKRQNREVPEMLCGKITLELMKEPVIVPSGITYDREEIVQHLRRIGHFDPVTRKPLTENEIIPNYALKEVGNLYRVIEKFLDDNPWAKYEPGGMV

SEQ ID NO: 9617 - protein, 289 aa, Drosophila melanogaster
MTTKHIYSTTNLSDLQLKEQGNCLFAARKYDDAINCYSKAIIKNPTNATYFTNRALCNLKLKRWELCCQDSRRALDIDGNLLKGHFFLGQGLMEIDNFDEAIKHLQRAYDLSKEQKQNFGDDITLQLRLARKKRWNVMEEKRIQQEIELQSYLNGLIKGDMESRLANLKLNGNVHDEQLKDKQQEIEQECDDHIKELNNIFSKVDERRKKREVPDFLCGKISFEILTDPVITPSGITYERKDIEEHLQRVGHFDPVTRVKLTQDQLIPNFSMKEVVDSFIAENEWSLDY

SEQ ID NO: 9618 - protein, 919 aa, Plasmodium yoelii yoelii
MDNNREVKKKSFLKNWNINYLSNNFNKFIKSNSNNKNENNSAIKTGISSGTVDNTSKNDYNLMNNNIHITNIREMSNININNIKNIRPDYYGKGYSTAENGNNNTCIKNHKYNNYNSNSNDTSINFIHTNDRGKTHMNFSDTYNKINFQNFHQNNISSNVETNVEDNKNSFSKSSFNDMNSIKENSNSYNKRVYKNLHNCNNNNNSDTMNTQYNINYNKCTIDGKNNIKIESTKYHNNSNTESTNNNVQSRNKYDINNEYCMNKNRLINNSECKNNTINLNDQGNKNNDTSNNNDQISFKNNRSYSVSSMVSSNSSIPSSAYSGQPFNYSQIDRINQKKHKISRIIGSNDNNVNKRNSSVSHNINNNSNDLTYNGHENSHFDWNKNEKNNTLSEEQASKNAQTENYNIYRSELNKNISTYTSNDRNATTGFTQNCINTNSSTNTSSETRQNYYESTLNNNRNSGYGGHDDYRRNCKDARYSINYSSVNTNTENKRTSIFSNNNNNSNNNNKGDSENFTDSRRGLNQYSQEIDTKYSRFSNNNAYSENNNNYMRMSTDRQGNSGREEGGDDRYDRRDRYEKRGERSNGNNGQGNEGGDSDGGSGDNNGQGNREGDSDGDSDEDTNRKNNKNRRKESSMDDEVEKKNNNSLNLDMLNPEERKREAEKYKVLGNQSYKLGYFESAIDYYTKAIQYDNTNHVYFTNRALCYKKQKLWKLANIDARQALNLEEESVKAHFILGLTLLHLNSLEEGLKKLTKAKTLSSYLKDSNESEINRYILQAKKLIYLRDEQTKQLKYAELQSFFIEKINLLNQMGYITNEEKFLRTEQTEDLFKEILGTFQKKQIPDYLCCKISMCLMNEPVITPSGMTYDKIFLYEHVKHNGSFDPVSREQFSIREVIPNYAIKEATDNFLKTNPWAFEE

SEQ ID NO: 9619 - protein, 303 aa, Homo sapiens
MKGKEEKEGGARLGAGGGSPEKSPSAQELKEQGNRLFVGRKYPEAAACYGRAITRNPLVAVYYTNRALCYLKMQQHEQALADCRRALELDGQSVKAHFFLGQCQLEMESYDEAIANLQRAYSLAKEQRLNFGDDIPSALRIAKKKRWNSIEERRIHQESELHSYLSRLIAAERERELEECQRNHEGDEDDSHVRAQQACIEAKHDKYMADMDELFSQVDEKRKKRDIPDYLCGKISFELMREPCITPSGITYDRKDIEEHLQRVGHFDPVTRSPLTQEQLIPNLAMKEVIDAFISENGWVEDY

SEQ ID NO: 9620 - protein, 303 aa, Homo sapiens [sequence omitted]

SEQ ID NO: 9621 - protein, 303 aa, Homo sapiens
MKGKEEKEGGARLGAGGGSPEKSPSAQELKEQGNRLFVGRKYPEAAACYGRAITRNPLVAVYYTNRALCYLKMQQHEQALADCRRALELDGQSVKAHFFLGQCQLEMESYDEAIANLQRAYSLAKEQRLNFGDDIPSALRIAKKKRWNSIEERRIHQESELHSYLSRLIAAERERELEECQRNHEGDEDDSHVRAQQACIEAKHDKYMADMDELFSQVDEKRKKRDIPDYLCGKISFELMREPCITPSGITYDRKDIEEHLQRVGHFDPVTGSPLTQEQFIPNLAMKEVIDAFISENGWVEDY

SEQ ID NO: 9622 - protein, 231 aa, Homo sapiens
MQQHEQALADCRRALELDGQSVKAHFFLGQCQLEMESYDEAIANLQRAYSLAKEQRLNFGDDIPSALRIAKKKRWNSIEERRIHQESELHSYLSRLIAAERERELEECQRNHEGDEDDSHVRAQQACIEAKHDKYMADMDELFSQVDEKRKKRDIPDYLCGKISFELMREPCITPSGITYDRKDIEEHLQRVGHFDPVTRSPLTQEQLIPNLAMKEVIDAFISENGWVEDY

SEQ ID NO: 9623 - protein, 358 aa, Homo sapiens
MDELFSQVDEKRKKYDIPKYLCCKISFELMRELCITPTGISYDRKDIEEHLQRVDHFDPVTWSPLTQKQFIPNLAMKEAGEKAWGSLSHGSPILIPVLVETQSNLRQHPFPPELPFPKLLLDVQELPYPVSSDERRQKLEMPDWHGSSQEGPTSWISNWSAPHSKTMQVPKCDDLRHTTTEISEMNRNISWLQAEIEGLKGQKASLEAAVADAEQRGELAIKDANAKLSELEAALQRAKQDMAWQLHEYQELMNIKLALDMEIATYRKLLEGKDSRLESGMQNMSIHTKTTSSYAGGLSSAYGGLTSPSLSYGLGSSFGSGVGSSSFSHSSSTRAVVVKKIQTRNGKLVSESSDVLRK

SEQ ID NO: 9624 - protein, 276 aa, Oryza sativa
  unsure (1)..(276): unsure at all Xaa locations
MSPAADSAASKRQAELLKQEGNAFFKKDRISAAIDAYTGAIALCPKVAVYWTNRALCYKRRNEWVRAEEDCRTAIQLDSHSVKAHYMLGLALLNKDELAEGIKELEKSLELGRGAHPASYMVEEIWQELSKAKYIEWENLSSERVRQLHKLKEACKEALRNYNSLDNPPAYVPEEQLNELEEVFRNARKSDIPTEVPDHLCCKITLDIFRDPVITPSGITYERAVILDHLHRVGKFDPVTRETLEPHQLVPNLAIKEAVHAFLSEHGWAYRMRXLL

SEQ ID NO: 9625 - protein, 537 aa, Aspergillus awamori
MAPLSKALSVFMLMGITYAFNYDQPYRGQYHFSPQKNWMNDPNGLLYHNGTYHLFFQYNPGGIEWGNISWGHAISEDLTHWEEKPVALLARGFGSDVTEMYFSGSAVADVNNTSGFGKDGKTPLVAMYTSYYPVAQTLPSGQTVQEDQQSQSIAYSLDDGLTWTTYDAANPVIPNPPSPYEAEYQNFRDPFVFWHDESQKWVVVTSIAELHKLAIYTSDNLKDWKLVSEFGPYNAQGGVWECPGLVKLPLDSGNSTKWVITSGLNPGGPPGTVGSGTQYFVGEFDGTTFTPDADTVYPGNSTANWMDWGPDFYAAAGYNGLSLNDHVHIGWMNNWQYGANIPTYPWRSAMAIPRHMALKTIGSKATLVQQPQEAWSSISNKRPIYSRTFKTLSEGSTNTTTTGETFKVDLSFSAKSKASTFAIALRASANFTEQTLVGYDFAKQQIFLDRTHSGDVSFDETFASVYHGPLTPDSTGVVKLSIFVDRSSVEVFGGQGETTLTAQIFPSSDAVHARLASTGGTTEDVRADIYKIASTWN

SEQ ID NO: 9626 - protein, 618 aa, Poa secunda
MDSRGITPGAYAPLPSSGDDQRGGGVRYCLACVATVLAASAVVVVVAFVSVGGVRVLLAGGTGDSKDADAFPWSNSMLQWQRAGFHFQTEKNFMSDPNGPVYYRGYYHLFYQYNTKGVVWDDGIVWGHVVSRDLVHWRHLPIAMVPDHWYDNMGVLSGSITVLNSGRLVMIYTGVFSNTTDRSGMMEVQCLAVPAEPNDPLLRRWTKHPANPVLVHPPGIKDMDFRDPTTAWFDESDSTYRTVIGSKDDNQGDHAGFAMVYKTKDFLSFQRIPGILHRVEHTGMWECMDFYPVGGGDNSSSEVLYVIKASMNDERHDYYALGRYDAAGNTWTPLDPELDLGMGLRYDWGKFYASTSFYDPIKRRRVVLGYVGETDSRRSDEAKGWASIQSIPRTVALDKKTWTNLLLWPVQEIETLRANATAFNGITIDTGSVFLLPIRQGTQLDIEASFRLNASAVAAISEADVGYNCSSSGGAATRGVLGPFGLLVLADTRGEQTAVYFYVSRGLDGGLRTSFCNDESRSSWARDVTKRVVGSTVPVLDGEVLSMRVLVDHSIVQSFAMGGRVTATSRVYPTEAIYAAAGVYVFNNATGASVTAERLVMHEMDSVDNNQIFLVDDL

SEQ ID NO: 9627 - protein, 497 aa, Chloroflexus aurantiacus
MHLGDGLGARLHSLSEISSDNLHGEGDPMAGAQQRPRYHFLPPANWMNDPNGLIQWEDTFHLFYQYNPAGAYHRHIHWGHATSHDLIHWQHQPIALSPTPGGADADGCWSGCAVNDHGTPTLIYTGFRLPEVQQPCLAVSHDGLQTWQKWPEPIIAAPPPELDLLGFRDHTVWQEQGVWHMLIGSGIRGQGGTVLLYRSPDLRHWEYAGPLLIGDAGQFDPVWTGLLWECPDFFALGDQQVLVCSAWDRRPYYTIAMIGAYRDGRFVPHTTHKLDYGDAHFYAPQTMPIRDGRRIMFAWSMEGRSEESIVAAGWAGVMTLPREVKIADDGQIVTLPVNEVQQLRQDEIVIPSTRVMPHDIHWLPVHGAQLEVELILRPPRHGTCTVMLRASPDGSEATVLRYNSRTATLTLDRRRSSLAGDVWRDAHHAPLTLHNDEPLVLRIFLDASLIEVFANERRSITSRIYPTRPDSTGIAICADEAAVDLLAGRVWEMAGIW

SEQ ID NO: 9628 - protein, 172 aa, Populus tomentosa
YHLFYQYNPKGAVWGNIVWAHSVSKDLINWESLEPAIYPSKWFDNYGCWSGSATILPNGEPVIFYTGIVDGNNRQIQNYAVPANSSDPYLREWVKPDDNPIVYPDPSVNASAFRDPTTAWRVGGHWRILIGSKKRDRGIAYLYRSLDFKKWFKAKHPLHSVQGTGMVECPDF

SEQ ID NO: 9629 - protein, 103 aa, Pseudoroegneria stipifolia
SRGLDGGLRTSFCQDELRSSRAKDVTKRVIGSTVPVLEGEAFSMRVLVDHSIVQSFAMGGRSTMTSRVYPMEAYQKARVYLFNNATGAGVTAERLVMHEMDSA

SEQ ID NO: 9630 - protein, 702 aa, Penicillium sp. TN-88
MKSISMLWEVLLLGAFLSQVDAAPTKESYTELYRPQYHFTPAQNWMNDPNGLLYADGTYHMYYQYNPGGNTWGAMSWGHATSEDLTHWKEQPVALLARGYPNNITEMFFSGSAVIDEHNTSGFGKKGKAPWIAMYTSYYPTAQVLPSGKQVRDNQQAQSIAYSLDHGTTWTTYDEANPVILDPPAPYQDQFLDFRDPNIFWHQPIRKWVAVVSLAKLHKLLIYTSTNLKQWDLESEFGPFNAVGGNWECPNIFPLPVDGDKSKVKWVAIVGINPGGPPGTVGSGVQYFLGDFNGTTFTADSNSIHGGGPPDGSFIFEDFEGNHSFSDRGWIATGDFIGTSPVAGTLPGQNPVTGYLGNQLVNTFLNGDATTGTLTSPSFTISYKYINFLIGGGDNINQTAIQLKIDGNVVYAATGSNSEQLTWQHWDVSAFQNQTAVIEIIDLATGGWGHINVDEISFANTPATNNNANWLDWGPDFYATQGYNGLPQYQRTIISWMNNWQYGGVIPTSPWRSAMSIPRQLSLKTIDESIAVVQEPEECWKAITQTQIASTFPSITGTHSLGDIGNAAEIELTFSSGDGTNGSSEFGIIVRASKDFSQQTRIGYDFTTQQVFVDRTKSGDVSFDSTFASVYYAPLSPASDKTVTLRIFVDWSSVEVFGGQGQTTMTTQIFPDENATNAQLFSTGGSTKNVQLRISKVRSTWV

SEQ ID NO: 9631 - protein, 501 aa, Pediococcus pentosaceus
MIWNRKTRYTPYEQWPATKLPQLVAQARQSKWRMQHHIQPTSGLLNDPNGFSYFDGQWHLFYQVFPFGPVHGLKSWQHVTSKNLVDWHDEGLAIRPDTPYDSHGAYTGTALPIDDQLFIMYTGNVRTADWQRESYQLGAWMDTDNHIKKLSRPLIAHAPAGYTSSFRDPDLIRNDHGYYALIGAQTTTEIGAILVYFSKDLTTWTCQGELNVPANARGYMIECPKSGLDRSTARLIVLSQGLSQATIPYQNIYPNMYLVADQLNLAQAQFTEPHALTQLDDGFDVYATQAINAPDGRALAVSWIGLPEISYPTDRENWAHCLSLVKELTLKDGHLYQNPVAAVDDLRTTAHDLVFEQQRATVAALNGSFELLLTVPADKTVTVNIADQQESGQLQVTVDANHGQVMIDRRHTGNSFAEDYGQTRQVELTAHKTIKIRLIIDVSVFECYIDNGYSVMTGRFFLNATPSRLNVQGDTTAVTGKVWEWRQSEHTGVDNNETKIK

SEQ ID NO: 9632 - protein, 159 aa, Cichorium intybus x Cichorium endivia
WGNIVWAHSVSKDLINWIPLEPALYPSKPFHKYGCWSGSATVLPGEKPVILYTRLGEEKEQVQNFAIPEDFSDPYLRKWIKPDDNPILIPTHGENVSAFRDPTTAWMDKSGQWRFIIGSKQDRRGVAYLYRSKDFINWTQAEHPLHSKENTGMWECPDF

SEQ ID NO: 9633 - protein, 494 aa, Staphylococcus xylosus
MSEWTKEQRYQKYEDVDQQTIEKLTEQVNQSEYRQTFHIQPQIGLLNDPNGLIYFKGNYYVSHQWFPLGPVHGLKYWYTYQSKDLVDFKAIGPTIKPDTKDDSHGVYSGSAFEYHDHLYYMYTANHRDSDWNRISTQHIAKMSKDGSINKFPKAVISAPPSGYTQHFRDPKVHVQDGVYYAMIAAQNIKKQGRILQYRSTDIVNWEFQGEVQTNLDDFGYMWECPDYFNLNGYDMLLFCPQGIDSEGERFKNIYQSGYIMGQYDINNLTMNHADFHELDYGFDFYAPQTFLDENGQRILIGWMGLPDINYPSDADGWAHCLTIPRVLTIESGNLKQRPIKALEKLRTNEETALGYANKFTRQLHPYEGKQFELIIDILENEATEVYFEVRTSKTESTLITYNKREQKLTLDRSESGQLPEPVEGTTRSTYLDTPLSKLQLFVDTSSVEIFCNDGERVMTARIFTDENATGIKTSTESGQTYLKFTKYDLKGDTI

SEQ ID NO: 9634 - protein, 454 aa, Streptococcus mutans
MNLPQNIRYRRYQDWTEEEIKSIKTNVALSPWHTTYHIEPKTGLLNDPNGFSYFNGKFNLFYQNWPFGAAHGLKSWIHTESEDLVHFKETGTVLYPDTSHDSHGAYSGSAYEIGDQLFLFYTGNVRDENWVRHPLQIGAFMDKKGNIQKFTDVLIKQPNDVTEHFRDPQIFNYKGQFYAIVGAQSLDFGGSKSEYMIECPNLVFINEQPVLIYSPQGLSKSELDYHNIYPNTYKVCQSFDTEKPALVDASEIQNLDFGFECYATQAFNAPDGRVYAVSWIGLPDIDYPSDSYDYQGALSLVKELSLKHGKLYQYPVEAVRSLRSEKEAVTYKPETNNTYELELTFDSSSVNELLLFADNKGNGLAITVDTKMGTILIDRSKAGEQYALEFGSQRSCSIQAKETVVNIFVDKSIFEIFINKGEKVFTGRVFPNDKQTGIVIKSGKPSGNYYELKY

SEQ ID NO: 9635 - protein, 1423 aa, Streptococcus mutans
MEEETVCKNWFMRKSGKSWIFGCAVFFVLGLATALPVAAEEISQTTAADTAVTEVRTEDSSQTSSQETAVTETTQSEETASKQLTTPAVADQTTEPTDNEPISSSDGASSPYQVTDTTEPQQTLTPADSEPQAKADVQQAAAPKKEEINPVTNLEDMSHDTNGTWEVREDGIHSNAIGKGDSFLYSQSSGKNFVYATDVTFKQNSGAAALVFRSNNDSNNKNMYAVNVDIGGHKAKFWRWVDNKDIQLIDERDVVPTADNRYTLKVVAVNNWISYYVNDVLMASTGDYVLQKADKGQNTVIPEGHFGLLNWNGDMVFQNTKFALLDDTTAPLIDNITVRSDRGNVEKQGQFFSEEPLHIQYVSNDASQVSLDIAKHNPAATVTVEDKTGRVYTDPSHLPVNVGANYFTVKSTVIDSFGRTVTLTYRINVHRRQNDEVYYNELYRDQYHYSVKDGWANDPNGLVYYNGVYHLFHQFYDDTKWGPMHWAHATSTDLIHWKEEPIAFYPDSNGYMFSGCVVVDEHNSSGLFKTAKGGLVAIITANGNGQRMELAYSEDEGKTWQKYDRIVADWSNDPLQNQDFRDPKVFHWNNQWFMVLAGGPLRIYSSNNLKDWKVESTYPDLHTECPDMYPIVANDGVLKWVLSRGGRFYKVGDFKQVDGKWTFIADDAYKDKDQVMNFGKDSYAAMTYYVHDFGTETRPTIPKLTEVNWMNTWEDYCNLVADTVGQDFNGTFNLNLDLGLINENGQYILTQTPVKAYDSLRDVNTALHFKDVTVDANNTLLKDFKGDSYEIVSHFRPDEKTTKVGFNLRVGNGQATKVIYDLQTETLSIDRSQSGTILSAAFAKVNSQHVTKNADGSIDLHIYVDRASVEVFSKNNTVAGANQIFPNPEAVGASIIVEGGKAQADISVYQMKTIWTDKKDTAKPVAMNTTTAKELALQVGQTQDLQVYLAPASVRQDVEWTISDPSLVRTSQKGNVLHLTAVKKGKLTITAISKENPSLSKIFTISITLNNFKTNLKGLQSVTGKWYVDDETLYDSNTSSNDYYMASQKPGFKEYDYDIDLKYQRGLINLFVASGNIDPSQAYSVQFGDSETVRLYRFAGDTIAEANMGKRINDDQYHHIKVTKTKNSIIISVDGQEVMSHNFDQVDSYFNDAYVGLGLWDGAVEFQNFFVTDHATTPKPDSDPTPQPDAPEALAQERELIDPATGVRVILQKGELASIVRVKVSHIETNDAHTPAVLNAKDYDLFNITPIDKNEKVVAITKPATVLLPIDAGKVVDKVVYLPNTDKEESLPFTIVSLTDSNGKKQSYVRFTAEHFSEYGLVYQAENQTNLKSKEKQDNVAISYPLNLEQEVKVSSISRKYAANKTADVNSVQQTEPSVMSSSSKATLPDTGDHKTDLSQLGVLAMIGSFLVEIASYFKKSKD

SEQ ID NO: 9636 - protein, 479 aa, Streptococcus sobrinus
MAIAKEIRYRAYEDWSAEEIKTIQENVAKSPWHTTYHIEPQTGLLNDPNGFSYFNGKFQLFYQNWPFGAGHGLKSWVHTESDDLVHFRETGTILYPDNPHDSHGAYSGSAYEIDGKLFLFYTGNVRDDNWIRDPLQVGAFMDKEGHIEKFDQVLIQQPSDVTEHFRDPQIFDYQGQFFAIIGAQNLEKQGFIKLYKAVNNDIKNWVFVGNLDFGGTGSEYMIECPNLVFVDGRPVLLYSPQGLDKAELDYQNIYPNTYKICQAFDTEKAELIQPSEIHNLDFGFECYATQAFNAPDGRALCVSWIGLPDIDYPTDIFDYQGAMSLVKELTIKDGKLLQYPVQALKELRSEPEAFTDKKHTENTYELELKVEDDSTAELLLFADEDGNGLSLTIDTKQGKVTLDRSKAGEQYALDYGSQRSCQIPQQKTSINIFVDKSIVEIFINKGETVFTSRVFPKKGQNGIHLVSGQVEGNYFELTD

SEQ ID NO: 9637 - protein, 628 aa, Tulipa gesneriana
MGGRDLESSTPLLHHEPYSPRKTITTILSCITAVALLLSLVTLLNTKHEADHRPPDVAFPMSRGVFEGVSEKSTASLIGSAARFPWTDAMLQWQRTGFHFQTEKNWMSDPDGPMFYKGWYHIFYQHNPDSAVWGNITWGHAVSRDLIHWFHLPIAFFPDQWYDARGPLTGSATFLPDGRIAMLYTGITTEFVQVQCQVYPEDVDDPLLLKWFKSDANPILVPPPGIGSKDFRDPTTAWYDVAEASWKLAIGSKDEQHNGISLIYRTYDFVSYELLPILLHAVEGTGMWECVDFYPVLTNSTVGLDTSVPPGPGVRHVLKASLDDDKHDYYAIGTYDVVSGTWTPDDVESDVGIGWRYDYGKFYASKTFFDSAKGRRVLWGFTGETDSEQNNRLKGWASVLPIPRTILFDQKTGSNLLLWPVEEVERLRTSRQDFENIDIGIGAVVPLDIGKAIQLDIVAEFEIDGATLEASVEADLGYNCSTSDGAFGRGVLGPFGFLVLSDEDLSEQTAIYFYVGRKMDGALHTFFCQDELRSSKANDLVKRVFGSIVPVLHGETFTMRILLDHSIVESFAQGGRTCITSRIYPTKAFDGAARVFIFNNATGAKVTAKSIKIWQMNSASIIPYPFKA

SEQ ID NO: 9638 - protein, 628 aa, Tulipa gesneriana
MGGRDLESSTPLLHHEPYSPRKTITTIVSSIVAAALLLSLITLLNTKHEADHHPPDVAFPMSRGVFEGVSEKSTASLIGSAARFPWTDAMLEWQRTGFHFQPEKNWMNDPDGPMFYKGWYHIFYQYNPVSAVWGNITWGHAVSRNLIHWFHLPIAFVPDQWYDANGALTGSATFLPDGRIAMLYTGITTEFVQVQCQVYPEDVDDPLLLKWFKSDANPILVPPPGIGSKDFRDPTTAWYDVAEASWKLAIGSKDEQHNGISLIYRTYDFVSYELLPILLHAVEGTGMWECVDFYPVLTNSTVGLDTSVPPGPGVRHVLKASLDDDKHDYYAIGTYDVVSGTWIPDDVEADVGIGWRYDYGKFYASKTFFDWAKGRRVLFGFTGETDSEQNNRLKGWASVLPIPRTILFDQKTGSNLLLWPVEEVERLRFNRQDFENIDIGIGAVVPLDIGRAIQLDIVAEFEIDGATLEASVEADLGYNCSTSGGTFGRGVLGPFGFLVLSDEDLSEQTAIYFYVGRKVDGALQTFFCQDELRSSKADDLVKRVFGSIVPVLHGEILTMRILLDHSIVESFAQGGRTCITSRIYPTKAFDGAARVFVFNNATGAKVTAKSIKIWQMKSASISPYPFKA

SEQ ID NO: 9639 - protein, 625 aa, Tulipa gesneriana
RDLESSTPLLHREPYSPRKTITTILSCITAAAILLSLITLLNTKHEADHHPPDVAFPMSRGVFEGVSEKSTASLIGSAARFPWTDAMLQWQRTGFHFQPEKNWMNDPDGPMFYKGWYHIFYQYNPVSAVWGNITWGHAVSRNLIHWFHLPIAFFPDQWYDARGALTGSATFLPDGSIAMLYTGITTEFVQVQCQVYPEDVDDPLLLKWYKSDANPILVPPPGIGSKDFRDPTTAWYDVAEASWKLAIGSKDEQHNGISLIYRTYDFVSYELLPILLHAVPGTGMWECVDFYPVLTNSTVGLDTSVPPGPGVRHVLKASLDDDKHDYYAIGTYDVVSGTWTPDDVEADVGIGWRYDYGKFYASKTFFDWPKGRRVLFGFTGETDSEQNNRLKGWASVLPIPRTILFDQKTGSNLLLWPVEEVERLRFNRQDFENIDIGIGAVVPLDIGRAIQLDIVAEFEIDGATLEASVEADLGYNCSTSGGTFGRGVLGPFGFLVLSDEDLSEQTAIYFYVGRKVDGALQTFFCQDELRSSKANDLVKRVFGSIVPVLHGEILTMRILLDHSIVESFAQGGRTCITSRIYPTKAFDGAARVFVFNNATGAKVTAKSIKIWQMKSASITPYPFKA

SEQ ID NO: 9640 - protein, 473 aa, Lactococcus lactis subsp. lactis
MKWSTKQRYRTYDSYSESDLESLRKLALKSPWKSNFHIEPETGLLNDPNGFSYFNEKWHLFYQHFPFGPVHGLKSWVHLVSDDLVHFEKTGLVLYPDTKYDNAGVYSGSALAFENFLFLIYTGNHRGEDWVRTPYQLGAKIDKNNQLVKFTEPLIYPDFSQTTDHFRDPQIFSFQGQIYCLIGAQSSQKNGIIKLYKAIENNLTDWKDLGNLDFSKEKMGYMIECPNLIFINGRSVLVFCPQGLDKSIVKYDNIYPNVYVIADDFTTGSKNQLKNAGQLINLDEGFDCYATQSFNAPDGSAYAISWLGLPETSYPTDKYNVQGVLSMVKKLSIKDNKLYQYPVEKMKELRQMEQDLLLADNNIITSNSYELEVDFRQQTSTLLSLMTNEKGDSALKVEIDKENNTITLIRNYEKRLAHVKIEKMNVFIDQSIFEIFINDGEKVLSDCRVFPNKNQYSIRSQNPIKIKLWELKK

SEQ ID NO: 9641 - protein, 1503 aa, Bacillus circulans
MREVKRGKKSGFAALAIWSLFFQLIAPGISAAAEPGADIEDALISEAESEIPVTDAVYQIENPGFETGDLTGWSVAEGGAFGPDSVSDETVWWAERIPYDQEGAYHLNGWKYPESETGVLRSSTFELGGSGWISFKLGGAKDPDKAFINIVEADTGQVVARYGNSAFTDVGFPDPAQGMRLANMEQYKADLSGHIGKKLYIEIVDHATSDWGLIFADAFFMYHESEPAEGIVATDIKPDFERYQIENPSFETGDLTGWTVIEGDAFGPNSVSDETVWWAERIPYDQEGAYHLNGWKYPESETGVLRSSTFELGGSGWITFKLGGGKHTDQVYVSVIEAETGNLIARYGNSAFTDVGFPDPAQGMRLANMEQYKADLSKHIGKKLYLEIVDHGVSDWGLVFADAFRTFHEIVPEDGVVAENIIPAEIANRGFETGNLDGWTVEGDAFHVTDEAHAAKEGNFYALSSTEGQGSITSNTFTLQGAGIINFTVLDILNPEGAYVALYDASSNTVIKITGNIGANEQISWKVQEHYNKKLYVKVVDQSGDAGIAVDGFQARTEGTVVHLGLDEGAGKKALEEVRNVEHDVNYVFNDARYMAPKDPRWTPRGVKGGALLFDGYSNYIEIDADETVPVSDALTIEAWVAPRSYEWGDGNKLSAIVNQSDQDKAEGFALGMYRHGTWSLQAGIGGRWIQAWVNDHPLEKYKWNYVAATFDKEDGMMRLYLNGEEVASQATPAGVPISPSGESLIVGKNNKPVELAGLFSFNMFSGLIDEVKVHNRALTNGEILAEYESAKALHGGVVPEIPNADIDEDPSVFDGDQHRPQYHAIPPQNWMNEAHAPIYYNGKYHLFYQHNPQGPYWHQIHWGHWVSDDMVHWENVRPALAPEAGSLDPDGAWSGSAAYDRNGNPVLFYTAGNDSESPNQRTGLATPADLSDPYLEQWVKYPEPVTEQNGIGIHNEFRDPFVWYDEETDKWYQLVTSGLPDFSSGTALVYVSDDMYNWEYKGPLYVSDRSLYPELGTVWELPVLLPLGTDSTGKKKHIFIINPHEKPEHVPPAKDVQRDVEVYYWIGTWDRDNFRFIPDREAPSKMDVGDGYLTAESGLVTPDGRTVVFSMVQNVRTPQAEYQSGWAHNLALPVALSLDEHDELRIEPIQELQSLRGNKLADISDKNLESANQLIKDIKGDMLEIVMEIDPGEAQKFGLKVRRSENGQEETLIYYDKSDSTFNVDRTKSSIDPDVRVDGIQGGYVNLDGENLKLHIFLDRSVVEAFANYKKKLTTRVYVGRYDSLGLQIWADGDITVKSMEVWAMNALTGEPAAPVYVPENWDNSVYKDITELPNHDFAMGDLTGWIAEGDAFQNIHVTDAKFFWDTIYFNPSQKIPGGYHLWGFNEQAGGDSLTGTLRSQNFVLGGNGRIDFLMSGGRDIDRLYVALVRASDGKELFKETATNYEEYQRKIWDASDYIGEELYIKVVDQSTGGFGHLNVDDFNVPVQVMRTDRSNRSNNRS

SEQ ID NO: 9642 - protein, 636 aa, Prunus cerasus
MDTNTTSYTPLPGDPFLSGPPATPRRPLKGFAVIFASVIFLMSLVALIINQGPPQQDGHHHEKQSASTASSETASFSRLPRGIAQGVSAKSNPSFSDEASYNWTNAMLSWQRTAFHFQPERNWMNDPNGPMFYKDWYHLFYQYNPNSALRGNITWGHAVSPDLIHGSTSRWLWSPIDGSMPTGLDWVCAILPDGQIVILYTGSTNESVQVQNLAYPANLSDPLLLDWVKYSGNPVLTPPAGIGSTDFRDPTTAWIGPDGLWRTTLGSKVNKTGISIVYTTANFIDYELLDGVLHAVPGTGMWECVTFYPVSINGSTGLKTSVNGPGVKHVLKASLDDTKMDHYAIGTYFVETNTWIPDDPKMDVGIGLKCDYGRYYASKTFYDQNKERRILLGWINETYTETDDLEKGWSSLQTIPRTVLFDNATGTNLLQWPVEEIEDLRLNSTEFSDVLVEAGTVVPLDIGTATQLDIFVDFEIEVLETESVNGSVGCGGGATDRSTLGPFGILVIADETLSELTPVYFRVSNSTDGDITTHFCADETRSSKAPEVYKTVYGDQVPVLDGETYSARVLVDHSIVESFAQGGRTVIASRIYPTEAIYGAARLFLFNNATGVNVKATLKIWQLNSAFIHPFPLHQI

SEQ ID NO: 9643 - protein, 488 aa, Bacillus megaterium
MLTINKIEQAQHSLNEAEKKVNHQYRLGYHIMAPANWINDPNGLVQYKGEYHVFYQHHPYDENWGPMHWGHVKSKDLVHWQHLPIALAPGDSFDKDGCFSGSAVDNEGELTLIYTGHNYIDKELDTFFQNQNIAVSKDGITFEKAEANPVIAEPPADSSHHFRDPKVWKHEGFWYMILGNSTKKQEGRVILYRSSNLQKWEYVGVLAKSDGDLGYMWECPDFFELDGKHVLMISPQGIEAKGDSYHNLFQTGYLVGEYNYGTNTFHHGSFTELDYGHDFYAVQTLLDDKGRRIAIGWMDMWEANMPTKEDGWCGALTLPRELTLREDKVLMNPVQELTSLRKTQYNMLTNKALSNSYVVEVNEDLLEIQAVFDLADCQASSVGIKIRGINNEETLMCYNLNEQKLLLDCTHSGKEDGVRKVALQAGETLALRIFVDRSSVEVFANEGQATMTSRIYPKESRLGIELFTEGGNVIVKELTYWNLKDIWG

SEQ ID NO: 9644 - protein, 1333 aa, Paenibacillus polymyxa
MRKAKGRKCWISGMVIWAMVLQLVVPGISVASENRTVAGETLVPKNDVKSSVTDAIYQIKNIPKNDMGLSVTDSVYQIRNPGFETGDLTGWTVVKGEAFGPNSVTDETTWWAEKIPYNQEGAYHLNGWKYDESATGIIHSSTFELGGSGWISFRLGGAKNPDKVFINIVEIDTGQVIARYGNSAFADVGFPDPALGMRLANMVQYKADLSTYLGKKLYVEVVDNATSDWGVIFADAFSMYHESEPAEGIVATDIKPDFKRYEIDNPSFETGNLDGWTVEGDAFEVTNEAHVSKEGNFFAKSSMQGKGSIASSTFTLQGTGTINFTILDILKPENAYVALYDANSNTLLMKTGNVSANEKISWKVQEHYNNKLYVKVVDHSNEASIAVDSFQASGKGTIFHLNLDEGAGKKALEKVHNLRHDVNYVFSNARYMASKDPRWTPRGIKGGALLFDGYSNYIEVNANDTVPVSDALTIEAWVAPRSYEWGDGNKLSAIVNQSDQDKAEGFSLGMYRHGTWSMQVGIGGQWIQVWVKDHPLEKYKWNYVAATFSKEDGKIKLYLNGEEVASQATPVNVPITPSTESLIIGKNNKPVELAGVFSFNMFSGLLDEVKLHNKALTNQEILAGYESVKALHGGSIPKILNADIDEDPSVFDGDQHRPQYHAMPPQNWMNEAHAPIYYNGKYHLFYQHNPQGPFWHQIHWGHWVSDDMVNWENVRPALAPEAGTLDPDGTWSGSAAYDRNGNPVLFYTAGNDSLSPNQRTGLATPADLSDPYLEKWVKYPKPVTEQNGKGIHNEFRDPFVWYDKEVDKWYQLVTSGLPDFSSGTALVYVSDDMYNWEYKGPLYVSDRSRYPELGTVWELPVLLPLGTDSTGKQKYIFMINPHEKPEHVPPANDVQRDVEVFYWIGTWDRDNFKFIPDQEAPSKMDVGDGYLTAESGLVTPDGRTVVFSMVQNVRTPQAEYQSGWAHNLSLPVSLSLDKHDKLHIEPIKELQSLRGKKWVDFSDKNLESANQLIKNVKGDILEIVMEIDPREAQKFGLKVRRSEKGQEETLIYYDKKNGTFNVDRTKSSIDPDVRVDGIQGGYVDLKGENLKLHIFLDRSVIEAFANYKKKLTTRVYVGRYDSLGLQIWADGDINIKSMQVWDMNALTGKPAAPVYVPDKWDNSVYKDITELPNHDFATGDLTGWITEGDAFQNVHVTNTQFFWDNIYFNPSHKIPGGYHLWGFNEQAGGDSLTGALRSQNFVLGGNGKINFLISGGRDIDRLYVALVRASDGKELFKETATNYEEYQRKIWDASDYIGEELYIKVVDQSKGGFGHINVDDFNVPVQVKKKTNN

SEQ ID NO: 9645 - protein, 512 aa, Paenibacillus polymyxa
MKELKSNYSETYRPQFHYSPEKNWMNDPNGLVYFEGEYHLFYQHTPHDTQPDFGNMHWGHAVSKDLVHWTELPPAIPPGEDGAIFSGSAVVDKNNTSGFFDEEGSGLVAIYTNEGNKSQPGKPQVQSIAYSKDKGRTWTKYEGNPVLFPTDTLDFRDPKVIWHDESSMWIMVLAVRDRVEFYTSPNLKEWSFASEFGSDIPHIHRGIFECPDIFRIQVDEDLNTTKWILMLSVGDRNGVNPDDPEPPAGGSGMMYFVGSFDGKSFTPDEALESIDTIKWVDYGSDFYAAVSWNGISNEDGRKIWLGWMNNWRYATTLPSKEWRGKTSIPRELQLRTYPEGLRLIQTPINELSQLRKPILSLQDLTIKPGMNVLSDISAAKAEIIAEFEIGTAVEFGFKVRKSANQETIIGYNISNEELFVDRTKSSATDFHSDFTAIHKATMKPEHERIQLSIYLDWSSVEVFGNHGKAIISDMIFPDFESKGLELYAIGGELRVVSLQINDLVSIWGNENV

SEQ ID NO: 9646 - protein, 485 aa, Paenibacillus polymyxa
MNVIRQEKYRPSYHFSPKSGWMNDPNGMVYYEGRYHLFYQHHPFGTTWGPMHWGHAVSTDLMNWEEQPIALEPDELGTIFSGSAVVDEQDTSGFFGGKPGLVAIFTHHASLPGTEQVRQCQSLAYSTDSGKTWIKYTGNPVLEDKECIDFRDPKVFWHKPTEQWVMVLACGQTIRIYHSPNLKEWTFASEFGHGIGSHDAVWECPDLFPLYIDEKREQVKWVMLVSIGDVPEIREGSRTQYFTGEFDGTTFVADAESEKVRWLDYGRDNYAGVCWSDIPAEDGRRLFMGWMSNWRYANQTPTERWRGAMSIPRELALETRKGTVALVQRPVRELEGLRTPVLSLTEPSWEEVRNALSALQLDCYELVAEFATTGDFGFKVRVSDEQETLVGYTSATQEVYVDRKRSGRSDFHEDFAGKHGASLTILPDRMDIRIYVDRSSIEVFFDRGQVAITDLIFPDAEAKGLEIFSAEEQITVFSLELYALK

SEQ ID NO: 9647 - protein, 493 aa, Geobacillus stearothermophilus
MKTHNSEKYRPTFHFSPKKNWMNDPNGLVYFKGEYHLFFQHNPNDSIWGPMHWGHAVSKDMIEWEELDIALYPDENGTIFSGSVVIDWNNTSGFFPKEPGMVAIFTQNLHDADHTTPIQTQSLAFSHDRGRTWTKYEKNPVLKHPTKVDFRDPKVFWHYESEKWIMVLATGQTVSIYSSPNLIDWQFESEFGENIGCHDGVWECPDLFELPVENSEEKKWVMFVSIGDNRQFDSGSRTQYFIGSFDGSNFKVDENNNEVLWLDFGKDNYAGVTFSDIPKEDGRRIYIGWMSNWRYANEVPTVGWRGQMTLPRVLSLRKIGDKLRVIQNPVKELDNYFTKQIVIHDEIISSGIQKKIDINQPSVEIVLNVNNLGAKQFGLVLHHTENQSTTITIDLLTNLLSLDRTNSGEVSFSENFLNNQVMKIHDTTKLNLRIIVDSSSVEIFVNEGAHALTSLIYPDKACEKISIFSLGGDIQLSNSYISFPNSIRRNFGY

SEQ ID NO: 9648 - protein, 445 aa, Geobacillus stearothermophilus
MKSETEREKIEQAYREIEKYRDKVEKDYYRLQYHLMPPVGLMNDPNGLIHWNGVYHVFYQWMPFHTGHGAKFWGHYTSCDLIHWKQEKIALAPSEWYDKDGCYSGSAIDHDGVLTLFYTGNVKDEHGNRQTYQCMAMSKNGIDFEKKGIVVTLPDGYTAHFRDPKVWKKGDKWYMIVGAQSESLDGKAVLFRSQNLRDWEHLGPITGGNSRQLGKFGYMWECPDLFELDGQEVLIVCPQGLEAEAMRYQNVHQSGYFVGRLDYEPAQFLHGPFAELDRGFEFYAPQTMLDAKGRRILIAWMGVPDQDEDKHPTITHRWVHALTLPRELKLKDRKLYQTPVEELQMLRKDKIAYSNVTIANEEMILEGISGDVIELNLENIRLSGGIMEIAIRNTARIIYHSDERVLTLERKSFANGLTEKRQCPFGTFALAAYVFRHVLDGGICE

SEQ ID NO: 9649 - protein, 653 aa, Bacillus subtilis
ADSSYYDEDYRPQYHFTPEANWMNDPNGMVYYAGEYHLFYQYHPYGLQWGPMHWGHAVSKDLVTWEHLPVALYPDEKGTIFSGSAVVDKNNTSGFQTGKEKPLVAIYTQDREGHQVQSIAYSNDKGRTWTKYAGNPVIPNPGKKDFRDPKVFWYEKEKKWVMVLAAGDRILIYTSKNLKQWTYASEFGQDQGSHGGVWECPDLFELPVDGNPNQKKWVMQVSVGNGAVSGGSGMQYFVGDFDGTHFKNENPPNKVLWTDYGRDFYAAVSWSDIPSTDSRRLWLGWMSNWQYANDVPTSPWRSATSIPRELKLKAFTEGVRVVQTPVKELETIRGTSKKWKNLTISPASHNVLAGQSGDAYEINAEFKVSPGSAAEFGFKVRTGENQFTKVGYDRRNAKLFVDRSESGNDTFNPAFNTGKETAPLKPVNGKVKLRIFVDRSSVEVFGNDGKQVITDIILPDRSSKGLELYAANGGVKVKSLTIHPLKKVWGTTPFMSNMTGWTTVNGTWADTIEGKQGRSDGDSFILSSASGSDFTYESDITIKDGNGRGAGALMFRSDKDAKNGYLANVDAKHDLVKFFKFENGAASVIAEYKTPIDVNKKYHLKTEAEGDRFKIYLDDRLVIDAHDSVFSEGQFGLNVWDATAVFQNVTKES

SEQ ID NO: 9650 - protein, 677 aa, Bacillus subtilis
MKKRLIQVMIMFTLLLTMAFSADAADSSYYDEDYRPQYHFTPEANWMNDPNGMVYYAGEYHLFYQYHPYGLQWGPMHWGHAVSKDLVTWEHLPVALYPDEKGTIFSGSAVVDKNNTSGFQTGKEKPLVAIYTQDREGHQVQSIAYSNDKGRTWTKYAGNPVIPNPGKKDFRDPKVFWYEKEKKWVMVLAAGDRILIYTSKNLKQWTYASEFGQDQGSHGGVWECPDLFELPVDGNPNQKKWVMQVSVGNGAVSGGSGMQYFVGDFDGTHFKNENPPNKVLWTDYGRDFYAAVSWSDIPSTDSRRLWLGWMSNWQYANDVPTSPWRSATSIPRELKLKAFTEGVRVVQTPVKELETIRGTSKKWKNLTISPASHNVLAGQSGDAYEINAEFKVSPGSAAEFGFKVRTGENQFTKVGYDRRNAKLFVDRSESGNDTFNPAFNTGKETAPLKPVNGKVKLRIFVDRSSVEVFGNDGKQVITDIILPDRSSKGLELYAANGGVKVKSLTIHPLKKVWGTTPFMSNMTGWTTVNGTWADTIEGKQGRSDGDSFILSSASGSDFTYESDITIKDGNGRGAGALMFRSDKDAKNGYLANVDAKHDLVKFFKFENGAASVIAEYKTPIDVNKKYGLKTEAEGDRFKIYLDDRLVIDAHDSVFSEGQFGLNVWDATAVFQNVTKES

SEQ ID NO: 9651 - protein, 677 aa, Bacillus subtilis
MKKRLIQVMIMFTLLLTMAFSADAADSSYYDEDYRPQYHFTPEANWMNDPNGMVYYAGEYHLFYQYHPYGLQWGPMHWGHAVSKDLVTWEHLPVALYPDEKGTIFSGSAVVDKNNTSGFQTGKEKPLVAIYTQDREGHQVQSIAYSNDKGRTWTKYAGNPVIPNPGKKDFRDPKVFWYEKEKKWVMVLAAGDRILIYTSKNLKQWTYASEFGQDQGSHGGVWECPDLFELPVDGNPNQKKWVMQVSVGNGAVSGGSGMQYFVGDFDGTHFKNENPPNKVLWTDYGRDFYAAVSWSDIPSTDSRRLWLGWMSNWQYANDVPTSPWRSATSIPRELKLKAFTEGVRVVQTPVKELETIRGTSKKWKNLTISPASHNVLAGQSGDAYEINAEFKVSPGSAAEFGFKVRTGENQFTKVGYDRRNAKLFVDRSESGNDTFNPAFNTGKETAPLKPVNGKVKLRIFVDRSSVEVFGNDGKQVITDIILPDRSSKGLELYAANGGVKVKSLTIHPLKKVWGTTPFMSNMTGWTTVNGTWADTIEGKQGRSDGDSFILSSASGSDFTYESDITIKDGNGRGAGALMFRSDKDAKNGYLANVDAKHDLVKFFKFENGAASVIAEYKTPIDVNKKYHLKTEAEGDRFKIYLDDRLVIDAHDSVFSEGLFGLNVWDATAVFQNVTKES

SEQ ID NO: 9652 - protein, 493 aa, Bacillus subtilis
MSSLIAGLIEDPEDDFGYGKLTRLGTAASLAAAITVGRPILHYTAKNTWLNDPNGLVWHQGVYHLFYQNNPFDNVWGNMSWGHATSTDLLHWTEHPVAIACNEEEDVFSGSIVVDHGNTSGFGTAEDPALVAIYTSAFKEGSVHQGTQAQSLAFSTDAGMTWSKYAGNPVLGRGSAHFRDPKVFRYEGPAGSRWIMVAVEAQHQQVVLYRSADLKDWEYLSTFGPANASDGEWECPLPVDGDPDNVKWVLVVNINPGAVAGGSGGQYFVGDFDGVQFPADPDSLVPTDADGNVDLRHCLWLDWGRDYYAAVSFSNAPENRRIMIGWMNNWDYANSLPTSPWRSSMSLAREIELATVDGFPRLVQRPVLPLDSGEPARTIQNMELTTPCCNCPTRRPPGSAQLIEAEILPGTARHIAFRLLGAPDGSAATVLSFDALTSRLTLDRRNSGNTAFTISSRRLNPQPVKASTGGALRLKVIIDQCSVEVFAQTAGLC

SEQ ID NO: 9653 - protein, 490 aa, Clostridium acetobutylicum
MNSLEFIKKVSYIEEKYRDKVEKDYYRQNYHLMPKVGFMNDPNGLIEINGEYHVFYQYNPFYPDEKHVCWGHFRSKDLITWECLPVALSPLEWYDSHGCYSGSAVNKGGKLVLMYTGNVKDSKGERETYQCLAESSDGVEFKKPYINPVIKNQHEGYTRHFRDPKVWKHNDKWYMVLGAQREEEKGSTVLYCSDDLQNWSIVHEILGSNLSKFDFLGYMWECPNLFTLDNKDVLLFCPQGVDKQGDLYNNIYQCGYVLGSLNYETGEFSCGDFLELDRGFEFYAPQVMKTSDGRTLLLGWMGLPDREVSPTIDNRWLHCLTIIRELKMKDNKVVQKPLRELKRLRKGKVEYKNKIIKDTETKLDGINGDSFELKCKFEFDKVNQFGIKMRYNSHKDEEILMFYDAINEKIVFDRSKDGFHKEADAERKCFIKNNGKVKMHIFMDKSSVEIFINDGEETFTSRIYPSKDSKDIVFYSKGGEVRLSVDHWQI

SEQ ID NO: 9654 - protein, 1142 aa, Clostridium acetobutylicum
MRLKQIAVLLLSSIVIVTGNNWVKANTSISSTSAYRREAYRPQYHFTPDIGWMNDPNGMVYYHGVYHLFYQYNPYDTVWGPMHWGHAESKDMINWKQKSIALAPDTNGDIFSGSVVVDWNNSSGLFNKVSDHTGLVAFYTTNSAVASQQYQSMAYSTDDGSTWTKYNGGKPIIAQPENTPDFRDPKVSWDNEHNKWVMVLAAGNQTQFYSSNDLKNWTKTGEFGAEGQASHAGVWECPDLYQMTVSGQNIKKWVLSINLGSSVSPDSPPAGGSGMMYVVGDFDGSKFIADPKFTVSNNIGASDIVKGYYLLPGDTINVYDAKEGGNLLGSATVEDNQSTATVNLTKDLGNGSGKVWVAIVRNKIEKNRQEIDYSSEVASTSTGTSAVAPSGQDIINPDFETGDLTGWTATGNEWSNKNVVDNKTWGGGSGKYHCSGYRDPATGGAGDPGTGTLESTVFTLGGNGSINFLVAGGDLPKSAYVTLEDATTRKELTQFNASGLSTATVRRVNWDASAYLGKKLRIKVVDNATGAFGHIDVDDFHVYNTVPYKPPVNQLPSYPVNWIDYGPDFYAGVTWNDTTQQTNATTSEYGKYVPDGRRILLGWMSNWAYADRTPTTTWRSADSIPREEKLVATNDGYKITQQPIKELSSIRKKPTKTLTNTTITKGNTMSLGSEGIYEITSKFNINSTTSSEFGINVKVGGNQYTTIGYDKATSILFLNRHNSSSLNFLDYMPNKQEAPLKPDAKGNIKLQILVDKDSVEVFGSNDDNASVTITDQIFSDNLNNGIKLYSVGGSTKVNSLAITPLKSAVFTPYINNTLPYNPKSVQKTLPTSDFESGVVPGFWKQAEGYDTTFTVSNSTSWWGGTYNQDGKSFLTTFGENGDTASGILKSNYFKLSGDGKISFLIGGGNHPTSEYLALVDGVNGNKLFSATGADSETLRSVTWDASKYVGKVVYLEIADESQSGWGHINLDDINVPHFNCNIKKYRTTGTWGEIGPYGMKGSSTSAVSNGIYMASQNARNLSYEAKVSNVTSLSKTKSGEAGLVFGASKNLANAYEFNIDTSKGVARLFNKKNGKDLAPEVKETLSSDKSYQLKVLISGTNVKAYLDGTKIFDVNITSYAGRNVGLDVLDGSADFQDVSFQN

SEQ ID NO: 9655 - protein, 514 aa, Clostridium acetobutylicum
MKRKKLKLLTILMIFTVIILIVLLSLYIQNNSTIKSTTTKKQNYREVYHFTVPNKWKNDPQRPVFFDGEYHYYYLYNKDYPNGNGTEWRQATSKDLVTWKDEGVCIPKYTNENGDIWSGSFVVDAQNTAGFGKGAIVAIVTQPSASMDKQEQFLWYSTDRGRTFKPYSNQPIIPNPCTKDFRDPKIIWDFKNNKWVMVLAEGTKIGFYESYNLKNWQHTGDFFTNNIGIVECPDIFMMQSNDGNYKWILGTSANGKVSGEPNTYAYWVGNYDGKKFIADISTPKWLDYGFDWYAAVTFESENQSKNLKKRYALAWMNNWDYANNTPTIQNRFNGMDSIVREITLSKQKDNTYSLLSKPIKRIENITTSIDQFKQISVKGLKHLKVQGKAYQLDTDINWVDAKNVGIRLRESLDKKRHIDVGIFTEGKYSYVNRAYTGNPDKSKKYVESRAPFDINNKKVHLRIFVDKVSVEVFIDDGKITYSNEVFPRPEDKGITLFSIKGKAVFKNITIKHID

SEQ ID NO: 9656 - protein, 485 aa, Clostridium beijerinckii
MPNPKSYQEINQNLNNYYSNKEMSIWRNNFHIEMPFGLINDPNGLSYYDNKFHIFYQWNPFGCEHKTKHWGLVTTTNFINFTKPQMALKPQDWFDRNGCYSGCGLVKDNELKLYYTGNVKGPNGERESYQCLAIYRKDGIIEKHGVIIDKQPNGYTAHFRDPYVFIEDDTYYMILGVQSEDLKGRALIYESIDSVKWNLLGELKTDMKDFGYMWECPNIIRISKGKHAFIFSPQGLEKEELKNQNLYQSGYVIGELDIESVELKNHSRFKELDMGFDFYAPQIFKHNGENIMIGWIGMPDRDSEYPTYEHGWMYSLTMPRVLEYKNNVLYQKPINEMRNLRENELINIKGLILNNYNLALESRSVEIMISIEVEDIESTEVKFKFNDEYILITYDNKRQLCTVDRSNMNIGGKGIRKFKLNSSKELKMNVFIDNSVMEIYYQDGLEVTTLTYYPKSEGLELQIRNDSKITINELNMWNLRSVKYE

SEQ ID NO: 9657 - protein, 477 aa, Escherichia coli O157:H7 EDL933
  unsure (1)..(477): unsure at all Xaa locations
MTQSRLHAAQNALAKLHERRGNTFYPHFHLAPPAGWMNDPNGLIWFNDRYHAFYQHHPMSEHWGPMHWGHATSDDMIHWQHEPIALAPGDENDKDGCFSXSAVDDNGVLSLIYTGHVWLDGAGNDDAIREVQCLATSRDGIHFEKQGVILTPPEGIMHFRDPKVWREADTWWMVVGAKDPGNTGQILLYRGSSLREWTFDRVLAHADAGESYMWECPDFFSLGDQHYLMFSPQGMNAEGYSYRNRFQSGVIPGMWSPGRLFAQSGHFTELDNGHDFYAPQSFVAKDGRRIVIGWMDMWESPMPSKREGWAGCMTLARELSESNGKLLQRPVHEAESLRQQHQSISPRTISNKYVLQENAQAVEIQLQWALKNSDAEHYGLQLGTGMRLYIDNQSERLVLWRYYPHENLDGYRSIPLPQRDTLALRIFIDTSSVEVFINDGEAVMSSRIYPQPEERELSLYASHGVAVVQHGALWQLG

SEQ ID NO: 9658 - protein, 494 aa, Staphylococcus aureus subsp. aureus Mu50
MTEWTREERYQRIEDVDTEYFKTLKQQVDQSKFRQQFHIQPETGLLNDPNGLIFYKGKYYVSHQWFPLGAVHGLKYWYNYTSDDLINFKPEGPILNPDTKYDSHGVYSGSAFEYNGHLYYMYTGNHRDNHWQRHASQMIARLKEDGSVEKFPKPVISQQPEGYTSHFRDPKVFKYGEKYYAIIGAQNNDQQGRLLLYNTEDIINWHYLGEINTELDDFGYMWECPDYFNLDNQDVILICPQGIEPKGNQFKNIYQSGYILGKFDIEKLTYEHENFVELDNGFDFYAPQTFLDEKGRRVLIGWMGLPEIEYPTDNEGWAHCLTIPRVLNVENGQLKQRPYPALEKLRHNKETALGYANKFTRKLHPYEGKQYELIIDILDNDATEVYFELRTSKTSSTLIAYNKRENKITLDRSDSGLLPTNVEGTTRSTILDTPLKQLQIFVDTSSIEIFCNDGERVLTSRIFPTEDALGIKTSTESGQVYLQFTKYDLKDEHK

SEQ ID NO: 9659 - protein, 231 aa, Lactobacillus plantarum
SYFDGQWHLFYQVFPFGPVHGLKSWQHVTSKNLVDWHDEGLAIRPDTPYDSHGAYTGTALPIDDQLFIMYTGNVRTADWQRESYQLGAWMDTDNHIKKLSRPLIAHAPAGYTSSFRDPDLIRTDHGYYALIGAQTTTEIGAILVYFSKDLTTWTCQGELNVPANARGYMIECPNLVWIDQQPVLLFCPQGLSQTTTPYQNIYPNMYLVADQLDLAQAQFTEPHALTQLDDG

SEQ ID NO: 9660 - protein, 493 aa, Bacillus sp. snu-7
MSSLIAGLIEDPEDDFGYGKLTRLGTAASLAAAITVGRPILHYTAKNTWLNDPNGLVWHQGVYHLFYQNNPFDNVWGNMSWGHATSTDLLHWTEHPVAIACNEEEDVFSGSIVVDHGNTSGFGTAEDPALVAIYTSAFKEGSVHQGTQAQSLAFSTDAGMTWSKYAGNPVLGPGSAHFRDPKVFRYEGPAGSRWIMVAVEAQHQQVVLYRSADLKDWEYLSTFGPANASDGEWECPLPVDGDPDNVKWVLVVNINPGAVAGGSGGQYFVGDFDGVQFPADPDSLVPTDADGNVDLRHCLWLDWGRDYYAAVSFSNAPENRRIMIGWMNNWDYANSLPTSPWRSSMSLAREIELATVDGFPRLVQRPVLPLDSGEPARTIQNMELTTPCCNCPTRRPPGSAQLIEAEILPGTARHIAFRLLGAPDGSAATVLSFDALTSRLTLDRRNSGNTAFTISSRRLNPQPVKASTGGALRLKVIIDQCSVEVFAQTAGLC

SEQ ID NO: 9661 - protein, 489 aa, Lactobacillus gasseri
MEWTREQRYRKYKDWDAQTLLDLQAQAATSPYQMHYHIHPLSGLLNDPNGFSYYNGEYHLFCQSYPFGPVHGVKSWIHFASPDLVHWHYLGPAIDPDSDLDNAGAYSGSAMEHNGKLLLMYTGNHRDEDWTRIPYQVIAEMDENNHITKPDAAAILPPEHVSEHFRDPQLFKHDGKYYVLLGAQDAETKSGHIDIYESDDLKTWHENGYLDLGKDEMGYMIECPNLVFVNNYPVLIFCPQGLDKAISDYQNIYPNMYWIGKDINLNEAKFTPLQSHPANLDDGFDVYATQAFNAPDGNAYAISWVGLPDCTYPTDKENWANCYSQVKRLEIKDGALYQHPVDAIKNLRHNETQLNDEKIISQKAGKQYELKLYLAAGQAGKLHLASNDDLSASLVIDFNTAQDAKLTIDRASSGPAVNPDYGATRTIGLNDNEDLDLDIFVDGSLCEIFINDGRHVATLRFFARSSNQKIAFDKDTKYTGRLWSMNSIL

SEQ ID NO: 9662 - protein, 348 aa, Lactobacillus gasseri
  unsure (1)..(348): unsure at all Xaa locations
MINRRKQFEYLVSNLKDIPKENLNKEKNSVKRSPYHQRIHIESLFGMLGDPNGFSYFNGYYHLFHQWFPMKYSTNPNYFQQGWFHWKSRNLVDWIPVGEAMNNDTVFDKYGVYSGSAIPINNKLFLMYNGNSWTNTDTDDWHRVPSQLGAYMNENDNVAKLANPLIKGPISGYTGHFRDPKIFKKNGKYYSIIGAQTKAKTGTVLIYESQNLKLWNKVGEIKTNFEKNGYMWECSDYFELDNKGVVLFCPQGLKSKGNQFLNAFQACYAIGNKLDFRNLYFEGKKYEEIDSGFDFYAPQTMIAPDGRRILSAWMSIMNSNSPLIKYHYDXXXXXXXXXXXXXXXXXLF

SEQ ID NO: 9663 - protein, 172 aa, Clivia miniata
YHLFYQYNPYAAVWGNITWGHSVSHNLIDWIDLEHAIEPTEPYDINGCWSGSATIIPGRNPVILYTGADFKKRQVQNLAVPKNPRDPYLKEWIKAKNNPLMTPINGIDPQFFRDPTTAWNGPDKRWRVVVGSQIDGHGTALLYHSKDFVAWTKREKPLHFSNKTTMWECPDF

SEQ ID NO: 9664 - protein, 479 aa, Streptococcus pyogenes M1 GAS
MDLPQAIRYRPYKEWSSKDYQAITEKMAQSPWHSQFHVEPKTGLLNDPNGFSYFNGRYHLFYQNWPYGAAHGLKQWVHMTSTDLVHFTETRSRLLPDHAHDSHGAYSGSAYAIDDKLFLFYTGNVRDANWVRTPLQVGAWMDKQGNISKIPQVLIEQPDDVTEHFRDPQLFSYQGQFYAIIGAQGLDGKGKIKLYKAVDNHVDNWRFIADLDFDDSGTEYMIECPNLVFVDDKPVLIFSPQGLAKADLDYQNIYPNTYKIFESFNPETGQLLGGGALQNLDFGFEAYATQAFSSPDGRVLAVSWIGLPDIDYPTDRYDYQGALSLVKELRIKDGILYQTPVSALQNLRGPAELFHNKIDSSNCYELELTIPGQKKLDLLLFADQKGNGLRLKVDTTKGQLSIDRSRAGVQYAQDYGTVRSCQIPQGHVTLNVYVDNSILEIFINQGQKVLTSRVFPTHGQTGIQVVEGQAFGHYYEMRY

SEQ ID NO: 9665 - protein, 691 aa, Beta vulgaris
MSESSDSILPYSYAPLATKNEFNGFGPGENQPRRRSLKIGLAVFSTLMICALLMSILDYNNNVIENNVSNNNAPNKYNNVVGDLTLRPPPENVASVEVMPGSKDLLFKVSRGKPHGVSQKANSLPLRGLKVPFFDWNDLQLAWQRTAFHFQPQKNWMNDPNGPLYYNGWYHFFYQYNPAGAVWGNIVWGHAVSKDLIRWKHLPIAMVADRWYDFNGVWTGSATILPDGQIMMLYTGSTNESVQVQNLAYPANLSDPLLLEWVKYPGNPVLVPPPGIGKLDFRDPTTAWLTSEGKWRITIGSKLNKTGISLVYDTTDFKNYELLSNILHAVQGTGMWECVDFYPVSVAEPNGLDTSTNGPSVKHVLKASMDDDRNDYYTLGTYIEDNVTWVPDNPAIDVGIGLRYDYGRFYASKTFYDHEKKRRILWGWITEGDSEAADVKKGWASLQGIPRTVLFDQKTRTNLVQWPVEEVETLRQNNKDFDKVEVPAGSVVPLDVSAATEIDIIAEFDIDKEALENLPVSEEHYSCPASKGAAQRGALGPFGLLVLANNDLAEQTPVYFYVIKTLSGSFKTFFCTDLSRSSAATDVFKNIYGSTVPVLKGEKLSMRILVDHSIVEAFAQGGRTCITSRVYPTKAIYKETKLYVFNNATTATVTASIKTWQMSSARMLRNSIWVHLIMFFSTFIFIGRPLI

SEQ ID NO: 9666 - protein, 675 aa, Beta vulgaris
MSESSDSTLPYSYAPLATKNEFNGFGPGENQPRRRSLKIGLAVFSTLMICALLMSILDYNNNVDVNNVSKNNAPNKYNVGDLTFRPQPENVASVEVMPGSKDLLFKVSRGKPHGVSQKANSLPLRGLKVPFFDWNDLQLAWQRTAFHFQPQKNWMNDPNGPLYYNGWYHFFYQYNPAGAVWGNIVWGHAVSKDLIRWKHLPIAMVADRWYDFNGVWTGSATILPDGQIMMLYTGSTNESVQVQNLAYPANLSDPLLLEWVKYPGNPVLVPPPGIGKLDFRDPTTAWLTSEGKWRITIGSKINKTGISLVYDTTDFKNYELLSNILHAVQGTGMWECVDFYPVSVAEPNGLDTSTNDQSVKHVLKASMDDDRNDYYTLGTYIEDNVTWVPDNPAIDVGIGLRYDYGRFYASKTFYDHEKKRRILWGWITEGDSEAADVKKGWASLQGIPRTVLFDQKTRTNLVQWPVEEVETLRQNNKDFDKVEVPAGSVVPLDVSAATEIDIIAEFDIDKEALENLPVSEEHYSCPASKGAAQRGALGPFGLLVLANNDLAEQTPVYFYVIKTLSGSFKTFFCTDLSRSSAATDVFKNIYGSTVPVLKGEKLSMRILVDHSIVEAFAQGGRTCITSRVYPTKAIYKETKLYVFNNATTATVTASIKTWQMSSARLQENIEETKER

SEQ ID NO: 9667 - protein, 943 aa, Actinomyces naeslundii
MSRTTRALSALTAFCLLAAASTLASMPAAASGQARPVSAAPNAPAAPTAPKADQTGERWRPQSHYTPQKNWMNDPNGLVYYDGEYHMFYQYNPEGSDWGNMSWGHAVSKDLVHWQELGVAIPHTSQYGVFSGSAVIDTKNTSGLGSPDNPAMVAVWTRADVGGNQSQSLAYSTDKGGTWNLYNNGDPVLDIGSNEFRDPKVFWDQASGRWTMVVSHATEHRVSFYSSPDLIHWTEQSSFGGEGITSAVWACPDFFPLPVDGSSQEVKWVLVVTVADSAQYFVGSWDGTTFTPDEIPHYSGEEGTTLADFENGYAGWKADGAAFGSGPATGDLPGHQGKAYVDSFGSGDADTGTLTSDEFTVSSSYINLRTAGGKHPYNPQATGDNGGGRLLAGFDGSWEGWTVEGSAFAATPPQGATPAQQPLVNHSSAGLLNTYLDAATGQGSDAPTGTATSPTFTIDSAYLNLLMGGGNNPRPEGGADGGSRVSVVELIVDGKVVRSATGRNLEELNWQSWDVSDLKGKSAQIVVTDTATGGWGHILLDEVRASDKKASPIADNTSVNLVVDGKVVASATGNNSGTLEWTSMNVAAYKGRKARLVIEDRNGNAEDWGHLMVDQILQSDTKAFSGADVVPRLDYGKDYYAAVTWDNVPNGKRYQVGWMSNWAYVRDLPTTTWRTAMSTVREMGLTRVNGKLRLTAQPVTALESLRTGQELIRKDTDIPVGETSLGKAAQGTSLDISVDLSPSASSFAGLKVLDNGEQYTLIGYDSQAKQLVVDRTHSGVTDFSPKFPARSTAPLSPDSKGQVHLRIIVDAHSVEVFAADGTPVITQTVYPEQDATGVSLYAEGGTAHLGSLSLWHLGSVQDAGAPAEGPDSPGAGKPAVQGPARGQAKAASASASPTAAAAGKSVSARFPLARTGTSLTLGALGAAAAATGAYSLRLPRRRS

SEQ ID NO: 9668 - protein, 439 aa, Streptococcus pneumoniae TIGR4
MGDKKYTVEKANRFIAENKHLVNTQYKPEEHFSAEIGWINDPNGFVYFRGEYHLFYQFYPYDSVWGPMHWGHAKSKDLVTWEHLPVALAPDQDYDRNGCFSGSAIVKDDRLWLMYTGHIEEETGVRQVQNMVFSDDGIHFEKISQNPVATGSDLPDELIAADFRDPKLFEKDGRYYSVVAAKHKDNVGCIVLLGSDNLVEWQFESIFLKGGEHQGFMWECPDYFELDGKDCLIMSPMRYQREGDSYHNINSSLLFTGKVDWREKRFIPESVQEIDHGQDFYAPQTLLDDQNRRILIAWMQTWGRTLPTHDQEHKWACAMTLPRILRLEDGKLRQFPVKKGQYQIQIDKDCHYHLGNDIDYLEFGYDSNAQQVYIDRSHLIQKILGEEEQDTSRRYVDIEAKELEVVLDKNSIEIFVNQGEASLTATYYLTVPAELSRID

SEQ ID NO: 9669 - protein, 484 aa, Streptococcus pneumoniae TIGR4
MEWTTERRYRLYQDWTQEEIQHIKENMAQSPWHTHYHVEPKTGLLNDPNGFSYFDGKWILFYQNFPFGAAHGLKSWAQLESDDLIHFKETGIKVLPDTPLDSHGAYSGSAMQFGDNLFLFYTGNVRDKNWIRHPYQIGALMDKEGKITKIDKILIDQPADSTDHFRDPQIFNFQGQYYAIVGGQDLEKKGFVRLYKAVNNDYTNWQAVGDLDFANDRTAYMMECPNLVFVEEQPVLLYCPQGLDKKVLDYDNIFPNMYKIGASFDPKNAKMVDVSQLQNMDYGFEAYATQAFNAPDGRALAVSWLGLPDVSYPSDRFDHQGTFSLVKELTIKDDKLYQYPVAAIKDLRASEEAFSNRSQTKNTYELELNLEANSQSEIVLLADKEGKGLSINFDLVNGQVTVDRSQAGEQYAQEFGTTRSCPIENQATTATIFIDNSVFEIFINKGEKVFSGRVFPHADQNGILIKSGNPTGTYYELDYGRKTN

SEQ ID NO: 9670 - protein, 439 aa, Streptococcus pneumoniae R6
MINKTFTVEKANRFIAENKHLVNTQYKPEEHFSAEIGWINDPNGFVYFRGEYHLFYQFYPYDSVWGPMHWGHAKSKDLVTWEHLPVALAPDQDYDRNGCFSGSAIVKDDRLWLMYTGHIEEKTGVRQVQNMAFSDDGIHFEKISQNPVATGSDLPDELIAADFRDPKLFEKDGRYYSVVAAKHKNNVGCIVLLGSDNLVEWQFESIFLKGVEHQGFMWECPDYFELDGKDCLIMSPMRYQREGDSYHNINSSLLFTGKVDWGEKCFIPESVQEIDHGQDFYAPQTLLDDQNRRILIAWMQTWGRTLPTHDQEHKWACAMTLPRILRLEDGKLRQFPVKKGQYQIQIDKDCHYHLGNDTDYLEFGYDSNVQQVYIDRSHLIQKILGEEEQDTSRRYVDIEAKELEVVLDKNSIEIFVNQGEASLTATYYLTVPAELSRID

SEQ ID NO: 9671 - protein, 484 aa, Streptococcus pneumoniae R6
MEWTTERRYRLYQDWTQEEIQHIKENMAQSPWHTHYHVEPKTGLLNDPNGFSYFDGKWILFYQNFPFGAAHGLKSWAQLESDDLVHFKETGIKVLPDTPLDSHGAYSGSAMQFGDNLFLFYTGNVRDENWIRHPYQIGALMDKEGKITKIDKILIDQPADSTDHFRDPQIFNFKGQYYAVVGGQDLEKKGFVRLYKAVNNDYTNWQAVGDLDFANDRTAYMMECPNLVFVEEHPVLLYCPQGLDKKVLDYDNIFPNMYKIGASFDPKNAKMVDVSQLQNMDYGFEAYATQAFNAPDGRALAVSWLGLPDVSYPSDRFDHQGTFSLVKELTIKDDKLYQYPVAAIKDLRASEEAFSNRSQTKNTYELELNLEANSQSEIVLLADKEGKGLSINFDLVNGQVTVDRSQAGEQYAQEFGTTRSCPIENQATTATIFIDNSVFEIFINKGEKVFSGRVFPHADQNGILIKSGNPTGTYYELDYGRKTN

SEQ ID NO: 9672 - protein, 174 aa, Fortunella crassifolia
YHLFYQYNPKGAVWGNIVWAHSTSRDLINWFPHPPTIFPSQKSDVNGCWSGSATILPGEKPVILYTGIDPDKKQVQNIAYPKDLSDPYLKEWVKSDKNPLMAPDNVNNINASSFRDPTTAWQGPDNIWRMAIGSKINDLGFAILYKSKDFLKWVKAKRPLHAARHTGMWECPDF

SEQ ID NO: 9673 - protein, 490 aa, Staphylococcus epidermidis ATCC 12228
MEWTREERYQRIEDVDETYLEQLKHQVDTSLYRQTFHIQPEMGLLNDPNGLIYYEGYYYISHQWFPLGAVHGLKYWFNYKSKDLLHFEPQGTLLKPDTKYDSHGVYSGSAFEYQNHLYYMYTGNHRDQHWNRISSQMIARMNKDGKIEKFPKPVIHGQPEGYTSHFRDPKVFEKNSQLYAILGAQNENEMGRLLLYRSQDVVDWHFEGEIKTNLTQFGYMWECPDYFRLGNKDVILMCPQGVEAEGDKYRNIYQSGYMIGDLNFNNLFFDHESFQELDNGFDFYAPQTFVDADGQRILIGWMGLPDTEYPTDKEGWAHCLTIPRVLTIENGKLKQRPFKQLEDLRTNKETALGYANKFKRKLHPYEGKQYEMIIDILENDASEIYFELRSSRSESTLITYNKHENKLTLDRTDSGTLPSNVDGTTRSTILDSPLKQLQIFVDTSSIEIFCNDGERVLTSRIFPNEDATGIKASTESGQVYLKFTKYELKG

SEQ ID NO: 9674 - protein, 543 aa, Agrobacterium tumefaciens str. C58 (Cereon)
MWLKAKKDAEAGAVSFSNQNGKFAEVSSVNTEEFSFRIYQVFGGGHVELSYDTVTTAVSVIYWFTASDVLETGITVVHTKPDNAAPELPGSYHFRPPFGWMNDPNGFGRFEGRPHLFYQHYSHGLRWNTMHWGHAVSSDYLRWRHLPIFLFPSEDLTTRPDKRGGAYSGSTIPLVEGSGIRVFFTEQVQDRIPEQQIQLTATSSDLIMAGQADVILAHRPDGQGLTPDFRDPYVFRGPDGLWKMLLGSQSDGGGVILLYETLDPTAASGWTYVGKLWVETRYKTTAIECPCLLPLDGPANARSTRWVLIYGLMHSEDPETGRKNLTMADVGWFDGKVFTKEFGQELDFGTDNYAFQAFLDGDSIIGIGWLANWADANPEIDFPTSMTLPRRIHYANGELLTPPIGAAESLRSHILDRTRLAAGERVTFINGAVEILIELASSDAAFELALDHPTVTLGLVSDETGLWIRHEDGRDGASPHYIAKGARASRIRIFLDYGSIEVFANRGRYVGTKRIEGFEPVRSALLRADPGAVVHATSWALKP

SEQ ID NO: 9675 - protein, 479 aa, Streptococcus pyogenes MGAS8232
MDLPQAIRYRPYKGWSSKDYQAITEKMAQSPWHSQFHVEPKTGLLNDPNGFSYFNGRYHLFYQNWPYGAAHGLKQWVHMTSTDLVHFTETRSRLLPDHAHDSHGAYSGSAYAIDDKLFLFYTGNVRDANWVRTPLQVGAWMDKQGNISKIPQVLIEQPDDVTEHFRDPQLFSYQGQFYAIIGAQGLDGKGKIKLYKAVDNHVDNWRFIADLDFDDSGTEYMIECPNLVFVDDKPVLIFSPQGLAKADLDYQNIYPNTYKIFESFNPETGQLLGGGALQNLDFGFEAYATQAFSSPDGRVLAVSWIGLPDIDYPTDRYDYQGALSLVKELRIKDGILYQTPVSALQNLRGPAELFHNKIDSSNCYELELTIPGQKKLDLLLFADQKGNGLRLKVDTTKGQLSIDRSRAGVQYAQDYGTVRSCQIPQSHVTLNVYVDNSILEIFINQGQKVLTSRVFPTQGQTGIQVVEGQAFGHYYEMRY

SEQ ID NO: 9676 - protein, 464 aa, Bacillus anthracis str. A2012
MSKYKTILQSNKDELHSLYEIANQDSWKPIYHIHPPFGLMNDPNGVSYYNDEYHVFYQWYPFGPIHGMKHWGHVKSKDLINWERMPVAIIPTESYESHGAYSGSAIVKDDLLHLLYTGNIKNPDDSRDAKQCMATMDSQYTMTKYSNNPVIDIIPDGYTKHVRDPKVWKHNDIYYMLLGAQRKNKTGTLLLYKSKDLYNWNFQGEITTNLKEFGFMWECPDYFQLSGKDVLLFSPQGIEKDREDFHNIYNVVYAIGHFDIKNLYFHIDSYYEADKGFDFYAPQTLEDSTSRRLLFAWAGSSEITYPSDDYMWAHCLTLPRELTLEDNILKQKPVSELTKLRTTKKEISGDITAGLNVLSTLDNEGSYELIVTLKTEDAKRFGLSLFHNEEECFPITFNREQGTISIDRGNFYHQFGGEYGFERCKKIDIQDTIELQIFVDKSIVEILIYDGSTVFTSRVFPRKD

SEQ ID NO: 9677 - protein, 480 aa, Streptococcus pyogenes SSI-1
MMDLPQAIRYRPYKEWSSKDYQAITEKMAQSPWHSQFHVEPKTGLLNDPNGFSYFNGRYHLFYQNWPYGAAHGLKQWVHMTSTDLVHFTETRSRLLPDHAHDSHGAYSGSAYAIDDKLFLFYTGNVRDANWVRTPLQVGAWMDKQGNISKIPQVLIEQPDDVTEHFRDPQLFSYQGQFYAIIGAQGLDGKGKIKLYKAVDNHVDNWRFIADLDFDDSGTEYMIECPNLVFVDDKPVLIFSPQGLAKADLDYQNIYPNTYKIFESFNPETGQLLGGGGLQNLDFGFEAYATQAFSSPDGRVLAVSWIGLPDIDYPTDRYDYQGALSLVKELRIKDGILYQTPVSALQNLRGPAELFHNKIDSSNCYELELTIPGQKKLDLLLFADQKGNGLRLKVDTTKGQLSIDRSRAGVQYAQDYGTVRSCQIPQGHVTLNVYVDNSILEIFINQGQKVLTSRVFPTQGQTGIQVVEGQAFGHYYEMRY

SEQ ID NO: 9678 - protein, 487 aa, Clostridium perfringens str. 13
MEFLNDEDINKKSKEYYNKTKDIWRDNFHFEPPFGLINDPNGLSYYKGEYYIFFQWNPYGCEHKNKHWGIVKTKNFKDFSIPKIALTPKEYFDKDGCYSGGSIVKDGNLQVFYTGNVKGEKGERISYQCKGILEENGQLKKLGPVISTLPKGYTAHFRDPYIWENNGYYYMILGIQTEKLKGRCVIYKSNDLDNWKFYGELKTSYEDFGFMWECPSFFKIDNKDILIFSPQGIKEEEFRYQNIYQSGYLIGNLNYDTLEFKNNNEFKELDMGFDFYAPQVFKDEKGRNILIGWMGLPEKEEFHCSRENGWIFSLTMPRELTLKNGVLHQNPIEEMRKLRGDKIVSLKNILIEDLNFNEVKENSYELKLDIERREASKIEINFMESNEEHTSLIYDFKKEICIIDRNSMINGEKGIRKFKLHSNGNLKINMFVDKSSVEIYFQDGIEVASLKLYPKKDSFNLSLKSEEGKIKINSLSIWEMNEVNYNE

SEQ ID NO: 9679 - protein, 494 aa, Staphylococcus aureus subsp. aureus MW2
MTEWTREERYQRIEDVDTEYFKTLKQQVDQSKFRQQFHIQPETGLLNDPNGLIFYKGKYYVSHQWFPLGAVHGLKYWYNYTSDDLINFKAEGPILNPDTKYDSHGVYSGSAFEYNGHLYYMYTGNHRDNHWQRHASQMIARLKEDGSVEKFPKPVISQQPEGYTSHFRDPKVFKYSEKYYAIIGAQNNDQQGRLLLYNTEDIINWHYLGEINTELDDFGYMWECPDYFNVDNQDVILICPQGIEPKGDQFKNIYQSGYILGKFDIEKLTYEHENFVELDNGFDFYAPQTFLDEKGRRVLIGWMGLPEIEYPTDNEGWAHCLTIPRVLNVENGQLKQRPYPALEKLRHNKETALGYANKFTRKLHPYEGKQYELIIDILDNDATEVYFELRTSKTSSTLIAYNKRENKITLDRSDSGLLPTNVEGTTRSTILDTPLKQLQIFVDTSSIEIFCNDGERVLTSRIFPTEDALGIKTSTESGQVYLQFTKYDLKDEHK

SEQ ID NO: 9680 - protein, 433 aa, Corynebacterium glutamicum ATCC 13032
MCGAMHTELSSLRPAYHVTPPQGRLNDPNGMYVDGDTLHVYYQHDPGFPFAPKRTGWAHTTTPLTGPQRLQWTHLPDALYPDASYDLDGCYSGGAVFTDGTLKLFYTGNLKIDGKRRATQNLVEVEDPTGLMGGIHRRSPKNPLIDGPASGFTPHYRDPMISPDGDGWKMVLGAQRENLTGAAVLYRSTDLENWEFSGEITFDLSDAQPGSAPDLVPGGYMWECPNLFTLRDEETGEDLDVLIFCPQGLDRIHDEVTHYASSDQCGYVVGKLEGTTFRVLRGFSELDFGHEFYAPQVAVNGSDAWLVGWMGLPAQDDHPTVAREGWVHCLTVPRKLHLRNHAIYQELLLPEGESGVIRSVLGSEPVRVDIRGNISLEWDGVRLSVDRGGDRRVAEVKPGELVIADDNTAIEITAGDGQVSFAFRAFKGDTIER

SEQ ID NO: 9681 - protein, 480 aa, Shigella flexneri 2a str. 301
MIKMTQSRLHAAQNALAKLHEHRGNTFYPHFHLAPPAGWMNDPNGLIWFNDRYHAFYQHHPMSEHWGPMHWGHATSDDMIHWQHEPIALALGDDNDKDGCFSGSAVDDNGVLSLIYTGHVWLDGAGNDDAIREVQCLATSRDGIHFEKQGVILTPPEGIMHFRDPKVWREADTWWMVVGAKDPGNTGQILLYRGSSLREWAFDRVLAHADAGESYMWECPDFFSLGDQHYLMFSPQGMNAEGYSYRNRFQSGVIPGMWSPGRLFAQSGHFTELDNGHDFYAPQSFLAKDGRRIVIGWMDMWESPMPSKREGWAGCMTLARELSESNGKLLQRPVHEAESLRQQHQSVSPRRISNKYVLQENAQAVEIQLQWALKNSDAEHYGLQLGTGMRLYIDNQSERLILWRYYPHENLDGYRSIPLPQRDTLALRIFIDTSSVEVFINDGEAVMSSRIYPQPEERELSLYASHGVAVLQHGALWLLG

SEQ ID NO: 9682 - protein, 477 aa, Shigella flexneri 2a str. 2457T
MTQSRLHAAQNALAKLHEHRGNTFYPHFHLAPPAGWMNDPNGLIWFNDRYHAFYQHHPMSEHWGPMHWGHATSDDMIHWQHEPIALALGDDNDKDGCFSGSAVDDNGVLSLIYTGHVWLDGAGNDDAIREVQCLATSRDGIHFEKQGVILTPPEGIMHFRDPKVWREADTWWMVVGAKDPGNTGQILLYRGSSLREWAFDRVLAHADAGESYMWECPDFFSLGDQHYLMFSPQGMNAEGYSYRNRFQSGVIPGMWSPGRLFAQSGHFTELDNGHDFYAPQSFLAKDGRRIVIGWMDMWESPMPSKREGWAGCMTLARELSESNGKLLQRPVHEAESLRQQHQSVSPRRISNKYVLQENAQAVEIQLQWALKNSDAEHYGLQLGTGMRLYIDNQSERLILWRYYPHENLDGYRSIPLPQRDTLALRIFIDTSSVEVFINDGEAVMSSRIYPQPEERELSLYASHGVAVLQHGALWLLG

SEQ ID NO: 9683 - protein, 479 aa, Streptococcus pyogenes MGAS315
MDLPQAIRYRPYKEWSSKDYQAITEKMAQSPWHSQFHVEPKTGLLNDPNGFSYFNGRYHLFYQNWPYGAAHGLKQWVHMTSTDLVHFTETRSRLLPDHAHDSHGAYSGSAYAIDDKLFLFYTGNVRDANWVRTPLQVGAWMDKQGNISKIPQVLIEQPDDVTEHFRDPQLFSYQGQFYAIIGAQGLDGKGKIKLYKAVDNHVDNWRFIADLDFDDSGTEYMIECPNLVFVDDKPVLIFSPQGLAKADLDYQNIYPNTYKIFESFNPETGQLLGGGGLQNLDFGFEAYATQAFSSPDGRVLAVSWIGLPDIDYPTDRYDYQGALSLVKELRIKDGILYQTPVSALQNLRGPAELFHNKIDSSNCYELELTIPGQKKLDLLLFADQKGNGLRLKVDTTKGQLSIDRSRAGVQYAQDYGTVRSCQIPQGHVTLNVYVDNSILEIFINQGQKVLTSRVFPTQGQTGIQVVEGQAFGHYYEMRY

SEQ ID NO: 9684 - protein, 421 aa, Leuconostoc mesenteroides subsp. mesenteroides ATCC 8293
MFIKDDINHFEKYHLYPTQGLLNDPNGLIYFKGQYHVFFQWNPHACNHKYKEWGHFVSNDLKTWTRLETALKPSLPDMDSAGIYSGTAFVKDDKLYVFYTGNVRDESGRSVASHQMWAVSEDGIHFEKLGELFPHPEGFTKDVRDPKVWQGRNGRYYLMVGARSNENIGDILIYESENFSQWQLHGSLIEGELTDIRGYMIECPDLIEIDGKQILMFSPQGLPADEENYRYQNIHNTGYVVGTFDEETLHFKPETSFKEVDKGFEFYAPQTMHTNEGRKIMWGWAGMMTPEREASTPTIASNNWVHVLTIPRELHVTSDNLLTQTPISEILHTKPLTNFGAINVGQYTIDSHDNWTLSFGENMTLVRNKNQLILSRRQWENGEIEKRLVVGDINHTLLIVDTDIIEVFTNNNQSVMTARYF

SEQ ID NO: 9685 - protein, 554 aa, Bifidobacterium longum DJO10A
  unsure (1)..(554): unsure at all Xaa locations
MMIRKSAATRSTPTSSCVRWKRPRPERTAMTDFTPETPVLTPIRDHAAELAKAEAGVAEMAAKRNNRWYPKYHIASNGGWINDPNGLCFYKGRWHVFYQLHPYGTQWGPMHWGHVSSTDMLNWKREPIMFAPSLEQEKDGVFSGSAVIDDNGDLRFYYTGHRWANGHDNTGGDWQVQMTALPDNDELTSATKQGMIIDCPTDKVDHHYRDPKVWKTGDTWYMTFGVSSADKRGQMWLFSSKDMVRWEYERVLFQHPDPDVFMLECPDFFPIKDKDGNEKWVIGFSAMGSKPSGFMNRNVSNAGYMIGTWEPGGEFKPETEFRLWDCGHNYYAPQSFNVDGRQIVYGWMSPFVQPIPMEDDGWCGQLTLPREITLGDDGDVVTAPVAEXXXXXXXXXXXXXXXXXHGSVTLDMDGEQIIADDAEAVEIEMTIDLAASTAERAGLKIHATEDGAYTYVAYDGQIGRVVVDRQAMANGDRGYRAAPLTDAELASGKLDLRVFVDRGSVEVYVNGGHQVLSSYSYASEGPRAIKLVAESGSLKVDSLKLHHMKSIGLE

SEQ ID NO: 9686 - protein, 500 aa, Pseudomonas syringae pv. syringae B728a
MSFSVNAMSNPMSPALERAHHALEEGLSQLIHDYRPGYHLAPPAGWMNDPNGVVFFRGEYHVFYQHHPFDAKWGPMYWGHAKSADLVHWQHLPIALAPGDDFDRDGCFSGSAVVCGDTLALIYTGHIWLGDVGDERFIRQVQCLATSTDGISFVKHGAVIDTPPQDEMIHFRDPKVWRQDGHWYLIAGARLGDKPLLPLYRSKDLHAWEFVSYVSSGEEGDGYMWECPDLFGLNERDVLLYSPQGMPAQRYERLNRFHTGYRVGQVDSQWQFTGGPFIELDSGHDFYAAQTLVAADGRRLLWAWIDMWESPTPTEAHHWRGMLGLPRELEVRENRLCVHPARELTALRDASLPGTAWWSDAGSQWLTDIHGDMLEIHVQLDLLDCIEGHLGVALRCSPDGQEQTLLYYDASLKRLILDRTQSGTHVSGQRSVAIDPQQNQLELRIFLDRSSIEVFEQNGSFSFSSRLYPQTDSLGVKLVANGTGGRVCIANAWQLSSGYL

SEQ ID NO: 9687 - protein, 518 aa, Bifidobacterium longum NCC2705
MTDFTPETPVLTPIHDHAAELAKAEAGVAEMAANRNNRWYPKYHIASNGGWINDPNGLCFYKGRWHVFYQLHPYGTQWGPMHWGHVSSTDMLNWKREPIMFAPSLEQEKDGVFSGSAVIDDNGDLRFYYTGHRWANGHDNTGGDWQVQMTALPDNDELTSATKQGMIIDCPTDKVDHHYRDPKVWKTGDTWYMTFGVSSADKRGQMWLFSSKDMVRWEYERVLFQHPDPDVFMLECPDFFPIKDKDGNEKWVIGFSAMGSKPSGFMNRNVSNAGYMIGTWEPGGEFKPETEFRLWDCGHNYYAPQSFNVDGRQIVYGWMSPFVQPIPMEDDGWCGQLTLPREITLGDDGDVVTAPVAEMEGLREDTLDHGSITLDMDGEQIIADDAEAVEIEMTIDLAASTAERAGLKIHATEDGAYTYVAYDDQIGRVVVDRQAMANGDRGYRAAPLTDAELASGKLDLRVFVDRGSVEVYVNGGHQVLSSYSYASEGPRAIKLVAESGSLKVDSLKLHHMKSIGLE

SEQ ID NO: 9688 - protein, 479 aa, Streptococcus agalactiae 2603V/R
MNLPTEIRYRPYDEWTEEDKENIVKNVSKSPWRATYHLEAKTGLLNDPNGFSYFNGKFHLFYQNWPFGAAHGLKQWVHTESDDLVHFKETGIKLKPDHVNDSHGAYSGSALAIDDKLFLFYTGNVRDMKWNRDPRQIGAWMTNDGKITKFDKVLISQPNDVTEHFRDPQIFNYDNQFYAVIGAQNSKKCGFIKLYKALNNDIHHWEFVGDLDFGGTGSEYMIECPNIIFVKGKPVLLYSPQGLDKNELDYQNIYPNTYKIGQYFDANSSKIVEPSPIYNLDYGFEAYATQGFNTSDGRAFIVSWIGLPDIDYPSDQFDYQGAMSLVKELSIKNGNLYQYPVPAMKNLRQHQAEFKTQLQTNNTYELELLVPRNDLSSFVLFANPKGQGLSITIDTVKGKVIIDRSQAGQQYATEFGTSRQCDIPKDATSINIFIDKSIFEIFINKGEKVFTGRVFPDAEQSGIQLKEGHVHGKYFELKY

SEQ ID NO: 9689 - protein, 479 aa, Streptococcus mutans UA159
MNLPQNIRYRRYQDWTEEEIKSIKTNVALSPWHTTYHIEPKTGLLNDPNGFSYFNGKFNLFYQNWPFGAAHGLKSWIHTESEDLVHFKETGTVLYPDTSHDSHGAYSGSAYEIGDQLFLFYTGNVRDENWVRHPLQIGAFMDKKGNIQKFTDVLIKQPNDVTEHFRDPQIFNYKGQFYAIVGAQSLDKKGFIKLYKAVDNDIKNWQEVGNLDFGGSKSEYMIECPNLVFINEQPVLIYSPQGLSKSELDYHNIYPNTYKVCQSFDTEKPALVDASEIQNLDFGFECYATQAFNAPDGRVYAVSWIGLPDIDYPSDSYDYQGALSLVKELSLKHGKLYQYPVEAVRSLRSEKEAVTYKPETNNTYELELTFDSSSVNELLLFADNKGNGLAITVDTKMGTILIDRSKAGEQYALEFGSQRSCSIQAKETVVNIFVDKSIFEIFINKGEKVFTGRVFPNDKQTGIVIKSGKPSGNYYELKY

SEQ ID NO: 9690 - protein, 1423 aa, Streptococcus mutans UA159
MEEETVCKNWFMRKSGKSWIFGCAVFFVLGLATALPVAAEEISQTTAADTAVTEVRTEDSSQTSSQETAVTETTQSEGTASKQLTTPAVADQTTEPTDNEPISSSDGASSPYQVTDTTEPQQTLTPADSEPQAKADVQQAAAPKKEEINPVTNLEDMSHDTNGTWEVREDGIHSNAIGKGDSFLYSQSSGKNFVYATDVTFKQNSGAAALVFRSNNDSNNKNMYAVNVDIGGHKAKFWRWVDNKDIQLIDERDVVPTADNRYTLKVVAVNNWISYYVNDILMASTGDYVLQKADKGQNTVIPEGHFGLLNWNGDMVFQNTKFALLDDTTAPLIDNITVRSDRGNVEKQGQFFSEEPLHIQYVSNDASQVSLDIAKHNPAATVTVEDKTGRVYTDPSHLPVNVGANYFTVKSTVIDSFGRTVTLTYRINVHRRQNDEVYYNELYRDQYHYSVKDGWANDPNGLVYYNGVYHLFHQFYDDTKWGPMHWAHATSTDLIHWKEEPIAFYPDSNGYMFSGCVVVDEHNSSGLFKTAKGGLVAIITANGNGQRMELAYSEDEGKTWQKYDRIVADWSNDPLQNQDFRDPKVFHWNNQWFMVLAGGPLRIYSSNNLKDWKVESTYPDLHTECPDMYPIVANDGVLKWVLSRGGRFYKVGDFKQVDGKWTFIADDAYKDKDQVMNFGKDSYAAMTYYVHDFGTETRPTIPKLTEVNWMNTWEDYCNLVADTVGQDFNGTFNLNLDLGLINENGQYILTQTPVKAYDSLRDVNTALHFKDVTVDANNTLLKDFKGDSYEIVSHFRPDEKTTKVGFNLRVGNGQATKVIYDLQTETLSIDRSQSGTILSAAFAKVNSQHVTKNADGSIDLHIYVDRASVEVFSKNNTVAGANQIFPNPEAVGASIIVEGGKAQADISVYQMKTIWTDKKDTAKPVAMNTTTAKELALQVGQSQDLQVYLAPASVRQDVEWTISDPSLVRTSQKGNVLHLTAVKKGKLTITAISKENPSLSKTFTISITLNNFKTNLKGLQSVTGKWYVDDETLYDSNTSSNDYYMASQKPGFKEYDYDIDLKYQRGLINLFVASGNIDPSQAYSVQFGDSETVRLYRFAGDTIAEANMGKRINDDQYHHIKVTKTKNSIIISVDGQEVMSHNFDQVDSYFNDAYVGLGLWDGAVEFQNFFVTDHATTPKPDSDPTPQPDAPEALAQERELIDPATGVRVILQKGELASIVRVKVSHIETNDAHTPAVLNAKDYDLFNITPIDKNEKVVAITKPATVLLPIDAGKVVDKVVYLPNTDKEENLPFTIVSLTDSNGKKQSYVRFTAEHFSEYGLVYQAENQTNLKSKEKQDNVAISYPLNLEQEVKVSSISRKYAANKTADVNSVQQTEPSVMSSSPKATLPDTGDHKTDLSQLGVLAMIGSFLVEIAGYFKKRKD

SEQ ID NO: 9691 - protein, 479 aa, Streptococcus agalactiae NEM316
MNLPTEIRYRPYDEWTEEDKENIVKNVSKSPWRATYHLEAKTGLLNDPNGFSYFNGKFHLFYQNWPFGAAHGLKQWVHTESDDLVHFKETGIKLKPDHVNDSHGAYSGSALAIDDKLFLFYTGNVRDMKWNRDPRQIGAWMTSDGKITKFDKVLISQPNDVTEHFRDPQIFNYDNQFYAVIGAQNSKKCGFIKLYKALNNDIHHWEFVGDLDFGGTGSEYMIECPNIIFVKGKPVLLYSPQGLDKNELDYQNIYPNTYKIGQYFDANSSKIVEPSPIYNLDYGFEAYATQGFNTSDGRAFIVSWIGLPDIDYPSDQFDYQGAMSLVKELSIKNGNLYQYPVPAMKNLRQHQAEFKTQLQTNNTYELELLVPRNDLSSFVLFANPKGQGLSITIDTAKGKVIVDRSQAGQQYATEFGTSRQCNIPKDATSVNVFIDKSIFEIFINKGEKVFTGRVFPDAEQSGIQLKEGHVHGKYFELKY

SEQ ID NO: 9692 - protein, 501 aa, Lactobacillus plantarum WCFS1
MIWNRKTRYTPYEQWPATKLPQLVAQVRQSKWRMQHHIQPTSGLLNDPNGFSYFDGQWHLFYQVFPFGPVHGLKSWQHVTSKNLVDWHDEGLAIRPDTPYDSHGAYTGTALPIDDQLFIMYTGNVRTADWQRESYQLGAWMDTDNHIKKLSRPLIAHAPAGYTSSFRDPDLIRTDHGYYALIGAQTTTEIGAILVYFSKDLTTWTCQGELNVPANARGYMIECPNLVWIDQQPVLLFCPQGLSQTTTPYQNIYPNMYLVADQLDLAQAQFTEPHALTQLDDGFDVYATQAINAPDGRALAVSWIGLPEISYPTDRENWAHCLSLVKELTLKDGHLYQNPVAAVDDLRTTAHDLVFEQQRATVAALNGSFELLLTVPADKTVTVNIADQQESGQLQVTVDANHGQVMIDRRHTGNSFAEDYGQTRQVELTAHKTIKIRLIIDVSVFECYIDNGYSVMTGRFFLNATPSRLNVQGDTTAVTGKVWEWRQSEHTGVDNNETKIK

SEQ ID NO: 9693 - protein, 493 aa, Pseudomonas syringae pv. tomato str. DC3000
MSNPMSPALERAHHALEEGLSQVIHDYRPGYHLAPPAGWMNDPNGVVYFRGEYHVFYQHHPFDAKWGPMYWGHAKSADLVHWQHLPIALAPGDDFDRDGCFSGSAVVCGDTLALIYTGHTWLGEVGDERFIRQVQCLATSLDGINFVKHGAVIDSPPQDTIIHFRDPKVWQQDEHWYLIAGARLGDKPLLPLYRSADLHAWELVSYVSSGNEGDGYMWECPDLFRLDGRDVLLYSPQGMPAQGYERLNKFHTGYRVGQIDSQWQFSGGPFIELDNGHDFYAAQTLVAADGRRLVWAWLDMWESPTPTTAHHWRGMLGLPRELEVRDERLCVHPARELTGLRHASVPGTPWWSEPGTRWVTEVRGDLLEIHVHLDLLDCLEGHLGVALRCSADGKEQTLLYYDASLKRLILDRDPSGSHVSGQRSVAIDPKQGQLELRVFLDRSSIEVFDKNGSFSLSSRLYPQADSLGVKLIANGTGGRVCIANAWTLASGYR

SEQ ID NO: 9694 - protein, 677 aa, Bacillus subtilis subsp. subtilis str. 168
MKKRLIQVMIMFTLLLTMAFSADAADSSYYDEDYRPQYHFTPEANWMNDPNGMVYYAGEYHLFYQYHPYGLQWGPMHWGHAVSKDLVTWEHLPVALYPDEKGTIFSGSAVVDKNNTSGFQTGKEKPLVAIYTQDREGHQVQSIAYSNDKGRTWTKYAGNPVIPNPGKKDFRDPKVFWYEKEKKWVMVLAAGDRILIYTSKNLKQWTYASEFGQDQGSHGGVWECPDLFELPVDGNPNQKKWVMQVSVGNGAVSGGSGMQYFVGDFDGTHFKNENPPNKVLWTDYGRDFYAAVSWSDIPSTDSRRLWLGWMSNWQYANDVPTSPWRSATSIPRELKLKAFTEGVRVVQTPVKELETIRGTSKKWKNLTISPASHNVLAGQSGDAYEINAEFKVSPGSAAEFGFKVRTGENQFTKVGYDRRNAKLFVDRSESGNDTFNPAFNTGKETAPLKPVNGKVKLRIFVDRSSVEVFGNDGKQVITDIILPDRSSKGLELYAANGGVKVKSLTIHPLKKVWGTTPFMSNMTGWTTVNGTWADTIEGKQGRSDGDSFILSSASGSDFTYESDITIKDGNGRGAGALMFRSDKDAKNGYLANVDAKHDLVKFFKFENGAASVIAEYKTPIDVNKKYHLKTEAEGDRFKIYLDDRLVIDAHDSVFSEGQFGLNVWDATAVFQNVTKES

SEQ ID NO: 9695 - protein, 480 aa, Bacillus subtilis subsp. subtilis str. 168
MTAHDQELRRRAYEEVEKKEPIANSDPHRQHFHIMPPVGLLNDPNGVIYWKGSYHVFFQWQPFQTGHGAKFWGHYTTQDVVNWKREEIALAPSDWFDKNGCYSGSAVTKDDRLYLFYTGNVRDQDGNRETYQCLAVSDDGLSFEKKGVVARLPEAILTAHFSRSEVWEHEGTWYMVIGAQTENLKGQAVLFASDNLTEWRFLGPITGAGFNGLDDFGYMWECPDLFSLQGSDVLIVSPQGLEADGFRYQNVYQSGYFVGRLDYNKPELKHGEFTELDQGFDFYAPQTLEDDQGRRILFAWMAVPDQDEGSHPTIDCHWIHCMTLPRQLTLSGQKLIQQPLPELKAMRRNEKKIHINMHGSSGALPVEKPERTEILLEDIHTESGFSISIRGTATFSFHKDEGIVTLERKSFDGKRTEARHCRIKDLHTVHMFLDASSVEIFINNGEEVFSARYFPFPGNHEVTASATGKSEMNVGIWTLM

SEQ ID NO: 9696 - protein, 516 aa, Bacillus subtilis subsp. subtilis str. 168
MNYIKAGKWLTVFLTFLGILLFIDLFPKEEHDQKTKSKQKPDYRAAYHFTTPDKWKNDPQKPIYFDGKYHYFYLYNRDYPKGNGTEWRHAVSEDLVHWTDEGVAIPKYTNPDGDIWTGSVVVDKENTAGFGKNALVAIVTQPSAKDKKQEQYLWYSTDKGKSFKFYSGNPVMPNPGTDDFRDPKVIWDDQDNKWVMVMAEGSKIGFYESDNLKDWHYTSGFFPEQAGMVECPDLYMMRASDGTNKWVLGASANGKPWGKPNTYAYWTGSFDGKEFKADQTEAQWLDYGFDWYGGVTFEDSKSTDPLEKRYALAWMNNWDYANNTPTMKNGFNGTDSVIRELRLKEQDGTYSLVSQPIEALEQLTVSTDEIEDQDVNGSKTLSITGDTYQLDTDLSWSELKNAGVRLRESEDQKRHIDVGIFAEGGYAYVNRAATNQPDKSNTYVESKAPYDVNKRKVHLKILVDKTTIEVFVGDGKTVFSNEVFPKPEDKGITLYSDGGTASFKNITVKHFDSIHE

SEQ ID NO: 9697 - protein, 486 aa, Enterococcus faecalis V583
MNQWTDELRYAPYSSWTSAHLENLTSIIAQSSWRFKYHIQPQTGLLNDPNGFSYFNNQWHLFYQAFPFGSVHGLKSWAHLTSSDLIHWDYEGIALYPDSEYDSHGVYSGSALTIDNQLCLFYTGNVRDQTWQRFAYQNIAWLNSLGAITKESTPFLPIDPNYSSHFRDPMVFPYQEGLVLLIGASDLNGQGKIVVYFSKDRNVHNFHQLGELTFTNQELGYMVECPNLVFIDGQPVLLFCPQGLSPSVKSYQNIYPNMYTLAETFDLENLSLVQAGPFENLDEGFDVYATQAFNAPDGRALAVSWIGLPEITYPSDVEGWANGLSLVKELTIHNGKLFQYPVSETEMLRQSATTLSNGCHFLSTASFELEVDIPKNEIAFIRLLANETGSKGLLITIDTIHGKITLDRTFAGQSFAEKYGTIRETKIRKNKSVQLTIFVDCSVAEIYVNKGEKTMTGRFFPDKAQQYLHLSKTAKACFYELENTNN

SEQ ID NO: 9698 - protein, 479 aa, Enterococcus faecalis V583
MELSREIRYRAYSEWSKDEITKIKENIKQSPWHASYHIEPKTGLLNDPNGFSFFNGKFTLFYQNWPFGAAHGLKKWVHAESDDLVHFNITGTELLPDTKYDSHGAYSGSAYEVDGKLLLLYTGNVRDKNWRRDSFQLGAWMDRSYNITKCEDVFINKPEDVTDHFRDPQIFDYKGQFYAIVGGQSLEKRGVIKLYKAVGNSVEKWSEVGNLDFCSSGSEYMIECPNLLFVNDTPILIYCPQGLDKSELSYDNIYPNTYKICQSFDERTAKLVGSSKIKNLDYGFDVYATQGFNSPDGRTLIVSWIGLPDVEYPTDKYDYQGAMSLVKELSINNGKLYQYPVDAIKTLRTSCEDFTSKIETSNTYELEVTFPANQKSELLLFADDKGNGLSLIVDTKEGKVILDRSKAGIQYAIDFGMTRECLIDTEETIANIFVDNSIIEIFINKGEKVFTSRVFPEKDQNGIQIKSGKPIGKYFELEY

SEQ ID NO: 9699 - protein, 610 aa, Bacteroides thetaiotaomicron VPI-5482
MNVFLPVKQLQTFLICFILMTISVSTRAADSPLLIKNLGEGHCLVRVNTSQNYLLLPVEDASPDVRISMIVNNKEVKNFDVRLAIHKVDYFVPVDLSDFSGKTVSFKFKMNSNDPIRVNLSPDNTACCKEMKLSDTFDTTNREKFRPTYHFSPLYGWMNDPNGMVYKDGEYHLFYQYNPYGSKWGNMNWGHAISKDLVNWEHRPVAIAPDALGTIFSGSAVVDHNNTAGFGAGAIIAIYTQNSDRQVQSIAYSTDNGRTFTKYENNPVLVSEARDFRDPKVFWYEATKRWIMVLAVGQEMQIFSSPNLKDWAFESSFGEGYGAHGNVWECPDLFELPVEGTNEKKWVLLCSLGDGPFGDSATQYFIGSFDGKKFSCDNQPNVTKWMDWGKDHYATVTWSDAPDNRRIAIAWMSNWQYANDVPTSQYRSPNSIPRDLSLFAIDGGIYLQSAPSPELLKLRGVSKKRSFKVNGTRIVKDLIPNNEGAYEIELSLKNQQAEIIGFRLYNDKGEEVDMQYDMKEKKFSMDRRKSGEVNFNENFPMLTWTAIEEDKDEMKLRLFVDRSSVEAFGDGGRFAMTNQVFPSEPYNHISFYSKGGAYKVDSFVVYKLKK

SEQ ID NO: 9700 - protein, 627 aa, Bacteroides thetaiotaomicron VPI-5482
MKTTPWIKLCKGAVLALTVSFGLTYCQSTKSTFTLEQKGDSLTIVHITHPTNYILLPIEEEEADESQVRLDTGNAADTDMDIRLAQTKVDYFVPFALPADTKVATLRIQKKSKDALCWEEIKLSDTFDTTNTDKFRPVYHHTPLYGWMNDANGLVYKDGEYHLYYQYNPYGSKWGNMHWGHSVSKDLMHWEHLAPAIARDTLGHIFSGSSIVDQENVAGYGAGSILAYYTSASDKNGQIQCLAYSKDNGRTFTKYEKNPVLRPSDGLKDFRDPKVFWYAPESKWVMIVSADKEMRFYDSHNLKDWNYLSSFGEGYGVQPCQFECPDMVELPVDGDINYKKWALIVNVNPGCYFGGSATQYFIGDFDGTKFICDNQPNVTKWLDWGKDHYATVCFSNTGDRVVAVPWMSNWQYCNIVPTRQFRSANALPRELGLYTQDNDIYLSAAPVAETKNLRKESKDVPSFTVDKDYHIESLLTDNEGAYELSLNIEAGKAEIMGFSLFNDKGEKVDIYFNLPEKKLVMDRTKSGIVDFGKNSSPHEIEAHDRRKTTSINYIDDFALATWAPIQKENEYKLDVFVDKCSVEIFLDGGKIAMTNLIFPTEPYNRMCFYSKGGTFAVDSFSVYRLGL

SEQ ID NO: 9701 - protein, 548 aa, Bacteroides thetaiotaomicron VPI-5482
MKTLSRTVLTLFVLSFSCLAAIAGEVSFKITKQYLNFPISHKENRGRMTFEVNGKPDLSVVIRLAPDEAEYWVFKDVSAFKGKTIKITYDGNEKGLSKIYQSDEIEGQAELYKEKNRPQFHFTTRRGWINDPNGLIYYEGEYHLFYQHNPFERDWENMHWGHAVSKDLIHWTELPDALYPDHLGTMFSGSAVIDYDNTAGFNKGKTPAMVAAFTAASSDRQVQGIAYSLDKGRTFTKYDKNPVINSKEKWNSQDTRDPKVFWYAPSKHWVLVLNERDGHSIYTSSNLKDWKYESHVTGFWECPELFELPVDGDKNHTKWVMYGATGTYMLGSFDGKVFTPEAGKYCYTTGSIYAAQTFTNIPASDGRRIQIGWGRISHPGMPFNGMMMLPTELTLRTTKDGIRLVNVPVKEVESLCKPLRSWKSLSSDEANRHLKEFYDADCLRIKTTIKLSHATDAGFNLFGQRMIGYDMNSNTLNGRFYSPQDPTSMELSADIYIDRTSIEVFIDGGLYSYSMERRPDTNNREGLHFWGNRIEVKDLQVFSVESIW

SEQ ID NO: 9702 - protein, 491 aa, Bacillus cereus ATCC 14579
MSKYKTILQSNKDELHSLYEIANQDSWKPIYHIHPPFGLMNDPNGVSYYNDEYHVFYQWYPFGPIHGMKHWGHVRSKDLINWERMPVAIIPTESYESHGAYSGSAIVKDGLLHLLYTGNIKKPDDSRDAKQCMASMDSQYTMTKYSNNPVIDIIPDGYTKHVRDPKVWKHNDMYYMLLGAQRENKTGTLLLYKSQDLYNWHFQGEITTNLKEFGFMWECPDYFQLSGKDVLLFSPQGIEKDGENFHNVYNVVYAIGHFDIKNLYFHVDSYYEADKGFDFYAPQTLEDSTSRRLLFAWAGSSEITYPSDDYMWAHCLTLPRELTLEDNILKQKPVSELTKLRTTKKDISGDITAGLNVLSTLDDEDSYELIVTLKTEDAKRFGLSLFHNEEECFPITFNREQGTISIDRGNFYHQFGGEYGFERCKKIDIQDTIELQIFVDKSIVEIFLYDGSTVFTSRVFPRKDMKHHIAIFSDAKLNFTITQYKLKRGIV

SEQ ID NO: 9703 - protein, 174 aa, Pyrus communis
YHLFYQYNPKGVVWGNIVWAHSTSTDLVNWTPHDAAIFPSQPSDINGCWSGSATILPSGKPVILYTGINPQNQQVQNLAFPKNLSDPFLREWVKVPQNPLMAPTQANRINASSFRDPTTAWLGPDKRWRVIIGSKQNQRGLAILYRSKDFLHWVKAKHPLHSAKKTGMWECPDF

SEQ ID NO: 9704 - protein, 432 aa, Thermotoga maritima
MFKPNYHFFPITGWMNDPNGLIFWKGKYHMFYQYNPRKPEWGNICWGHAVSDDLVHWRHLPVALYPDDETHGVFSGSAVEKDGKMFLVYTYYRDPTHNKGEKETQCVAMSENGLDFVKYDGNPVISKPPEEGTHAFRDPKVNRSNGEWRMVLGSGKDEKIGRVLLYTSDDLFHWKYEGVIFEDETTKEIECPDLVRIGEKDILIYSITSTNSVLFSMGELKEGKLNVEKRGLLDHGTDFYAAQTFFGTDRVVVIGWLQSWLRTGLYPTKREGWNGVMSLPRELYVENNELKVKPVDELLALRKRKVFETAKSGTFLLDVKENSYEIVCEFSGEIELRMGNESEEVVITKSRDELIVDTTRSGVSGGEVRKSTVEDEATNRIRAFLDSCSVEFFFNDSIAFSFRIHPENVYNILSVKSNQVKLEVFELENIWL

SEQ ID NO: 9705 - protein, 588 aa, Citrus sinensis
MDTPYHHLHSPPQYPPLLPEEQPSDAGPPASHRKPFKGFAAILASVIFLLSLVALIINQTQKPLPSQNNIVPTSKPTSFSNPEPRGVAEGVSAKSNSHLLRNIKGSYNWTNAMFTWQRTSFHFQPEKNWMNDPNGPLFYKGWYHLFYQYNPDSAVWGNITWGHAVSADLIHWLYLPIAMVPDQWYDINGVWTGSATILPDGQIVMLYTGSTDKSVQVQNLAYPADPSDPLLLDWVKYPGNPVLMPPRHIGPKDFRDPTTAWAGPDGKWRLTIGSKIGKTGISLVYQTTDFKTYELLDEYLHAVPGTGMWECVDFYPVAINGSVGLDTSATGPGIKHVLKASLDDTKVDHNKTGTYNPENDKWTPDNPEEDVGIGLKWDYGRYYASKSFYDPYKKRRIVWGWINETDTESDDLEKGWASVQLDISAEFETELLGSGAPEEGYGCSGGAIDRSAMGPFGLLVNAHDSLSELTPIFFRSSNTTKGTNTYFCADETRSSLAPDVFKQVHGSKVPVIQGEKLSMRILVDHSIVESFGQGGRTVITSRIYPTKAIYGAARLFLFNNATGVNVKATLKIWRLNSAFIHPFPLDQI

SEQ ID NO: 9706 - protein, 533 aa, Debaryomyces occidentalis
MVQVLSVLVIPLLTLFFGYVASSSIDLSVDTSEYNRPLIHFTPEKGWMNDPNGLFYDKTAKLWHLYFQYNPNATAWGQPLYWGHATSNDLVHWDEHEIAIGPEHDNEGIFSGSIVVDHNNTSGFFNSSIDPNQRIVAIYTNNIPDLQTQDIAFSLDGGYTFTKYENNPVIDVSSNQFRDPKVFWHERFKSMDHGCSEIARVKIQIFGSANLKNWVLNSNFSSGYYGNQYGMSRLIEVPIENSDKSKWVMFLAINPGSPLGGSINQYFVGDFDGFQFVPDDSQTRFVDIGKDFYAFQTFSEVEHGVLGLAWASNWQYADQVPTNPWRSSTSLARNYTLRYVIQMLKLTANIDKSVLPDSINVVDKLKKKNVKLTNKKPIKTNFKGSTGLFDFNITFKVLNLNVSPGKTHFDILINSQELNSSVDSIKIGFDSSQSLFYIDRHIPNVEFPRKQFFTDKLAAYLEPLDYDQDLRVFSLYGIVDKNIIELYFNDGTVAMTNTFFMGEGKYPHDIQIVTDTEEPLFELESVIIRELNK

SEQ ID NO: 9707 - protein, 532 aa, Bifidobacterium animalis
MATLPTNIPANGILTPDPALDPVLTPISDHAEQLSLAEAGVSALETTRNDRWYPKFHIASNGGWINDPNGLCRYNGRWHVFYQLHPHGTQWGPMHWGHVSSDNMVDWHREPIAFAPSLEQERHGVFSGSAVIGDDGKPWIFYTGHRWANGKDNTGGDWQVQMLAKPNDDELKTFTKEGMIIDCPTDEVDHHFRDPKVWKTGDTWYMTFGVSSKEHRGQMWLYTSSDMVHWSFDRVLFEHPDPNVFMLECPDFFPIRDARGNEKWVIGFSAMGAKPNGFMNRNVNNAGYMVGTWKPGESFKPETEFRLWDEGHNFYAPQSFNTEGRQIMYGWMSPFVAPIPMEEDGWCGNLTLPREITLGDDGDLVTAPTIEMEGLRENTIGFDSLDLGTNQTSTILDDDGGALEIEMRLDLNKTTAERAGLHVHATSDGHYTAIVFDAQIGGVVIDRQNVANGDKGYRVAKLSDTELAADTLDLRVFIDRGCVEVYVDGGKHAMSSYSFPGDGARAVELVSESGTTHIDTLTMHSLKSIGLE

SEQ ID NO: 9708 - protein, 515 aa, Penicillium purpurogenum
MISLRIALAINALSYICALVELAVADDYRPTFHFCPAENWMNEPNGLIKIDSTWHLFYQADPTANVWGNECWGHATSSDLLHWDHLPVAIPVENGIESFTGTSYYDANNTSSLGTSTNPPYLAFFTGYTSSNGTQDQRLAYSTDLGTTWLKFSGNPIISAALEAPHDVTGGLESRDPKVFFHEPSGKWVMVLAHGGQDKLTFWTSLDAKSWTWMSDLLASQIEGFPSSVTGWEVPDMFQLPIQGTNETTWVIIFTPAQGSPAGGNGVVALTGSFDGETFLANPVDSSTLWLDYGRDFDGAMSWENVPASDGRLIIAAVMNSYGSNPPTNTWKGMLSFPRTLTLEKIGSKQYFLQQPIAELSTVDNALASIQNQTIAPKQTLLSSIHGSSLDVRIAFSVDSGATLSLAVRKGGSEQTVIRYSQSNSTLSVDRTASGDISYDPAAGGIHSAQLARDNTELVYLRVLVDTCSVEVFGGQGEAVISDLIFPSNSSDGLSLEVIGGTATLQSVEVFSVSL

SEQ ID NO: 9709 - protein, 609 aa, Kluyveromyces lactis
MLKLLSLMVPLASAAVIHRRDANISAIASEWNSTSNSSSSLSLNRPAVHYSPEEGWMNDPNGLWYDAKEEDWHIYYQYYPDAPHWGLPLTWGHAVSKDLTVWDEQGVAFGPEFETAGAFSGSMVIDYNNTSGFFNSSTDPRQRVVAIWTLDYSGSETQQLSYSHDGGYTFTEYSDNPVLDIDSDAFRDPKVFWYQGEDSESEGNWVMTVAEADRFSVLIYSSPDLKNWTLESNFSREGYLGYNYECPGLVKVPYVKNTTYASAPGSNITSSGPLHPNSTVSFSNSSSIAWNASSVPLNITLSNSTLVDETSQLEEVGYAWVMIVSFNPGSILGGSGTEYFIGDFNGTHFEPLDKQTRFLDLGKDYYALQTFFNTPNEVDVLGIAWASNWQYANQVPTDPWRSSMSLVRNFTITEYNINSNTTALVLNSQPVLDFTSLRKNGTSYTLENLTLNSSSHEVLEFEDPTGVFEFSLEYSVNFTGIHNWVFTDLSLYFQGDKDSDEYLRLGYEANSKQFFLDRGHSNIPFVQENPFFTQRLSVSNPPSSNSSTFDVYGIVDRNIIELYFNNGTVTSTNTFFFSTGNNIGSIIVKSGVDDVYEIESLKVNQFYVD

SEQ ID NO: 9710 - protein, 104 aa, Bromus tectorum
SRGLDGGLKTSFCQDETRSSRARDVTKRVIGSTVPVLDGEAFSMRVLVDHSIVQGFAMGGRTTMTSRVYPMEAIYEKSGLYLFNNATTAGVTAEKLVVYEMDSS

SEQ ID NO: 9711 - protein, 473 aa, Ralstonia solanacearum
MLDTLALDVIEDPWRQAYHLCPPQGLLNDPNGLIFWRGAYHVFYQWNPHGCRHENKHWAHARSTDLIHWELLPPALAPDAPYDEDGCYSGCAVEVDGDLFLLYSGNVRSPDGGRASYQCLAHSRDGVGFDKLGPVINGVLPGYTGHFRDPKAWRQGDHWYAVLGAQRTDLTGTVLLLKSPDLRQWQLLGELIAPALPCYMYECPDLFTLDRRTVLVCCQQTMETGAGGNRRSDVAGYMLGQIDLERAQFPHSGFRPLDQGFDFYAPQTLLGPDGRRLLIGWMGLPVQPQTPTVASGWMHCLTLPRELTLEGDQLMQRPARELAMLRSATIRVPDVDLEANTAFVLPQPDGGAWELDLSIRAECPAGWVLHLFDSAQQSLSLAFDGVGTLTLRRHCPMAGQINERKTCGIGGPVTRLQVFIDRSSVEMFVNDGVAVLTTCCYPAAEPEAPRLQARQPLSLRDIHVWPLEDRLAR

SEQ ID NO: 9712 - protein, 534 aa, Gluconacetobacter diazotrophicus
MTMTGTVPRSAGWRRLSRRCLPAAFALLFPLGAPHAADTPQWRPVLHFSPAAYWMNDPNGPILLDGVYHLFYQYAPGSMTWGHPSWGHATSTDLLHWTEHGVAIAATPGEEIFSGSLVPDPLNRSGLGSTDAPPLLAFHTSVFHDNPAHPDGTQAQSVSVSHDGGFTWRPYAHNPVLTLHPDSRQFRDPSVFWYQDGGCWIMTTVVGDAQLVKLYRSTDLLHWSFLSDFQPSGYRKPGMLWEMPTLVPLKLDGNPRATRWVMIVSVNPWSIAGGSGVQYFVGRFDGVTFTPDALPPPGSDPSRYDWLDHGADQYATTLFANTGSGAPVLIGWMDNWDYATDLPTAPWRGQMTLPVDIALKTVDGHPTVIQTPTRAYEDMVRKKGVVTYGDRNLPQDGRVTIPSRGEVLDIRLVLRRGGARRAGIVVRETPDGRTGTSVSYDFVDGTLTVDRGRSGLVGFSPRFSTRHIAYLAAPGGEVALHLVVDRASVELFANDGVLRMTDLIFPPAGSDRISLFAEGGGATIHGLRVAVLAR

SEQ ID NO: 9713 - protein, 677 aa, Lolium temulentum
MPMETRDGGSRLEPALLPCSYVPLPDDAEAAVVGRGHRTGPLFAALLLALAAVLLVVATLAGVRLVGQLPATGVVMLNQPVDEAMSTTSSSRGPESGVSEKTSGVPAEHGGMLAADAASSNAFPWSNAMLQWQRTGFHFQPEKNWMNDPNGPVYYKGWYHLFYQYNPDGAIWGNKIAWGHAVSRDLVRWRHLPIAMFPDQWYDINGAWSGSATVLPDGRIVMLYTGSTNASVQVQCLAFPSDPSDPLLTNWTKYEGNPVLYPPPHIGEKDFRDPTTAWYDGSDGMWRIVIGSKDDRHAGMALTYKTNNFIDFELIPGVLHRVPATGMWECIDLYPVGAARGIDMTEAVAAASNNGGGEVLHVMKESSDDDRHDYYALGRYDAATNKWTPLDADADVGIGLRYDWGKFYASKTFYDPAKKRRVLWGWVGETDSERADVAKGWASLQSTPRTVVLDNKTGSNLIQWPVVEVETLRTNSTNLGSITVDHGSIFPLSLHRATQLDIEASFRLDPLDVVAAKEADVGYNCSTSGGAAGRGALGPFGLLVLADARRHGGDTEQTAVYFYVARGLDGGLRTHFCHDESRSSRANDIVKRVVGNVVPVLDGEALSIRVLVDHSIVESFAQGGRSTVTSRVYPTEAIYANTGVYLFNNATGARVTATSLAVHEMDFSYNQAYMASL

SEQ ID NO: 9714 - protein, 533 aa, Lolium temulentum
SNAMLQWQRTGFHFQPEMNWMNDPNGPVYYRGWYHLFYQYNPEGAVWGNIAWGHAVSRDLVHWRHLPLAMVPDQWYDINGVWTGSATVFPDGTLNMLYTGSTNASVQVQCLAVPEDPNDSLLRNWTKHEANPVLLPPPGIGDKDFRDPTTAWFDESDQTWRTVIGSKDNNGHAGIAMVYKTKDFLNYELIPGYLHRVDGTGMWECIDFYPVGGKNGSEELYVIKESSDDDRHDWYTLGKYDAAANTFTAADPENDLGIGLRYDWGKFYASKTFYDPAKQRRVLWGWIGETDSERADVAKGWASLMSIPRTVELDEKTRTNLIQWPVEEIETLRINSTDLSGVTIDHGSVYPLALHRATQLDIEASFRLDSATIAALNEADVGYNCSTSGGSANRGALGPFGLLVLADGKAEQTAVYFYVAKGLDGSLQTHFCHDESRSTLAKDVVKRVVGYTVPILDGEAFSMRVLVDHSIVESFVMGGRSTATSRVYPTEAIYGAAGAYLFNNATSGTVTVEKLVVHEMDSSYNQIFMADDL

SEQ ID NO: 9715 - protein, 625 aa, Lolium temulentum
MESRAIPSAAYAALLPSAADDVALAKQDRPGVGWRGFLTVLAASGVVVLLVGATLLAGSRMGQAGDGEGNTDEDGAGGFPWSNEMLQWQRAGFHYQPEGHFMSDPNGPVYYRGYYHLFFQYNRRGVAWDDYIEWGHVVSQDLVHWRPLPLAMRPDHWYDKKGVLSGTITVLHNGTLVLLYTGVTEDPMAESQCIAVPTDPNDPLLRHWTKHPANPVLAHPQGVQGMDFRDPTSAWWDKSDATWRILIGSKDDDNGSHAGIAFIFKTKDFLSFERVPGIVHRVEGTGMWECIDFYPVGGGHSSSSSEELYVIKASMDDERHDYYSLGRYDAAANTWTPLDAELDLGIGLRYDWGKLYASTSFYDPLKQRRIMLGYVGEVDSARADVAKGWASLQSIPRTVALDEKTRTNLLLWPVEEVEALRYNSTDLSGITIDDGSVFHLPLHQATQLDIEATFRLDASDVAAINEADVGYNCSSSGGAAARGALGPFGLLVHAAGDLIRGEQTAVYFYVSRALDGTLRTSFCNDETRSTRAKDVTKRVVGSTVPVLDGEALSMRVLVDHSIVQSFAMGGRVTATSRVYPTEAIYARAGVYLFNNATGASVTAERLVVHEMASAVYDDTVMVEDS

SEQ ID NO: 9716 - protein, 231 aa, Lolium temulentum
MESRSIPGAYAYAYEPLPRSSDDDRRSTGGVRWRACAAVLAASALVVFVVASTLAGSRVDRVAVDVAAMPALSETARSRGRDAGVSEKTSGAADEMGFLGAGSGADADGFPWSNAMLQWQRTGFHFQPEMNWMNDPNGPVYYRGWYHLFYQYNPEGAVWGNIAWGHAVSRDLVHWRHLPLAMVPDQWYDINGVWTGSATVFPDGTLNMLYTGSTNASVQVQCLAVPEDPND

SEQ ID NO: 9717 - protein, 803 aa, Azotobacter vinelandii
MGLAGLGGRDGRGRRGVRHRPGHRLLHEQRRRPGVPADPLPAGHGRLQEPRDAGRRVRPGTHRRHPATAAPAALLGVQPVPDRGRRGLHDLRAAVPGVLRLLLPYPGRRHPRLRLPELLAGTGRGPAHAGRALGGRPHRRQIRPAAGRHHHVRAHPRLGAGQRCLDHRRLQDAACHRGADPVGRGVQVHLRQLRCAAVGHALPGQFPVRPATDRHAVVAGRGLWLRQARLRQRLPAAGQSGRRLPAAVLVAAARRPVQQDHPGGGRRPGTAGHRPGGQPLRTLNEAIRVISSAPAGMTPLETFPRTFEDHDMQADLLDEAQRAIARTLPARRDDYRLGYHLSPPAGWMNDPNGLVYFRGEYHVFYQHHPYSPQWGPMYWGHARSADLVHWEHLPIALAPGDPFDRDGCFSGSAVVDGDTLYLIYTGHRWLGEAGNDEQGMRQVQCLASSTDGIAFTKHGAVIDTPPHPDIMHFRDPRVWRRGDHWWMALGARQGDDPLLLLYRSRDLRQWDCLGRALEGRREADGYMWECPDLFELEGRDVFLFSPQGLEPDGHERWNLFQNGYRLGRLDERARFVAESELREIDHGHDFYAAQTLLAPDGRRLLWAWMDMWQSPMPSQAHHWCGALTLPRELSRDGDRLRMRPARELAALRQSRQALAIGALESGSRTLEVRGALLEFELELELTGSSAERFGLALRCSDDGRERTLLYFDAMARRLVLDRQHSGAGVSGVRSVPVAPGQTRIALRIFLDRSSIEVFVDDGVHTLSSRIYPRPDSLGVGAFAVNGRGVFAEGAVWSLADLKL

SEQ ID NO: 9718 - protein, 513 aa, Chenopodium rubrum
SAKLACLHCDSRGSPLHLFYQYNPDSAVWGNITWGHAVSRNLIHWKYLPISMVPDQWYDINGVWTGSATILDGNIMLACLQVDSRGSPGTELEFAAALSDPLLLDWVKYSGNPVLTPPEGIGAKDFRDPTTAWLGPNGVWRFIIGSKKGKTGISLVYKTKDFKSYELEGNLHGVPDTGMWECVDFYPVSTTGQNGLDTSAYGPGMKHLLKASLDDNKQDHYALGTYDVASQTWTPDNPEMDVGIGLRLDYGKYYASKTFFDQNKQRRILWGWVGETDTEADDLLKGWSSLQSVPRVVTYDAKTGTNVIQWPVKEVESLRTDSIVYDNLVLQPGSIINLNITSAAQLDVSAEFMMDQEALKSTVGDDVINNCSAAAIRQALGPFGVLVLADGSLSEFTPVYFYIAKTSDGTVKNWFCTDQSRSSKASSVDKQVYGGPVPVLEGEKYSMRLLVDHSIVEAFGQGGRTCITSRIYPTKAINGEARVFLFNNATDLSVTASVKIWKLKSADISPYKF

SEQ ID NO: 9719 - protein, 346 aa, Cucumis melo
DPTTAWTGPQNGQWLLTIGSKIGKTGVALVYETSNFTSFKLLDGVLHAVPGTGMWECVDFYPVSTKKTNGLDTSYNGPGVKHVLKASLDDNKQDHYAIGTYDLGKNKWTPDNPELDCGIGLRLDYGKYYASKTFYDPKKERRVLWGWIGETDSESADLQKGWASVQSIPRTVLYDKKTGTHLLQWPVEEIESLRVGDPTVKQVDLQSGSIELLRADSAAELDIEASFEVDKVALQGIIEADHVGFSCSTSGGAASRGILGPFGVIVIADQTLSELTPVYFYISKGADGHAETHFCADQTRSSEAPGVGKQVYGSSVPVLDGEKHSMRLLVDHSIVESFAQGGRTVI

SEQ ID NO: 9720 - protein, 663 aa, Lagenaria leucantha
MAITSLYLTLLHSIHSPFLLLCLFLTYFFICLPYPFFPRSLSFLFYCRYFPPHHSGPFLLCSLFPLSLFFLLLLVSLLTLVSYHTPSPDATNLPENTQSPPPFRLARGVAEGVSAKSNPYFSDSVDSFNWTNAMFSWQRTFFHFQPEGNWMNDPNGPLYHKGWYHLFYQYNPESAVWGNISWGHAVSRDLITLAYISAYAMVPDQPYDVNGVWTGSATILPDGRIIMLYTGDTIDGVQVQNLAYPANLSDPLLLNWVKYPGNPVLVPPPGIGPKDFRDPTTAWLGHDGKWRITIGSRVGTTLGVSLVYTTNDFIKYELVDRFLHAVPGTGMWECVDFYPVSVHGSKGLDTSVNGHGVKHVLKASLDDTKMDHYAIGTYFSNNDTWVPDNPEEDVGIGLKLDYGRYYASKTFYDQNKERRILWGWINETDTEANDLAKGWASVQTIPRTVLFDHKTGSNIIQWPVEEVESLRLGSTEFNDVLVEPGSVVELEVGTATQLDILTEFELEALGSEKATISEEGCGGGAAERSSLGPFGLLVLAHQSLSELTPIYFNVANSSKGSREAYFCADEKRSSKAPDVFKQVYGSKIPVLEGENFSMRVLVDHSIVESFGQGGRRVITSRIYPTEAIYGAAKLFLFNNATSANVKATVKVWRLNSAFIQPFS

SEQ ID NO: 9721 - protein, 664 aa, Arabidopsis thaliana
MASSDALLPISAREEEPLCPYTRLPMADPNQETHGPRRRRPFKGLLAVSFGLLFIAFYVALIATHDGSRSNDEGIDETETITSRARLAGVSEKRNDGLWKLSGDRNTPAFEWNNSMLSWQRTAFHFQPEQNWMNDPNGPLFYKGWYHFFYQYNPNAAVWGDIVWGHAVSRDLIHWVHLPIAMVADQWYDSNGVWTGSATFLPDGSIVMLYTGSTDKAVQVQNLAYPEDPNDPLLLKWVKFPGNPVLVPPPGILPKDFRDPTTAWKTSEGKWRITIGSKLNKTGISLVYDTIDFKTYEKLDTLLHRVPNTGMWECVDFYPVSKTAGNGLDTSVNGPDVKHIVKASMDDTRFDHYAVGTYFDSNGTWIPDDPTIDVGMTASLRYDYGKFYASKSFYDQNKGRRVLWSWIGESDSEASDVQKGWSSLQGIPRTVVLDTKTGKNLVQWPVEEIKSLRLSSKQFDLEVGPGSVVPVDVGSAAQLDIEAEFEINKESLDKIIGNASVVAEAEEFSCEKSGGSTVRGALGPFGFSVLATESLSEQTPVYFYVAKGKDSELKTFFCTDTSRSSVANDVVKPIYGSVVPVLKGEKLTMRILVDHSIVEAFGQGGRTCITSRVYPTTAIYGAAKLFLFNNALDATVTASFTVWQMNSAFIHPYSDEAVRALSRT

SEQ ID NO: 9722 - protein, 660 aa, Arabidopsis thaliana
DALLPISAREEEPLCPYTRLPMADPNQETHGPRRRRPFKGLLAVSFGLLFIAFYVALIATHDGSRSNDEGIDETETITSRARLAGVSEKRNDGLWKLSGDRNTPAFEWNNSMLSWQRTAFHFQPEQNWMNDPNGPLFYKGWYHFFYQYNPNAAVWGDIVWGHAVSRDLIHWVHLPIAMVADQWYDSNGVWTGSATFLPDGSIVMLYTGSTDKAVQVQNLAYPEDPNDPLLLKWVKFPGNPVLVPPPGILPKDFRDPTTAWKTSEGKWRITIGSKLNKTGISLVYDTIDFKTYEKLDTLLHRVPNTGMWECVDFYPVSKTAGNGLDTSVNGPDVKHIVKASMDDTRFDHYAVGTYFDSNGTWIPDDPTIDVGMTASLRYDYGKFYASKSFYDQNKGRRVLWSWIGESDSEASDVQKGWSSLQGIPRTVVLDTKTGKNLVQWPVEEIKSLRLSSKQFDLEVGPGSVVPVDVGSAAQLDIEAEFEINKESLDKIIGNASVVAEAEEFSCEKSGGSTVRGALGPFGFSVLATESLSEQTPVYFYVAKGKDSELKTFFCTDTSRSSVANDVVKPIYGSVVPVLKGEKLTMRILVDHSIVEAFGQGGRTCITSRVYPTTAIYGAAKLFLFNNALDATVTASFTVWQMNSAFIHPYSDEAVRALSRT

SEQ ID NO: 9723 - protein, 648 aa, Arabidopsis thaliana
MASTEALLPVTSLQDPLSESRSDQIPETRRRRPIKVHLAVYSGLLLIALYVTLIVTHDGSKAEIATESRPRMAGVSEKSNDGVWISSDDGKVEAFPWNNTILSWQRTAFHFQPEKNWMNDPNGPLFYKGWYHFFYQYNPNAAVWGDIVWGHAVSKDLIHWLYLPIAMVPDQWYDANGVWTGSATFLDDGSIVMLYTGSTDEFVQVQNLAYPEDPSDPLLLKWVKFSGNPVLVPPPGIGAKDFRDPTTAWKTSSGKWRITIGSKINRTGISLIYDTTDFKTYEKHETLLHQVPNTGMWECVDFYPVSKTQLNGLDTSVNGPDVKHVIKASMDDTRIDHYAIGTYDDSNATWVPDNPSIDVGISTGLRYDYGKYYASKTFYDQNKGRRILWGWIGESDSEAADVQKGWSSVQGIPRTVVLDTRTHKNLVQWPVEEIKSLRLSSKKFDMTIGPGTVVPVDVGSATQLDIEAEFEIKTDDLKLFFDDDSVEADNKFSCETNGGSTARGALGPFGFSVLADEGLSEQTPVYFYVTKGKHSKLNTVFCTDTSRSTLANDVVKPIYGSFVPVLKGEKLTMRILVDHSIVEGFAQGGRSCITSRVYPTKAIYGATKLFLFNNAIDATVTASFTVWQMNNAFIHPYSSDDLGVPSST

SEQ ID NO: 9724 - protein, 650 aa, Arabidopsis thaliana
MASTEALLPVTSLQDPLSESRSDQIPETRRRRPIKVHLAVYSGLLLIALYVTLIVTHDGSKAEIATESRPRMAGVSEKSNDGVWISSDDGKVEAFPWNNTILSWQRTAFHFQPEKNWMNGTNIKCPLFYKGWYHFFYQYNPNAAVWGDIVWGHAVSKDLIHWLYLPIAMVPDQWYDANGVWTGSATFLDDGSIVMLYTGSTDEFVQVQNLAYPEDPSDPLLLKWVKFSGNPVLVPPPGIGAKDFRDPTTAWKTSSGKWRITIGSKINRTGISLIYDTTDFKTYEKHETLLHQVPNTGMWECVDFYPVSKTQLNGLDTSVNGPDVKHVIKASMDDTRIDHYAIGTYDDSNATWVPDNPSIDVGISTGLRYDYGKYYASKTFYDQNKGRRILWGWIGESDSEAADVQKGWSSVQGIPRTVVLDTRTHKNLVQWPVEEIKSLRLSSKKFDMTIGPGTVVPVDVGSATQLDIEAEFEIKTDDLKLFFDDDSVEADNKFSCETNGGSTARGALGPFGFSVLADEGLSEQTPVYFYVTKGKHSKLNTVFCTDTSRSTLANDVVKPIYGSFVPVLKGEKLTMRILVDHSIVEGFAQGGRSCITSRVYPTKAIYGATKLFLFNNAIDATVTASFTVWQMNNAFIHPYSSDDLGVPSST

SEQ ID NO: 9725 - protein, 728 aa, Arabidopsis thaliana
MASTEALLPVTSLQDPLSESRSDQIPETRRRRPIKVHLAVYSGLLLIALYVTLIVTHDGSKAEIATESRPRMAGVSEKSNDGVWISSDDGKVEAFPWNNTILSWQRTAFHFQPEKNWMNGTNIKCPLFYKGWYHFFYQYNPNAAVWGDIVWGHAVSKDLIHWLYLPIAMVPDQWYDANGVWTGSATFLDDGSIVMLYTGSTDEFVQVQNLAYPEDPSDPLLLKWVKFSGNPVLVPPPGIGAKDFRDPTTAWKTSSGKWRITIGSKINRTGISLIYDTTDFKTYEKHETLLHQVPNTGMWECVDFYPVSKTQLNGLDTSVNGPDVKHVIKASMDDTRIDHYAIGTYDDSNATWVPDNPSIDVGISTGLRYDYGKYYASKTFYDQNKGRRILWGWIGESDSEAADVQKGWSSVQGIPRTVVLDTRTHKNLVQWPVEEIKSLRLSSKKFDMTIGPGTVVPVDVGSATQLDIEAEFEIKTDDLKLFFDDDSVEADNKFSCETNGGSTARGALGPFGFSVLADEGLSEQTPVYFYVTKGKHSKLNTVFCTDTSRSTLANDVVKPIYGSFVPVLKGEKLTMRILVDHSIVEGFAQGGRSCITSRVYPTKAIYGATKLFLFNNAIDATVTASFTVWQMNNAFIHPYSSDDLGQILSLTYLRTQSRASSNAAFYFISYKTTKTVVTMTQYELKSLAVHKTITKQKSLSFVKKKEGEKQKQSHPRARKISIRNLKSA

SEQ ID NO: 9726 - protein, 648 aa, Arabidopsis thaliana
MASTEALLPVTSLQDPLSESRSDQIPETRRRRPIKVHLAVYSGLLLIALYVTLIVTHDGSKAEIATESRPRMAGVSEKSNDGVWISSDDGKVEAFPWNNTILSWQRTAFHFQPEKNWMNDPNGPLFYKGWYHFFYQYNPNAAVWGDIVWGHAVSKDLIHWLYLPIAMVPDQWYDANGVWTGSATFLDDGSIVMLYTGSTDEFVQVQNLAYPEDPSDPLLLKWVKFSGNPVLVPPPGIGAKDFRDPTTAWKTSSGKWRITIGSKINRTGISLIYDTTDFKTYEKHETLLHQVPNTGMWECVDFYPVSKTQLNGLDTSVNGPDVKHVIKASMDDTRIDHYAIGTYDDSNATWVPDNPSIDVGISTGLRYDYGKYYASKTFYDQNKGRRILWGWIGESDSEAADVQKGWSSVKGIPRTVVLDTRTHKNLVQWPVEEIKSLRLSSKKFDMTIGPGTVVPVDVGSATQLDIEAEFEIKTDDLKLFFDDDSVEADNKFSCETNGGSTARGALGPFGFSVLADEGLSEQTPVYFYVTKGKHSKLNTVFCTDTSRSTLANDVVKPIYGSFVPVLKGEKLTMRILVDHSIVEGFAQGGRSCITSRVYPTKAIYGATKLFLFNNAIDATVTASFTVWQMNNAFIHPYSSDDLGVPSST

SEQ ID NO: 9727 - protein, 639 aa, Arabidopsis thaliana
VTSLQDPLSESRSDQIPETRRRRPIKVHLAVYSGLLLIALYVTLIVTHDGSKAEIATESRPRMAGVSEKSNDGVWISSDDGKVEAFPWNNTILSWQRTAFHFQPEKNWMNDPNGPLFYKGWYHFFYQYNPNAAVWGDIVWGHAVSKDLIHWLYLPIAMVPDQWYDANGVWTGSATFLDDGSIVMLYTGSTDEFVQVQNLAYPEDPSDPLLLKWVKFSGNPVLVPPPGIGAKDFRDPTTAWKTSSGKWRITIGSKINRTGISLIYDTTDFKTYEKHETLLHQVPNTGMWECVDFYPVSKTQLNGLDTSVNGPDVKHVIKASMDDTRIDHYAIGTYDDSNATWVPDNPSIDVGISTGLRYDYGKYYASKTFYDQNKGRRILWGWIGESDSEAADVQKGWSSVQGIPRTVVLDTRTHKNLVQWPVEEIKSLRLSSKKFDMTIGPGTVVPVDVGSATQLDIEAEFEIKTDDLKLFFDDDSVEADNKFSCETNGGSTARGALGPFGFSVLADEGLSEQTPVYFYVTKGKHSKLNTVFCTDTSRSTLANDVVKPIYGSFVPVLKGEKLTMRILVDHSIVEGFAQGGRSCITSRVYPTKAIYGATKLFLFNNAIDATVTASFTVWQMNNAFIHPYSSDDLGVPSST

SEQ ID NO: 9728 - protein, 562 aa, Arabidopsis thaliana
IRHEKVEAFPWNNTILSWQRTAFHFQPEKNWMNDPNGPLFYKGWYHFFYQYNPNAAVWGDIVWGHAVSKDLIHWLYLPIAMVPDQWYDANGVWTGSATFLDDGSIVMLYTGSTDGFVQVQNLAYPEDPSDPLLLKWVKFSGNPVLVPPPGIGAKDFRDPTTAWKTSSGKWRITIGSKINRTGISLIYDTTDFKTYEKHDTLLHQVPNTGMWECVDFYPVSKTQVNGLDTSVNGPDVKHVIKASMDDTRIDHYAIGTYDDSNATWVPDNPSIDVGISTGLRYDYGKYYASKTFYDQNKGRRILWGWIGESDSEAADVQKGWSSVQGIPRTVVLDTRTHKNLVQWPVEEIKSLRLSSKKFDMTIGPGTVVPVDVGSATQLDIEAEFEIKTDDLKLFFDDDSVEADNKFSCETNGGSTARGALGPFGFSVLADENLSEQTPVYFYVTKGKHSKLNTVFCTDTSRSTLANDVVKPIYGSFVPVLKGEKLTMRILVDHSIVEGFAQGGRSCITSRVYPTKAIYGATKLFLFNNAIDATVTTSFTVWQMNNAFIHPYSSDDLGVPSST

SEQ ID NO: 9729 - protein, 662 aa, Brassica oleracea
MAKSDALLPISAREEDPLLSDGSRSDPNAETHGRRRPVKGLLAVSFGLFFIAFYVALIATHDGSRSNDVKIESDGTATKASRAHLAGVSEKSNDQLWKLSGDRNTVAFSWNNSMLSWQRTAFHFQPEQNWMNDPNGPLFYKGWYHFFYQYNPNAAVWGDIVWGHAVSKDLIHWVHLPLAMAADQWYDANGVWTGSATFLEDGSIVMLYTGSTDKSVQVQNLAYPEDLNDPLLLKWVKFPGNPVLVPPPGILPKDFRDPTTAWKTSAGKWRITIGSKINRTGISLVYDTTDFKTYEKLETLLHKVPNTGMWECVDFYPVSKTLVKGLDTSVNGPDVKHIVKASMDDTRIDHYAIGTYFDSNGTWTPDDPTIDVGISTSLRYDYGKFYASKTFYDQNKGRRILWGWIGESDSESADVQKGWSSLQGIPRTVVLDTKTGKNLVQWPVEEVKSLRLSSKKFDMEVGPGSLVHIDVGSAAQLDIEAEFEIKKESLEKILGDASAAAEAEEFSCQKSGGSTVRGALGPFGFSVLAHESLSEKTPVYFYVAKGKDSKLITFFCTDSSRSSFANDVVKPIYGSSVPVLKGEKLTMRILVDHSIVEAFGQGGRTCITSRVYPTKAIYGAAKLFLFNNAIDATITASFKVWQMNSAFIQPYSEEAVRALSRT

SEQ ID NO: 9730 - protein, 663 aa, Brassica oleracea
MASSDALLPISAREEDPLLSDGSRCDPNAETHRRRRPVKGLLAVSFGLLFIAFYVVLIATHDGSSRSNDVKIESDETATTTSRARLAGVSEKSNGQLWKLSGERNTVSFAWNNSVLSWQRTAFHFQPEQNWMNDPNGPLFYKGWYHFFYQYNPNAAVWGDIVWGHAVSKDLIHWVHLPIAMVADQWYDANGVWTGSATFLDDGSLVMLYTGSTDKSVQVQNLAYPEDLNDPLLLKWVKYSGNPVLVPPPGILPKDFRDPTTAWKTSDGKWRITIGSKINKTGISLVYDTIDFKTYEKHDTLLHKVPNTGMWECVDFYPVSKTAVNGLDTSVNGPNVKHIVKASMDDTRFDHYAVGTYFDSNGTWIPDDPTIDVGMSASLRYDYGKFYASKTFYDQNKGRRILWSWIGESDSEAADVQKGWSSLQGIPRTVVLDTKTGKNLVQWPVEEIKSLRLSSKQFDMEVGPGSVVPVDVDSAAQLDIEAEFEINKESLDKILGDASVVVEAEEFSCQKSGGASVRGALGPFGFSVLADKSLSEQTPVYFYVAKGKDSKLKTFFCTDTSRSTFANDVVKPIYGSSVPVLKGEKLTMRILVDHSIVEGFAQAGRTCISSRVYPTKAIYGAAKLFVFNNAIDATITASFKVWQMNSAFIHPYSEEAVRALSST

SEQ ID NO: 9731 - protein, 247 aa, Malus x domestica
SSFLSVQPQQSSMGDIVWGHAVSKDLIHWLHLPLAMVADQWYDINGVWTGSATILPDGKIVMLYTGSTNESVQVQNLAYPADHSDPLLLNWVKYSGNPVLVPPPGIGYKDFRDPTTAWFTSEGKWRITIGSKLNKTGMSLVYDTKDFKTYELLNGVLHAVPGTGMWECVDFYPVSKTSDKGLDTSVNGPDVKHVVKASLDDDRNDYYAFGTYDEKTGKWVPDNEKIDVGIGIRYDYGKFYASKTFFD

SEQ ID NO: 9732 - protein, 143 aa, Prunus persica
  unsure (1)..(143): unsure at all Xaa locations
DPLALPPARDGPRSMVRRQRRVDRSSTILPDGQIVILXTGSTNESVQVQNLAYPANLSDPLLLHWVKYSGNPVLTAPPGIGSTDFRDPTTAWIGPDGLWRITLGSKVNKTGISIVYTTANFIDYELLEGVLHAVPGTGMWECP

SEQ ID NO: 9733 - protein, 103 aa, Heteranthelium piliferum
SRGLDGGLHTSFCQDELRSSRAKDVTKRVIGSTVPVLEGEAFSMRVLVDHSIVQGFAMGGRTTMTSRVYPMEAYQEARVYLFNNATGAGVTAERLVVHEMDSA

SEQ ID NO: 9734 - protein, 103 aa, Agropyron mongolicum
SRGLDGGLQTSFCQDELRSSRAKDVTKRVIGSTVPVLDGEAFSMRVLVDHSIVQGFAMGGRITMTSRVYPMEAYQEAGVYLFNNATGARVTAERLVVHEMDSS

SEQ ID NO: 9735 - protein, 103 aa, Agropyron puberulum
SRGLDGGLQTSFCQDELRSSRAKDVTKRVIGSTVPVLDGEAFSMRVLVDHSIVQGFAMGGRITMTSRVYPMEAYQEAGVYLFNNATGASVTAERLVVHEMDSA

SEQ ID NO: 9736 - protein, 103 aa, Psathyrostachys huashanica
SRGLDGGLQTSFCQDELRSSWAKDVTKRVIGSTVPVLDGEAFSMRVLVDHSIVQGFAMGGRTTMTSRVYPMEAYQEAGVYLFNNATGAGVTAERLVVHEMDSS

SEQ ID NO: 9737 - protein, 586 aa, Oryza sativa (indica cultivar-group)
MATARARAALVFVALLQMAAVVVVRASHVVYPELQSLEAKHVDGKLRTGYHFQPPKHWINDPNGPMYYKGLYHLFYQYNPKGAVWGNIEWAHSVSTDLIDWTALEPGIYPSKTFDEKGCWSGSATVLPSGVPVIMYTGIDPDERQVQNVAYPVNLSDPYLREWYKPDYNPIINPDGGINASAFRDPTTAWYGPDGHWRLLVGSKVNMKGLAVLYRSRDFKKWVKAHHPLHSAHTGMWECPDFFPVAVAGGSRHYRRGVDTAELHDAAVAEEVKYVLKVSLDLTRYEYYTVGWYDHATDRYVPDAAFPDNDYGLRYDYGDFYASKSFYDPAKRRRIVWGWANESDTVPDDRRKGWAGIQAIPRKLWLSADGKQLVQWPVEELKALRAKHVNVTDKVIKKGNYFEVTGFKSVQSDVDMAFAIKDLSKAEEFDPAWRTDAEALCKKLGSDVDGGVGPFGLWALASGDLKERTAVFFRVFKANDSSHVVLMCNDPTRSSYESKIYRPTFAGFVDVDIAKNKQIALRTLIDHSVVESFGARGKTCILTRVYPRKAVGDDAHLFVFNNGESDVKVTNLDAWEMKTPKMNAEE

SEQ ID NO: 9738 - protein, 179 aa, Apium graveolens
KASKSPEMLEPLSRGVAQGVSEKRFRQATAEPAYPWTNDMLSQQRTSFHFQPQENWMNDPNGPLFHMGWYHLFYQYNPDSAIWGNITWGHAISTDLINWLHLPFAMQPDQWYDINGVWTGSATILPDGKIVMLYTGDTDDLVQVQNLAYPANLSDPLLLDWIKYPDNPVMFPPPGIGST

SEQ ID NO: 9739 - protein, 630 aa, Helianthus tuberosus
MMASSTTTTPLILHDDPENLPELTGSPTTRRLSIAKVLSGILVSVLVIGALVALINNQTYESPSATTFVTQLPNIDLKRVPGKLDSSAEVEWQRSTYHFQPDKNFISDPDGPMYHMGWYHLFYQYNPQSAIWGNITWGHSVSKDMINWFHLPFAMVPDHWYDIEGVMTGSATVLPNGQIIMLYSGNAYDLSQVQCLAYAVNSSDPLLIEWKKYEGNPVLLPPPGVGYKDFRDPSTLWSGPDGEYRMVMGSKHNETIGCALIYHTTNFTHFELKEEVLHAVPHTGMWECVDLYPVSTVHTNGLDMVDNGPNVKYVLKQSGDEDRHDWYAIGSYDIVNDKWYPDDPENDVGIGLRYDFGKFYASKTFYDQHKKRRVLWGYVGETDPQKYDLSKGWANILNIPRTVVLDLETKTNLIQWPIEETENLRSKKYDEFKDVELRPGALVPLEIGTATQLDIVATFEIDQKMLESTLEADVLFNCTTSEGSVARSVLGPFGVVVLADAQRSEQLPVYFYIAKDIDGTSRTYFCADETRSSKDVSVGKWVYGSSVPVLPGEKYNMRLLVDHSIVEGFAQNGRTVVTSRVYPTKAIYNAAKVFLFNNATGISVKASIKIWKMGEAELNPFPLPGWTFEL

SEQ ID NO: 9740 - protein, 615 aa, Helianthus tuberosus
MQTPEPFTDLEHEPHTPLLDHHHNPPPQTTTKPLFTRVVSGVTFVLFFFGFAIVFIVLNQQNSSVRIVTNSEKSFIRYSQTDRLSWERTAFHFQPAKNFIYDPDGQLFHMGWYHMFYQYNPYAPVWGNMSWGHSVSKDMINWYELPVAMVPTEWYDIEGVLSGSTTVLPNGQIFALYTGNANDFSQLQCKAVPVNLSDPLLIEWVKYEDNPILYTPPGIGLKDYRDPSTVWTGPDGKHRMIMGTKRGNTGMVLVYYTTDYTNYELLDEPLHSVPNTDMWECVDFYPVSLTNDSALDMAAYGSGIKHVIKESWEGHGMDWYSIGTYDAINDKWTPDNPELDVGIGLRCDYGRFFASKSLYDPLKKRRITWGYVGESDSADQDLSRGWATVYNVGRTIVLDRKTGTHLLHWPVEEVESLRYNGQEFKEIKLEPGSIIPLDIGTATQLDIVATFEVDQAALNATSETDDIYGCTTSLGAAQRGSLGPFGLAVLADGTLSELTPVYFYIAKKADGGVSTHFCTDKLRSSLDYDGERVVYGGTVPVLDDEELTMRLLVDHSIVEGFAQGGRTVITSRAYPTKAIYEQAKLFLFNNATGTSVKASLKIWQMASAPIHQYPF

SEQ ID NO: 9741 - protein, 172 aa, Citrus aurantium
YHLFYQYNPNGAIWGDIVWGHAVSKDLIHWYHLPLAMVADQWYDIMGVWTGSATILPDGKLMMLYTGSTNESVQVQNLAYPADPSDPLLIKWVKYPGNPVLVPPPGIGAKDFRDPTTAWLTSEGKWRIAIGSRINRTGITFVYDTKDFINYELLRGVLHGVPNTGMWECPDF

SEQ ID NO: 9742 - protein, 171 aa, Hamamelis virginiana
LHLFYQYNPDSAVWGNITWGHAVSRDMIHWLYLPIAMIPDHWFDWFGVWTGSATLLPDGRIIILYTGETDHYVQVQNLAYPANQSDPLLLDWVKYEDNPVIVPPTGIKPKDFRDPTTAWLGPDGTWRVTVGSKVNKTGISLVYQTTNFTSYELLDGVLHAVVGTGMWECPD

SEQ ID NO: 9743 - protein, 173 aa, Hamamelis virginiana
LHLFYQYNPYSAVWGNITWAHSTSTDLVNWIPHEYAIYMSQPSDINGCWSGSATMLPTGKPVILYTGINTRNQQVQNLAVPKNLSDPFLREWVKSPNNPLMAPTTMNKINASSFRDPTTAWLGPDRLWRVIIGSKRNRHGLAILYRSKDFLRWTKAQHPLHSSKNTGMWECPD

SEQ ID NO: 9744 - protein, 171 aa, Hamamelis virginiana
LHLFYQYNPYSAVWGNITWAHSTSTDLVNWIPHEYAIYMSQPSDINGCWSGSATMLPTGKPVILYTGINTQNQQVQNLAVPKNLSDPFLREWVKSPNNPLMAPTTMNKINASSFRDPTTAWLGPDRLWRVIIGSKRNRRGLAILYRSKDFLRWTKAQHPLHSSKNTGMWEC

SEQ ID NO: 9745 - protein, 173 aa, Hamamelis virginiana
LHLFYQYNPYSAVWGNITWAHSTSTDLVNWIPHEYAIYMSQPSDINGCWSGSATMLPTGKPVILYTGINTQNQQVQNLAVSKNLSDPFLREWVKSPNNPLMAPTTMNKINASSFRDPTTAWLGPDRLWRVIIGSKRNRRGLAILYRSKDFLRWTKAQHPLHSSKNTGMWECPD

SEQ ID NO: 9746 - protein, 170 aa, Hamamelis virginiana
HLFYQYNPKGAVWGNIVWAHSVSKDLVNWEALEHAIYPSKPFDINGCWSGSATILSDNKPVILYTGIDTQNRQVQNFAIPANLSDPYLREWIKPDNNPLVVAGDGMNSSAFRDPSTAWLGEDGHWRIVVGSKRKHRGIAFLYKSRDFMKWTEAQHPLQSKPKTGMWECPD

SEQ ID NO: 9747 - protein, 171 aa, Hamamelis virginiana
LHLFYQYNPKGAVWGNIVWAHSVSKDLVNWEALDHAIYPSKPFDINGCWSGSATILKNNKPVILYTGIDTQNRQVQNFAIPANLSDPYLREWIKPDNNPLVVAGDGMNSSAFRDPSTAWLGEDGHWRIVVGSKRKHRGIAFLYKSRDFMKWTKAQHPLQSKPKTGMWECPD

SEQ ID NO: 9748 - protein, 169 aa, Hamamelis virginiana
FTYSTSTIHMVQFTWAHSTSTDLVNWIPHEYAIYMSQPSDINGCWSGSATMLPTGNPVILYTGINTQNQQVQNLAVPKNLSDPFLREWVKSPNNPLMAPTIMNKINASSFRDPTTAWLGPDRLWRVIIGSKRNRRGLAILYMSKDFLRWTKAQHPLHSSKNTGMWECPD

SEQ ID NO: 9749 - protein, 1333 aa, Paenibacillus macerans
MRKVKRGKCWISGMVIWAMVLQLVVPGISVASENRTVAGETLIPKNDVKSSVTDAIYQIKNIPQNDMGLSVTDSVYQIRNPGFETGDLTGWTVIKGDAFGPNSVTDETTWWAEKIPYNQEGAYHLNGWKYDESATGVLRSSTFELGGSGGISFKLGGAKNPDKVFINIVEVDTGQVIARYGNSAFADVGFPDPAQGMRLANMVQYKADLSTQLGKKLYVEVVDNATSDWGVIFADAFSMYHESEPAEGIVATDIKPDFKRYEIDNPSFETGNLDGWTVEEDAFEVTDEAHASKEGNFYAKSSLQGKGSITSNTFTLQGTGTINFTVLDILKPENAYVALFDANSNTLLMKTGNVSANEKISWKVQEHYNKKLYVKVVDHSNEASIAVDSFQASDRGTIFYLNLDEGAGKKALEKVHNLRHDVNYVFNNARYMASKDPRWTPRGIKGGALLFDGSSNYIEVNANVTVPVSDALTIEAWVAPRSYEWGDGNKLSAIVNQSDQDKAEGFSLGMYRHGTWSMQVGIGGQWIQVWVKDHPLEKYKWNYVAATFSKEDGKIKLYLNGEEVASQATPVNVPITPSTESLIIGKNNKPVELAGVFSFNMFSGLLDEVKLHNKALTNQEILAGYESVKALHGGSIPKIPNADIDEDPSVFDGDQHRPQYHAMPPQNWMNEAHAPIYYNGKYHLFYQHNPQGPFWHQIHWGHWVSDDMVNWENVRPALAPEAGTLDPDGTWSGSAAYDRNGNPVLFYTAGNDSLSPNQRTGLATPADLSDPYLEKWEKYPKPVTEQNGKGIHNEFRDPFVWYDKEVDKWYQLVTSGLPDFSSGTALVYVSDDMYNWKYKGPLYVSDRIRYPELGTVWELPVLLPLGTDSTGKQKYIFMINPHEKPEHVPPANDVQRDVEVFYWIGTWDRDNFKFIPDQEAPSKMDVGDGYLTAESGLVTPDGRTVVFSMVQNVRTPQAEYQSGWAHNLSLPVSLSLDKYDKLHIEPIKELQSLRGEKWVDFSDKNLESANQLIKNVKGDMLEIVMEIDPREAQKFGLKVRRSEKGQEETLIYYDKKNGTFNVDRTKSSIDPDVRVDGIQGGYVDLEGENLKLHIFLDRSVIEAFANYKKKLTTRVYVGRYDSLGLQIWADGDINIKSMQVWDMNALTGKPAAPVYVPDKWDNSVYKDITELPNHDFATGDLTGWMTEGDAFQNVHVTNTQFFWDNIFFNPSHKIPGSYHLWGFNEQAGGDSLTGALRSQNFVLGGNGKINFLISGGRDIDRLYVALVRASDDKELFKETATNYEEYQRKIWDATDYIGEELYIKVVDHSKGGFGHINVDDFNVPVQVKKKTNN

SEQ ID NO: 9750 - protein, 103 aa, Aegilops markgrafii
SRGLDGGLHTSFCQDELRSSRAKDVTKRVIGSTVPVLDGEAFSMRVLVDHSIVQGFAMGGRTTMTSRVYPMEAYQEAKVYLFNNATGASVTAERLVVHEMDSA

SEQ ID NO: 9751 - protein, 170 aa, Avena sativa
ERAHVPTMASTIRSTSITPMAPLGDIVWGHAVSTDLVNWIILEPAIERDSPGDINGCWTGSATILPGGQPIVIYTGGDAENHQVQNIMLPKNRSDPYLREWTKAGNNPVLQLVGPGFNSSQFRDPTTGWIGPDGLWRMSIGAEVNGYGAALLYKSERLSKLDYSSSPTVF

SEQ ID NO: 9752 - protein, 625 aa, Hordeum vulgare
MGSHGKPPLPYAYKPLPSDAADGKRTGCMRWSACATVLTASAMAVVVVGATLLAGLRMEQAVDEEAAAGGFPWSNEMLQWQRSGYHFQTAKNYMSDPNGLMYYRGWYHMFYQYNPVGTDWDDGMEWGHAVSRNLVQWRTLPIAMVADQWYDILGVLSGSMTVLPNGTVIMIYTGATNASAVEVQCIATPADPNDPLLRRWTKHPANPVIWSPPGVGTKDFRDPMTAWYDESDETWRTLLGSKDDHDGHHDGIAMMYKTKDFLNYELIPGILHRVVRTGEWECIDFYPVGRRSSDNSSEMLHVLKASMDDERHDYYSLGTYDSAANTWTPIDPELDLGIGLRYDWGKFYASTSFYDPAKNRRVLMGYVGEVDSKRADVVKGWASIQSVPRTVALDEKTRTNLLLWPVEEIETLRLNATELTDVTINTGSVIHIPLRQGTQLDIEASFHLDASAVAALNEADVGYNCSSSGGAVNRGALGPFGLLVLAAGDRRGEQTAVYFYVSRGLDGGLHTSFCQDELRSSRAKDVTKRVIGSTVPVLDGEALSMRVLVDHSIVQGFDMGGRTTMTSRVYPMESYQEARVYLFNNATGASVTAERLVVHEMDSAHNQLSNEDDGMYLHQVLESRH

SEQ ID NO: 9753 - protein, 670 aa, Lolium perenne
  unsure (1)..(670): unsure at all Xaa locations
MPMEARDGVSMPYSYAALPEDAEAAVVGRGRRTGPLFAALLLTLVAALLAVAALAGVRLVGELPAGGVXMPNHPMEVMDVSGSRGPESGVSEKTSGAASESGGMLGADAGSNAFPWSNAMLQWQRTGFHFQPEKNWMNDPNGPVYYKGWYHLFYQYNPEGAIWGNKIAWGHAVSRDMLRWRHLPIAMFPDQWYDINGAWSGSATVLPDGRIVMLYTGSTNASVQVQCLAFPSDPSDPLLTNWTKYEGNPVLYPPPHVGEKDFRDPTTAWYDGSDGMWRIVIGSKDNRRAGMALTYKTKNFHDFELVPGVLHRVPATGMWECIDLYPVGGARGIDMTEAVAAASNSGGGEVLHVMKESSDDDRHDYYALGRYDAATNKWTPLDADADVGIGLRYDWGKFYASKTFYDPAKKRRVLWGWVGETDSERADVAKGWASLQSIPRTVVLDTKTGSNLIQWPVVEVETLRTNSTNLGSIIVEHGSVFPLSLHRATQLDIEASFRLDPLDVAAAKEADVGYNCSTSGGAAGRGALGPFGLLVLADARRHGGDTEQTAVYFYVARGLDGNLRTHFCHDESRSSRANDIVKRVVGNIVPVLDGEALSVRVLVDHSIVESFAQGGRSVVTSRVYPTEAIYANAGVYLFNNATGARVTATSLVVHEMDPSYNQNQAEMASL

SEQ ID NO: 9754 - protein, 648 aa, Lolium perenne
MESRSIPGAYAYEPLPHSSDDAHGHDDRRSAGGVRWRACAAVLAASALVVFVVASTLAGSRVDRVAVDVAAMPALSETARSRGKDAGVSEKTSGAADEMGFLGAGSGADADGFPWSNAMLQWQRTGFHFQPEMNWMNDPNGPVYYRGWYHLFYQYNPEGAVWGNIAWGHAVSRDLVHWRHLPLAMVPDQWYDINGVWTGSATVFPDGTLNMLYTGSTNASVQVQCLAVPEDPNDSLLRNWTKHEANPVLLPPPGIGDKDFRDPTTAWFDESDQTWRTVIGSKDNNGHAGIAMVYKTKDFLNYELIPGYLHRVDGTGMWECIDFYPVGGKNGSEELYVIKESSDDDRHDWYTLGKYDAAANTFTAADPENDLGIGLRYDWGKFYATKTFYDPAKNRRVLWGWIGETDSERADVAKGWASLMSIPRTVELDEKTRTNLIQWPVEELETLRIKSTDLGGVTIDHGSVYPLPLHRATQLDIEASFRIDTATVAALNEADVGYNCSTSGGSANRGALGPFGLLVLADGKAEQTAVYFYVAKGLDGTLQTHFCHDESRSTLARDVVKRVVGYTVPVLDGEAFSVRVLVDHSIVESFAMGGRSTATSRVYPTEAIYGAAGAYLFNNATGGSVTVEKLVVHEMDSSYNQIFMADDL

SEQ ID NO: 9755 - protein, 653 aa, Lolium perenne
MESPSAVVPGTTAPLLPYAYAPLPSSADDARQNRSGGRWRACAAVLAASALAVVVVVGLLAGGRVDRVPAGGDVASATVPAVPMEFPRSRGKDFGVSEKSSGAYSTDGGFPWSNAMLQWQRTGFHFQPEQHYMNDPNGPVYYGGWYHLFYQHNPKGDSWGNIAWAHAVSKDMVNWRHLPLAMVPDQWYDSNGVLTGSITVLPDGQVILLYTGNTDTLAQVQCLATPADPSDPLLREWVKHPANPILYPPPGIGLKDFRDPLTAWFDHSDHTWRTVIGSKDDDGHAGIILSYKTKDFVNYELMPGNMHRGPDGTGMYECIDLYPVGGNSSEMLGGDDSPGVLFVLKESSDDERHDYYALGRFDAVANVWTPIDRELDLGIGLRYDWGKYYASKSFYDQKKNRRIVWAYIGETDSEQADITKGWANLMTIPRTVELDRKTRTNLIQWPVEEVDTLRRNSTDLGRITVNAGSVIRLPLHQGAQLDIEASFQLNSSDVDAINEADVGYNCSTSGAAVRGALGPFGLLVLANGRTEQTAVYFYVSKGVDGALQTHFCHDESRSTRAKDVVNRMIGSIVPVLDGETFSVRVLVDHSIVQSFAMGGRITATSRAYPTEAIYAAAGVYLFNNATGATVTAERLVVHEMASADNHIFTNDDL

SEQ ID NO: 9756 - protein, 645 aa, Lolium perenne
MESSAVVVQGTTAPLLPYAYAPLPSSADDARENQSSGGGVRWRACAASALVVLLVVVGFFAGGRVDLGQDGEVSATSSVPGSSRGKDSGVSEKESPADGGFPWSNAMLQWQHTGFHFQPLKHYMNDPNGPVYYGGWYHLFYQHNPYGDSWGNVSWGHAVSKDLVNWRHLPVALVPDQWYDINGVLTGSITVLPDGRVILLYTGNTDTFSQVQCLAVPADPSDPLLRSWIKHPANPILFPPPGIGLKDFRDPLTAWFEHSDNTWRTIIGSKDDDGHAGIVLSYKTTDFVNYELMPGNMHRGPDGTGMYECLDIYPVGGNSSEMLGGDSSPEVLFVLKESANDEWHDYYALGWFDAAANTWTPQDPEADLGIGLRYDWGKYYASKSFYDPIKNRRVVWAFVGETDSEQADKAKGWASLMSIPRTVELDKKTRTNLIQWPVEEIETLRRNVTDLGGITVEAGSVIHLPLQQGGQLDIEASFRLNSSDIDALNEADVGFNCSSSDGAAVRGALGPFGLLVFADGRHEQTAAYFYVSKGLDGSLLTHYCHDESRSTRAKDVVSRVVGGTVPVLDGETFSVRVLVDHSIVQSFVMGGRTTVTSRAYPTEAIYAAAGVYLFNNATSATITAEGLVVYEMASAESRAFLADDM

SEQ ID NO: 9757 - protein, 623 aa, Lolium perenne
MESRAIPSAAYAPLLPSAADDVALAKQDRPSVGWRGFLTVLAASGVVVLLVGATLLAGSRMGQAGDGEGNTDEDGAGGFPWSNEMLQWQRAGFHYQPEGHFMSDPNGPVYYRGYYHLFFQYNRRGVAWDDYIEWGHVVSQDLVHWRPLPLAMRPDHWYDKKGVLSGTITVLHNGTLVLLYTGVTEDPMAESQCIAVPTDPNDPLLRHWTKHPANPVLAHPQGVQGMDFRDPTSAWWDKSDSTWRILIGSKDDDNGSHAGIAFIFKTKDFLSFERVPGIVHRVEGTGMWECIDFYPVGGGHNSSSEELYVIKASMDDERHDYYSLGRYDAAANTWTPLDAELDLGIGLRYDWGKLYASTSFYDPLKQRRIMLGYVGEVDSARADVAKGWASLQSIPRTVALDEKTRTNLLLWPVEEVEALRYNSTDLSGITVENGSIFHLPLHQATQLDIEASFRLDASDVAAINEADVGYNCSSSGGAAARGALGPFGLLVHAAGDLRGEQTAVYFYVSRALDGSLRTSFCNDETRSSRARDVTKRVVGSTVPVLDGEALSMRVLVDHSIVQSFAMGGRVTATSRVYPTEAIYARAGVYLFNNATGASVTAERLIVHEMASAVYDETVMVKDS

SEQ ID NO: 9758 - protein, 567 aa, Saccharum officinarum
HDGGGNAFPWSNAMLQWQRTGFHFQPQKNWMNDPNGPVYYKGWYHLFYQYNPDGAIWGNKIAWGHAVSRDLIHRRHLPLAMVPDQWYDTNGVWTGSATTLPDGRLAMLYTGSTNASVQVQCLAVPADDADPLLTNWTKYEGNPVLYPPPGIGPRDFRDPTTAWFDPSDSTWRIVIGSKDDAEGDHAGIAVVYRTRDFVHFELLPDLLHRVAGTGMWECIDFYPVATRGKVSGNGVDMSDALGKNGAVVGDVVHVMKAGMDDDRHDYCALGRYDAAANAWTPLDAEKDVGTGLRYDWGKFYASKTFYDPAKRRRVLWGWVGETDSERADVSKGWASLQGIPRTVLLDTKTGSNLLQWPVEEVETLRTNSTDLSGITIDYGSAFPLNLRRATQLDIEAEFELDRRAVMSLNEADVGYNCSTSGGAAARGALGPFGLLVLADKHLHEQTAVYFYVAKGLDGSLTTHFCQDESRSSSANDIVKRVVGSAVPVLEDETTLSLRVLVDHSIVESFAQGGRSTATSRVYPTKAIYANAGVFLFNNATAARVTAKKLVVHEMDSSYNHDYMVTDI

SEQ ID NO: 9759 - protein, 103 aa, Secale cereale
SRGLDGGLHTSFCQDELRSSRAKDVTKRVIGSTVPVLDGEAFSMRVLVDHSIVQGFAMGGRTTMTSRVYPMEAYQEARVYLFNNATGASVTAERLVVHEMDSA

SEQ ID NO: 9760 - protein, 662 aa, Triticum aestivum
MDSSRVILIPGTPPLPYAYEQLPSSSADAKGIEEERAGGGGLRWRACAAVLAASAVVALVVAAAVFGASGAGWDAVAASVPATPATEFPRSRGKEHGVSEKTSGAYSANAFPWSNAMLQWQRTGYHFQPDKYYQNDPNGPVYYGGWYHFFYQYNPSGSVWEPQIVWGHAVSKDLIHWRHLPPALVPDQWYDIKGVLTGSITVLPDGKVILLYTGNTETFAQVTCLAEPADPSDPLLREWVKHPANPVVFPPPGIGMKDFRDPTTAWFDESDGTWRTIIGSKNDSDHSGIVFSYKTKDFLSYELMPGYMYRGPKGTGEYECIDLYAVGGGRKASDMYNSTAEDVLYVLKESSDDDRHDWYSLGRFDAAANKWTPIDEELELGVGLRYDWGKYYASKSFYDPVKKRRVVWAYVGETDSERADITKGWANLQSIPRTVELDEKTRTNLVQWPVEELDALRINTTDLSGITVGAGSVAFLPLHQTAQLDIEATFRIDASAIEALNEADVSYNCTTSSGAATRGALGPFGLLVLANRALTEQTGVYFYVSKGLDGGLRTHFCHDELRSSHASDVVKRVVGSTVPVLDGEDFSVRVLVDHSIVQSFAMGGRLTATSRAYPTEAIYAAAGVYMFNNATGTSVTAEKLVVHDMDSSYNHIYTDDDLVVVD

SEQ ID NO: 9761 - protein, 616 aa, Triticum aestivum
MGSHGKPPLPYAYKPLPSDADGERAGCTRWRVCAVALTASAMVVVVVGATLLAGFRVDQAVDEEAAGGFPWSNEMLQWQRSGYHFQTAKNYMSDPNGLMYYRGWYHMFFQYNPVGTDWDDGMEWGHAVSRNLVQWRTLPIAMVADQWYDILGVLSGSMTVLPNGTVIMIYTGATNASAVEVQCIATPADPTDPLLRRWTKHPANPVIWSPPGVGTKDFRDPMTAWYDESDDTWRTLLGSKDDNNGHHDGIAMMYKTKDFLNYELIPGILHRVERTGEWECIDFYPVGRRTSDNSSEMLHVLKASMDDERHDYYSLGTYDSAANRWTPIDPELDLGIGLRYDWGKFYASTSFYDPAKKRRVLMGYVGEVDSKRADVVKGWASIQSVPRTIALDEKTRTNLLLWPVEEIETLRLNATELSDVTLNTGSVIHIPLRQGTQLDIEATFHLDASAVAALNEADVGYNCSSSGGAVNRGALGPFGLLVLAAGDRRGEQTAVYFYVSRGLDGGLHTSFCQDELRSSRAKDVTKRVIGSTVPVLDGEAFSMRVLVDHSIVQGFAMGGRTTMTSRVYPMEAYQEAKVYLFNNATGASVTAERLVVHEMDSAHNQLSNMDDHSYVQ

SEQ ID NO: 9762 - protein, 518 aa, Triticum aestivum
  unsure (1)..(518): unsure at all Xaa locations
QPGGAVWGNIAWGHAVSRDLIHWRHLPLAMVPDQWYDINGVWTGSATVLPDGSLVMLYTGSTNASVQVQCLAVPADPNDSLLRNWTKYEANPILVPPPGIGDKDFRDPTTAWFDESDKTWRTVIGSKDNHGHTGIVMTYKTKDFINYELIPGLLHSVPGTGMWECIDFYPVGGADGSEELYVMKESSDDDRHDWYALGRYDAAANKYTPIDPEMDVGIGLRYDWGKFYASKTFYDPSKNRRVLWGWIGETDSERADVAKGWASLQSIPRTVELDEKTRTNLIQWPVVEIETLRINSTDLGGTTIDTGSVLPLPLRRATQLDIEATFHLDTSAIAAVNEADVGYNCSTSGGAANRGALGPFGLLVLADGALKEQTAVYFYVSRGLDGGLQTHFCQDESRSSLAQDVVKRVVGFTVPVLDGEDLSLRVLVDHSIVESFAMGGRSTAXVEGVSDGGHLRRRWRVPFQQRHWRRRHRREARGARDGRLLQPDLHGRRCLGRLVAESNQALGPVMHIHLYYIL

SEQ ID NO: 9763 - protein, 509 aa, Triticum aestivum
GTRGHAVSRDLIHWRHLPLAMVPDQWYDINGVWTGSATVLPDGSLVILYTGSTNASVQVQCLAVPADPNDSLLRNWTKYEANPILVPPPGIGDKDFRDPTTAWFDESDKTWRTSSAPRDNHGHTGIVMTYKTKDFINYELIPGLLHSVPGTGMWECIDFYPVGGADGSEELYVMKESSDDDRHDWYALGRYDAAANKYTPIDAEMDVGIGLRYDWGKFYASKTFYDPSKNRRVLWGWIGETDSERADVAKGWASLQSIPRTVELDEKTRTNLIQWPVVEIETLRINSTDLGGTTIDTGSVLPLPLRRATQLDIEATFHLDTSAIAAVNEADVGYNCSTSGGAANRGALGPFGLLVLADGALKEQTAVYFYVSRGLDGGLQTHFCQDESRSSLAQDVVKRVVGFTVPVLDGEDLSLRVLVDHSIVESFAMGGRSTANIEGVSDGGHLRRRWRVPFQQRHRRCRHRGEARGARDGRLLQPDLHGRRCLSRLVAAINQALGPVMHIHPYYIL

SEQ ID NO: 9764 - protein, 509 aa, Triticum aestivum; identical to SEQ ID NO: 9763

SEQ ID NO: 9765 - protein, 485 aa, Triticum aestivum
  unsure (1)..(485): unsure at all Xaa locations
LVQWRTLPXAMVADQWYDILGVLSGSMTVLPNGTVIMIYTGATNASAVEVQCIATPADPTDPLLRRWTKHPANPVIWSPPGVGTKDFRDPMTAWYDESDDTWRTLLGSKDDNNGHHDGIAMMYKTKDFLNYELIPGILHRVERTGEWECIDFYPVGRRSSDNSSEMLHVLKASMDDERHDYYSLGTYDSAANTWTPIDPDLDLGIGLRYDWGKFYASTSFYDPAKKRRVLMGYVGEVDSKRADVVKGWASIQSVPRTIALDEKTRTNLLLWPVEEIETLRLNATELSDVTMNTGSVIHIPLRQGTQLDIEATFHLDASAVAALNEADVGYNCSSSGGAVNRGALGPFGLLVLAAGDRRGEQTAVYFYVSRGLDGGLHTSFCQDELRSSRAKDVTKRVIGSTVPVLDGEAFSMRVLVDHSIVQGFAMGGRTTMTSRVYPMEAYQEAKVYLFNNATGATVTAERLVVHEMDSAHNQLSNMDDHSYVQ

SEQ ID NO: 9766 - protein, 505 aa, Triticum aestivum
  unsure (1)..(505): unsure at all Xaa locations
XPYXREQKLELHRGGGRSRTSGSXRAAGIRPHASEWYDILGVLSGSMTVLPNGTVIMIYTGATNASAVEVQCIATPADPTDPLLRRWTKHPANPVIWSPPGVGTKDFRDPMTAWYDESDDTWRTLLGSKDDHDGHHDGIAMMYKTKDFLNYELIPGILHRVERTGEWECIDFYPVGRRTSDNSSEMLHVLKASMDDERHDYYSLGTYDSAANTWTPIDPELDLGIGLRYDWGKFYASTSFYDPAKKRRVLMGYVGEVDSKRADVVKGWASIQSVPRTIALDEKTRTNLLLWPVEEIETLRLNATELSDVTLNTGSVIHIPLRQGTQLDIEATFHLDASAVAALNEADVGYNCSSSGGAVNRGALGPFGLLVLAAGDRRGEQTAVYFYVSRGLDGGLHTSFCQDELRSSRAKDVTKRVIGSTVPVLDGEAFSMRVLVDHSIVQGFAMGGRTTMTSRVYPMEAYQEAKVYLFNNATGASVTAERLVVHEMDSAHNQLSNMDDHSYVQ

SEQ ID NO: 9767 - protein, 456 aa, Triticum aestivum
  unsure (1)..(456): unsure at all Xaa locations
XRERERERERPDGRVILLYTGNTETFAQVTCLAEAADPSDPLLREWVKHPANPVVFPPPGIGMKDFRDPTTAWFDESDGTWRTIIGSKNDSDHSGIVFSYKTKDFLSYELMPGYMYRGPKGTGEYECIDLYAVGGGRKASDMYNSTAEDVLYVLKESSDDDRHDWYSLGRFDAAANKWTPIDEELELGVGLRYDWGKYYASKSFYDPVKKRRVVWAYVGETDSERADITKGWANLQSIPRTVELDEKTRTNLIQWPVEELDTLRINTTDLSGITVGAGSVAFLPLHQTAQLDIEATFRIDASAIEALNEADVSYNCTTSRGAATRGALGPFGLLVLANHALTEQTGVYFYVSKGLDGGLRTHFCHDELRSSHASDVVKRVVGSTVPVLDGEDFSVRVLVDXSIVQXFAMGGRLTATSRAYXTEAIYAAAXVYMFNNATGTSVTAEKLVVHDMDSSX

SEQ ID NO: 9768 - protein, 479 aa, Triticum aestivum
  unsure (1)..(479): unsure at all Xaa locations
AITSSKPSFAFHFNFVPMEARDGGSAPLPCSYAPLPEDAEAAATVGRVRRTAGLLCAALLLATVAVLLVVAALAGVRLAGQLPAGGIVVMSGHQTTVDTAPMSASSRGPESGVSEKTSYAGEQAAGALGVGRXNAYPGNNAMLXXQRTGLSFPPDKNWMNDPNGPVYYKGWYHLFYQYNPERMLWGNKIAWGHAASRDLLRWRHLPVAMSPDQWYDINGVWSGSATVLPDGRIVMLYTGSTNASVQVQCLAFPTDPSDPLLINWTKYENNPVMYPPPGVGDKDFRDPTTAWFDGSDDTWRLVIGSKDDHHAGMVMTYKTKDFIDYELVPGLLHRVPGTGMWECIDLYPVGGVRGIDMTEAVAAASNNGGGDVLHVMKESSDDDRHDYYALGRYDAAMNTWTPLDSDADVGIGLRYDWGKFYASKTFYDPSKKRRVLWGWVGETDSEHADVAKGWASLQVLDIFIIXXSSDXLIPPLIDX

SEQ ID NO: 9769 - protein, 573 aa, Triticum aestivum
  unsure (1)..(573): unsure at all Xaa locations
MDSSRVILIPGTPPLPYAYEQLPSSSADAKGIEEQRAGGGLRWRACAAVLAASAVVALVVAAAVFGAGGAGRDAVAASVPATPATEFPRSRGKEHGVSEKTSGAYSANAFPWSNAMLQWQRTGYHFQPDKYFAQVTCLAEPADPSDPLLREWVKHPANPVVFPPPGIXXDFRDPTTAWFDESDGTWRTIIGSKNDSDHSGIVFSYKTKDFLSYELMPGYMYRGPKGTGEYECIDLYAVGGGRKASDMYNSTAEDVLYVLKESSDDDRHDWYSLGRFDAAANKWTPIDTELELGVGLRYDWGKYYASKSFYDPVKKXRVVWAYVXETDSERADITKGWANXQSIPRTXELDXKTRTNLVQWPXEELDALXNTTDLSGITVGAGSVAFLPLHQTAQLDIEATFRIDASAIEALNEADVSYNCTTSSGAATRDALGPFGLLVLANRALTEQTGVYFYVSKGLDGGLRTHFCHDELRSSHASDVVKRVVGSTVPVLDGEDFSVRVLVDHSIVQSFAMGGRLTATSRAYPTEAIYAAAGVYMFNNATGTSVTAEKLVVHDMDSSYNHIYTDDDLVVVD

SEQ ID NO: 9770 - protein, 590 aa, Triticum monococcum
MARLSLAACAVAFHLCLLVSSSASLRWLSDKAAAVTTAGGVRTRSAYHFQPAKNWQNDPNGPMYHNGLYHFFYQYNPDGVTWGNGNLSWGHSVSVDLVNWFALDAALQPSRPFDANGCWSGSATILPDGSPVMLYTGIDARGDQVQNVAYPKNASDPLLVDWVKPEYNPVIPVPADIKRDDFRDPSTAWLGADGLWRIAVAARVHDVGGATLIYRSKDFLRWERNADPLYLAHAAGMVECPDLFPVSEPGVEVGLPASGAGARHVLKMSVMDTVQDYYVVGRYDDAADTFVPEDDEDCRSWRRLDYGHVYASKSFFDPARTGACSGAGPTSPTACPTTSSGDGPVFKLFPRKIWLDEDGKQLRQWPVEEIETLRSKRVNLLIPEVNAGGVNEIIGVMGAQADVEVVFEVPALEHADVLEPNWLLDPQSLCGEKGASVPGSVGPFGLLVMASGDMQEHTAVFFRVFRQNDKYKVLMCTDLSRSSTRDGVYKPPYGAFVDMDIEAHGGIISLRTLVDHSVVESFGGGGRACITARVYPDHVVNGNSHLYVFNNGTGAVKVSSLDAWEMATATVNVLPDELIAASSVSRAQAY

SEQ ID NO: 9771 - protein, 103 aa, Triticum urartu
SRGLDGGLHTSFCQDELRSSRAKDVTKRVIGSTVPVLDGEAFSMRVLVDHSIVQGFAMGGRTTMTSRVYPMEAYHEAKVYLFNNATGASVMAERLVVHEMDSA

SEQ ID NO: 9772 - protein, 103 aa, Aegilops speltoides
SRGLDGGLHTSFCQDELRSSRAKDVTKRVIGSTVPVLDGEAFSMRVLVDHSIVQGFAMGGRTTMTSRVYPMEAYQEAKVYLFNNATGATVTAERLVVHEMDSA

SEQ ID NO: 9773 - protein, 670 aa, Zea mays
MIPAVADPTTLDGGGARRPLLPETDPRGRAAAGAEQKRPPATPTVLTAVVSAVLLLVLVAVTVLASQHVDGQAGGVPAGEDAVVVEVAASRGVAEGVSEKSTAPLLGSGALQDFSWTNAMLAWQRTAFHFQPPKNWMNDPNGPLYHKGWYHLFYQWNPDSAVWGNITWGHAVSRDLLHWLHLPLAMVPDHPYDANGVWSGSATRLPDGRIVMLYTGSTAESSAQVQNLAEPADASDPLLREWVKSDANPVLVPPPGIGPTDFRDPTTACRTPAGNDTAWRVAIGSKDRDHAGLALVYRTEDFVRYDPAPALMHAVPGTGMWECVDFYPVAAGSGAAAGSGDGLETSAAPGPGVKHVLKASLDDDKHDYYAIGTYDPATDTWTPDSAEDDVGIGLRYDYGKYYASKTFYDPVLRRRVLWGWVGETDSERADILKGWASVQSIPRTVLLDTKTGSNLLQWPVVEVENLRMSGKSFDGVALDRGSVVPLDVGKATQLDIEAVFEVDASDAAGVTEADVTFNCSTSAGAAGRGLLGPFGLLVLADDDLSEQTAVYFYLLKGTDGSLQTFFCQDELRASKANDLVKRVYGSLVPVLDGENLSVRILVDHSIVESFAQGGRTCITSRVYPTRAIYDSARVFLFNNATHAHVKAKSVKIWQLNSAYIRPYPATTTSL

SEQ ID NO: 9774 - protein, 670 aa, Zea mays; identical to SEQ ID NO: 9773

SEQ ID NO: 9775 - protein, 671 aa, Zea mays
  unsure (1)..(671): unsure at all Xaa locations
MIPAVADPRTSASACATTTALPETDRPSTTPCSAAEKRRPATARLLTAVVSAVLVLVLVAVTVLASQHVDGQGGGVPAGEDAVVVEVAASRGVAEGVSEKSTAPLLGAGALQDFSWTNAMLAWQRTAFHSQPPKNWMNDPNGPLYHKGWYHLFYQWNPDSAVWGNITWGHAVXRDLLHWLHLPLAMVPDHPYDANGVWSGSATRLPDGRIVMLYTGSTAESSAQVQNLAEPADASDPLLREWVKSDANPVLVPPPGIGPTDFCDPTTVWRTPVGNDTAWRVAIGSKDRDHAGLALVYRTEDFVRYDPAPALMHAVPGTGMWECVDFYPVAAGSGAAADSGDGAETSTAPGPGVKHVLKASLDDDKHDYYAIGTYDPATDTWTPDSAEDDVGIGLRYDYGKYYASKTFYDPVLRXRRVLWGWVGETDSEXADILKGWASVQSIPRTVLLDTKTGSNLLQWPVVEVENLRMSGKSFDGVALDRGSVVPLDVGKATQLDIEAVFEVDASDAAAVTEADVTFNCSTSAGAAGQGLLGPFGLLVLADDDLSEQTAVYFYLLKGTDGSLQTFFCQDELRASKANDLVKRVYGSLVPVLDGENLSVRILVDHSIVESFAQGGRTCITSRVYPTRAIYDSARVFLFNNATHAHVKAKSVKIWQLNSAYIRPYPATTTSL

SEQ ID NO: 9776 - protein, 634 aa, Zea mays
  unsure (1)..(634): unsure at all Xaa locations
XLTAVVSAVLVLVLVAVTVLASQHVDGQGGGVPAGEDAVVVEVAASRGVAEGVSEKSTAPLLGAGALQDFSWTNAMLAWQRTAFHSQPPKNWMNDPNGPLYHKGWYHLFYQWNPDSAVWGNITWGHAVXRDLLHWLHLPLAMVPDHPYDANGVWSGSATRLPDGRIVMLYTGSTAESSAQVQNLAEPADASDPLLREWVKSDANPVLVPPPGIGPTDFCDPTTVWRTPVGNDTAWRVAIGSKDRDHAGLALVYRTEDFVRYDPAPALMHAVPGTGMWECVDFYPVAAGSGAAADSGDGAETSTAPGPGVKHVLKASLDDDKHDYYAIGTYDPATDTWTPDDVEKDVGVGLRYDYGKFYASKTFYDPVLRRRVLWGWVGETDSERADVLKGWASVQSIPRTVLLDTKTGSNLLQWPVVEVENLRMSGKSYDGVALDRGSVVPLDVGKATQLDIEAVFEVDAEGVGVAEEADVTFNCSTSAGAASRGLLGPFGLLVLADEDLSERTAVYFYLVKATDGSLKTFFCQDELRSSKANDLVKRVYGSLVPVLDGENLSVRILVDHSIVESFAQGGRTCITSRVYPTRAINDSARVFLFNNATGVHVKAKSVKIWQLNSAYIRPYPASSLXASKVTVTDK

SEQ ID NO: 9777 - protein, 321 aa, Psathyrostachys juncea
MLHVLKASMDDERHDYYSLGRYDSAANTWTPIDPELDLGIGLRYDWGKFYASTTFYDPAKKRRVLMGYVGEVDSKRADVVKGWASIQSVPRTVALDEKTRTNLLLWPVEEIETLRLNATELSDVTINTGSVFHVPLRQGTQLDIEASFRLDASAVAALNEADVGYNCSSSGGAATRGALGPFGLLVLAAGDRLGEQTAVYFYVSRGLDGGLQTSFCQDELRSSWAKDVTKRVIGSTVPVLDGEAFSMRVLVDHSIVQGFAMGGRTTMTSRVYPMEAIYEKAGVTLFNNATSAVVMAEKLVVHEMDSSHNQLSNEDDELYVQ

SEQ ID NO: 9778 - protein, 103 aa, Psathyrostachys juncea
SRGLDGGLQTSFCQDELRSSWAKDVTKRVIGSTVPVLDGEAFSMRVLVDHSIVQGFAMGGRTTMTSRVYPMEAYQEAGVYLFNNATGAGVTAERLVVHEMDSA

SEQ ID NO: 9779 - protein, 623 aa, Agropyron cristatum
MGSHTMPGKPPLPYAYKPLLSGTTDEANGQRTGCTRRRVCAAMLTASAMVVVVVAAAFLARARVDKVVNEEAAGGFPWSNEMLQWQRSSYHFQPAKNYMSDPDGLLYYGGWYHMFYQYNPVGTDWADGMAWGHAVSRNLVQWRTLPIAMKPDQWYDILGVLSGSVTVLPNGTVIMLYTGATNDWYVEATCLALPADPNDPLLRRWTKHPANPIIWSPPGIGTKDFRDPMTPWYDDSDHTWRTLFGSKDDHHGHHDGIAIMYKTKDFLNYELIPGILHRVENTGEWECIDFYPVGGGGSENSSEVLHVLKASMDDERHDYYSLGTYDSAANIWTPIDPELDLGIGLRYDWGKFYASTSFYDPAKKRRVLMGYVGEVDSKRADVVKGWASIQSVPRTIALDEKTRTNLLLWPVEEIETLRLNATELSDVTLNTGSLVHVPLRQGTQPDIEATFHLDAAAVAALNEADVGYNCSSSGGAVNRGALGPFGLLVLAAGDRRGEKTAVYFYVSRGLDGGLQTSFCQDELRSSRAKDVTKRVIGSTVPVLGGEAFSMRVLVDHSIVQGFAMGGRITMTSRVYPMEAYQEAGVYLFNNATGASVTAERLVVHEMDSAHNQLSNEDAYMYVR

SEQ ID NO: 9780 - protein, 103 aa, Australopyrum retrofractum
SRGLDGGLHTSFCQDELRSSRAKDVTKRVIGSTVPVLDGEAFSMRVLVDHSIVQGFAMGGRTTMTSRVYPMEAYAEAGVYLFNNATGASVTAERLVVHEMDSA

SEQ ID NO: 9781 - protein, 103 aa, Thinopyrum bessarabicum
SRGLDGGLHTSFCQDELRSSWAKDVTKRVIGSTVPVLEGEAFSMRVLVDHSIVQGFAMGGRTTMTSRVYPMESYQEAKVYLFNNATGASVTAERLVVHEMDSA

SEQ ID NO: 9782 - protein, 103 aa, Pseudoroegneria spicata
SRGLDGGLRTSFCQDESRSSRAKDVTKRVIGSTVPVLEGEAFSMRVLVDHSIVQSFAMGGRSTMTSRVYPMEAYAKARVYLFNNATGAGVTAERLVVHEMDSA

SEQ ID NO: 9783 - protein, 654 aa, Schedonorus arundinaceus
MESSAVVPGTTAPLLPYAYAPLPSSADDARENQSSGGVRWRVCAAVLAASALAVLIVVGLLAGGRVDRGPAGGDVASAAVPAVPMEIPRSRGKDFGVSEKASGAYSADGGFPWSNAMLQWQRTGFHFQPEKHYMNDPNGPVYYGGWYHLFYQYNPKGDSWGNIAWAHAVSKDMVNWRHLPLAMVPDQWYDSNGVLTGSITVLPDGQVILLYTGNTDTLAQVQCLATPADPSDPLLREWIKHPANPILYPPPGIGLKDFRDPLTAWFDHSDNTWRTVIGSKDDDGHAGIILSYKTKDFVNYELMPGNMHRGPDGTGMYECIDLYPVGGNSSEMLGGDDSPDVLFVLKESSDDERHDYYALGRFDAAANIWTPIDQELDLGIGLRYDWGKYYASKSFYDQKKNRRIVWAYIGETDSEQADITKGWANLMTIPRTVELDKKTRTNLIQWPVEELDTLRRNSTDLSGITVDAGSVIRLPLHQGAQIDIEASFQLNSSDVDALTEADVSYNCSTSGAAVRGALGPFGLLVLANGRTEQTAVYFYVSKGVDGALQTHFCHDESRSTQAKDVVNRMIGSIVPVLDGETFSVRVLVDHSIVQSFAMGGRITATSRAYPTEAIYAAAGVYLFNNATGATVTAERLVVYEMASADNHIFTNDDL

SEQ ID NO: 9784 - protein, 501 aa, Pseudomonas mucidolens
MDKVYYQEKFRPQFHFTPETNWMNDPNGLVYYEGEYHLFYQYHPFGNTWGPMHWGHAVSKDLIHWDHLPIALYPDHIGQIFSGSAVIDWQDTSGFFNGGAGMVALFTHADKFPDSGRPRQRQSLAYSTDRGRTWIKYEGNPFFADEAMTDFRDPKVFWHKASNKWIMILAAGNCVRIYHSSNLKQWKFASEFGANEGSHTGVWECPDLFELPVDGDRNRKKWVMVVSIGNSDEYLEGSRTQYFIGQFDGIRFTNENDPETVLWVDHGRDNYAGVTWSDIPEEDGRRLFIAWMSNWKYANHTPTEIWRSAMTIPRSLSLRSTPEGTRLFQTPVTELESLRLEKLEWKDLEVTTNGNVLSNISGDIFEIIAEFELNTALEFGFKVRKSADQETIVGYDAEQQMLFIDRTQSGVSDFCEHFPCKHGAVMIPNQNRIQMHIFVDRSSVEVFGNNGELTMTDLIFPDDSSTGIEVYAKEGNVKLVSLMLFPLMPIHSHLKSFVMNN

SEQ ID NO: 9785 - protein, 776 aa, Pseudomonas mucidolens
MHNTEDTGLIAYWSFDEESGKTAVDVIGKMNDSIDYVFNHARFKASSDPQRRKGISGNALLFDGYSTWIKRSADQIGKPENALTLEAWVAPRSYEWGDEQRLSAIVNQHDREKKEGFILGMYRHGTWSLQLGLDHEWIEVWSEDHPLPKNEWSYVVATYDKKTSMLKLACPSMLKLYLNGVEVASKQTTAHSTITPSRQDLLIGKNNQAVVLAGVFSLNMFNGLIDEIKIYNRALSSDEIASSFHRYLVPYGGKIPSIPYDHLKLDRSLLADDRHRPQYHVSPPAHWMNEPHAPIYFNGQYHLFYQHNPQGPYWHQIHWGHWVSDDLVHWRDLPVALSPEKNAVDPDGDWSGSATYDEHGLPVLFFTAGDDSAKPNQRVGLARSTFAQDGDNDLVHWVKHPTPVVVQQQGVGKFGDFRDPFVWKDGDTWYMLVGSGTDGEGGTALAYTSKNLTEWEYRGPFYISDHKNYPYLGKVWELPVLLPLGKDKKGHDKHVFLISPVGAGADVEVFYWIGTFDKEQFRFIPDQNEPQLIDVGDSHFTGPSGMVDPNTGRKILFTIAQGERTPALDYSAGWAHNGGLPVSLSLREDGRLGVEPIEELKSLRGKKLVSFTKKSAEEANDLLTNVKGDMLEIILELEPGTAKQFGIKVRRSPGGEEETLLYYNTEASTLNVNRMKTTLDNFERSKGIQGGKLELNGENLKLHIYLDRSMIEAYANGLKSLTTRAYPSRPDSLGLQIWGDGSVSVKSMEVWEMNSAFGPTVSAYIPEQHADGVQTK

SEQ ID NO: 9786 - protein, 623 aa, Allium sativum
MESRDIESSPALNAPLLQTTPPVKSSKLKVVLLAISTSVILVLATFFAVKYSVFESGTGLVKEDAPAAGDGYPWTNDMFEWQRPGYHFQPPYHFMGDPNAAMYYKGWYHFFYQYNPYGSAWDTTISWAHAVSKDMIHWLHLPIAMVPDHWYDSKGVWSGYATTLPDGRIIVLYTGGTDELVQVQNLAEPADPSDPLLIEWKKSNHNPILMPPPGVGPHDFRDPFPVWYNESDSNWHMLIGSKDDNHYGTVLIYLTKDFKTYTLLPEILHKTKDNVGMLECVDLYPVATTGNQIGNGLEMQVGFGKGIKHVLKASMDDERHDYYAIGTFDLESFTWVPDDDTIDVGVGLRYDYGKFYASKTFYDQEKRRRILWGYVGEVDSKTDDARKGWANVLNIARTILFDVKTRSNLLVWPVEELDALRTSSKEFNGVVVEPGFTYHLDVGTASQLDIEAEFEINQEAVDAVVEADVTYNCSTSDGSAHRGLLGPFGLLVLANEKMTEKTATYFYVSRTVDGGLQTHFCQDELRSSKANDITKRVVGHTVPVLHGETFSLRILVDHSIVESFAQKGRAVATSRVYPTEAIFDSTRIFLFNNATSATLTAKSVKIWHMNSTHNHPFPGFPFP

SEQ ID NO: 9787 - protein, 662 aa, Asparagus officinalis
MASSRDVESPPTSYAPLPSDDEQRPGSAPPRSRLRLIAIAMPPILLLALAAALFLSGSGAVTDLVAGPSPDTMPEIVRTDRGVEEGVSSKSSGAGPGLLTSVSHGQYPWTNKMLSWQRTGFHFQPEKNWMNDPNGPLYYKGWYHFFYQYNPNAAVWGDIAWGHAVSKDLLSWRHLPLAMVPDRWYDINGVWTGSATILPDGRIIMLYTGATNESVQVQNLAVPADLSDPLLLEWTKVDDANPILVPPPGVGATDFRDPTTAWFEPSDSTWRIAIGTKDADHSGVALVYSTKDFLNYTLLPGTLHTVKHVGMWECIDFYPIATSGAGANRGLDPSVRPSKLVKHVLKESSDDDRQDWYAIGTYDPDTNKWTPDDESLDVGIGLRYDLGKFYASKTFYDQEKKRRVLWGWIGESDSESADILKGWASLQGIPRTVLYDLRTGSNLITWPIEEVESLRSNLHDFSGITIDKGSTFHLDVHGAAQLDIEAEFKINEESLSAEAENGTGVMYNCSGGGGAAERGLLGPFGLLVLANSDLTEQTAAYFYVSRGVDGELQTHFCQDEMRSSKANDIVKSVVGGTVPVLKGETLSLRILVDHSIVESFAQGGRASATSRVYPTEAIYSSAKVFLFNNATGASITAQSLKIWHMNSTLSRPFDFNDGAQAQ

SEQ ID NO: 9788 - protein, 440 aa, Novosphingobium aromaticivorans
MRPLYHYAPAANWLSDPNGLVWQDGEWHLFYQYNPFGEDWGHMSWGHAVSRDLVTWQELPVALAEEDGTMIFSGSAVIDHQGSAGFGKGAMVAVYTGARTDRAHQFQSIAASTDRGRTFTKFTGNPVLDLQMADFRDPNVFWHGPSGRWIMSVVLSEENRAQLYASVDLRHWDLLSDIGRDGAPGHLWECPWMVELPVEGTDETRWLFKVDVLSGAAGQASPWRVGHFDGRRFVPETGWAVGDHGPDFYAAIGWNAAPDAEGRPVWIGWAGNHAYQKYLEPQGWRGAMTLPRRVSLRRDESGYALVQEVEPACRALFGKAEATSLCDGCIPLPSAALLSFPAGKDWSFRIEDDHGRSIECALSGGRLTVRRHDPVTPQLEHRAAMEAGKGPVELWLDAGSLEVFANRGGAVLTLQHRLAGEAWALRGEGACSVAYPAAMA

SEQ ID NO: 9789 - protein, 581 aa, Schizosaccharomyces pombe
MFLKYILASGICLVSLLSSTNAAPRHLYVKRYPVIYNASNITEVSNSTTVPPPPFVNTTAPNGTCLGNYNEYLPSGYYNATDRPKIHFTPSSGFMNDPNGLVYTGGVYHMFFQYSPKTLTAGEVHWGHTVSKDLIHWENYPIAIYPDEHENGVLSLPFSGSAVVDVHNSSGLFSNDTIPEERIVLIYTDHWTGVAERQAIAYTTDGGYTFKKYSGNPVLDINSLQFRDPKVIWDFDANRWVMIVAMSQNYGIAFYSSYDLIHWTELSVFSTSGYLGLQYECPGMARVPVEGTDEYKWVLFISINPGAPLGGSVVQYFVGDWNGTNFVPDDGQTRFVDLGKDFYASALYHSSSANADVIGVGWASNWQYTNQAPTQVFRSAMTVARKFTLRDVPQNPMTNLTSLIQTPLNVSLLRDETLFTAPVINSSSSLSGSPITLPSNTAFEFNVTLSINYTEGCTTGYCLGRIIIDSDDPYRLQSISVDVDFAASTLVINRAKAQMGWFNSLFTPSFANDIYIYGNVTLYGIVDNGLLELYVNNGEKTYTNDFFFLQGATPGQISFAAFQGVSFNNVTVTPLKTIWNC

SEQ ID NO: 9790 - protein, 453 aa, Schizosaccharomyces pombe
MPVRPCIHFTPPEGFMNDPNGLVYSNGKWHLFFQWNPTGNQAGNQHWGHAVSKNLYKWKLLPTALAPGDDHGLMFSGSAVIDKTNSSGFFESGFFSRKSVDPEERIVLIYTTHYDNRETQNIAYSLDGGITFIKYKKNPILDIKESQFRDPKVFWHEESRAWIMVVVLAQKYKVLFYHSLNLRDWVKLSEFGSAGVLGYQYECPDFVRLPIEGTDEFRWVLIVSINPGSSINGGSMVQYFIGDFDGQTFTPIDSASRILDCGHDCYATQTFGNAPDGRVISISWASNWNYTNDVPMRMKHRGMFTIPRELTLCYTHLNQETRGLVLRQRPVNLHHLYYPDSLPAPLLLNRVCEFPTVWTSATVFYLAVSIPKSIVLESPMEFLCLTWSTTPDVETSKEYFELGYRFHDGAVYVERGVCSSSWKYPLYPERCTSSVPPSSYEDNYILEIEAVVD

SEQ ID NO: 9791 - protein, 490 aa, Schizosaccharomyces pombe
FTPSSGFMNDPNGLVYTGGVYHMFFQYSPKTLTAGEVHWGHTVSKDLIHWENYPIAIYPDEHENGVLSLPFSGSAVVDVHNSSGLFSNDTIPEERIVLYWTGVPERLAIAYTTNGGYTFKKYSGNPVLDINSLQFRDPKVIWDFDANRWVMMVALSQNYGIAFYPSYDLIHWTELSVFSTSGYLGLQYECPGMARVPVEGTDEYKWVLFISINPGAPLGGSVVQYFVGDWNGTNFVPDDGQTRFVDLGKDFYASALYHSSSANADVIGVGWASNWQYTNQAPTQVFRSAMTVARKFTLRDVPQNPMTNLTSLIQTPLNVSLLRDETLFTAPVINSSSSLSGSPITLPSNTAFEFNVTLSINYTEGCTTGYCLGRIIIDSDDPYRLQSISVDVDFAASTLVINRAKAQMGWFNSLFTPSFANDIYIYGNVTLYGIVDNGLLELYVNNGEKTYTNDFFFLQGATPGQISFAAFQGVSFNNVTVTPLKTIWNC

SEQ ID NO: 9792 - protein, 533 aa, Pichia jadinii
MSLTKDASEDQEDIKSLTMNTSLVDSSIYRPLVHLTPPVGWMNDPNGLFYDSSESTYHVYYQYNPNDTIWGLPLYWGHATSDDLLTWDHHAPAIGPENDDEGIYSGSIVIDYDNTSGFFDDSTRPEQRIVAIYTNNLPDVETQDIAYSTDGGYTFEKYENNPVIDVNSTQFRDPKVIWYEETEQWVMTVAKSQEYKIQIYTSDNLKDWSLASNFSTKGYVGYQYECPGLFEATIENPKSGDPEKKWVMVLAINPGSPLGGSINEYFVGDFNGTEFIPDDDATRFMDTGKDFYAFQAFFNAPENRSIGVAWSSNWQYSNQVPDPDGYRSSMSSIREYTLRYVSTNPESEQLILCQKPFFVNETDLKVVEEYKVSNSSLTVDHTFGSSFANSNTTGLLDFNMTFTVNGTTDVTQKDSVTFELRIKSNQSDEAIALGYDYNNEQFYINRATESYFQRTNQFFQERWSTYVQPLTITESGDKQYQLYGLVDNNILELYFNDGAFTSTNTFFLEKGKPSNVDIVASSSKEAYHRGPAD

SEQ ID NO: 9793 - protein, 556 aa, Kluyveromyces marxianus
MKLAYSLLLPLAGVSASVINYKRDGDSKAITNTTFSLNRPSVHFTPSHGWMNDPNGLWYDAKEEDWHLYYQYNPAATIWGTPLYWGHAVSKDLTSWTDYGASLGPGSDDAGAFSGSMVIDYNNTSGFFNSSVDPRQRAVAVWTLSKGPSQAQHISYSLDGGYTFQHYSDNAVLDINSSNFRDPKVFWHEGENGEDGRWIMAVAESQVFSVLFYSSPNLKNWTLESNFTHHGWTGTQYECPGLVKVPYDSVADSSSNSSDSKPDSAWVLFVSINPGGPLGGSVTQYFVGDFNGTHFTPIDDQTRFLDMGKDYYALQTFFNTPNEKDVYGIAWASNWQYAQQAPTDPWRSSMSLVRQFTLKDFSTNPNSADVVLNSQPVLNYDALRKNGTTYSITNYTVTSENGKKIKLDNPSGSLEFHLEYVFNGSPDIKSNVFADLSLYFKGNNDDNEYLRLGYETNGGAFFLDRGHTKIPFVKENLFFNHQLAVTNPVSNYTTNVFDVYGVIDKNIIELYFDNGNVVSTNTFFFSTNNVIGEIDIKSPYDKAYTINSFNVTQFNV

SEQ ID NO: 9794 - protein, 555 aa, Kluyveromyces marxianus
MKFAYSLLLPLAGVSASVINYKRDGDSKAITNTTFSLNRPSVHFTPSHGWMNDPNGLWYDAKEEDWHLYYQYNPAATIWGTPLYWGHAVSKDLTSWTDYGASLGPGSDDAGAFSGSMVIDYNNTSGFFNSSVDPRQRAVAVWTLSKGPSQAQHISYSLDGGYTFEHYTDNAVLDINSSNFRDPKVFWHEGENGEDGRWIMAVAESQVFSVLFYSSPNLKNWTLESNFTHHGWTGTQYECPGLVKVPYDSVVDSSNSSDSKPDSAWVLFVSINPGGPLGGSVTQYFVGDFNGTHFTPIDGQTRFLDMGKDYYALQTFFNTPNEKDVYGIAWASNWQYAQQAPTDPWRSSMSLVRQFTLKDFSTNPNSADVVLNSQPVLNYDALRKNGTTYSITNYTVTSENGKKIKLDNPSGSLEFHLEYVFNGSPDIKSNVFADLSLYFKGNNDDNEYLRLGYETNGGAFFLDRGHTKIPFVKENLFFTHQLAVTNPVSNYTTNVFDVYGVIDKNIIELYFDNGNVVSTNTFFFSTNNVIGEIDIKSPYDKAYTINSFNVTQFNV

SEQ ID NO: 9795 - protein, 555 aa, Kluyveromyces marxianus
MKLAYSLLLPLAGVSASVINYKRDGDSKAITNTTFSLNRPSVHFTPSHGWMNDPNGLWYDAKEEDWHLYYQYNPAATIWGTPLYWGHAVSKDLTSWTDYGASLGPGSDDAGAFSGSMVIDYNNTSGFFNSSVDPRQRAVAVWTLSKGPSQAQHISYSLDGGYTFQHYSDNAVLDINSSNFRDPKVFWHEGENGEDGRWIMAVAESQVFSVLFYSSPNLKNWTLESNFTITVWTGTQYECPGLVKVPYDSVADSSNSSDSKPDSAWVLFVSINPGGPLGGSVTQYFVGDFNGTHFTPIDDQTRFLDMGKDYYALQTFFNTPNEKDVYGIAWASNWQYAQQAPTDPWRSSMSLVRQFTLKDFSTNPNSADVVLNSQPVLNYDALRKNGTTYSITNYTVTSENGKKIKLDNPSGSLEFHLEYVFNGSPDIKSNVFADLSLYFKGNNDDNEYLRLGYETNGGAFFLDRGHTKIPFVKENLFFNHQLAVTNPVSNYTTNVFDVYGVIDKNIIELYFDNGNVVSTNTFFFSTNNVIGEIDIKSPYDKAYTINSFNVTQFNL

SEQ ID NO: 9796 - protein, 555 aa, Kluyveromyces marxianus
MKFAYSLLLPLAGVSASVINYKRDGDSKAITNTTFSLNRPSVHFTPSHGWMNDPNGLWYDAKEEDWHLYYQYNPAATIWGTPLYWGHAVSKDLTSWTDYGASLGPGSDDAGAFSGSMVIDYNNTSGFFNSSVDPRQRAVAVWTLSKGPSQAQHISYSLDGGYTFEHYTDNAVLDINSSNFRDPKVFWHEGENGEDGRWIMAVAESQVFSVLFYSSPNLKNWTLESNFTHHGWTGTQYECPGLVKVPYDSVVDSSNSSDSKPDSAWVLFVSINPGGPLGGSVTQYFVGDFNGTHFTPIDGQTRFLDMGKDYYALQTFFNTPNEKDVYGIAWASNWQYAQQAPTDPWRSSMSLVRQFTLKDFSTNPNSADVVLNSQPVLNYDALRKNGTTYSITIYTVTSENGKKIKLDNPSGSLEFHLEYVFNGSPDIKSNVFADLSLYFKGNNDDNEYLRLGYETNGGAFFLDRGHTKIPFVKENLFFTHQLAVTNPVSNYTTNVFDVYGVIDKNIIELYFDNGNVVSTNTFFFSTNNVIGEIDIKSPYDKAYTINSFNVTQFNV

SEQ ID NO: 9797 - protein, 550 aa, Pichia anomala
MIQLSPLLLLPLFSVFNSIADASTEYLRPQIHLTPDQGWMNDPNGMFYDRKDKLWHVYFQHNPDKKSIWATPVTWGHSTSKDLLTWDYHGNALEPENDDEGIFSGSVVVDRNNTSGFFNDSTDPEQRIVAIYTNNAQLQTQEIAYSLDKGYSFIKYDQNPVINVNSSQQRDPKVLWHDESNQWIMVVAKTQEFKVQIYGSPDLKKWDLKSNFTSNGYLGFQYECPGLFKLPIENPLNDTVTSKWVLLLAINPGSPLGGSINEYFIGDFDGTTFHPDDGATRFMDIGKDFYAFQSFDNTEPEDGALGLAWASNWQYANTVPTENWRSSMSLVRNYTLKYVDVNPENYGLTLIQKPVYDTKETRLNETLKTLETINEYEVNDLKLDKSSFVATDFNTERNATGVFEFDLKFTQTDLKMGYSNMTTQFGLYIHSQTVKGSQETLQLVFDTLSTTWYIDRTTQHSFQRNSPVFTERISTYVEKIDTTDQGNVYTLYGVVDRNILELYFNDGSIAMTNTFFFREGKIPTSFEVVCDSEKSFITIDELSVRELARK

SEQ ID NO: 9798 - protein, 532 aa, Saccharomyces cerevisiae
MLLQAFIFLLAGFAAKISALMTNETSDRPLVHFTPNKGWMNDPNGLWYDAKEGKWHLYFQYNPNDTVWGLPLFWGHATSNDLTHWQDEPVAIAPKRNDSGAYSGSMVIDHNNTSEFFNDTVDPRQRCVAIWTYNTPESEEQYISYSLDGGYTFTEYQKNPVLAANSTQFRDPKVFWYEPSQKWIMTAAKSQDYKIEIYSSDDLKSWKLESAFANEGFLGYQYECPGLIEVPTEQDPSKSHWVMFISINPGAPAGGSFNQYFVGSFNGTHFEAYDNQSRVVDFGKDYYALQTFFNTDPTYGSALGIAWASNWEYSAFVPTNPWRSSMSLVRKFSLNTEYQANPETELINLKAEPILNISNAGPWLHFASNSTLTKANSFSVDLSNSTGTLEFELVYAVNTTQSVSKSVFSDLSLWFKGLEDPEEYLRMGFEASASSFFLDRGNSKVKFVKENPYFTNRMSVNNQPFKSENDLSYYKVYGLLDQNILELYFNDGDVVSTNTYFMTTGNALGSVNMTTGVDNLFYIDKFQVREVK

SEQ ID NO: 9799 - protein, 532 aa, Saccharomyces cerevisiae
MLLQAFLFLLAGFAAKISASMTNETSDRPLVHFTPNKGWMNDPNGLWYDEKDAKWHLYFQYNPNDTVWGTPLFWGHATSDDLTNWEDQPIAIAPKRNDSGAFSGSMVVDYNNTSGFFNDTIDPRQRCVAIWTYNTPESEEQYISYSLDGGYTFTEYQKNPVLAANSTQFRDPKVFWYEPSQKWIMTAAKSQDYKIEIYSSDDLKSWKLESAFANEGFLGYQYECPGLIEVPTEQDPSKSYWVMFISINPGAPAGGSFNQYFVGSFNGTHFEAFDNQSRVVDFGKDYYALQTFFNTDPTYGSALGIAWASNWEYSAFVPTNPWRSSMSLVRKFSLNTEYQANPETELINLKAEPILNISNAGPWSRFATNTTLTKANSYNVDLSNSTGTLEFELVYAVNTTQTISKSVFADLSLWFKGLEDPEEYLRMGFEVSASSFFLDRGNSKVKFVKENPYFTNRMSVNNQPFKSENDLSYYKVYGLLDQNILELYFNDGDVVSTNTYFMTTGNALGSVNMTTGVDNLFYIDKFQVREVK

SEQ ID NO: 9800 - protein, 532 aa, Saccharomyces cerevisiae
MLLQAFLFLLAGFAAKISASMTNETSDRPLVHFTPNKGWMNDPNGLWYDAKEGKWHLYFQYNPNDTVWGLPLFWGHATSDDLTHWQDEPVAIAPKRKDSGAYSGSMVIDYNNTSGFFNDTIDPRQRCVAIWTYNTPESEEQYISYSLDGGYTFTEYQKNPVLAANSTQFRDPKVFWYEPSKKWIMTAAKSQDYKIEIYSSDDLKSWKLESAFANEGFLGYQYECPGLIEVPSEQDPSKSHWVMFISINPGAPAGGSFNQYFVGSFNGHHFEAFDNQSRVVDFGKDYYALQTFFNTDPTYGSALGIAWASNWEYSAFVPSNPWRSSMSLVRPFSLNTEYQANPETELINLKAEPILNISSAGPWSRFATNTTLTKANSYNVDLSNSTGTLEFELVYAVNTTQTISKSVFADLSLWFKGLEDPEEYLRMGFEVSASSFFLDRGNSKVKFVKENPYFTNRMSVNNQPFKSENDLSYYKVYGLLDQNILELYFNDGDVVSTNTYFMTTGNALGSVNMTTGVDNLFYIDKFQVREVK

SEQ ID NO: 9801 - protein, 632 aa, Taraxacum officinale
MASSTTAATPLILHNDSTPRRRLSLAKLLSGIPVAVLVIFALVTVILNQSQHTSATGNIDFHGGDKPSSDTTFTEMVPEELKQVLIKLESNAGVEWERSAYHFQPDKNFISDPDGPMYHMGWYHLFYQYNPESAIWGNITWGHSISRDMINWFHLPFAMVPDHWYDIEGVMTGSATMLPDGQIIMLYTGNAYDLAQLQCLAYAVNSSDPLLLEWKKYEGNPILFPPPGVGYKDFRDPSTLWRGPDGDWIMIMGSKHNQTIGCALVYRTSNFTHFELSEEPLHAVPHTGMWECVDLYPVSTTHTNGLDMMDNGPNVKYILKQSGDEDRHDWYAIGSFDPINDKWYPDDPENDVGIGLRYDYGKFYASKTFYDQHKSRRVLWGYVGETDPPKDDLLKGWANMLNIPRTIVLDTVTGTNLIQWPIDEVENLRSKKYDEFKDVELRPGSIIPLEIGSATQLDIMATFEIDEKMLESTLEADVLFNCTTSEGSVGRGVLGPFGIVVLADAKRSEQLPVYFYIAKNTDGSSKTYFCADESRSSMDKSVGKWVYGDSVPVLEGEKHNMRLLVDHSIVEGFAQGGRTVVTSRVYPTKAIYGAAKLFLFNNATGISVKASLKIWKMAEAQLDPFPLSGWSS

SEQ ID NO: 9802 - protein, 342 aa, Saccharum hybrid cultivar H65-7052
TRGKASGNGVDMSDALGKNGAVVGDVVHVMKASMDDDRHDYYALGRYDAAANAWTPLDAEKDVGTGLRYDWGKFYASKTFYDPAKRRRVLWGWVGETDSERADVSKGWASLQGIPRTVLLDTKTGSNLLQWPVEEVETLRTNSTDLSGITIDYGSAFPLNLRRATQLDIEAEFQLDRRAVMSLNEADVGYNCSTSGGAAARGALGPFGLLVLADKHLHEQTAVYFYVAKGLDGSLTTHFCQDESRSSSANDIVKRVVGSAVPVLEDETTLSLRVLVDHSIVESFAQGGRSTATSRVYPTKAIYANAGVFLFNNATAVRVTAKKLVVHEMDSSYNHDYMVTDI

SEQ ID NO: 9803 - protein, 164 aa, Saccharum hybrid cultivar H65-7052
  unsure (1)..(164): unsure at all Xaa locations
YNPDGAIWGNKIAWGHAVSRDLIHWRHLPLAMVPDQWYDTNGVWTGSATTLPDGRLAMXYTGSTNASVQVQCLAVPADDADPLLTNWTKYEGNPVLYPPPGIGPKDFRDPTTAWFDPSDNTWRIVIGSKDDXEGDHAGIAVVYRTRDFVHFELLPDLLHRVAGT

SEQ ID NO: 9804 - protein, 516 aa, Aspergillus ficuum
MLNPKVAYMVWMTCLGLTLPSQAQSNDYRPSYHFTPDQYWMNEPNGLIKIGSTWHLFFQHNPTANVWGNICWGHATSTDLMHWAHKPTAIADENGVEAFTGTAYYDPNNTSGLGDSANPPYLAWFTGYTTSSQTQDQRLAFSVDNGATWTKFQGNPIISTSQEAPHDITGGLESRDPKVFFHRQSGNWIMVLAHGGQDKLSFWTSADTINWTWQSDLKSTSINGLSSDITGWEVPDMFELPVEGTEETTWVVMMTPAEGSPAGGNGVLAITGSFDGKSFTADPVDASTMWLDNGRDFDGALSWVNVPASDGRRIIAAVMNSYGSNPPTTTWKGMLSFPRTLSLKKVGTQQHFVQQPITELDTISTSLQILANQTITPGQTLLSSIRGTALDVRVAFYPDAGSVLSLAVRKGASEQTVIKYTQSDATLSVDRTESGDISYDPAAGGVHTAKLEEDGTGLVSIRVLVDTCSVEVFGGQGEAVISDLIFPSDSSDGLALEVTGGNAVLQSVDVRSVSLE

SEQ ID NO: 9805 - protein, 516 aa, Aspergillus niger
MLNPKVAYMVWMTCLGLTLPSQAQSNDYRPSYHFTPDQYWMNEPNGLIKIGSTWHLFFQHNPTANVWGNICWGHATSTDLMHWAYKPTAIADENGVEAFTGTAYYDPNNTSGLGDSANPPYLAWFTGYTTSSQTQDQRLAFSVDNGATWTKFQGNPIISTSQEAPHDITGGLESRDPKVFFHRQSGNWIMVLAHGGQDKLSFWTSADTIHWTWQSDLKSTSINGLSSDITGWEVPDMFELPVEGTGETTWVVMMTPAEGSPAGGNGVLAITGSFDGKTFTADPVDASTMWLDNGRDFDGALSWVNVPASDGRRIIAAVMNSYGSNPPTTTWKGMLSFPRTLSLKKVGTQQHFVQQPITELDTISTSMQTLANQTITPGQTLLSSIRGTALDVRVAFYPDAGSVLSLTVRKGASEQTVINYTQSNATLSVDRTESGDISYDPAAGGVHTAKLEEDGTGLVSIRVLVDTCSVEVFGGQGEAVISDLIFPSDSSDGLALEVTGGNAVLQSVDVRSVSLE

SEQ ID NO: 9806 - protein, 516 aa, Aspergillus niger
MLNPKVAYMVWMTCLGLTLPSQAQSNDYRPSYHFTPDQYWMNEPNGLIKIGSTWHLFFQHNPTANVWGNICWGHATSTDLMHWAHKPTAIADENGVEAFTGTAYYDPNNASGLGDSANPPYLAWFTGYTVSSQTQDQRLAFSVDNGATWTKFQGNPIISTSQEAPHDITGGLESRDPKVFFHRQSGNWIMVLAHGGQDKLSFWTSADTINWTWQSDLKSTSINGLSSDITGWEVPDMFELPVEGTEETTWVVMMTPAEGSPAGGNGVLAITGSFDGKSFTADPVDASTMWLNNGRDFDGALSWVNVPASDGRRIIAAVMNSYGSNPPTTTWKGMLSFPRTLSLKKVGTQQHFVQQPITELDTISTSLQTLENQTITPGQTLLSSIRGTALDVRVAFYPDAGSVLSLAVRKGASEQTVIKYTQSDATLSVDRTESGDTSYDPAAGGVHTAKLEEDDTGLVSIRVLVDTCSVEVFGGQGEAVISDLIFPSDSSDGLALEVTGGNAVLQSVDVRSVSLE

SEQ ID NO: 9807 - protein, 516 aa, Aspergillus niger
MLNPKVAYMVWMTCLGLTLPSQAQSNDYRPSYHFTPDQYWMNEPNGLIKIGSTWHLFFQHNPTANVWGNICWGHATSTDLMHWAHKPTAIADENGVEAFTGTAYYDPNNASGLGDSANPPYLAWFTGYTVSSQTQDQRLAFSVDNGATWTKFQGNPIISTSQEAPHDITGGLESRDPKVFFHRQSGNWIMVLAHGGQDKLSFWTSADTINWTWQSDLKSTSINGLSSDITGWEVPDMFELPVEGTEETTWVVMMTPAEGSPAGGNGVLAITGSFDGKSFTADPVDASTMWLNNGRDFDGALSWVNVPASDGRRIIAAVMNSYGSNPPTTTWKGMLSFPRTLSLKKVGTQQHFVQQPITELDTISTSLQTLENQTITPGQTLLSSIRGTALDVRVAFYPDAGSVLSLAVRKGASEQTVIKYTQSDATLSVDRTESGDTSYDPAAGGVHTAKLEEDDTGLVSIRVLVDTCSVEVFGGQGEAVISDLIIPSDSSDGLALEVTGGNAVLQSVDVRSVSLE

SEQ ID NO: 9808 - protein, 516 aa, Aspergillus niger
MLNPKVAYMVWMTCLGLMLPSQAQSNDYRPSYHFTPDQYWMNEPNGLIKIGSTWHLFFQHNPTANVWGNICWGHATSTDLMHWAHKPTAIADENGVEAFTGTAYYDPNNTSGLGDSANPPYLAWFTGYTTSSQTQDQRLAFSVDNGATWTKFQGNPIISTSQEAPHDITGGLESRDPKVFFHRQSGNWIMVLAHGGQDKLSFWTSADTINWTWQSDLKSTSINGLSSDITGWEVPDMFELPVEGTEETTWVVMMTPAEGSPAGGNGVLAITGSFDGKSFTADPVDASTMWLDNGRDFDGALSWVNVPASDGRRIIAAVMNSYGSNPPTTTWKGMLSFPRTLSLKKVGTQQHFVQQPITELDTISTSLQTLANQTITPGQTLLSSIRGTALDVRVAFYPDAGSVLSLAVRKGASEQTVINYTQSDATLSVDRTESGDISYDPAAGGVHTAKLEEDGTGLVSIRVLVDTCSVEVFGGQGEAVISDLIFPSDSSDGLALEVTGGNAVLQSVDVRSVSLE

SEQ ID NO: 9809 - protein, 516 aa, Aspergillus niger
MLNPKVAYMVWMTCLGLMLPSQAQSNDYRPSYHFTPDQYWMNEPNGLIKIGSTWHLFFQHNPTANVWGNICWGHATSTDLMHWAHKPTAIADENGVEAFTGTAYYDPNNTSGLGDSANPPYLAWFTGYTTSSQTQDQRLAFSVDNGATWTKFQGNPIISTSQEAPHDITGGLESRDPKVFFHRQSGNWIMVLAHGGQDKLSFWTSADTINWTWQSDLKSTSINGLSSDITGWEVPDMFELPVEGTEETTWVVMMTPAEGSPAGGNGVLAITGSFDGKSFTADPVDASTMWLDNGRDFDGALSWVNVPASDGRRIIAAVMNSYGSNPPTTTWKGMLSFPRTLSLKKVGTQQHFVQQPITELDTISTSLQTLANQTITPGQTLLSSIRGTALDVRVAFYPDAGSVLSLAVRKGASEQTVINYTQSNATLSVDRTESGDISYDPAAGGVHTAKLEEDGTGLVSIRVLVDTCSVEVFGGQGEAVISDLIFPSDSSDGLALEVTGGNAVLQSVDVRSVSLE

SEQ ID NO: 9810 - protein, 494 aa, Aspergillus niger
MQSNDYRPSYHFTPDQYWMNEPNGLIKIGSTWHLFFQHNPTANVWGNICWGHATSTDLMHWAHKPTAIADENGVEAFTGTAYYDPNNASGLGDSANPPYLAWFTGYTVSSQTQDQRLAFSVDNGATWTKFQGNPIISTSQEAPHDITGGLESRDPKVFFHRQSGNWIMVLAHGGQDKLSFWTSADTINWTWQSDLKSTSINGLSSDITGWEVPDMFELPVEGTEETTWVVMMTPAEGSPAGGNGVLAITGSFDGKSFTADPVDASTMWLNNGRDFDGALSWVNVPASDGRRIIAAVMNSYGSNPPTTTWKGMLSFPRTLSLKKVGTQQHFVQQPITELDTISTSLQTLENQTITPGQTLLSSIRGTVLDVRVAFYPDAGSVLSLAVRKGRSEQTVIKDTQSDATLSVDRTESGDTSYDPAAGGVHTAKLEEDDTGLVSIRVLVDTCSVDLFGGQGEAVISDLIFPSDSSDGLALEVTGGNAVLQSVDVRSLSLE

SEQ ID NO: 9811 - protein, 494 aa, Aspergillus niger
MQSNDYRPSYHFTPDQYWMNEPNGLIKIGSTWHLFFQHNPTANVWGNICWGHATSTDLMHWAHKPTAIADENGVEAFTGTAYYDPNNASGLGDSANPPYLAWFTGYTVSSQTQDQRLAFSVDNGATWTKFQGNPIISTSQEAPHDITGGLESRDPKVFFHRQSGNWIMVLAHGGQDKLSFWTSADTINWTWQSDLKSTSINGLSSDITGWEVPDMFELPVEGTEETTWVVMMTPAEGSPAGGNGVLAITGSFDGKSFTADPVDASTMWLSWVNVPASDGRRIIAAVMNSYGSNPPTTTWKGMLSFPRTLSLKKVGTQQHFVQQPITELDTISTSLQTLENQTITPGQTLLSSIRGTVLDVRVAFYPDAGSVLSLAVRKGRSEQTVIKDTQSDATLSVDTQSDATLSVDRTESGDTSYDPAAGGVHTAKLEEDDTGLVSIRVLVDTCSVDLFGGQGEAVISDLIFPSDSSDGLALEVTGGNAVLQSVDVRSLSLE

SEQ ID NO: 9812 - protein, 515 aa, Penicillium sp.
MISQGLTGALKALPLVCALVARAVADDYRPAFHFCPAENWMNEPNGLIQINSTWHLFYQADPAANVWGNECWGHATSSDLLHWDHLPVAIPVENGIESFTGTSYYDSNNTSGLGTSTNPPYLAFFTGYTESNKTQDQRLAYSTDLGQTWVKFAGNPIIGAAQEAPQDISGGLESRDPKVFFHAPSGKWVMVLAHGGQDKLTFWTSLDAKNWTWVSDLSSSQIEGFPSSITGWEVPDMFQLPIQGIKKTTWVLIFTPAQGSPPGGNGVVALTGSFDGETFVADPVDPSTLWLDYGRDFDGALSWENVPASDGRRIIAAVMNSYGSNPPTTTWKGMLSFPRTLALKQIGSKQYFLQQPVAELSTIDGSLTSIQNQTITPNQTLLSSIHGTSLDIRMAFVIDSGATLSLAVRKGGSEQTVIRYFQSNSTLSVDRTASGDISYDPAAGGVHTAQLAQDNTELVHIWALIDTCSVEVFGGEGEAVISDLIFPSNSSDGLSLEVSGGTAMLRSVNVSSVSL

SEQ ID NO: 9813 - protein, 695 aa, Neurospora crassa
MTKTTPYKNALVGLLSLASVLPDGTTASVLPRTQECQRQQYPGPKNPSFETGDLSGWTVVNGTAFGKSSVTTAASSQLGSGPFNQVGKQFLSTNLQDGEAATGTLRSSTFKASSVMSFLIGGNYDPANLYVGLVLEKDGSLLFSQTATNDEALIRIVWDTSAYAGQNVYLVVVDTSTTGHISLDDVRTGCDALKDGPHTFNILGQSNQPTSKNLTALSAASRYAVDPTRPQYHYTPYQGWINDPAGLIQWGGKYHLFNQYNPVAPLWGPMYWSHAESTDAVHWRDLPVALTPPYVNNTQDTSGRYTGSAVKNQDTGALQLIYTDATNVTYHPHAVPEVVSSAVSSDGIHFDLYSGNPIVAEAPPTSSAGFRDPKVFWDPTANNWKMVVGSGDGHTGNVQLYKSTGPSSSELLSWEYVGVLHQGDGSRGIMWECPNFFPIDDKWVLFYGQDKGFKGWYEVGSFNGTTFVSEKLGLFDSGPDSYATQWFVDDAGRNLAVTWINNWNTTKWPSRVNGWAGTQSIMRELFIREDGGLGQKPVEEVSLLASGPAKSLGQTDVFGTYEVGFTDTARLQATVDLAASDAPAFTIELFASGAESTSLVYNFANRSLTIDTMNAGYGQAGTWEATIAKPADNRLSLDILIDRSSIEVFVGDGTAMTVRVFPRYQESKNIRITSDGGKKTVFDDIVLTPMGSAWE

SEQ ID NO: 9814 - protein, 512 aa, Zymomonas mobilis
MESPSYKNLIKAEDAQKKAGKRLVSSEWYPGFHVTPLTGWMNDPNGLIFFKGEYHLFYQYYPFAPVWGPMHWGHAKSRDLVHWETLPVALAPGDSFDRDGCFSGCAVDNNGILTLIYTGHIVLSNDSPDAIREVQCMATSIDGIHFQKEGIILEKPPMPQVAHFRDPRVWKENDRWFMVVGYRTDDEKHQGIGHVALYRSENLKDWIFVKTLLGDNSQLPLGKRAFMWECPDFFSLGNRSVLMFSPQGLKASGYKNRNLFQNGYILGKWQAPQFTPETSFQELDYGHDFYAAQRFEDKDGRQILIAWFDMWENQKPSQRDGWAGCMTLPRKLDLIDNKIVMTPVREMEILRQSEKIESVVTLSDAEHPFTIDSPLQEIELIFDLEKSSAYQAGLALRCNDKGQETLLYIDRSQNRIILDRNRSGQNVKGIRSCPLPNTSKVRLHIFLDRSSIEIFVGDDQTQGLYSISSRIFPDKDSLKGRLFAIEGYAVFDSFKRWTLQDANLAAFLSDAC

SEQ ID NO: 9815 - protein, 512 aa, Zymomonas mobilis
MESPSYKNLIKAEDAQKKAGKRLLSSEWYPGFHVTPLTGWMNDPNGLIFFKGEYHLFYQYYPFAPVWGPMHWGHAKSRDLVHWETLPVALAPGDLFDRDGCFSGCAVDNNGVLTLIYTGHIVLSNDSPDAIREVQCMATSIDGIHFQKEGIVLEKAPMPQVAHFRDPRVWKENDHWFMVVGYRTDDEKHQGIGHVALYRSENLKDWIFVKTLLGDNSQLPLGKRAFMWECPDFFSLGNRSVLMFSPQGLKASGYKNRNLFQNGYILGKWQAPQFTPETSFQELDYGHDFYAAQRFEAKDGRQILIAWFDMWENQKPSQRDGWAGCMTLPRKLDLIDNKIVMTPVREMEILRQSEKIESVVTLSDAEHPFTMDSPLQEIELIFDLEKSSAYQAGLALRCNGKGQETLLYIDRSQNRIILDRNRSGQNVKGIRSCPLPNTSKVRLHIFLDRSSIEIFVGDDQTQGLYSISSRIFPDKDSLKGRLFAIEGYAVFDSFKRWTLQDANLAAFSSDAC

SEQ ID NO: 9816 - protein, 511 aa, Zymomonas mobilis
MESPSYKNLIKAEDAQKKAGKRLLSSEWYPGFHVTPLTSWMNDPNGLIFFKGEYHLFYQYYPFAPVWGPMHWGHAKSRDLVHWETLPVALAPGDSFDRDGCFSGCAVDNNGVLTLIYTGHIVLSNDSPDAIREVQCMATSIDGIHFQKEGIVLEKAPMPQVAHFRDPRVWKENDHWFMVVGYRTDDKKHQGIGHVALYRSENLKDWIFVKTLLGDNSQLPLGKRAFMWECPDFFSLGNRSVLMFSPQGLKASGYKNRNLFQNGYILGKWQAPQFTPETSFQELDYGHDFYAAQRLKLKDGRQNINCMVDMWKSKPSQRDGWAGCMTLPRKLDLIDNKIVMTPVREMEILRQSEKIESVVTLSDAEHPFTMDSPLQEIELIFDLEKSNAYQAGLALRCNGKGQETLLYIDRSQNRIILDRNRSGQNVKGIRSCPLPNTSKVRLHIFLDRSSIEIFVGDDQTQGLYSISSRIFPDKDSLKGRLFAIEGYAVFDSFKRWTLQDANLAAFSSDAC

SEQ ID NO: 9817 - protein, 687 aa, Citrus unshiu
MADSNVSYNPLPDGERPRPTRRRSIVLVLSGLLVVGFLVALLSDNGSITPANVIDNDNNNVNDNAKNGLNDVSSSSKEPERLRPFTSASSAGVSEKSNRRFGSRTASYPWTNNMLSWQRTAFHFQPQKNWMNDPNGPVFYKGWYHLFYQYNPNGAIWGDIVWGHAVSKDLIHWYHLPLAMVADQWYDIMGVWTGSATILPDGKLMMLYTGSTNESVQVQNLAYPADPSDPLLIKWVKYPGNPVLVPPPGIGSKDFRDPTTAWLTSEGKWRIAIGSRINRTGITFVYDTKDFINYELLRGVLHGVPNTGMWECVDFYPVSTTGEHGLDTSHNGLGVKHVVKASMDDDRHDYYAIGTYHEKNVTWVPDNPEIDVGIGIRYDYGLFYASKTFYDQNKKRRVLWGWIGESDSEIADVKKGWASLQGIPRTVALDTKTGSNLLQWPVEEVDSLRLTSKEFKKIELKPGSVMPLDVGSATQLDIVAEFELDKAALEKTAESNVEFSCSSSEGSAERGALGPFGLLVLADDSLSEQTPVYFYIAKGKDGSLKTYFCTDQSRSSEANDVNKSKYGSFVPVLEGEKFSMRVLVDHSIVEGFAQGGRTTITSRVYPTKAIYGAARVFLFNNATGASVTSSLKAWQMNSAFIRPYPDDDDERHSGTEPTHEVRGSKTKYLGNLLTSSLLFLNARNNFL

SEQ ID NO: 9818 - protein, 469 aa, Erwinia amylovora
MSEAHLLKQALRAVLSGQQRAARDHHRPMWHLAPPVGLLNDPNGFIHFEQRYVLCYQWNPLDCKHGAKFWGQWSSCDLVHWRHEPLALAPSENYESHGCYSGCAVNNQGVLTLIYTGNVKFDDGSRTAWQCLATRDQQGEFHKLGPVLALPEGYTGHVRDPKVWQHDGQWYMVLGAQDLQLQGKVLLLRSADLHHWTLLGEIAGSQLNGLGDFGYMWECPDLFELDGSHVLVVCPQGLASEARRYRNTFQSGYFCGQLDHDSASFCHGQFQELDHGFEFYAPQTCLSDDGRRLLIGWMGIPDDDEFYQPTKAHGWMHTLTCPRELTLCAGRIHQQPARELQQLRQQETRLVGCAEDLPALDIGSAELELSVDGVCHARFGDRLTLCIDRPGITLRRNNLRSGDVEERYWMGEVRTLRILCDSSSIEIFINDGEGVMSSRYFPAAEPRLRFSGSAQIALRYWRLQQCVIE

SEQ ID NO: 9819 - protein, 477 aa, Escherichia coli
MTQSRLHAAQNALAKLHERRGNTFYPHFHLAPPAGWMNDPNGLIWFNDRYHAFYQHHPMSEHWGPMHWGHATSDDMIHWQHEPIALAPGDENDKDGCFSGSAVDDNGVLSLIYTGHVWLDGAGNDDAIREVQCLATSRDGIHFEKQGVILTPPEGIMHFRDPKVWREADTWWMVVGAKDPGNTGQILLYRGSSLREWTFDRVLAHADAGESYMWECPDFFSLGDQHYLMFSPQGMNAEGYSYRNRFQSGVIPGMWSPGRLFAQSGHFTELDNGHDFYAPQSFVAKDGRRIVIGWMDMWESPMPSKREGWAGCMTLARELSESNGKLLQRPVHEAESLRQQHQSISPRTISNKYVLQENAQAVEIQLQWALKNSDAEHYGLQLGAGMRLYIDNQSERLVLWRYYPHENLDGYRSIPLPQGDMLALRIFIDTSSVEVFINDGEAVMSSRIYPQPEERELSLYASHGVAVLQHGALWQLG

SEQ ID NO: 9820 - protein, 476 aa, Escherichia coli
MKQRLSLAQSALEKLSARRGNTWYPIFHLAPPAGWMNDPNGLIYFNGRYHAFFQHHPASAYQGPMHWGHATSTDMLHWQHELVALAPGDKYDRDGCFSGSAVDDDGVLSLIYTGHICLEDRGNDSIIREVQCLATSHDGIRFEKQGCVLTPPEGIMHFRDPKVWHEDGSWWMVIGARDASDNGQVLLYRGTSLRDWHLEHVLAHSAAGESYMWECPDFFRCGNFHWLMFSPQGMNPSGYRFRNLFQSGVLAGNWKPGSVFALKGVFEELDYGHDFYAPQSMLAEDGRRIIMAWMNMWDSPVPTRSEAWAGCLTLPREVFERDGRLCQRPVREVESLRRKCQPLSPVRLHGVQLLTENVQAAELLVTWHTVDSHAEHYGIRLGEGLRFYVDNQAGRLILWRYYPEEGLDGYRSVELPDTEYLTLRIFLDRSSVEVFVNDGEATLSSRIYPQADSRQLSLYAAHGDAILTDGTLWMLT

SEQ ID NO: 9821 - protein, 477 aa, Escherichia coli
MTQSRLHAAQNALAKLHEHRGNTFYPHFHLAPPAGWMNDPNGLIWFNDRYHAFYQHHPMSEHWGPMHWGHATSDDMIHWQHEPIALAPGDDNDKDGCFSGSAVDDNGVLSLIYTGHVWLDGAGNDDAIREVQCLATSRDGIHFEKQGVILTPPEGIMHFRDPKVWREADTWWMVVGAKDPGNTGQILLYRGSSLREWTFDRVLAHADAGESYMWECPDFFSLGDQHYLMFSPQGMNAEGYSYRNRFQSGVIPGMWSPGRLFAQSGHFTELDNGHDFYAPQSFLAKDGRRIVIGWMDMWESPMPSKREGWAGCMTLARELSESNGKLLQRPVHEAESLRQQHQSVSPRTISNKYVLQENAQAVEIQLQWALKNSDAEHYGLQLGTGMRLYIDNQSERLVLWRYYPHENLDGYRSIPLPQRDTLALRIFIDTSSVEVFINDGEAVMSSRIYPQPEERELSLYASHGVAVLQHGALWLLG

SEQ ID NO: 9822 - protein, 640 aa, Leishmania major
MIPGSVRCGVILFLVAVAMMAAAAMKDGVPYEPIYHIRPPKNWINDPNGPYRDPVTGKIHLYMQYNPNGPLWGDIAWYHVTSQDYVKWTRPESPVAVWADRWYDKWGAYSGTMMNNNYSEPVMMYTCTEPENIQRQCIANPPKSDLQGKRTLNTLVKSALNVIMSEDMIPGVVAMENFRDPTEWWQDPTNPNRWLIAFVARIKDREGDNAHVIVFSTEDPSFQSGYSFSHSLYVYKYDLDHMFECPDFFTLKQGGEHYLKVSTMPSHRDYIIYGSYQLNTTSSQYVFVEDPARSFTFIDYGPFYASKTFYDPILNRRAIWGWTNDELTNEQIIANGWSGVQNMLRTMVYDHTEKKIKTQPVPETKGLRLDKLVDLRGVAVTATPTQVIASNTNNTLYHEIVARFTLADPTTFAAAATYPSDSDVPEVGVMIRANANLSQYTTVSVRMPGGGPSALQSTEQIETYPPIKIFAGSSAANCSAECDKMRLCESYTFWGKNNTCKLYWKTNPMKSKDDATSGTVREPLLYLGRTQSGTIGSTAPLHGRAPFATATPNGFELHIFVDDSVLEIFKDEGLETLTGRLYIDNGADTTGIAVYARNAGTVTVDVEVYTMDTIWKAPTPNAAKNFTDALYNLLDTLIAV

SEQ ID NO: 9823 - protein, 513 aa, Leishmania major
MSSQAQQRAPAYAPRDTHAERLAAADREAAARRDSSTNWTWYPEYHLAPYMGWMNDPTGLVHFRDHYHVFYQYHPYSAEWGPMHWGHMTSEDLVHWQHEKVALAPGDACDRNGCFSGTAVVHEDRMYVFYTGHFALDAATPSNPDAIFEQQCVAVSSDGVNFEKLGAVVRPPPGYVHFRDPKVWQQDGRWWMVCGARDVTKDLGQLLLFTTEDLLKWDDTNWQVLGMTEDKNVFMWECPDYFTIGSREDMKLLLFCPQGKKASEYNYRNRFQNGYTVGQWMPGGPWTVQREFRELDRGHDFYAAQTFLAADGQRRMLMAWCNMWESPMPTKQYGWSGCLTLPRELSYNEATGQLCMLPARELVGLRTPEMMIVPSLLVENNSDAQILENCTAYELDIAFNMETSTAEKYGLWLGSGAELYVDAQSKRLVLNRHYPQHMLSGYRSCELPIGLLLQLHVFIDRSSIEVFVNNGEATFSSRVFPDEGDRALRVFSVNGTADMVGGTMWKLKATVRH

SEQ ID NO: 9824 - protein, 581 aa, Leishmania major
MRASERVPADDAATRVCPHSLIDSPSPSLMQAASAVATATATSSGIANLKQEASHEERLKVADHTAVKAWSLLNKMWYPDYHMASLAGWMGVPGGLCYHNGFYHVFYQYNPFSENWGPMHWGHMTSEDLVHWQHQPIALAPGELFDHDGCFSGSSVSYNNKLYIFYTGHTWRTESEKGSGNGTMGDGASFYQQQCVAVSSDGVNFEKLGAVVRPPPGYVHFRDPKVWQQDGRWWMVCGARDVTKDLGQLLLFTTEDLLKWDDTNWQVLGMTEDKNVFMWECPDMFRLGQMNVFLYSPQGMRKADYAYRNRFQSGYLLGSWNMSLVTAALSEREAGSPKGTASGSHAIGGPRWLASFDVTQRFREIDRGHDFYAPQTLLTKDGRRLIIGWMDMWESPMPTRGHGWSGCLTLPRELILDPFTGSVRMVPPKELLQLRCAQATILAQRIQESTDVLLVESCTAYELDIAFNMETSTAEKYGLWLGSGAELYVDAQSKRLVLNRHYPQHMLSGYRSCELPIGLLLQLHVFIDRSSIEVFVNNGEATFSSRVFPDEGDRALRVFSVNGTADMVGGTMWKLKATVRH

SEQ ID NO: 9825 - protein, 486 aa, Leishmania major
MTHANPPANRPPRRPLPFSPTPAQTHPSERIHLTRRHDRSLIAFVARIKDREGDNAHVIVFSTEDPSFQSGYSFSHSLYVYKYDLDHMFECPDFFTLKQGGEHYLKVSTMPSHRDYIIYGSYQLNTTSSQYVFVEDPARSFTFIDYGPFYASKTFYDPILNRRAIWGWTNDELTNEQIIANGWSGVQNMLRTMVYDHTEKKIKTQPVPETKGLRLDKLVDLRGVAVTATPTQVIASNTNNTLYHEIVARFTLADPTTFAAAATYPSDSDVPEVGVMIRANANLSQYTTVSVRMPGGGPSALQSTEQIETYPPIKIFAGSSAANCSAECDKMRLCESYTFWGKNNTCKLYWKTNPMKSKDDATSGTVREPLLYLGRTQSGTIGSTAPLHGRAPFATATPNGFELHIFVDDSVLEIFKDEGLETLTGRLYIDNGADTTGIAVYARNAGTVTVDVEVYTMDTIWKAPTPNAAKNFTDALYNLLDTLIAV

SEQ ID NO: 9826 - protein, 550 aa, Tritrichomonas foetus
MSGIQITRTHNDGFNPVVLKFDVAKKYLLIPIEEEAPERPFTVINSKYRRTFLIRLAVKKVEYNVPLELEEAGTVVEIYKAPAETAIGWSKLELADSYDTTNTDYYRPNYHFTPPFGWMNDPNGLFYLDGVYHLYYQHNPFASTWGNMSWGHATTKDFVHYEHHPIVLFPDELGHIFSGSIVIDKDNTAGFGANAVIAFYTNAGGDDYQIQTNSIAYSTDGGYTFTKYENNPVVTFDCRDFRDPTVIRYNDQWNLFIATGQCIRIYSSLNLKEWKYESTFGRGIGCHDGVWECPAVLKVDGKWVILLNINPGGPFGGSATQYFVGEFDGHQFICESDPWNTKWMDYGRDAYATVCFHNAPVNTAIAWMSNWDYAKIAPTHQFRSAFSIPRIFKLVECPCSHEHYLYSYPLPSFEEKFVNKVDELTTACLATVDLSKVTAKQVRIILKNQQEEVTLVVNREVEGGRFEFERGLKSGLHTFSDAFCCLTHCPYQISDHYQLKLFVDKHSVEVFDGAGSFTMTTTVFPRSPYTTIVVEPIDGECSSTVTIKSL

SEQ ID NO: 9827 - protein, 466 aa, Klebsiella pneumoniae
MSLPSRLPAILQAVMQGQPQALADSHYPQWHLAPVNGLLNDPNGFCQVAGRYHLFYQWNPLACDHTYKCWGHWSSADLLHWRHEPIALMPDEEYDRNGCYSGSAVEFEGALTLCYTGNVKFPDGGRTAWQCLATENADGTFRKLGPVLPLPEGYTGHVRDPKVWRQDGRWYMVLGAQDVQQRGKVLLFTASDLREWRLVGEIAGHDVNGLANAGYMWECPDLFPLADTHLLICCPQGLAREAQRFLNTYPAVWMAGRFDAERGIFDHGPLHELDSGFEFYAPQTMQADDGRRLLVGWMGVPDGDEMHQPTRAQGWIHQMTCVRELEWQAGTLYQRPLRELVALRGEAQGWCGQTLPLAPMELAFDLSPDSTLGLDFAGALQLTVNRDGLRLSRRGLQTAEMHHRYWRGEARRLRIFIDRSSVEIFINDGEGVMSSRFFPGYPGQLIFSGATPVAFCRWLLRPCMVE

SEQ ID NO: 9828 - protein, 229 aa, Arabidopsis lyrata
KTGKNLVQWPVEEIKSLRLSSKQFDIKVGPGSVVPVDVGSAAQLDIEAEFEINKESLDKILGNASVMAEAEEFSCEKSGGSTVRGALGPFGFSVLATESLSEQTPVYFYVAKGKDSELKTFFCIDTSRSSVANDVVKLIYGSVVPVLKGEKLTMRILVDHSIVEAFGQGGRTCITSRVYPTSAIYGAAKLFLFNNALDATVTASFRVWQMNSAFIHPYTEEAFRALTRT

SEQ ID NO: 9829 - protein, 637 aa, Cynara scolymus
MASSTTTPLLPHHHLQNPQQLAGSPAAHRLSRPTLLSGILVSVLVICALVAVIHNQSQQPYHDGGAKPSSSAATTTFPTASPEAGLKRFPIELKTNAEVEWQRSAYHFQPDKNYISDPDGPMYHMGWYHLFYQYNPESAIWGNITWGHSVSKDMINWFHLPFAMVPDQWYDIEGVMTGSATVLPDGQIIMLYTGNAYDLSQLQCLAYAVNSSDPLLLDWKKYEGNPILFPPPGVGYKDFRDPSTLWLGPDGEYRMVMGSKHNETIGCALIYHTTNFTHFELKEEVLHAVPHTGMWECVDLYPVSTTHTNGLDMVDNGPNVKHVLKQSGDEDRHDWYALGTYDVVNDKWYPDDPENDVGIGLRYDFGKFYASKTFYDQHKKRRVLWGYVGETDPPKYDVYKGWANILNIPRTIVLDTKTNTNLIQWPIAEVENLRSNKYNEFKDVELKPGSLIPLEIGTATQLDITATFEVDQTMLESTLEADVLFNCTTSEGSAGRGVLGPFGLVVLADAERSEQLPVYFYIAKDTDGSSKTYFCADESRSSNDVDIGKWVYGSSVPVLEGEKFNMRLLVDHSIVEGFAQGGRTVVTSRVYPAKAIYGAAKLFLFNNATGISVKASLKIWKMKEAQLDPFPLSGWSS

SEQ ID NO: 9830 - protein, 617 aa, Cynara scolymus
MRTTEPQTDLEHAPNHTPLLDHPEPPPAAVRNRLLIRVSSSITLVSLFFVSAFLLILLYQHDSTYTDDNSAPSESSSQQPSAADRLRWERTAFHFQPAKNFIYDPNGPLFHMGWYHLFYQYNPYAPFWGNMTWGHAVSKDMINWFELPIALAPTEWYDIEGVLSGSTTILPDGRIFALYTGNTNDLEQLQCKAVPVNASDPLLVEWVRYDANPILYAPSGIGLTDYRDPSTVWTGPDGKHRMIIGTKRNTTGLVLVYHTTDFTNYVMLDEPLHSVPNTDMWECVDLYPVSTTNDSALDVAAYGPGIKHVLKESWEGHAMDFYSIGTYDAFNDKWTPDNPELDVGIGLRCDYGRFFASKSLYDPLKKRRVTWGYVAESDSYDQDVSRGWATIYNVARTIVLDRKTGTHLLQWPVEEIESLRSNGHEFKNITLEPGSIIPLDVGSATQLDIVATFEVDQEALKATSDTNDEYGCTTSSGAAQRGSFGPFGIAVLAHGTLSELTPVYFYIAKNTKGGVDTHFCTDKLRSSYDYDGEKVVYGSTVPVLDGEEFTMRILVDHSVVEGFAQGGRTVITSRVYPTKAIYEAAKLFVFNNATTTSVKATLKVWQMSQAFVKAYPF

SEQ ID NO: 9831 - protein, 466 aa, Salmonella typhimurium
MSLPSRLPAILQAVMQGQPRALADSHYPRWHHAPVTGLMNDPNGFIEFAGRYHLFYQWNPLACDHTFKCWAHWSSIDLLHWQHEPIALMPDEEYDRNGCYSGSAVDNNGTLTLCYTGNVKFAEGGRTAWQCLATENADGTFRKIGPVLPLPEGYTGHVRDPKVWRHEDLWYMVLGAQDRQKRGKVLLFSSADLHQWTSMGEIAGHGINGLDDVGYMWECPDLFPLGDQHILICCPQGIAREEECYLNTYPAVWMAGEFDYAAGAFRHGELHELDAGFEFYAPQTMLTSDGRRLLVGWMGVPEGEEMLQPTLNNGWIHQMTCLRELEFINGQLYQRPLRELSALRGEANGWSGNALPLAPMEIDLQTRGGDMLSLDFGGVLTLECDASGLRLARRSLASDEMHYRYWRGNVRSLRVFIDQSSVEIFINGGEGVMSSRYFPACSGQLTFSGITPDAFCYWPLRTCMVE

SEQ ID NO: 9832 - protein, 466 aa, Salmonella typhimurium
MSLPSRLPAILQAVMQGQPRALADSHYPRWHHAPVTGLMNDPNGFIEFAGRYHLFYQWNPLACDHTFKCWAHWSSIDLLHWQHEPIALMPDEEYDRNGCYSGSAVDNNGTLTLCYTGNVKFAEGGRTAWQCLATENADGTFRKIGPVLPLPEGYTGHVRDPKVWRHEDLWYMVLGAQDRQKRGKVLLFSSADLHQWTSMGEIAGHGINGLDDVGYMWECPDLFPLGDQHILICCPQGIAREEECYLNTYPAVWMAGEFDYAAGAFRHGELHELDAGFEFYAPQTMLTSDGRRLLVGWMGVPEGEEMLQPTLNNGWIHQMTCLRELEFINGQLYQRPLRELSALRGEANGWSGNALPLAPMEIDLQTRGGDMLGLDFGGVLTLECDASGLRLARRSLASAEMHYRYWRGNVRSLRVFIDQSSVEIFINGGEGVMSSRYFPACSGQLTFSGITPDAFCYWPLRTCMVE

SEQ ID NO: 9833 - protein, 567 aa, Saccharum robustum
  unsure (1)..(567): unsure at all Xaa locations
HDGGGNAFPWSNAMLQWQRTGFHFQPQKNWMNDPNGPVYYKGWYHLFYQYNPDGAIWGNKIAWGHAVSRDLIHRRHLPLAMVPDQWYDTNGVWTGSATTLPDGRLAMLYTGSTNASVQVQCLAVPADDADPLLTNWTKYEGNPVLYPPPGIGPRDFRDPTTAWFDPSDSTWRIVIGSKDDAEGDHAGIAVVYRTRDFVHFELLPDLLHRVAGTGMWECIDFYPVATRGKVSGNGVDMSDALGKNGAVVGDVVHVMKAGMDDDRHDYCALGRYDAAANAWTPLDAEKDVGTGLRYDWGKFYASKTFYDPAKRRRVLWGWVGETDSERADVSKGWASLQGIPRTVLLDTKTGSNLLQWPVEEVETLRTNSTDXSGITIDYGSAFPLNLRRATQLDIEAEFELDRRAVMSLNEADVGYNCSTSGGAAARGALGPFGLLVLADKHLHEQTAVYFYVAKGLDGSLTTHFCQDESRSSSANDIVKRVVGSAVPVLEDETTLSXRVLVDHSIVESFAQGGRSTATSRVYPTKAIYANAGVFLFNNATAARVTAKKLVVHEMDSSYNHDYMVTDI

SEQ ID NO: 9834 - protein, 750 aa, Bacillus sp. L7
MMKWFAKLILSLSLAVVMAASSAAISFGASNSSLDTHASLVTQLDSAASEAAEGKSAMINESAINSNVTGWKLHGKGRMEVTGEGLRLTSDPQENVMAISETVADDFIYEADVMVTDPQADATLLFRSGEDGWSSYMLQLALGAGVIRLKDASGGEGVLNVERKVEAKPGDIYHLRVKAEGTRLQVYWGQQYEPVIDTEAAAHRTGRLGLHVWNGSALFQNIRVSDMSGNTLEPISSQGLWQPDLKGLKGTGEDGLEAKKVFRNHEADVVLEGDLILNGQGSAGLLFRSNAQGTEGYAAVLQGEGERVRVYLKKADGTILHESRVTYPSQRESRHHLEVKAIGERIQIFVDGYEPAAIDMVDTAFPSGYHGVMASSGIAYFQDVYITPYASYYTEKYRPQYHYSPIRGSASDPNGLVYFEGEYHLFHQDGGQWAHAVSRDLIHWKRLPIALPWNDLGHVWSGSAVADTTNASGLFGSSGGKGLIAYYTSYNPDRHNGNQKIGLAYSTDRGRTWKYSEEHPVVIENPGKTGEDPGGWDFRDPKVVRDEANNRWVMVVSGGDHIRLFTSTNLLNWTLTDQFGYGAYIRGGVWECPDLFQLPVEGSKKRKWVLMISTGANPNTQGSDAEYFIGDLTPEGKFINDNPAGTVLKTDWGKEYYASMSFSDMPDGRRIMLAWMTNWDYPFSFPTTGWKGQLSIPRQVSLKETEEGIRMHQTPIEELAQLRSPVLHITNREVGDFRRKSAQRDHIRRL

SEQ ID NO: 9835 - protein, 537 aa, Aspergillus foetidus
MARLLKAVTVCALAGIAHAFNYDQPYRGQYHFSPQKNWMNDPNGLLYHNGTYHLFFQYNPGGIEWGNISWGHATSEDLTHWEEQPVALLARGYGSDVTEMYFSGSAVADVNNTSGFGKDGKTPLVAMYTSYYPVAQTLPSGQTVQEDQQSQSIAYSLDDGLTWTTYDAANPVIPNPPQPYQAQYQNFRDPFVFWHDESQKWVVVTSIAELHKLAIYTSDNLKDWKLVSEFGPYNAQGGVWECPGLFKLPLDGGSSTKWVITSGLNPGGPPGTVGSGTQYFVGEFDGTTFTPDADTVYPGNSTANWMDWGPDFYAAAGYNGLSIKDHVHIGWMNNWQYGANIPTYPWRSAMAIPRHLALKTINNKTTLVQQPQEAWSSISSKHPLYSRTYSTFSEGSTNASTTGETFRVDLSFSATSKASTFAIALRASANFTEQTLAGYDFAKQQIFLDRTKSGDVSFDNTFASVYHGPLVPDSTSMVRLSIFVDRSSVEVFGGQGETSLTAQIFPSNDAVHARLVSTGGATEDVRVDVHNITSTWN

SEQ ID NO: 9836 - protein, 546 aa, Vibrio cholerae
MLLDTQLELAGGINNVTRILAPQGQVVLALKHPPHAPHLPDDVSLQSVLGEWQLSVQRTAEVSDQQLATIGKAISERQKLETLPYQTALDCPYRPLWHISPPQGLLNDPNGFIYHQGEYHLFYQWHPFVCEHKDKYWVHLKSLDLVHWQWQSVALTPSDWFDSHGVFSGHAVSHQQDLWLFYTGNTRLGVDRQRQTMQCAARMNANGEFEKLGPVIRCLPEGVTEHIRDPKVIYTQGKWHMLLGAQTLAHQGRLAVYHSDDLLHWHFDKLYGDELGNYGYMWECPDWFELQGEAFFVFGPQGIASANPHHTIEHQNRIFRATQNAQGEIALLQGWPLDEGFDFYAPQTAQTTDGRRVLCGWMGLPDETQHPSCDQGWIHQLTALRELEWREGKIYQHPLRELDTLRSEPHTLLLSDTVTELKAKSFDVQVTLPWGCQLRLMQNAQYCVTLTLDAENRLLRLDRSATQIRQGDTIRELKLDSPTVELRILADQSSLEIFINQGEHVMTSRIFTPLDATGISLHGASVDAKLYYMAPASAPFNLEVNV

SEQ ID NO: 9837 - protein, 548 aa, Vibrio cholerae
MLLDTLLELAGGINNVTRILAPQGQVVLALKHPPLVPHLPDDVSLQSVLGEWQLSVQRTAEVSDQQLAAIGKAIAERQKLETLPYQTALDCPYRPLWHISPPQGLLNDPNGFIYHQGEYHLFYQWHPFACEHKDKYWVHLKSLDLVDWQWQSVALTPSDWFDSHGVFSGHAVSHQQDLWLFYTGNTRLGVDRQRQTMQCAARMNANGEFEKLGPVIRCLPEGVTEHIRDPKVIYTQGKWQMLLGAQTLAHQGRLAVYHSDDLLHWHFDKLYGDELGDYGYMWECPDWFELQGEAFFVFGPQGIASANPHHTIEHQNRIFRATQNAQGEIALLQGWPLDEGFDFYAPQTAQTADGRRVLCGWMGLPDETQHPSCDQGWIHQLTALRELEWREGRIYQHPLRELDTLQSEPHTLLLSDNVTELKTKSFALQVTLPWGCELRLMQNTQYRVTLTLDAENQLLRLDRSATQIRQGDTIRELKLDSPTVELRILADQSSLEIFINQGEHVMTSRIFTPRDASGISLHGASVDAKLYYMAPASAPFNLEVNVQP

SEQ ID NO: 9838 - protein, 499 aa, Pasteurella multocida
MPFSLSKVRSFFCHFWTSPMYIFNQGKYKSLHAQQVGELAQIRQHVLRDTQFRPTYHLAPETGLLNDPNGLVFDGEKYHIFYQWFPYAAIHGMKHWKHFMTYDFHHFQVADPLIPDELFESHGCYSGGALLWQDQIVAFYTGNTRNAENQRIPHQNIAIFKKDGTLLKKRCLLNQAPTGYTEHVRDPKPFITEEGKIRFILGAQREDLSGTALIYEMTDLDATPQLIGEFKLPDFDNQQVFMWECPDLLKLQEQDLFLWSPQGKAQKTYCFQNHYHATYALGQYANLHFSAQHIEELDYGFDFYAPQSIQGSEGIYYAWVGLPDLTYPTDEYQWHSMLSLPRQFSIQQGILYQRPIPQVYAQCLPAHKYWVEGKQQIPHLDRSYVAFDAENQPFTLRFFTNQRGQQLILRYQNGILTLDRTYTTQTALMQQFGEQRHCILPQLNHVEIFFDRSVVEIFLNQGEKVMTSRFFIADRENALDSSRPLCVSVAELKPIILTP

SEQ ID NO: 9839 - protein, 622 aa, Bacteroides fragilis
MKTTFMNVSRGVIGALAFSLGISSCQSSQSKMTFEQEGDSLTVIHITNPTQYLLLPVEEKTPEAQVCIASDSVPVDMDVRLSREKVDYFVPFALPKGEKEVAVRIRHLPKEALCWKELKLSDTFDTTNTDQYRPLYHHTPLYGWMNDANGLVYKDGEYHLFYQYNPYGSMWGNMHWGHSVSKDLVHWEHLEPALARDTLGHIFSGSSVVDDANTAGYGAGAIVAFYTSASDKNGQIQCMAYSTDNGRTFTKYEKNPVLTPFDGLKDFRDPKVFWYAPDQKWVMVVSADKEMRFYSSENLKEWTYMSGWGEGYGVQPSQFECPDMVELPVDGNPDHKKWALIVNVNPGCYFGGSATQYFIGDFDGEKFVCDNKPETVKWLDWGKDHYATVCFSNTGDRTIAVPWMSNWQYANIVPTRQFRSANALPRELSLYTQDGDIYMAAAPVEETKSLRKESREIPAFEVGDAYHVDSLLSDNKGAYEIELELAAGSAEIMGLKLFNEKGENVDIYISLPEKKLVMDRTKSGIVDFGKDSAPHAIEAHDRRKQNSINYVDDFALGTWAPVQKAGNYKLDIFVDKCSVEIFLNGGKIAMTNLIFPTTPYNQMSFYSRGGAFKVDRCKIYRL

SEQ ID NO: 9840 - protein, 477 aa, Escherichia coli O157:H7
MTQSRLHAAQNALAKLHERRGNTFYPHFHLAPPAGWMNDPNGLIWFNDRYHAFYQHHPMSEHWGPMHWGHATSDDMIHWQHEPIALAPGDENDKDGCFSGSAVDDNGVLSLIYTGHVWLDGAGNDDAIREVQCLATSRDGIHFEKQGVILTPPEGIMHFRDPKVWREADTWWMVVGAKDPGNTGQILLYRGSSLREWTFDRVLAHADAGESYMWECPDFFSLGDQHYLMFSPQGMNAEGYSYRNRFQSGVIPGMWSPGRLFAQSGHFTELDNGHDFYAPQSFVAKDGRRIVIGWMDMWESPMPSKREGWAGCMTLARELSESNGKLLQRPVHEAESLRQQHQSISPRTISNKYVLQENAQAVEIQLQWALKNSDAEHYGLQLGTGMRLYIDNQSERLVLWRYYPHENLDGYRSIPLPQRDTLALRIFIDTSSVEVFINDGEAVMSSRIYPQPEERELSLYASHGVAVVQHGALWQLG

SEQ ID NO: 9841 - protein, 286 aa, Citrus reticulata
GMWECVDFYPVAINGSVGLDTSATGPGIKHVLKASLDDTKVDHYAIGTYNPENDKWTPDNPEEDVGIGLKWDYGRYYASKSFYDPYKKRRIVWGWINETDTESDDLEKGWASVQTIPRTVLYDNKTGSNVVQWPVEEIESLRQNSTMFEEVVVEPGSVVPLDIGVATQLDISAEFETELLGSGAPEEGYGCSGGAIDRSAMGPFGLLVNAHDSLSELTPIFFRSSNTTKGTNTYFCADETRSSLAPDVFKQVHGSKVPVIQGEKLSMRILVDHSIVESFGQGGRTV

SEQ ID NO: 9842 - protein, 812 aa, Arthrobacter sp. S37
MTTATRKVVPMTELRQTQPTTNLPGLGRRTFLQGAAVSAAVIATGALFRPAAAATGDPVLRLTYDQPNGSTTVLDEVGRSNFTVHVSNNPAERVPGVRGNAFRTDGFSTWATGQFATPLTTQMTIQTWIALESYPSDSEQPYDALTPSSIIYQRTNDAGFDIAINTYGEWWFTAHVGGQWRTVKAPWLFPLYEWVQIAAVVDGDAGQLRLHLDDAAGPKVASVAIPTGSRFTQAAGAPLVVGKASKDVTTGVFLINALNAAYDDTRIYDIARGAAALTGEYTSGIAGASPAHDVALQVTGLRFADDILRPRYHAMPPANWTNEPHGLVRHDCSYHMFYQRTPNGPFKWQMNWGHMTSTDLVHWTNMPDALRPELNDREARLGAVAGSGLSGQGSKGIWSGDVVSVDGTAHAFFTTVNFGGPFDPGITRASSTDPDLLTWTKASTGVIDKNAPAHVADFRDPYLWQEGGTWHMIIGAATDAGGALEHYTTQDIQGQWTRASRPFSTVSFASMDIGSAIWEMPVFEKIGTHAGRDKYVLVVSPIGRSVSKLSEPYTRSVYWTGTWNGSQFTPDYARPKSLDLIHGHLSPTVAHGPDGKLVAIGIVDERSSSKMQLDLGWAHTFSAPREWRLLEDGQTLGQRPIAQLMTLRAGSAQTATNVAVTGEHNLAAAGNQVEILAKVDPASTGARYGLCIGASPDGSEITRIYYDGNDIVIDKTRSSRNFENEEAVLLRGAYDEAVFGKPHTFHVFVDHSVIDVFINDAAAFSNRIYPTSRGADGAAASTGLRLYSEGGQTRFTQTDVWQLQSAWPTPAF

SEQ ID NO: 9843 - protein, 321 aa, Pascopyrum smithii
MLHVLKASMDDERHDYYSLGTYDSAANTWTPIDPELDLGIGLRYDWGKFYASTSFYDPAKKRRVLMGYVGEVDSKRADVVKGWASIQSVPRTVALDEKTRTNLLLWPVEEIETLRLNATELSDITINTGSVFHVPLRQGAQLDIEASFRLDASAVAALNEADVGYNCSSSGGAATRGALGPFGLLVLTAGDRRGEQTAVYFYVSRGLDGGLRTSFCQDEFRSSRAKDVTKRVIGSTVPVLDGEAFSMRVLVDHSIVQGFAMGGGPRMTSRVYPMEAIYEKAGVYLFNNATSAVVTAEKLVVHEMDSSHNQLSNEDDELYVQ

SEQ ID NO: 9844 - protein, 104 aa, Pascopyrum smithii
SRGLDGGLRTSFCQDESRSSRAKDVTKRVIGSTVPVLEGEAFSMRVLVDHSIVQGFAMGGRSTMTSRVYPMEAIYQKAGVYLFNNATSTVVTEEMLVLHEMDSS

SEQ ID NO: 9845 - protein, 487 aa, Bacillus halodurans
MTNRDQELRQKAKETIKRYERLVERDPYRLVYHLMPPVGLLNDPNGFIDWDGTYHLFYQWHPFEAAHGPKFWGHFVSGDLVFWEEKEPALTPSDWFDKNGCYSGSAVADNGKLKLFYTGNVKNENDERESYQCVAESEDGLTFTKKGVILHVPDGYTAHFRDPKVWKRDGIWYLVIGAQTKQIDGHVLLFRSDDLKEWQFAGIVTGSNVRSMGDFGYMWECPDLFHLDGEDVLLVSPQGLEKQGYLYHNVHNTGYFIGRLDYETGELVHGPFKELDRGFEFYAPQTTIDRYGRRILFGWMGVPDQGEEKHPTVKHQWIHAMTLPRELKLVDGKIYQRPVEELKQLRKNEVSRPSVKISEHPQRFEEISGEAFELLLDVEENQAEVFELTIRDNVRVIFNRGLKRLTLERVSFVDGLTESRHCELAELSSLHLYVDTSAVELFVNEGEEVFTARYFADPANRSIQFKTLHGSLTASLKKWALDSIMKK

SEQ ID NO: 9846 - protein, 487 aa, Hordeum vulgare subsp. vulgare
MNQSGMARSDEGSLVPREVPGSYGLPFVSAIRDRLDFYYFQGQDKYFESRVEKYGSTVVRINVPPGPFMARDPRVVAVLDAKSFPVLFDVTKVEKKNLFTGTYMPSTSLTGGFPVCSYLDPSEPTHTKVKQLLFSLLASRKDAFIPAFRSHFSSLLATVESQLLLSGKSNFNTLNDATSFEFIGDGYFGVLPSASDLGTTGPAKAAKWLIFQLHPLVTLGLPMILEEPLLHTVHLPPFLVSGDYKALYKYFFAAATKALDTAEGLGLKRDEACHNLLFATVFNSYGGLKVLLPGILARIADSGEKFHKKLVTEIRAAVAEAGGKVTIEALEKMELTKSAVWEALRLDPAVKFQYGRAKADMNIESHDAVFAVKKGEMLFGYQPCATKDPRVFGPTAREFVGDRFVGKEGSKLLKYVYWSNGRETESPSVHNKQCPGKNLVVLVGRLLVVELFLRYDTFTAKVGLDLLGTKVEFTGVTKATSGVADAV

SEQ ID NO: 9847 - protein, 480 aa, Hordeum vulgare subsp. vulgare
MNQSAIGSLVPRQAPGSYGLPFVSAIRDRLDFYYFQGEAKYFESRVEKHGSTVLRINVPPGPFMARDPRVVAVLDAKSFPVLFDVDKVEKKNLFTGTYMPSTSLTGGFRVCAYLDPSEPTHTKVKQLLFSLLASRKDAVIPAFRSHFSSLLATVESQLVLSGKSNFNTLNDFTSFEFIADTYFGVLPSASDLGTTGPAKAAKWLIFQLHPLVTFGLPMILEEPLLHTVLLPPIFVSGDYKALYKYFYAAATKALDMAESLGLNRDEACHNLLFATVFNSYGGLKVMLPGFLGRIAEAGEKFHQRLAAEVRTAVADAGGKVTIEALEKMELTKSAVWEALRLEPPVKFQYGRAKVDMNIESHDAVFAVQKGEMLFGYQPCATKDPRVFGSTAREFVGDRFVGEGSKLLQYVYWSNGRETESPSVDNKQCPGKNLVVLVGRLLVVELFLRYDTFTADVGVDLLGPKVEFTGVTKATSGPGAV

SEQ ID NO: 9848 - protein, 532 aa, Citrus sinensis
MASTSLSFSLLPTEFQSPRKSSKLYTPRVRSAAIRPRPITASISEKQSVPVPPPIIISPSDEQPTKLPIRKIPGSYGLPYLGPIKDRQDYFYNLGRDEFFKSKIQKYGSTVFRANMPPGPFISSNPKVIVLLDGKSFPVLFDVSKVEKKDLFTGTYMPSTDLTGGYRVLSYLDPSEPNHAKLKQLLFFLLMNRRDKVIPELHSTYTEAFETLERDLAAKGKADFSGANEQAAFNFLARAWFGKNPADTTLGSDAPTLIGKWILFQLAPLLSLGLPKLVEEPLLRTRPLPPALVKKDYQRLYDFFHESSGFVLDEAEKLGVSREEACHNLVFATCFNSFGGMKILFPNMVKWIGRGGVKLHMQLAEEIRSVVRSNGGKVTMAGMEQMPLMKSVVYEVLRMEPPVALQYGKAKRDLIISSHEASFEVKEGEMLFGYQPFATKDPKIFEQAEEFVADRFVGEGEKMLKHVLWSNGPETENPPVGNKQCAGKDFVVLASRLLLVELFLRYDSFDIQVGKSAIGSSVTLTSLKRASF

SEQ ID NO: 9849 - protein, 475 aa, Physcomitrella patens
MAVPSSKLPLKAIPGDYGVPYFGAIKDRLDYFWLQGEEQFYRSRMAKYNSTVFRVNMPPGPPISEHPQVICLLDQKSFPILFDVSKVEKKDVFTGTYMPSVSFTSGYRVCSYLDPSEERHTKLKQWCFEVIAMNGRNFLPEFHKSIEESMVLWETSLAKGEKTSVSDEVKQFAFNFLMRAVCHHDPAAPGEYSLGRNGGPYATAWANPQLAPIAGQTGLPHVVEELVLHTVPLPSALVKKNYDALYNFIKNYATEALDRAEAMGIERNDATANLLFFLCFNAYGGFSIFFPLITILISSCGPELMHDLHDEVTKAVAATDGKVTLQSIENMPLVKSVVYEAFRFKPPVPYQYGKAKFDFTIENHENSFEVKKGEMLYGYQPIVMHDPKVFSDPDQFLPRRFMGPDGEKLIKYIFWSNGYETDEPTTANKQCAGKDLVVTMARAFVAEMFLRYKEYTLTMEGAGNATKVFFSDLKK

SEQ ID NO: 9850 - protein, 489 aa, Physcomitrella patens
RTVVASLGNIETTSTSTVGQESNLPLREIPGSYGIPYLSQLLDRWTFFYREGEPQFWQSRMAKYGSTVIRSNMPPGWFWTDSRCIMLLDQKSYPTVFDYDKVDKYKAFAGTIMPSTEYNGGYEVCAYLDASDKKHEQLKGYCFELLKFSSSKWAREFHTAISETFNQWEGKLAQKTPALINPTLPESLFSFVINALTTARFDDSSIPDAEKPVCGDLQKWAGFQLMPVIRTGAPIYIEEMLHVAPIPASLTKGGYDKMVVFLQKYAAETLSIAEKFGLSQDEAVHNLIFFLILNAHGGFCRFLPVILREVAKNGQLQADLREEVRAAVKASGSDQVTMKAVMNDMPLVASTVFEALRFDPPVPFQYARAKKDFIIESHDARYQIKTGDFLGGVNYMVSRDPKVFTDRPNEFNARRFMGPEGDKLLAHLVWSNGRQTDETTVYTKQCAGKEIVPLTGRLLLAELFMRFDSFNIEGLEMEATFTSLTPRSD

SEQ ID NO: 9851 - protein, 473 aa, Parthenium argentatum
MDPSSKPLREIPGSYGIPFFQPIKDRLEYFYGTGGRDEYFRSRMQKYQSTVFRANMPPGPFVSSNPKVIVLLDAKSFPILFDVSKVEKKDLFTGTYMPSTKLTGAYRVLSYLDPSEPRHAQLKNLLFFMLKNSSNRVIPQFETTYTELFEGLEAELAKNGKAAFNDVGEQAAFRFLGRAYFNSNPEETKLGTSAPTLISSWVLFNLAPTLDLGLPWFLQEPLLHTFRLPAFLIKSTYNKLYDYFQSVATPVMEQAEKLGVPKDEAVHNILFAVCFNTFGGVKILFPNTLKWIGVAGENLHTQLAEEIRGAIKSYGDGNVTLEAIEQMPLTKSVVYESLRIEPPVPPQYGKAKSNFTIESHDATFEVKKGEMLFGYQPFATKDPKVFDRPEEFVPDRFVGDGEALLKYVWWSNGPETESPTVENKQCAGKDFVVLITRLFVIELFRRYDSFEIELGESPLGAAVTLTFLKRASI

SEQ ID NO: 9852 - protein, 537 aa, Cucumis melo
MSSIVIPSLQPHLRFPSSQETPQRSRSRVGFVSIRPIYATDGVSSSSSSSLQVPQRIVSPPEPTKLPLRKVPGDYGPPMFGALKDRHDYFYNQGREEYLKSRMLRYESTVYRTNMPPGPFITSDSRVVVLLDGKSFPVLFDHSKVEKKDLFTGTYMPVTELTGGYRVLSYIDPSEPDHAKLKQLIFFLLKHRRDKIMPEFHSTFSELFETLEKDLAAAGRAEYNASGEQAAFNFLARSLFGADPVDSKLGRDAPKLIAKWVLFQLGPVLSLGLPKVVEELLLRTVRLPPALIKADYRRLYDFFYKSSEAVFEEADRLGISREEACHNLLFTTCFNSFGGMKIFFPNMIKWIGRAGVNLHTRLAREIRTAVKANGGKITMGAMEQMPLMKSVVYEALRIEPPVPVQYGRAKKDLVVESHDAAFEIKEGEVICGYQPFATRDPKIFDRADELVPDRFTGEGEELLKHVIWSNGPETQSPSVQNKQCAGKDFIVFISRLLVVELFLRYDSFDIEASNTPLGAAVTVSAAVTVTSLKKASF

SEQ ID NO: 9853 - protein, 518 aa, Arabidopsis thaliana
MASISTPFPISLHPKTVRSKPLKFRVLTRPIKASGSETPDLTVATRTGSKDLPIRNIPGNYGLPIVGPIKDRWDYFYDQGAEEFFKSRIRKYNSTVYRVNMPPGAFIAENPQVVALLDGKSFPVLFDVDKVEKKDLFTGTYMPSTELTGGYRILSYLDPSEPKHEKLKNLLFFLLKSSRNRIFPEFQATYSELFDSLEKELSLKGKADFGGSSDGTAFNFLARAFYGTNPADTKLKADAPGLITKWVLFNLHPLLSIGLPRVIEEPLIHTFSLPPALVKSDYQRLYEFFLESAGEILVEADKLGISREEATHNLLFATCFNTWGGMKILFPNMVKRIGRAGHQVHNRLAEEIRSVIKSNGGELTMGAIEKMELTKSVVYECLRFEPPVTAQYGRAKKDLVIESHDAAFKVKAGEMLYGYQPLATRDPKIFDRADEFVPERFVGEEGEKLLRHVLWSNGPETETPTVGNKQCAGKDFVVLVARLFVIEIFRRYDSFDIEVGTSPLGSSVNFSSLRKASF

SEQ ID NO: 9854 - protein, 517 aa, Arabidopsis thaliana
MASISTPFPISLHPKTVRSKPLKFRVLTRPIKASGSETPDLTVATRTGSKDLPIRNIPGNYGLPIVGPIKDRWDYFYDQGAEEFFKSRIRKYNSTVYRVNMPPGAFIAENPQVVALLDGKSFPVLFDVDKVEKKDLFTGTYMPSTELTGGYRILSYLDPSEPKHEKLKNLLFFLLKSSRNRIFPEFQATYSELFDSLEKEAFPLRESGFRRFQRRNRLLFLGSSFLRDESRRYKLKADAPGLITKWVLFNLHPLLSIGLPRVIEEPLIHTFSLPPALVKSDYQRLYEFLRIRGEILVEADKLGISREEATHNLLFATSFNTWGGMKILFPNMVKRIGPGGHQVHNRLAEEIRSVIKSNGGELTMGAIEKMELTKSVVYECLRFEPPVTAQYGRAKKDLVIESHDAAFKVKAGEMLYGYQPLATRDPKIFDRADEFVPERFVGEEGEKLLRHVLWSNGPETETPTVGNKQCAGKDFVVLVARLFVIEIFRRYDSFDIEVGTSPLGSSVNFSSLRKASF

SEQ ID NO: 9855 - protein, 534 aa, Glycine max
YPPPPPRVRGRASSASTTLSSPFLRLELPSRTKKRSSSIIPVPSIRASVSEKPPLPAVSVTSPEPSKLPIRKIPGDCGFPVIGPLKDRQDYFYKQGRDEFFKSRIQKYQSTVFRTNMPPGPFLAPNPNVVVLLDAKTFPILFDNSKVDKRDVFTGTFMPSTQLTGGYRVLSYLDPSEPKHSLLKQLMFFLLKSRRAHVISEFHASYKDLFHALEANLAEAGKASFGDANDQAAFNFLSRSLFNSNPADTKLGRDGPKIVQKWVLFQLGPILRLGLPQFLEESTIRSFRLPFSLIQKDYQRLYDFFYQSSGSVLDEAERLGITRDEACHNLLFATCFNSFGGMKLFFPNVLKWIGRAGVKLHARLAEEIRSAVRGAGGEITMAAMENMPLMKSVVYEAFRIDPPVPLQFGRAKRDLIIESHDHAFQVKEGEMLFGYQPFATKDPRIFERAEEFVGDRFVGEEGEKLLKHVLWSNGPETESPTIGNKQCAGKDFVTLVSRLLVVEFFLRYDSFEIQVGTSPLGSSVTITSLKRASF

SEQ ID NO: 9856 - protein, 520 aa, Glycine max
  unsure (1)..(520): unsure at all Xaa locations
MASSASTTLSSPFLRLEFPSSTKQRSSISIRASVSEKPPLPAVSVTSPEPSKLPIRKIPGDCGFPVIGPFKDRQDYFYKQGRDEFFKSRIQKYQSTVFRTNMPPGPFLAPDPNVXVVLLDAKSFPVLFDNSKVEKKDVFTGTFMPSTELTGGYRVLSYLDPSEPKHALLKQLMFFLLKSRRAHVISEFHASYKELFHALEANLAEAGKASFGDANDQAAFNFLSRSLFNSNPADTKLGLDGPKIVQKWVLFQIGPILRLGLPQFLEESTIRTFRLPFSLIKKDYQRLYDFFYESSGLVLDEAERLGITRDEACHNLLFATCFNSFGGMKLFFPNVLKWIGRAGVKLHARLAEEIRSAVRSGGGEISMAAMEKMPLMKSVVYEAFRIDPPVALQFGRAKRDLIIESHDHAFQVKEGEMLFGYQPFATKDPRIFERAEEFVGDRFVGEEGEKLLKHVLWSNGPETESPTLGNKQCAGKDFVTLVSRLFVVEFFLRYDSFEIQVGTSPLGSSVTITSLKRASF

SEQ ID NO: 9857 - protein, 478 aa, Oryza sativa (japonica cultivar-group)
MELGVPLPRRPVPGSYGVPFVSAVRDRLDFYYLQGQDKYFESRAERYGSTVVRINVPPGPFMARDPRVVALLDAKSFPVLFDVAKVEKRDVFTGTFMPSTSLTGGYRVCAYLDPSEPNHAKIKQLLLSLLVSRKDAFVPVFRSNFGALLDTVESQLASGGGKSDFTALNDATSFEFIGEAYFGVRPSASSSLGTGGPTKAALWLLWQLAPLTTLGLPMIIEDPLLHTLPLPPFLISSDYKALYAYFAAAASQALDAAEGLGLSREEACHNLLFATVFNSYGGFKLLLPQILSRVAQAGEKLHERLAAEIRSAVADAGGNVTLAALEKMELTRSVVWEALRLDPPVRFQYGRAKADLEIESHDASFAIKKGEMLFGYQPCATRDPRVFGATAREFVGDRFVGEEGRKLLQYVYWSNGRETENPSVDNKQCPGKNLVVLVGRLLLVELFLRYDTFTAEAGKKVVITGVTKASTSAVNRTA

SEQ ID NO: 9858 - protein, 536 aa, Linum usitatissimum
MASSALNNLVAVNPNTLSPSPKSTPLPNTFSNLRRVSAFRPIKASLFGDSPIKIPGITSQPPPSSDETTLPIRQIPGDYGLPGIGPIQDRLDYFYNQGREEFFKSRLQKYKSTVYRANMPPGPFIASNPRVIVLLDAKSFPVLFDMSKVEKKDLFTGTYMPSTELTGGYRILSYLDPSEPNHTKLKQLLFNLIKNRRDYVIPEFSSSFTDLCEVVEYDLATKGKAAFNDPAEQAAFNFLSRAFFGVKPIDTPLGKDAPSLISKWVLFNLAPILSVGLPKEVEEATLHSVRLPPLLVQNDYHRLYEFFTSAAGSVLDEAEQSGISRDEACHNILFAVCFNSWGGFKILFPSLMKWIGRAGLELHTKLAQEIRSAIQSTGGGKVTMAAMEQMPLMKSVVYETLRIEPPVALQYGKAKKDFILESHEAAYQVKEGEMLFGYQPFATKDPKIFDRPEEFVADRFVGEGVKLMEYVMWSNGPETETPSVANKQCAGKDFVVMAARLFVVELFKRYDSFDIEVGTSSLGASITLTSLKRSTF

SEQ ID NO: 9859 - protein, 534 aa, Lycopersicon esculentum
MASTSLSLPSLKLQFPSHTSSSSRKNSSSYRVSIRPIQASVSEIPPYISSPSQSPSSSSSPPVKQAKLPAQKVPGDYALPLVGPWKDRLDYFYNQGKNEFFKSRIQKHQSTVFRTNMPPGPFISFNPNVVVLLDGKSFPVLFDVSKVEKKDLFTGTFMPSTDLTGGYRVLSYLDPSEPNHAKLKKLMFYLLSSRRNEVIPEFHNSYSELFETLENELSTKGKAGLNAANDQAAVNFLARSLYGINPQDTELGTDGPKLIGKWVLFQLHPLLILGLPKVLEDLVMHTFRLPPALVKKDYQRLYNFFYENSTSVLDEAEKIGISREEACHNLLFATCFNSFGGIKIFFPNMLKWIGRAGAKLHSQLAQEIRSVISSNSGKVTMAAMEKMPLMKSVVYESLRIEPPVASQYGRAKHDMVIESHDASFEIKEGELLYGYQPFATKDPKIFDRSEEFVADRFKGEEGEKLLKHVLWSNGSETENASINNKQCAGKDFVVLVSRLLLVELFLRYDSFEIEVGASPLGAAITLTSLRRASF

SEQ ID NO: 9860 - protein, 510 aa, Lycopersicon esculentum
MALTLSFSLPLPSLHQKIPSKYSTFRPIIVSLSDKSTIEITQPIKLSTRTIPGDYGLPGIGPWKDRLDYFYNQGKNDFFESRIAKYKSTIFRTNMPPGPFITSNPKVIVLLDGKSFPVLFDASKVEKKDLFTGTFVPSTELTGGYRILSYLDPSEPNHEKLKKLMFFLLSSRRDHVIPEFHETYTELFETLDKEMEEKGTVGFNSGSDQAAFNFLARSLFGVNPVETKLGTDGPALIGKWILLQLHPVITLGLPKFLDDVLLHTFRLPPILVKKDYQRLYDFFYTNSANLFIEAEKLGISKDEACHNLLFATCFNSFGGMKIFFPNMLKSIAKAGVEIHTRLANEIRSEVKSAGGKITMSAMEKMPLMKSVVYEALRVDPPVASQYGRAKQDLKIESHDAVFEVKKGEILFGYQPFATKDPKIFDRPGEFVADRFVGEEGEKLLKHVLWSNGPETESPTVGNKQCAGKDFVVMVSRLFVTEFFLRYGTLNVDVGTSALGSSITITSLKKA

SEQ ID NO: 9861 - protein, 478 aa, Nicotiana tabacum
MSSFLVSSNNLPEREIPGDYGFPIISAIKDRYDYFYKQGEDVWFHSKAEKYNSTVVKINMAPGPFTSNDYKLVAFLDANSFVYMFDNSLIDKTDTLGGTFKPGKEYYGGYRPVAFVDTSDPNHAALKNYILTSFAKRHNLFIPLFRNSVSDHLFQNLEKQVSDQGKSDFNALLPNMTFGFIFRLLCDQTNPSDTVLGAQGPEHLRKWLFPQLIPSLSARKLPSFIEDLLFHNFLIPFGLVKSDYNKLVDAFSKNAGSMLDEAEKLGIKREEAVHNILFLVGINMFAGLNAFFPHLIRFVGEAGPTLHARLAKEIRTAIKEEGGAVTLSAINKMSLVESIVYETLRLRPPVPLQYGKAKKDFMVQSHDASYMIKKGQFLVGYQPMASRDPKIFDKPDDFIPDRFMGEGVKMLKHVLWSNGRETENPAPDNKQCAGKDLVHLLGRLMLVEFFLRYDTFTVEITPLFRAPNVAIKTLTKAT

SEQ ID NO: 9862 - protein, 507 aa, Solanum tuberosum
MASFSLPLPSLHQQFPSKYSTFRPIIVSLSEKPTIVVTQPTKLPTRTIPGDYGLPGIGPWKDRLDYFYNQGKDEFFESREVKYKSTIFRTNMPPGPFISSNPKVIVLLDGKSFPVLFDVSKVEKKDLFTGTYMPSTELTGGYRVLSYLDPSEPNHEKLKKLMFFLLSSRRDHVIPKFHETYTEFFETLDKEMAEKGTAGLNSGNDQAAFNFLARSLFGVNPVETKLGTDGPTLIGKWVLLQLHPVLTLGLPKFLDDLILHTFRLPPFLVKKDYQRLYDFFYTNSASLFAEAEKLGISKEEACHNLLFATCFNSFGGMKIFFPNMLKSIAKAGVEVHTRLANEIRSEVKSAGGKITMSAMEKMPLMKSVVYEALRVDPPVASQYGRAKQDLKIESHDAVFEVKKGEMLFGYQPFATKDPKIFDRPEEFVADRFVGEEGEKLLKYVLWSNGPETESPTVGNKQCAGRDFVVMVSRLFVTEFFLRYDTFNVDVDKSALGASITITSLKKA

SEQ ID NO: 9863 - protein, 530 aa, Solanum tuberosum
MASTSLSLPSLKLQFPSHKSSSSRKNSSSHRVSIRPIQASVSERPPYISSPSPSPSPPVKQAKLPTRKVPGDYGLPLVGPWKDRLDYFYNQGKNEFFKSRIQKHQSTVFRTNMPPGPFISFNPNVVVLLDGKSFPILFDVSKVEKKDLFTGTFMPSTDLTGGYRVLSYLDPSEPNHAKLKKLMFYLLSSRRNEVIPEFHNSYSELFETLENELSTKGKARLNAANDQAAFNFLARSLYGINPQDTKLGTDGPKLIGKWVLFQLHPLLILGLPKVLEDLVMHTFRLPPALVKKDYQRLYNFFYENSTSVLDEAEKIGISREEACHNLLFATCFNSFGGIKIFFPNMLKWIGRAGAKLHSQLAQEIRSVISSNSGKVTMAAMEKMPLMKSVVYESLRIEPPVASQYGRAKHDMVIESHDASFEIKEGELLYGFQPFATKDPKIFDRSEEFVADRFIGEEGEKLLKHVLWSNGSETENPSINNKQCAGKDFVVLVSRLLLVELFLRYDSFEIEVGASPLGAAITLTSLRRASF

SEQ ID NO: 9864 - protein, 490 aa, Solanum tuberosum
MALTLSFSLPLPSLHQQFPSKYSTFRPIIVSLSEKPTIVVTQPTKLPTRTIPGDYGLPGIGPWKDRLDYFYNQGKDEFFESRVVKYKSTIFRTNMPPGPFISSNPKVIVLLDGKSFPVLFDVSKVEKKDLFTGTYMPSTELTGGYRVLSYLDPSEPNHEKLKKLMFFLLSSRRDHVIPKFHETYTEFFETLDKEMAEKGTAGLNSGNDQAAFNFLARSLFGVNPVETKLGTDGPTLIGKWVLLQLHPVLTLGLPKFLDDLILHTFRLPPFLVKKDYQRLYDFFYTNSASLFAEAEKLGISKEEACHNLLFATCFNSFGGMKIFFPNMLKSIAKAGVEVHTRLANEIRSEVKSAGGKITMSAMEKMPLMKSVVYEALRVDPPVASQYGRAKQDLKIESHDAVFEVKKGEMLFGYQPFATKDPKIFDRPEEFVADRFVGEGEKLLKYVLWSNGPETESPTVGNKQCAGKDFVVMVSRLFVTEFFLRYDTFNV

SEQ ID NO: 9865 - protein, 487 aa, Hordeum vulgare
  unsure (1)..(487): unsure at all Xaa locations
MLPSFSPAVTAAAMAPPPPKPIPGGYGAPVLGPLRDRLDYFWFQGPEEFFRRRAAQHRSTVFRANIPPTFPFFVGINPRVIAIVDTAAFTALFDPELVDKRDCLIGPYNPSDSFTGGTRVGVYLDTEEPEHERTKAFAMDLLRRSSRVWAPEFLEGVDGMLAAIESDLAAGKEGGASFLVPLQRCIFRFLCRSVASADPAAEGLVDRYGLFILDVWLGLQLLPTQKVGAIXQPLEELLLHSFPFPSILAKPGYDLLYRFVAKHGAESVAVGVTNHGMSEKDAINNILFLLGFNAFGGFSVFLPFLILQIGKDAALRARLRDEVRAALDQHDGEVGFASVKGMPLVRSTVYEVLRMNPPVPLQFGRARRDFVLRSHGGEGFSVAGGEMLCGYQPLAMRDPEVFERPEEFVADRFVGAGGEALLRYVYWSNGPETGEPALGNKQCAAKDVVIATACMLVAELFRRYDDFECTGTAFTSLKKRPQPQPSS

SEQ ID NO: 9866 - protein, 478 aa, Oryza sativa
MELGVPLPRRPVPGSYGVPFVSAVRDRLDFYYLQGQDKYFESRAERYGSTVVRINVPPGPFMARDPRVVALLDAKSFPVLFDVAKVEKRDVFTGTFMPSTSLTGGYRVCAYLDPSEPNHAKIKQLLLSLLVSRKDAFVPVFRSNFGALLDTVQSQLASGGGKSDFTALNDATSFEFIGKAYFGVRPSASSSLGTGGLDQGRLWLLWQLAPLTTLGLPMIIEDPLLHTLPLPPFLISSDYKALYAYFAAAASQALDAAEGLGLSREEACHNLLFATVFNSYGGFKLLLPQILSRVAQAGEKLHERLAAEIRSAVADAGGNVTLAALEKMELTRSVVWEALRLDPPVRFQYGRAKADLEIESHDASFAIKKGEMLFGYQPCATRDPRVFGATAREFVGDRFVGEEGRKLLQYVYWSNGRETENPSVDNKQCPGKNLVVLVGRLLLVELFLRYDTFTAEAGKKVVITGVTKASTSAVNRTA

SEQ ID NO: 9867 - protein, 481 aa, Oryza sativa
  unsure (1)..(481): unsure at all Xaa locations
MELGVPLPRRPVPGSYGVPFVSAVRDRLDFYYLQGQDKYFESRAERYGSTVVRINVPPGPFMXARDPRVVALLDAKSFPVLFDVAKVEKRDVFTGTFMPSTSLTGGYRVCAYLDPSEPNHAKIKQLLLSLLVSRKDAFVPVFRSNFGALLDTVQSQLASGGGKSDFTALNDATSFEFIGKAYFGVRPSASSSLGTGGLDQGRLWLLWQLAPLTTLGLPMIIEDPLLHTLPLPPFLISSDYKALYAYFAAAASQALDAAEGLGLSREEACHNLLFATVFNSYGGFKLLLPQILSRVAQAGEKLHERLAAEIRSAVADAGGNVTLAALEKMELTRSVVWEALRLDPPVRFQYGRAKADLEIESHDXASFAIKKGEMLFGXYQPCATRDPRVFGATAREFVGDRFVGEEGRKLLQYVYWSNGRETENPSVDNKQCPGKNLVVLVGRLLLVELFLRYDTFTAEAGKKVVITGVTKASTSAVNRTA

SEQ ID NO: 9868 - protein, 511 aa, Oryza sativa
  unsure (1)..(511): unsure at all Xaa locations
XGLQEFGTRVRRIDTICTPAPARPASASASATDRQEVVSPKRRLPLRKVPGDYGPPVVGAIRDRYEYFYGRGRDGFFAARVRAHRSTVVRLNMPPGPFVARDPRVVALLDAASFPVLFDTSLVDKTDLFTGTFMPSTDLTGGYRVLSYLDPSEPNHAPLKTLLFYLLSHRRQQVXFPKFREVYGDLFGLMENDLARVGKADFGVHNDAAAFGFLCQGLLGRDPAKSALGRDGPKLITKWVLFQLSPLLSLGLPTLVEDTLLHSLRLPPALVKKDYDRLADFFRDAAKAVVDEGERLGIAREEAVHNILFALCFNSFGGMKILFPTLVKWLGRAGARVHGRLATEVRGAVRDNGGEVTMKALAEMPLVKSAVYEALRIEPPVAMQYGRAKRDMVVESHDYGYEVREGEMLFGYQPMATKDPRVFARPEEYVPDRFLGEDGARLLRHVVWSNGPETAAPTLHDKQCAGKDFVVLVARLLLVELFLRYDSFDVEVGTSTLGSSVTVTSLKKATF

SEQ ID NO: 9869 - protein, 534 aa, Oryza sativa
  unsure (1)..(534): unsure at all Xaa locations
XAVAVTIRHLHASTXVRIRSQYPXSRPWRRREPTPATVTTAPSEGRASSRRRXLLIREIPGGYGVPFLSPLRDRLDYYYFQGADEFFRSRVARHGGATVLRVNMPPGPFLAGDPRVVALLDARSFRVLLDDSMVDKADTLDGTFMPSLALFGGHRPLAFLDAADPRHAKIKRVVMSLAAARMHHVAPAFRAAFAAMFDEVDAGLVAGGPVEFNKLNMRYMLDFTCAALFGGAPPSKAMGDAAVTKAVKWLIFQLHPLASIVKPWPLEDLLLHTFRLPPFLVRREYGEITAYFAAAAAAILDDAENPGIPRDELLHNLVFVAVFNAYGGFKIFLPHIVKWLARAGPELHAKLASEVRAAAPAGGGEITISAVEKEMPLVKSVVWEALRMNPPVEFQYGRARRDMVVESHDAAYEVRKGELLFGYQPLATRDEKVFDRAGEFVPDRFVSGAGSAARPLLEHVVWSNGPETGTPSEGNKQCPGKDMVVAVGRLMVAGLFRRYDTFAADVEELPLEPVVTFTSLTRAADGDGAARRGV

SEQ ID NO: 9870 - protein, 488 aa, Triticum aestivum
  unsure (1)..(488): unsure at all Xaa locations
TNRSGMAGGDEGSLVPREVPGSYGMPFVSAIRDRLDFYYFQGQDKYFESRVDKYGSTVVRINVPPGPFMARDPRVVAVLDAKSFPVLFDVDKVEKKNLFTGTYMPSTSLTGGFRVCSYLDPSEPTHTKVKQLLFSLLASRKDAFIPAFRSHFSSLLATVESQLVLSKKSNFNTLNDATSFECSGDAYFGVLPSASDLGTTGPAKAAKWLIFQLHPLVTLGLPMILEEPLLHTVHLPPILVSGDYKALYKYFYAAATKALDTAEGLGLKRDEACHNLLFATVFNSYGGLKVLLPGILARIAGAGEKFHQKLVAEIRAAVADAGGKVTVEALEKMELTKSAVWEALRLDPPVKFQYGRAKADMNIESHDAVFAVKKGEMLFGYQPCATRDPRVFGPTAREFVGDRFVGEEGRKLLQYVYWSNGRETESPSVXSSWQCPGKNLVVLVGRLLGGELFLRCHPFTADVGVDLLGTKVEFTGVTKATSGPESAV

SEQ ID NO: 9871 - protein, 488 aa, Triticum aestivum
  unsure (1)..(488): unsure at all Xaa locations
TNRSGMAGGDEGSLVPREVPGSYGMPFVSAIRDRLDFYYFQGQDKYFESRVEKYGSTVVRINVPPGPFMARDPRVVAVLDAKSFPVLFDVDXVAXKVEKKNLFTGTYMPSTSLTGGFRVCSYLDPSEPTHTKXLCSRLAPRSPPASPPSRPPFSSPSPPVAPPSGRSAFSACNSLFDAPSVESIGDAYFGVLPSASDLGTTGPTKAAKWLIFQLHPLVTLGLPMILEEPLLHTVHLPPILVSGDYKALYKYFYAAATKALDTAEGLGLKRDEACHNLLFATVFNSYGGLKVLLPGILARIAGAGEKFHQKLVAEIRAAVADAGGKVTIEALEKMELTKSAVWEALRLDPPVKFQYGRAKADMNIESHDAVFAVKKGEMLFGYQPCATRDPRVFGSTAREFVGDRFVGEEGRKLLQYVYWSNGRETESPSVDNKQCPGKNLVVLVGRLLVVELFLRYDTFTADVGVDLLGTKVEFTGVTKATSGPESAV

SEQ ID NO: 9872 - protein, 465 aa, Triticum aestivum
MNQSAVGSLVPRQAPGSYGLPFVSAIRDRLDFYYFQGEAKYFESRVEKHGSTVLRINVPPGPFMARDPRVVAVLDAKSFPVLFDVDKVEKKNLFTGTYMPSTSLTGGFRVCSYLDPSEPTHTKVKQLLFSLLASRKDAVIPAFRSHFSSLLATVESQLVLAGKSNFNTLNDFTSFEFIADAYFGVLPSASDLGTTGPTKAAKWLIFQLHPLVTFGLPLILEEPLLHTVLLPPIFVSGDYKALYKYLYAAATKALDMAESLGLNRDEACHNLLFATVFNSYGGLKVMLPGILGRIAEAGEKFHQRLAAEVRTAVADAGGKVTIEALEKMELTKSAVWEALRLEPPVKFQYGRAKADMNIESHDAVFAVNKGEMLFGYQPCATKDPRVFGSTAREFVGDRFVGERSKLLQYAYWSNGRETESPSVDNKQCPGKNLVVLVGRLLVVELFLPVRHLHRRRRGRPAGHQG

SEQ ID NO: 9873 - protein, 143 aa, Triticum aestivum
  unsure (1)..(143): unsure at all Xaa locations
XPFLVKGDYRALYKYFSTVAKQALDTAEGLGLSREEACHNLLFATTFNSYGGLKVLFPGLLANVASGGEKLHERLVAEIRGAVADAGGKVTLAAVERMELAKSVVWESLRLDPPVKFQYGHAKKDLLVESHDAVFQVRKGEMX

SEQ ID NO: 9874 - protein, 346 aa, Triticum aestivum
  unsure (1)..(346): unsure at all Xaa locations
TSACPPCHDVQGSQQLRQQQCGCQAIAVGAPRXREVPGGYGVPFLSPLRDRLDYYYFQGAEEYFRSRIARNGGATVLRVNMPPGPFITTDFRVVAFLDARSFSVLLDDAKVDKTDTLDGTFMPSLALFGGYRPLAFLDAADPRHXRAKRVMISLAAARMHHVAPVFRXRFGAVFDAADAGLGDGPXFQFNKLNEHHMFDFTCSALFXRHAAEQGHGRPAPVTKAIKVAWAXQLHPLASKIIKPWLLEDLLLHTFRLPPLLVRRDYADLTAYFAEAAAGFLNDAEQSGISRDELLHNLVFTAIFNAYGGFKIFLPHVIKWLARAGPALHARLASEVRAAVPNGSDIX

SEQ ID NO: 9875 - protein, 519 aa, Nicotiana attenuata
MAVATATATLSSSSSLPFHSLHQQFPSKYFTVRPITVSLSEKIPAVTQSSEFTKLPIRTIPGDYGLPLIGPWKDRQDYFYNQGKEEFFRSRIQKYKSTVFKTNMPPGNFISSNPNVVVLLDGKSFPTLFDVSKVEKKDLFTGTFMPSTELTGGYRVLSYLDPSEPTHEKLKKLLFFLLSSRRDYIIPQFHESYTELFKTLEKEMEKNGKADLNSANDQAAFNFLARSLYGANPVETKLGTDGPTLIGKWVLFQLHPLLTLGLPKVLDDFLLHNFRLPPALVKKDYQRLYDFFYESSTAVLNEAGNFGISRDEACHNLLFATCFNSFGGMKIFFPNMLKWIARAGVELHIRLANEIRSAVKSAGGKITMSAMEKMPVMKSVVYEALRIDPPVASQYGRAKRDLMIESHDGVFEVKKGEMLFGYQPFATRDPKIFDRPDEFVPDRFVGEEGEKLLKHVLWSNGPETESPTVENKQCAGKDFVVLVSRLLVTEFFLRYDTLDIDVGTSPLGAKITITSLKRA

SEQ ID NO: 9876 - protein, 592 aa, Arabidopsis thaliana
MEDPDIKRCKLSCVATVDDVIEQVMTYITDPKDRDSASLVCRRWFKIDSETREHVTMALCYTATPDRLSRRFPNLRSLKLKGKPRAAMFNLIPENWGGYVTPWVTEISNNLRQLKSVHFRRMIVSDLDLDRLAKARADDLETLKLDKCSGFTTDGLLSIVTHCRKIKTLLMEESSFSEKDGKWLHELAQHNTSLEVLNFYMTEFAKISPKDLETIARNCRSLVSVKVGDFEILELVGFFKAAANLEEFCGGSLNEDIGMPEKYMNLVFPRKLCRLGLSYMGPNEMPILFPFAAQIRKLDLLYALLETEDHCTLIQKCPNLEVLETRNVIGDRGLEVLAQYCKQLKRLRIERGADEQGMEDEEGLVSQRGLIALAQGCQELEYMAVYVSDITNESLESIGTYLKNLCDFRLVLLDREERITDLPLDNGVRSLLIGCKKLRRFAFYLRQGGLTDLGLSYIGQYSPNVRWMLLGYVGESDEGLMEFSRGCPNLQKLEMRGCCFSERAIAAAVTKLPSLRYLWVQGYRASMTGQDLMQMARPYWNIELIPSRRVPEVNQQGEIREMEHPAHILAYYSLAGQRTDCPTTVRVLKEPI

SEQ ID NO: 9877 - protein, 604 aa, Glycine max
  unsure (1)..(604): unsure at all Xaa locations
HLFFSLSVSDPIXRRNXNVRKTRVVDVVLDCVIPYIDDPKDRDAVSQVCRRWYELDSLTRKHVTIALCYTTTPARLXARRFPHLESLKLKGKPRAAMFNLIPEDWGGHVTPWVKEISQYFDCLKSLHFRRMIVKDSDLQNLARDRGHVLHALKLDKCSGFTTDGLFHIGRFCKSLRVLFLEESSILEKDGEWLHELALNNTVLETLNFYLTDIAVVKIEDLELLAKNCPNLVSVKLTDCEILDLVNFFKHASALEEFCGGTYNEXXPERYSAISLPAKLCRLGLTYIGKNELPIVFMFAAVLKKLDLLYAMLDTEDHCMLIQRCPNLEVLETRNVIGDRGLEVLGRCCKRLKRLRIERGDDDQGMEDEEGTVSHRGLIALSQGCSELEYMAVYVSDITNASLEHIGTHLKNLCDFRLVLLDHEEKITDLPLDNGVRALLRGCDKLRRFALYLRRGGLTDVGLGYIGQYSPNVRWMLLGYVGESDAGLLEFAKGCPSLQKLEMRGCLFFSERALAVAATQLTSLRYLWVQGYGVSPSGRDLLVMARPFWNIELIPSRKVATNTNPDETVVVEHPAHILAYYSLAGQRSDFPDTVVPLDTATCVDT

SEQ ID NO: 9878 - protein, 638 aa, Glycine max
  unsure (1)..(638): unsure at all Xaa locations
THRFWRLYLPFPHSHTHHHHNPFPFRHLNQNLFHLYLFLHSPLQYYDGGSERAEDTCXVDLVLDCVIPYIDDPKDRDXAVSQVCRRWYELDSLTRKHVTIALCYTTTPARLRRRFPHLESLKLKGKPRAAMFNLIPEDWGGHVTPWVKEISQYFDCLKSLHFRRMIVKDSDLRNLARDRGHVLHSLKLDKCSGFTTDGLFHIGRFCKSLRVLFLEESSIVEKDGEWLHELALNNTVLETLNFYLTDIAVVKIQDLELLAKNCPNLVSVKRTDSFLLDLVNFFKHASALEEFCGGTYNEXXPEKYSAISLPAKLCRLGLTYIGKNELPIVFMFAAVLKKLDLLYAMLDTEDHCMLIQKCPNLEVLETRNVIGDRGLEVLGRCCKRLKRLRIERGDDDQGMEDEEGTVSHRGLIALSQGCSELEYMAVYVSDITNASLEHIGTHLKNLCDFRLVLLDHEEKITDLPLDNGVRALLRGCNKLRRFALYLRRGGLTDVGLGYIGQYSPNVRWMLLGYVGESDAGLLEFSKGCPSLQKLEMRGCSFFSERALAVAATQLTSLRYLWVQGYGVSPSGRDLLAMARPFWNIELIPSRKVAMNTNSDETVVVEHPAHILAYYSLAGQRSDFPDTVVPLDTATCVDT

SEQ ID NO: 9879 - protein, 427 aa, Glycine max
  unsure (1)..(427): unsure at all Xaa locations
NSSLIAFRIFLSCYPATGLAARLFTRVSQFVHVFVFFVFWITRILDLLNAPFLAVIEDRDARRMTARRLSDVVLDCVMPYIHDSKDRDAVSQVCRRWYELDSLTRKHVTIALCYTTTPDRLRRRFPHLESLKLKGKPRAAMFNLIPEDWGGFVTPWVRVISQYFDCLKSLHFRRMIVRDSDLQVLARSRGHVLQALKLDKCSGFSTDGLYYIGRYCRNLRVLFLEESSLVENDGDWLHELALNNTVLETLNFYLTDIANVRIQDLELIARNCPNLNSVKITDCEVLDLVNFFRYASALEEFCGGSYNEXXSEKYSAISLPAKLSRLGLTYITKNEMPMVFPYAALLKKLDLLYAMLDTEDHCTLIQRCPNLEVLESRNVIGDRGLEVLARCCRRLKRIRIERGDDDQGMEDEEGVVSQRGLIALSHX

SEQ ID NO: 9880 - protein, 242 aa, Glycine max
  unsure (1)..(242): unsure at all Xaa locations
MEDEEGVVSQRGLIALSHGCPELEYLAVYVSDITNASLEHIGTHLKNLCDFRLVLLDREEKITDLPLDNGVRALLRGCDKLRRFALYLRPGGLTDVGLGYIGXQYSPXNVRWMLLGYVGETDAGLLEFSKGCPSLQKLEMRGCSFFSEYALAIAATQLNSLRYLWVQGYGASPSGRDLLAMARPYWNIELIPSRRVVVSNQQEEPVVVEHPAHILAYYSLAGPRTDFPDTVIPLDPATYVDT

SEQ ID NO: 9881 - protein, 589 aa, Oryza sativa (japonica cultivar-group)
MGGEAGERRLGRAMSFGIPDVALGLVMGFVEDPWDRDAISLVCRHWCRVDALSRKHVTVAMAYSTTPDRLFRRFPCLESLKLKAKPRAAMFNLIPEDWGGSASPWIRQLSASFHFLKALHLRRMIVSDDDLDVLVRAKAHMLSSFKLDRCSGFSTSSLALVARTCKKLETLFLEDSIIAEKENDEWIRELATNNSVLETLNFFLTDLRASPAYLTLLVRNCRRLKVLKISECFMLDLVDLFRTAEILQDFAGGSFDDQGQVEESRNYENYYFPPSLLRLSLLYMGTKEMQVLFPYGAALKKLDLQFTFLSTEDHCQLVQRCPNLEILEVRDVIGDRGLEVVAQTCKKLQRLRVERGDDDQGGLEDEHGMVTQVGLMAVAQGCPHLEYWAVHVTDITNAALEAIGTYSSSLNDFRLVLLDREANITESPLDNGVRALLRGCTKLRRFAFYVRPGALSDVGLGYIGEFSKTIRYMLLGNVGESDQGLLQLSTGCPSLQKLELRGCFFSERALAVAVLQLKSLRYLWVQGYKASPNGTDLMAMVRPFWNIEIIAPNQDEVCPDGQAQILAYYSLAGMRSDYPHSVIPLYPSV

SEQ ID NO: 9882 - protein, 154 aa, Lycopersicon esculentum
MGCPKLQSVLYFCRQMTNDALVSIARNRSNMIRFCLCIIEPQTPDYLILEPLDTGFGAIVQHCKEVQRLSLSGLLTDRVFEYIGVHAKKLEMLSLAFAGDSDIGLLYVLSGFESLRKLETRDCPFGDEALLANAAKLETMRSLWMSNCSVSFEA

SEQ ID NO: 9883 - protein, 589 aa, Oryza sativa
  unsure (1)..(589): unsure at all Xaa locations
MGGEAGERRLGRAMSFGIPDVALGLVMGFVXEDPWDRDAISLVCRHWCRVDALSRKHVTVAMAYSTTPDRLFRRFPCLESLKLKAKPRAAMFNLIPEDWGGSASPWIRQLSASFHFLKALHLRRMIVSDDDLDVLVRAKAHMLSSFKLDRCSGFSTSSLALVARTCKKLETLFLEDSIIAEKDDEWIRELATNNSVLETLNFFLTDLRASPAYLTLLVRNCRRLKVLKISECFMLDLVDLFRTAEILQDFAGGSFDDQGQVEESRNYENYYFPPSLLRLSLLYMGTKEMQVLFPYGAALKKLDLQFTFLSTEDHCQLVQRCPNLEILEVRDVIGDRGLEVVAQTCKKLQRLRVERGDDDQGGLEDEHGMVTQVGLMAVAQGCPHLEYWAVHVTDITNAALEAIGTYSSSLNDFRLVLLDREANITESPLDNGVRALLRGCTKLRRFAFYVRPGALSDVGLGYIGEFSKTIRYMLLGNVGESDQGLLQLSTGCPSLQKLELRGCFFSERALAVAVLQLKSLRYLWVQGYKASPNGTDLMAMVRPFWNIEIIAPNQDEVCPDGQAQILAYYSLAGMRSDYPHSVIPLYPSV

SEQ ID NO: 9884 - protein, 618 aa, Oryza sativa
MTRNHCEKTLTTDNVRDFSHRITNSQEMEGNPDRDRDGSAAAAAMGGEAGERRLGRAMSFGIPDVALGLVMGFVEDPWDRDAISLVCRHWCRVDALSRKHVTVAMAYSTTPDRLFRRFPCLESLKLKAKPRAAMFNLIPEDWGGSASPWIRQLSASFHFLKALHLRRMIVSDDDLDVLVRAKAHMLSSFKLDRCSGFSTSSLALVARTCKKLETLFLEDSIIAEKDDEWIRELATNNSVLETLNFFLTDLRASPAYLTLLVRNCRRLKVLKITEILQDFAGGSFDDQGQVEESRNYENYYFPPSLLRLSLLYMGTKEMQVLFPYGAALKKLDLQFTFLSTEDHCQLVQRCPNLEILEVRDVIGDRGLEVVAQTCKKLQRLRVERGDDDQGGLEDEHGMVTQVGLMAVAQGCPHLEYWAVHVTDITNAALEAIGTYSSSLNDFRLVLLDREANITESPLDNGVRALLRGCTKLRRFAFYVRPGALSDVGLGYIGEFSKTIRYMLLGNVGESDQGLLQLSTGCPSLQKLELRGCFFSERALAVAVLQLKSLRYLWVQGYKASPNGTDLMAMVRPFWNIEIIAPNQDEVCPDGQAQILAYYSLAGMRSDYPHSVIPLYPSV

SEQ ID NO: 9885 - protein, 664 aa, Triticum aestivum
  unsure (1)..(664): unsure at all Xaa locations
PRVRPRVRPRVRPRVRSLPPSHDSLLSSPPPHHHRRESQREGGENQSPCPHPSPDQIPGGPARSLRRGPARPMGGEAPEPRRLSRALSLDGSGVPEEALHLVLGYVDDPRDREAASLACRRWHHIDALTRKHVTVPFCYAVSPARLLARFPRLESLGVKGKPRAAMYGLIPDDWGAYARPWVAELAAPLECLKALHLRRMVVTDDDLAALVRARGHMLQELKLDKCSGFSTDALRLVARSCRSLRTLFLEECTITDNGTVWLHDLAANNPVLVTLNFYLTYLRVEPADLELLAKNCKSLISLKISDCDLSDLIGFFQIATSLQEFAGAEISEQKYGNVKLPSKLCSFGLTFMGTNEMHIIFPFSAVLKKLDLLYSFLTTEDHCQLIAKCPNLLVLAVRNVIGDRGLGVVVXTSKKLLTLIVERGEDDPGMQEEEGGVSQVGLTAIAVGCRELENIAAYVSDITNGALESIGTFCKNLHDFRLVLLDRQETITDLPLDNGARALLRGCTKLRRFALYLRPGGLSDVGLGYIGQHSGTIQYMLLGNVGQTDGGLISFAAGCRNLRKLELRSCCFSERALALAIRQMPSLRYVWVQGYRASQTGRDLMLMARPFWNIEFTPPSTETAGRLMEDGEPCVDRQAQVLAYYSLSGKRSDYPQSVVPLYPA

SEQ ID NO: 9886 - protein, 454 aa, Triticum aestivum
  unsure (1)..(454): unsure at all Xaa locations
XMLQELKLDKCSGFSTDALRLVARSCRSLRTLFLEECVITDEGGEWLHELAVNNSVLVTLNFYMTELKVVPADLELLAKNCKSLLSLKISECDLSDLIGFFEAANALQDFAGGSFNEVGELTKYEKVKFPPRVCFLGLTFMGKNEMPVIFPFSASLKKLDLQYTFLTTEDHCQLISKCPNLFVLEVRNVIGDRGLEVVGDTCKKLRRLRIERGDDDPGLQEEQGGVSQLGLTAVAVGCRDLEYIAAYVSDITNGALESIGTFCKNLYDFRLVLLDRQKQVTDLPLDNGVRALLRSCTKLRRFALYLRPGGLSDIGLDYIGQYSGNIQYMLLGNVGESDHGLIRFAIGCTNLRKLELRSCCFSEQALSLAVLHMPSLRYIWVQGYKASPAGLELLLMARRFWNIEFTPPSPEGLFRMTLEGEPCVDKQAQVLAYYSLAGQRQDCPDWVTPLHPAA

SEQ ID NO: 9887 - protein, 474 aa, Triticum aestivum
  unsure (1)..(474): unsure at all Xaa locations
XAXPPRRDGGPHPDPAARCPARPPMPQGRKLDPWSPSAPDALPSIACACTSLKTLFLEECRITDNGTEWLHDLAANNPVLVTLNFYLTYLRVEPADLELLAKNCKSLISLKISDCDVSDLIGFFQIATSLQEFAGAEXSREQKYGNVKLPSKLCSFGLTFMGTNEMHIIFPFSAVLKKLDLQYSFLTTEDHCQLIAKCXPNLLVLALRNVIADYSRGVVRXTWSNCKSVTGVRGDAESGMREEEGALGQVGLSAIAVGSSVVGDLAAYVSDITNGALESIGTFCKNLHDFRLVLLDKQETITDLPLDNGARALLRGCTKLRRFALYLRPGGLSDVGLGYIGQHSGTIQYMLLGNVGQTDGGLISFAAGCRNLRKLELRSCCFSERALALAIRQMPSLRYVWVQGYRASQTGRDLMLMARPFWNIEFTPPSTETAGRLMEDGEPCVDRQAQVLAYYSLSGKRSDYPQSVVPLYPA

SEQ ID NO: 9888 - protein, 165 aa, Triticum aestivum
  unsure (1)..(165): unsure at all Xaa locations
FFLTDLRASPAYLFLLVRNCRRLKTLKISDCFMSDLVDLFRTAETLQDFAGGSFDDQDQGGNYANYYFPPSVQRLSLLYMGTNEMQILFPYGATLKKLDLQFTFLTTEDHCQLVQRCPNLEVLEVRDVIGDRGLEVVARTCKKLQRLRVERGDDDQGGLEDXQGX

SEQ ID NO: 9889 - protein, 189 aa, Triticum aestivum
  unsure (1)..(189): unsure at all Xaa locations
ARDFPIPIPYPLSFSHSTPRRTRPPALPQPPSSQPHPPPHTPVEIRGGTDRGADRGSAPXXMGGDXXRHLGRTMSFXXIPDVALGLVMGCVEDPWDRDAISLVCRHWCKVDALSRKHVTVAMAYSTTPDRLFRRFPCLEALKLKAKPRASMFNLIPQDWGGSASPWIRELSASFHFLKGLLLRRMIVSD

SEQ ID NO: 9890 - protein, 630 aa, Oryza sativa (japonica cultivar-group)
MPPYETARAEPASNNKQRPISGETAAGSSRSGPDPMGGEVPEPRRLNRALSFDDWVPDEALHLVMGHVEDPRDREAASRVCRRWHRIDALTRKHVTVAFCYAARPARLRERFPRLESLSLKGKPRAAMYGLIPDDWGAYAAPWIDELAAPLECLKALHLRRMTVTDADIAALVRARGHMLQELKLDKCIGFSTDALRLVARSCRSLRTLFLEECHITDKGGEWLHELAVNNSVLVTLNFYMTELKVAPADLELLAKNCKSLISLKMSECDLSDLISFFQTANALQDFAGGAFYEVGELTKYEKVKFPPRLCFLGLTYMGTNEMPVIFPFSMKLKKLDLQYTFLTTEDHCQIIAKCPNLLILEVRNVIGDRGLEVVGDTCKKLRRLRIERGDDDPGLQEEQGGVSQLGLTAVAVGCRELEYIAAYVSDITNGALESIGTFCKNLYDFRLVLLDRERQVTDLPLDNGVCALLRNCTKLRRFALYLRPGGLSDDGLSYIGQYSGNIQYMLLGNVGESDHGLIRFAVGCTNLQKLELRSCCFSERALSLAVLQMPSLRYIWVQGYRASQTGLDLLLMARPFWNIEFTPPSPESFNHMTEDGEPCVDSHAQVLAYYSLAGRRSDCPQWVIPLHPA

SEQ ID NO: 9891 - protein, 598 aa, Oryza sativa
  unsure (1)..(598): unsure at all Xaa locations
MGGEVPEPRRLNRALSFDDWVPDEALHLVMGHVEDPRDREAASRVCRRWHRIDALTRKHVTVAFCYAARPARLRERFPRLESLSLKGKPRAAMYGLIPDDWGAYAAPWIDELAAPLECLKALHLRRMTVTDADIAALVRARGHMLQELKLDKCIGFSTDALRLVARSCRSLRTLFLEECHITDKGGEWLHELAVNNSVLVTLNFYMTELKVAPADLELLAKNCKSLISLKMSECDLSDLISFFQTANALQDFAGGAFYEVGELTKYEKVKFPPRLCFLGLTYMGTNEMPVIFPFSMKLKKLDLQYTFLTTEDHCQIIAKCPNLLILEVRNVIGDRGLEVVGDTCKKLRRLRIERGDDDPGLQEEQGGVSQLGLTAVAVGCRELEYIAAYVSDITNGALESIGTFCKNLYDFRLVLLDRERQVTDLPLDNGVCALLRNCTKLRRFALYLRPGGLSDDGLSYIGQYSGNIQYMLLGNVGESDHGLIRFAVGCTNLQKLELRSCCFSEXRALSLAVLXQMPSLRYIWVQGYRASQTGLDLLLMARPFWNIEFTPPRRVLIIXQKMENPXVDSHAQVLAYYSLAGRRSDCPQWVIPLHPAXL

SEQ ID NO: 9892 - protein, 422 aa, Mus musculus
MFSNSDEAVINKKLPKELLLRIFSFLDVVTLCRCAQVSRAWNVLALDGSNWQRIDLFDFQRDIEGRVVENISKRCGGFLRKLSLRGCLGVGDNALRTFAQNCRNIEVLSLNGCTKTTDATCTSLSKFCSKLRHLDLASCTSITNMSLKALSEGCPLLEQLNISWCDQVTKDGIQALVRGCGGLKALFLKGCTQLEDEALKYIGAHCPELVTLNLQTCLQITDEGLITICRGCHKLQSLCASGCSNITDAILNALGQNCPRLRILEVARCSQLTDVGFTTLARNCHELEKMDLEECVQITDSTLIQLSIHCPRLQVLSLSHCELITDDGIRHLGNGACAHDQLEVIELDNCPLITDASLEHLKSCHSLERIELYDCQQITRAGIKRLRTHLPNIKVHAYFAPVTPPPSVGGSRQRFCRCCIIL

SEQ ID NO: 9893 - protein, 423 aa, Mus musculus
MVFSNSDDGLINKKLPKELLLRIFSFLDIVTLCRCAQISKAWNILALDGSNWQRVDLFNFQTDVEGRVVENISKRCGGFLRKLSLRGCIGVGDSSLKTFAQNCRNIEHLNLNGCTKITDSTCYSLSRFCSKLKHLDLTSCVSVTNSSLKGISEGCRNLEYLNLSWCDQITKEGIEALVRGCRGLKALLLRGCTQLEDEALKHIQNHCHELVSLNLQSCSRITDDGVVQICRGCHRLQALCLSGCSNLTDASLTALGLNCPRLQVLEAARCSHLTDAGFTLLARNCHELEKMDLEECVLITDSTLVQLSIHCPKLQALSLSHCELITDEGILHLSSSTCGHERLRVLELDNCLLVTDASLEHLENCRGLERLELYDCQQVTRAGIKRMRAQLPHVKVHAYFAPVTPPPAVAGSGHRLCRCCVIL

SEQ ID NO: 9894 - protein, 422 aa, Mus musculus
MFSNSDEAVINKKLPKELLLRIFSFPDVVTLCRCAQVSRAWNVLALDGSNWQRIDLFDFQRDIEGRVVENISKRCGGFLRKLSLRGCLGVGDNALRTFAQNCRNIEVLSLNGCTKTTDATCTSLSKFCSKLRHLDLASCTSITNMSLKALSEGCPLLEQLNISWCDQVTKDGIQALVRGCGGLKALFLKGCTQLEDEALKYIGAHCPELVTLNLQTCLQITDEGLITICRGCHKLQSLCASGCSNITDAILNALGQNCPRLRILEVARCSQLTDVGFTTLARNCHELEKMDLEECVQITDSTLIQLSIHCPRLQVLSLSHCELITDDGIRHLGNGACAHDQLEVIELDNCPLITDASLEHLKSCPSFERIELYDCQQITRAGIKRLRTHLPNIKVHAYFAPVTPPPSVGGSRQRFCRCCIIL

SEQ ID NO: 9895 - protein, 423 aa, Mus musculus
MVFSNSDDGLINKKLPKELLLRIFSFLDIVTLCRCAQISKAWNILALDGSNWQRVDLFNFQTDVEGRVVENISKRCGGFLRKLSLRGCIGVGDSSLKTFAQNCRNIEHLNLNGCTKITDSTCYSLSRFCSKLKHLDLTSCVSVTNSSLKGISEGCRNLEYLNLSWCDQITKEGIEALVRGCRGLKALLLRGCTQLEDEALKHIQNHCHELVSLNLQSCSRITDDGVVQICRGCHRLQALCLSGCSNLTDASLTALGLNCPRLQVLEAARCSHLTDASFTLLARNCHELEKMDLEECVLITDSTLVQLSIHCPKLQALSLSHCELITDEGILHLSSSTCGHERLRVLELDNCLLVTDASLEHLENCRGLERLELYDCQQVTRAGIKRMRAQLPHVKVHAYFAPVTPPPAVAGSGHRLCRCCVIL

SEQ ID NO: 9896 - protein, 431 aa, Mus musculus
MPTDFARISEWKGFVHIFILHHRGDSGYGSLPAPDPPHSPTHSARLQTPERASQHRQAPGPLHGADLLLPAHQPAMSLCTCVPPLVQPGLGPAPLEDYPSHWRDHQCGPCPESTDPQALPGHPQCVSHAGDCHCQWLPAAHRPGALYHCTVLSRTEAPGSLRMLQYLERGCIEWVTLPNLEHLDVSGCSKVTCISLTREASIKLSPLHGKQISIRYLDMTDCFVLEDEGLHTIAAHCTQLTHLYLRRCVRLTDEGLRYLVIYCTSIKELSVSDCRFVSDFGLREIAKLESRLRYLSIAHCGRITDVGIRYVAKYCSKLRYLNARGCEGITDHGVEYLAKNCTKLKSLDIGKCPLVSDTGLESLALNCFNLKRLSLKSCESITGQGLQIVAANCFDLQMLNVQDCEVSVEALRFVKRHCKRCVIEHTNPAFF

SEQ ID NO: 9897 - protein, 400 aa, Mus musculus
METHISCLFPELLAMIFGYLDFRDKGRAAQVCTAWRDAAYHKSVWRGVEAKLHLRRANPSLFPSLQARGIRRVQILSLRRSLSYVIQGMANIESLNLSGCYNLTDNGLGHAFVQEIGSLRALNLSLCKQITDSSLGRIAQYLKGLEVLELGGCSNITNTGLLLIAWGLQRLKSLNLRSCRHLSDVGIGHLAGMTRSAAEGCLGLEQLTLQDCQKLTDLSLKHISRGLTGLRLLNLSFCGGISDAGLLHLSHMGSLRSLNLRSCDNISDTGIMHLAMGSLRLSGLDVSFCDKVGDQSLAYIAQGLDGLKSLSLCSCHISDDGINRMVRQMHGLRTLNIGQCVRITDKGLELIAEHLSQLTGIDLYGCTRITKRGLERITQLPCLKVLNLGLWQMTDSEKVR

SEQ ID NO: 9898 - protein, 327 aa, Mus musculus
QILSLRRSLSYVIQGMANIESLNLSGCYNLTDNGLGHAFVQEIGSLRALNLSLCKQITDSSLGRIAQYLKGLEVLELGGCSNITNTGLLLIAWGLQRLKSLNLRSCRHLSDVGIGHLAGMTRSAAEGCLGLEQLTLQDCQKLTDLSLKHISRGLTGLRLLNLSFCGGISDAGLLHLSHMGSLRSLNLRSCDNISDTGIMHLAMGSLRLSGLDVSFCDKVGDQSLAYIAQGLDGLKSLSLCSCHISDDGINRMVRQMHGLRTLNIGQCVRITDKGLELIAEHLSQLTGIDLYGCTRITKRGLERITQLPCLKVLNLGLWQMTDSEKVR

SEQ ID NO: 9899 - protein, 400 aa, Mus musculus
METHISCLFPELLAMIFGYLDVRDKGRAAQVCTAWRDAAYHKSVWRGVEAKLHLRRANPSLFPSLQARGIRRVQILSLRRSLSYVIQGMANIESLNLSGCYNLTDNGLGHAFVQEIGSLRALNLSLCKQITDSSLGRIAQYLKGLEVLELGGCSNITNTGLLLIAWGLQRLKSLNLRSCRHLSDVGIGHLAGMTRSAAEGCLGLEQLTLQDCQKLTDLSLKHISRGLTGLRLLNLSFCGGISDAGLLHLSHMGSLRSLNLRSCDNISDTGIMHLAMGSLRLSGLDVSFCDKVGDQSLAYIAQGLDGLKSLSLCSCHISDDGINRMVRQMHGLRTLNIGQCVRITDKGLELIAEHLSQLTGIDLYGCTRITKRGLERITQLPCLKVLNLGLWQMTDSEKVR

SEQ ID NO: 9900 - protein, 745 aa, Mus musculus
MILAIIKRGLENLLWDTCIHPSLKSRVRRLSETYLDELFGLDDQLVTPELMIKACTFYTGHLVKTHFSGWKKVAIPRANQEEIMAEKMDKAIAHDNFRCQKYIFNRWFAYTVMSRERLITTLLRLRHLFYMQRQRIILAKWKERARHKSKTREDDLISKHELQLKKWKFKLGKPISLEGSLSDIAVENRRIAFDISVLPEQAILQIFLYLTFKDMMACSRVNRSWMAMIQRGSLWNSIDFSTVKNIADKCVVTTLQKWRLNVLRLNFRGCDFRTKTLKAVSHCKNLQELNVSDCQSFTDESMRHISEGCPGVLYLNLSNTTITNRTMRLLPKYFHNLQNLSLAYCEKFTDKGLQYLNLGNGCHKLIYLDLSGCTQVLVEKCPRISSVVLIGSPHISDSAFKALSSCDLKKIRFEGNKRISDACFKSIDRNYPGINHIYMVDCKGLTDSSLKSLSLLKQLTVLNLTNCIRIGDIGLKHFFDGPASIRLRELNLTNCSLLGDSSVIRLSERCPNLHYLNLRNCEHLTDLAIEYIASMLSLISVDLSGTLISNEGMTILSRHRKLREVSVSDCVNITDFGIRAYCKTSLLLEHLDVSYCSQLTDDIIKTIAIFCTRITSLNIAGCPKITDAGMEILSARCHYLHILDISGCIQLTDQIIQDLQIGCKQLRILKMQFCKSISPAAAQKMSSVVQHQEYNSDNPPHWFGYDSEGNPLDKIHSRVQLRTYSKLIVKEPFSIDEEDPDSKHQ

SEQ ID NO: 9901 - protein, 745 aa, Mus musculus
MILAIIKRGLENLLWDTCIHPSLKSRVRRLSETYLDELFGLDDQLVTPELMIKACTFYTGHLVKTHFSGWKKVAIPRANQEEIMAEKMDKAIAHDNFRCQKYIFNRWFAYTVMSRERLITTLLRLRHLFYMQRQRIILAKWKERARHKSKTREDDLISKHELQLKKWKFKLGKPISLEGSLSDIAVENRRIAFDISVLPEQAILQIFLYLTFKDMMACSRVNRSWMAMIQRGSLWNSIDFSTVKNIADKCVVTTLQKWRLNVLRLNFRGCDFRTKTLKAVSHCKNLQELNVSDCQSFTDESMRHISEGCPGVLYLNLSNTTITNRTMRLLPRYFHNLQNLSLAYCRKFTDKGLQYLNLGNGCHKLIYLDLSGCTQVLVEKCPRISSVVLIGSPHISDSAFKALSSCDLKKIRFEGNKRISDACFKSIDRNYPGINHIYMVDCKGLTDSSLKSLSLLKQLTVLNLTNCIRIGDIGLKHFFDGPASIRLRELNLTNCSLLGDSSVIRLSERCPNLHYLNLRNCEHLTDLAIEYIASMLSLISVDLSGTLISNEGMTILSRHRKLREVSVSDCVNITDFGIRAYCKTSLLLEHLDVSYCSQLTDDIIKTIAIFCTRITSLNIAGCPKITDAGMEILSARCHYLHILDISGCIQLTDQIIQDLQIGCKQLRILKMQFCKSISPAAAQKMSSVVQHQEYNSDNPPHWFGYDSEGNPLDKIHSRVQLRTYSKLIVKEPFSIDEEDPDSKHQ

SEQ ID NO: 9902 - protein, 435 aa, Mus musculus
RPPDAGCCQAPEQPPPPLCPAPASPASECAPIVAAAGDTVRAGGTAPSSAQQQPESGDADCQEPPENPCDCHREPPPEIPDINQLPPSILLKIFSNLSLNERCLSASLVCKYWRDLCLDFQFWKQLDLSSRQQVTDELLEKIASRSQNIIEINISDCRSLSDSGVCVLAFKCPGLLRYTAYRCKQLSDTSIIAVASHCPLLQKVHVGNQDKLTDEGLKQLGSRCRELKDIHFGQCYKISDEGMIVIAKSCLKLQRIYMQENKLVTDQSVKAFAEHCPELQYVGFMGCSVTSKGVIHLTKLRNLSSLDLRHITELDNETVMEIVKRCKNLSSLNLCLNWIINDRCVEVIAKEGQNLKELYLVSCKITDYALIAIGRYSVTIETVDVGWCKEITDQGATLIAQSSKSLRYLGLMRCDKVNELTVEQLVQQYPHITFS

SEQ ID NO: 9903 - protein, 621 aa, Mus musculus
MSPVFPMLTVLTMFYYMCLRRRARTATRGDMMNSHRTIVSNSRTSPLNAEVVQYAKEVVDFSSHYGSENSMSYTMWNLAGVPNVFPSSGDFTQTAVFRTYGTWWDQCPSASLPFRRTPSSFQSQDYVELTFEQQVYPTAVHVLETYHPGAVIRILACSANPYSPNPPAEVRWEILWSERPMKVNASQARQFKPCIKQINFPTNLIRLEVNSSLLDYYTELDAVVLHGTKDKPLLSLKTALVDMNDLEDDDYEEKDGCEMDALNKKFSSAALGDGPHNGYFDKLPYELIQLILNHLSLPDLCRLAQTCRLLHQHCCDPLQYIHLNLQPYWARLDDTSLEFLQARCVLVQWLNLSWTGNRGFISVSGFSRFLKVCGSELVRLELSCSHFLNDTCLEVISEMCPNLQDLNLSSCDKLPPQAFGHIAKLCSLKRLVLYRTKVEQTALLSILNFCAELQHLSLGSCVMIEDYDVIASMIGAKCKNLRTLDLWRCKNITENGIAELASGCVLLEELDLGWCPTLQSSTGCFVRLARQLPNLQKLFLTANRSVCDTDIEELASNCTRLQQLDILGTRMVSPASLRKLLESCKDLSLLDVSFCSQIDNKAVLELNASFPKVFIKKSFTQ

SEQ ID NO: 9904 - protein, 276 aa, Rattus norvegicus
MRRDVNGVTKSRFEMFSNSDEAVINKKLPKELLLRIFSFLDVVTLCRCAQVSRAWNVLALDGSNWQRIDLFDFQRDIEGRVVENISKRCGGFLRKLSLRGCLGVGDNALRTFAQNCRNIEVLSLNGCTKTTDATCTSLSKFCSKLRHLDLASCTSITNMSLKALSEGCPLLEQLNISWCDQVTKDGIQALVRGCGGLKALFLKGCTQLEDEALKYIGAHCPELVTLNLQTCLQITDEGLITICRGCHKLQSLCASGCSNITDAILNALGQNCPRLR

SEQ ID NO: 9905 - protein, 1056 aa, Rattus norvegicus
MGAPLSSAKGVGAPLSSAKGTGAPLSSAKGTGASLSSAKGTGAPLSGAKGMGAPLSSAKGTGAPLSSAKGTGAPLSSAKGVGAPLSSAKGVGASLSGAKGMGALLSSAKGTGAPLSSAKGTGAPLSSAKGMGAPLSSAKGTGAPLSGAKGMGAPLSSAKGTGAPLSSAKGTGAPLSSAKGGRARFPGKRLRQFRRRGRVPLSRGAGAEDAKGAARLADSWGAGPITPILSLRRSLSYVIQGMANIESLNLSGCYNLTDNGLGHAFVQEIGSLRALNLSLCKQITDSSLGRIAQYLKGLEVLELGGCSNITNTGLLLIAWGLQRLKSLNLRSCRHLSDVGIGHLAGMTRSAAEGCLGLEQLTLQDCQKLTDLSLKHISRGLTGLRLLNLSFCGGISDAGLLHLSHMGSLRSLNLRSCDNISDTGIMHLAMGSLRLSGLDVSFCDKVGDQSLAYIAQGLDGLKSLSLCSCHISDDGINRMVRQMHGLRTLNIGQCVRITDKGLELIAEHLSQLTGIDLYGCTRITKRGLERITQLPCLKVLNLGLWQMTDSEKPSRPRTHYMATAAPDRQGITVCTAHPADTRRMGITCSVEQPVMSCCLSVMAAHIMGPGCGSWTRRTLTTDGTVLSTGTESGSGPPTWESVSSNSRQVSTMRILVTHVQPGEVMVTDGKVEPSRLGGIATLVRMEKSENPHCLQSLSAPQTDSGEGPEQATPTQSDEPAAELSAKGKKPPKKKNHPKRANKAGASFPLGREGIKQTRLLPTPSTSSGTARRKAGEAQPGEATRSARGASPAPGHAPNERRAPGRSRPTCPRQAPARGPSFVRSGPRCRSPRAPFPPPGHTAPSAGAGPTPELTCRGCGVGSSAGPDSLCSARGPLAQPPRTPHRRPEPARPECRICPEGRRLRGLGSGETRRPYRPFRRRCGRRRPRPGSRDPGKFRPRLSGASLEASRSRFLTTLDNIDSRKPKMLLFSHSRTPEISTSGWDRRDVFLPPFLPAYGPAASPGKSLVQLSAQVQAKGRELGQGVGTASIGSGSVAGAALPPFLLLLLRLLQDIELD

SEQ ID NO: 9906 - protein, 421 aa, Anopheles gambiae str. PEST
SCIIPDDEISRKLPKEILLRILSYLDVTSLCRCGQVSRYWNILALDGSNWQKIDLFDFQRDIEGPVIENISQRCGGFLKYLRLRGCQSVGSHSIRTLANYCHNIEHLDLSECKKISDVAIQQLSKNCAKLTAINLESCSQISDSSLKALSDGCPNLSEINVSWCNLITENGVEALARGCNKIKKFSSKGCKQVNDRAVIALALYCPGIEVLNLHSCDSITDASISKIAEKCCNLKQLCVSKCTELTDQSLTALAMNNQYLNTLEVAGCAQFTDSGFIALAKNCKYLERMDLEECSLITDATLQNLALGCPSLEKLTLSHCELITDEGIRQLAGGGCAAESLSVLELDNCPLITDATLEHLISCHNLQRIELYDCQLISRNAIRRLRNHLPNIKVHAYFAPVTPPPTINGPRPRYCRCCEIL

SEQ ID NO: 9907 - protein, 836 aa, Anopheles gambiae str. PEST
RRVAPVECPLASLGRNTPSMDTRQYHHPLSSSPLDPQAYQMSRSSPILTLDSDLYPSDCGKPDQGPPDGLVPDGGGGGSGGGANGNGSLLSRSSSSSLDQTGSFLRQALPLPLHPPPTNGHHGHRRDYRPVRPRTYTPIDALLTNTYQQHHQRLSPVLRGPPGGSGGGGGGGGGGGGGGYHHPDEPQSALGGLSEADRYFLEEKMDALYIQGAIRRNANATPSSLTRNQSSSSNNTERYYLENENIDAIYNFCRRNGGGGGGGGIGPPPGTVAAHNAHNAASKASSAAQSQVDCLDSSSPHLLRRASSPETSGSDRYLLDRIRGSPAFQSPRGTHLKAVGSADFIDGRIPLTKSQHYTDGLSRYGRFSPNLDQGYHTLVSPSPSGQQQSTIPASWTTGGTHGSGGGGTNSTSSSHGSPAQTNTPVGGNGSANGNGPCGRSIDGATILTSLGNGHGTSLYRAGPLFDRMPDELMVRIFEWLDSSELCNIARVCRRFESVIWNPALWKIIKIKGEENSGDRAIKTILRRLCGQTRNGACPGVERVLLADGCRLTDRGLQLLSRRCPEITHLQIQNSVTITNQALSDLVTKCTNLQHLDITGCAQITCININPGLEPPRRLLLQYLDLTDCASICDAGIKVIARNCPLLVYLYLRRCIQVTDAGLKFIPNFCIALRELSVSDCTSVTDFGLYELAKLGATLRYLSVAKCDQVSDAGLKVIARRCYKLRYLNARGCEAVSDDSINVLARSCPRLRALDIGKCDVSDAGLRALAESCPNLKKLSLRNCDMITDRGIQCIAYYCRGLQQLNIQDCQISIEGYRAVKKYCKRCIIEHTNPGFC

SEQ ID NO: 9908 - protein, 435 aa, Anopheles gambiae str. PEST
EIPGGFISHRPHTITGGHHHRYAPYSVVLHQPHLQQTAASPTIYTIPSHHFPHRAHPHLPHPGHHAAHHHHNLHGTIHSTNRPKSPNTPPPQPVEEEGTHIGHLYPEILAMIFAKLNVKDRGRAAQVCTVWRDAAYAKSCWRGVEASLHLRRPSPTLFGSLVKRGIKRVQVLSVRRALKDIVTGVPNLESLNLSGCYNITDMAIGHAFAADFPNLKVLNLSLCKQVTDSSLGRITQHLKNIEVLELGGCSNITNTGLLLISWGLKKLRRLNLRSCWHISDHGIGHLAGLSKETADGTPALEYLGLQDCQRLSDEALRHIAQGLTSLRSINLSFCVSVTDSGLKHLARMSRLEELNLRACDNISDIGMAYLTEGCNSISTLDVSFCDKVADQAMVHISQGLFQLRSLSLSACQITDEGLSRIAKSLHDLETLNIGH

SEQ ID NO: 9909 - protein, 573 aa, Anopheles gambiae str. PEST
LLIKLFQYLNPSDRSAAALVCRSWYDAFRYIEFQRAVRLHIHDIEFVDNGHPLNKLMTSFRYFTDVRITKVVFGNKSEFWSEFGDGIEELTFDNCVIWKHKLVSILKYMPRLRRLHVLNCPDLFKAWKLIENTTVTWNLVMPELRHLSLARNNRFQDFHFDQLVQLAPRLDSLDVSECFSSIEARQRVLMLNHILEFVRTTCDRLRHLFLAGTPIDNVFLRGLADIRALSLRSLALMVCEKIPTNEPGIIDLLRAQTGLTHLDLSKSLALNDYALIQISRSIPQLETLILNRCWMITDYGITAIKSLVRLRHIDLTNCERITDAGLVGGLFTHNRRNVRKLYLGLLTNMSDAALTKVSFEFCDLVVLDLGGCSNSINDLSIQYIFYHMTKLQELNLDCCAKISDAGITGVNLEEKAFAIWDIELSFSIADLIGLRSLKLAGCYKITDYSFERCFNFKELKEISLARLLQISDHGIERLALGCPSLEVVDFSECRTITDRCIEIITKCEPRLTTLKLQNCTQITDKAIRHIVENCRVLRVLNIRGCINISSYAEKKLSAVKSLRYLHGTTPEVI

SEQ ID NO: 9910 - protein, 1117 aa, Anopheles gambiae str. PEST
MELLLKVMKQISVDDRLACGQTCHRWMEAAHYYLPFSDRIIYRFTNVNFTDYEPPIKSFLGAFRIFPRIAIKACTFYGNSQFWPLFGEHVIELTIKNCLIKDTELLYILEHVPNLRQLKIEQCDELFRSWYFEKRQSCCESHFVLPDLLDVSLTNNDFLDELHFNKLMTLAPNIAHLDLSNCFKMIASHRRVAMVEHIMRFINMHQFQLHTLKFNGTLAIDDICLSTLSMIEGLSLETFSMTFCDKIPAAIIDLLRRQPDLNITQDLEWKVGRHPIKAPGFISFLVRQTNLVHLDLTSSLGITDEVMELITTCLPKLKTLKLRRCILVTDEGIMNIVNLVNLEVLDLSNCYRISDHAMYRGVIGRKVKNLHELYLCELPTLSDYSLIQVTLNYEMLQVLDLSNSPNAATDATMQYVNYYLVSLKQLHLYCCTKLTDSGLTGIDLPVKPMITWDQEETFPLDRLFKLRVLNLIGCYRITDLSLENAFKLAELKELHLARCYQISEKGIAVLSQVATALEFIDLSECPLVNDNCIEMLTANLKRLRTLKVNKCPQLTNACLEIIGRNCSYLKMEMSIESWFNLHYYGFGHGVDGGGYDDDEEEEDESEEEKPTPKEPIVEVDDREFPFHDDVFYINLKGPRVRTGFDNLPMEILLNIFRFLNGVDRDAAALTCKRWFDAMGYREFLDEVCFHFEEVSICDGTPPIALFLRSFRHFSNIKLTRVQFNGYCEFWDVFGEYLREITFCNCITLTKSKLTMILKRLPFLECLALEEADEFFKTWTPVELKRIEPVCRCLRKLALRKSNAFTVDHLYYLVAMGPNISALEISKCLKQIDAPTRVKILTTILTIMKMRKKKLQAVDFSYTMYDDLFLKQFAEIENMSLSQISLSFFERAPIKDPGIIDILRCQSAIVHLDLSSFLNLTDFALIEISTSLRMLKTLKLNGCWLLTDFGVESIYKLDRLQVLDLSDCDKISDRGFMKAIVDRRRDCMSQLYLSMLPGLTDSVILKICLTLLNLTVIDFCGSDCMNDTSVQFLFCYLKCLRILRLNGCVKISDAGLTGENLPVAVIEIWDTQTTFAICELRSLQELQLSGCFKVTDFTLTHAFRFRELRELNLAHCVQ

SEQ ID NO: 9911 - protein, 656 aa, Anopheles gambiae str. PEST
LPQQLLLKVMKQISVDDRLACGQTCHRWMEAAHYYLPFSDRIIYRFTNVNFTDYEPPIKSFLGAFRIFPRIAIKACTFYGNSQFWPLFGEHVIELTIKNCLIKDTELLYILEHVPNLRQLKIEQCDELFRSWYFEKRQSCCESHFVLPDLLDVSLTNNDFLDELHFNKLMTLAPNIAHLDLSNCFKMIASHRRVAMVEHIMRFINMHQFQLHTLKFNGTLAIDDICLSTLSMIEGLSLETFSMTFCDKIPAAIIDLLRRQPDLNITQDLEWKVGRHPIKAPGFISFLVRQTNLVHLDLTSSLGITDEVMELITTCLPKLKTLKLRRCILVTDEGIMNIVNLVNLEVLDLSNCYRISDHAMYRGVIGRKVKNLHELYLCELPTLSDYSLIQVTLNYEMLQVLDLSNSPNAATDATMQYVNYYLVSLKQLHLYCCTKLTDSGLTGIDLPVKPMITWDQEETFPLDRLFKLRVLNLIGCYRITDLSLENAFKLAELKELHLARCYQVESFAIWDIELSFSIADLIGLRSLKLAGCYKITDYSFERCFNFKELKEISLARLLQISDHGIERLALGCPSLEVVDFSECRTITDRCIEIITKCEPRLTTLKLQNCTQITDKAIRHIVENCRVLRVLNIRGCINISSYAEKKLSAVKSLRYLH

SEQ ID NO: 9912 - protein, 567 aa, Anopheles gambiae str. PEST
MLKMSSISAQGVVERASAELSKRINGLGLRSKHHHGSGGGGGGGGGKSGEKASVMERVTNVLCGGSSSSNSSNAANLSIQTAGQSQSGGGGGITGGGGGGGHAPEKPSRVSNTTGGGNSAGGKGSMLGMGAGPGGKSQSNTPQSLRKIGHQQHGGGMNHHHLGGAGKMGQSQLALPQILTIEQLLQDERFLARFFLYFTSYERCTLAQVCQKWRDLLYRSPRYWSGLVPVLQCRELRQTTNQDRVKLYNSLIRRSFHAVCLMGATDEDALDLVHSFPLASKHVHSLSLRCSSISDRGLEALLDHLQSLFELELAGCNEITEAGLWACLTPRIVSLSLADCINVADEAVGAVAQLLPSLYEFSLQAYHVTDAALGYFSPKQSHSLSILRLQSCWELTNHGVVNIVHSLPHLTVLSLSGCSKVTDDGVELIAENLQKLRALDLSWCPRITDAALEYIACDLNQLEELTLDRCVHITDIGVGYISTMLSLSALFLRWCTQIRDFGLQHLCSMRNLQVLSLAGCPLLTSSGLSSLIQLRHLQELELTNCPGASQELFGYLREHLPRCLLIE

SEQ ID NO: 9913 - protein, 257 aa, Fugu rubripes
MQVCKRKCSEVQRCTPCKQPRCTFAAPDVGLEDRGVLSHLTVKERCLCASLVCKYWRDLCLDFQFWKQIDLSGLQQVNDDLLVKIASRRQNITEINISDCRGVHDHGVSSLASHCPSLQKYTAYRCKQLGDASLSALGTHCPLLVKVHVGNQDKLTDEALKKLGEHCSELKDIHLGQCYSITDEGMVALSKGCRKLQRLYLQENKLITKGGKMRICMKFWVQLFGVILLHPPPPNTSAVSIIQPQLHKFNIGGNECV

SEQ ID NO: 9914 - protein, 642 aa, Arabidopsis thaliana
MSTSPSILSVLSEDLLVRVYECLDPPCRKTWRLISKDFLRVDSLTRTTIRILRVEFLPTLLFKYPNLSSLDLSVCPKLDDDVVLRLALDGAISTLGIKSLNLSRSTAVRARGLETLARMCHALERVDVSHCWGFGDREAAALSSATGLRELKMDKCLSLSDVGLARIVVGCSNLNKISLKWCMEISDLGIDLLCKICKGLKSLDVSYLKITNDSIRSIALLVKLEVLDMVSCPLIDDGGLQFLENGSPSLQEVDVTRCDRVSLSGLISIVRGHPDIQLLKASHCVSEVSGSFLKYIKGLKHLKTIWIDGAHVSDSSLVSLSSSCRSLMEIGLSRCVDVTDIGMISLARNCLNLKTLNLACCGFVTDVAISAVAQSCRNLGTLKLESCHLITEKGLQSLGCYSMLVQELDLTDCYGVNDRGLEYISKCSNLQRLKLGLCTNISDKGIFHIGSKCSKLLELDLYRCAGFGDDGLAALSRGCKSLNRLILSYCCELTDTGVEQIRQLELLSHLELRGLKNITGVGLAAIASGCKKLGYLDVKLCENIDDSGFWALAYFSKNLRQINLCNCSVSDTALCMLMSNLSRVQDVDLVHLSRVTVEGFEFALRACCNRLKKLKLLAPLRFLLSSELLETLHARGCRIRWD

SEQ ID NO: 9915 - protein, 562 aa, Glycine max
VVLVVLSQGSASWTRGLRRLVLSRATGLGHVGLEMLIRACPMLEAVDVSHCWGYGDREAAALSCAARLRELNMDKCLGVTDIGLAKIAVGCGKLERLSLKWCLEISDLGIDLLCKKCLDLKFLDVSYLKVASESLRSIASLLKLEVFVMVGCSLVDDVGLRFLEKGCPLLKAIDVPRCDCVSSSGLISVISGHGGLEQLDAGYCLSELSAPLVKCLENLKQLRIIRIDGGRVSDFILQTIGTNCKSLVELGLSKCVGVTNKGIMQLVSGCGNLKILDLTCCQFISDTAISTIADSCPDLVCLKLESCDMVTENCLYQLGLNCSLLKELDLTDCSGIDDIALRYLSRCSELVRLKLGLCTNISDIGLAHIACNCPKMTELDLYRCVRIGDDGLAALTSGCKGLTKLNLSYCNRITDRGLEYISHLGELSDLELRGLSNITSIGIKAVAISCKRLADLDLKHCEKIDDSGFWALAFYSQNLRQINMSYCIVSDMVLCMLMGNLKRLQDAKLVCLSKVSVKGLEVALRACCGRIKKVKLQRSLRFSLSSEMLETMHARGCKIRWD

SEQ ID NO: 9916 - protein, 174 aa, Glycine max
  unsure (1)..(174): unsure at all Xaa locations
PRVRPRVRNDAALRPLAKCSELLVLKLGLCSSISDKGLAFISSSCGKLIELDLYRCNSITDDGLAALANGCKKIKMLNLCYCNKITDTGLGHLGSLEELTNLELRCLVRITGIGISSVAIGCKNLIEIDLKRCYSVDDAGLWALARYALNLRQLTISYCQVTGLGLCHLLSSLX

SEQ ID NO: 9917 - protein, 2159 aa, Dictyostelium discoideum
MSNNNYNKIQSPSSGKRRFLQEIPKGEEDELYSEHFIEIDKLIKQEQEKEENGGFSLPKWPASSTINNNSTQNLFSNFMSDSSSSINSDINSNYTRDNNGMFIVRTDLNTDIPSSHKSTIYSKQQQSPRHQDINSNHYSMTYDSSLLSVSGSNASSNCNTSASSSVNSCNNSIGNLSKVFNLNSSTKSLNNNNNNNNNNNNNMETISGFNNIMKIDNLINHDTNNNNNNNNMITSPSLTTNTTTTTTMTSNNSTPIRSPSPPKTPQHQSVLISPMTPYDVYNSYKFDKLKTTPTSPTSPTKSTRFKEPLLPRSNNNFNNNNNKNSTMSLSGMMSGTFSTSHLSSWVWVKNKHSIVIIGPTGIGKSFLLNTLLHSTFTPSLNSIRPILGNHRLSLKPQHDTTSTSTTSTTNTISTDHIMSNNEYFLLDKLKTKLMNISKSQIDQKMILDQSFYQSINWDKERDNEFERVYTTSQYLTKKIPQVNDSHAFILPQGRLGPNQQFKFTYGAICELNVEFLQESEVRVILWELHQYSEDKTIPMNPNRLQSLQWVYSSVVDGATFDYSNQSSSSSTSSINSGTSGSNRMVRVVEDINSYWDIPIKEKFKKLFGKRIQFKGLGKDHNIDRIYVREKVKEVLSVYGCILNLLHIKLPSSVLFNKREITMISDDSKRGNISKFTITRILDDADQILLSIDYRGLSADLADLLLASKFTQKFSADDGSIQFLELGEHRQFQLQQQLQQKLQQQQVSSPQPQPQQQQQQQQVQQCQSQQSPQQCQSQQSPQQCQSQQSPQQCQSQQSPLQQQQQQQQSPQQLQSPQQLPDIHSFVINQLRKLFKDARNISNIHRILDSFKIIKIKPLLFSSIHLNKSVPPEYKLKGYSSIRQLKEISNVPVLIRLMHVSNNSTWTTQHNLLDKFKQGIAKKPSILNHLVEQQQQQYQQQDALNSTGSKPIPTDKELNDLQEQLTNSFKDTLNVNNNQNNNNNNNNNNNNNNNNNNNNNNNNNNNNNNYNNNNYNNNNYNNYNYNNNNVITKNNNNVINNNNNYNNNINNNNWRNNYNRGVINPPSGIDRITTSFRTRFAGWKRKLLANVSSEASESLFQNKSNECEQMARMEWIKFKMVSPDAVVNINDFCNLVYSTFGGTNAKPDTLSNVNGNNPVILLCKTLLQWTPNFWRENIVERLPTLQEEISSFSKTLLFETNKLLLNRITLPNDEKNYLMKVLHYCQAATDRNISSKISGVQTLFNQNMNLIIYNTCLDTFCSEVTNIKFQQSSVNYHLIMESCFSIIPYAVSTKIQQKLIEILRQGLSYLDSIEKHIEYTIQYLLNSPFRIKRQQQLKPSIDVSDSVIENYVNLVNPITKQSPLKSQSQQTTTTTTTTTTTTTTTTTSSPSNSPKLSTDEMDIETPNKKIKSDNSVNNINNTTETTPTETSPNNSSNVIPTPMIINNQTTTTTTTTSSTISNNNNTNNNNNNNKPMFDNGSCNYIPKQILPPQTADSLIQICVGKIVQNIHSLTSVKGTTIPEEILQKIITLLISQDKIKGGSNDPITNQLDDSLLARLLSPFMQSLDLEGAKFLSTISLKTIGSTCSQLKKLSLANCINIPSDALNSISMSCKNLEVIILKGCYQLSNPGIVSLARGCPNLYVVDLSGCMKITDFAIHELLQNCKQLHTLDLRKCVNLTDGAFQSFNITTLANIDLLECNYISDQTIFNICSTSRNLLSIKLSGKGITDQSLKKISENCQSLTNLDLVLCENITDQGVQLLGKNCLKLSSINLFSSKNLTSSVFDETINNNNNNNNNVNNNNNNNNIVNNNNNNNNNLNNNNNNNNNNMIINIFNQQSWSSLTSLNLNRCITINDTSILTITNQSPLLETLILAMCTDISDESVITIAQRLKNLKNIDLTKCTQISDRGVIEIAKQCKQNLNRLILVSCTQVTDASIIEVANQCSSLIHLDLSQCEKITDQSLLKVSQGLRQLRILCMEECIITDVGVSSLGEISEGYGCQYLEVIKFGYCRFISDSSLIKLAFGCPFVSNLDLSQCSNLITPRAIRSAIKAWPRLHTLRLRGYQSLTNESIVESTPLKLKTVNLSWCANMEDSALIGFLKQCTAIETLDISKCPKITDNSLESILDSCPSIRVINVYGCKEISSFTVQKLSSLGKAIYR

SEQ ID NO: 9918 - protein, 638 aa, Dictyostelium discoideum
MKMDAFSCFGVRNKKKSVLLKQMQAEEKEAQLNRNYFNLLSTELILYILKYMGTHDLCILARISKRFRECCYDSTLWRTLGFSSEMAKKKIDSALKNMELTSRLASVRLINLNNLNIKQKTIDYIVTHTPQLKEIRLHNLRLTEKTSKLLVAKCPNLEQVYMDGGRTSDECLELLANGAVKLKSINLHKVENITTTGICHIIKNTNLSFLNFNGISGWDIRTLAPYCAHFTSMDLGSSNNLSDDDLKALTRQCKKLKFISLKSCKLITDHGVLELIHDCPQLMDLNLASCSKVTRTSVQHVLQNLHNLTTLNLSSFKNIHPITFPKNPYRLLNTLTTIDLSFTDVKDEDIFQLTEYAANLKSLRLVACVEVTDESMLMIATHCKKLFCVDLSRDQQQSSNYSTSKGPMKITFATVEALFLTCQDLQKVALSYSSKNNITKRSVMEVHDRRVSSGLKNINFTLNEESVNNSAIINNSNQGSSNSIINNNNSSNNSIINNNSNNSINNNNNNNNNNNNNNNNNNNNNNNNNNNNNHNNINNNYNPPIPIPFNNNNNNYNNNNNNHNNNNNNNNNQNNNNNNQNNNNQNNSNQNNNNNNNNNNNNNNNNNNNNNNINNINNPNFYNPIIPNNNIPITTNNP

SEQ ID NO: 9919 - protein, 389 aa, Oryza sativa
  unsure (1)..(389): unsure at all Xaa locations
XGTPGLQVLARGDQLAMVCCSCIDDDGLELLGKGSNSLQSVDVSRCDHVTCQGLASLIDGHNFLQKLNAADRMAEMRQSLLSNLPKLKDTLTVPIDGPXEVSSSVLLAIGGCNNLVEIGLSKCNGVTDEGISSLVTQCSHLRVIDLTCCNLLTNNALDSIAENCKMVEHLRLESCSSISEKGLEQIATSCPNLKEIDLTDCGVNDAALQHLAKCSELLVLKLGLCSSISDKGLAFISSSCGKLIELDLYRCNSITDDGLAALANGCKKIKMLNLCYCNKITDTGLGHLGSLEELTNLELRCLVRITGIGISSVAIGCKNLIEIDLKRCYSVDDAGLWALARYALNLRQLTISYCQVTGLGLCHLLSSLRCLQDVKMVHLSWVSIERFEM

SEQ ID NO: 9920 - protein, 296 aa, Oryza sativa
  unsure (1)..(296): unsure at all Xaa locations
HPHLRCAWAIRHEETISSAENCKMVERLRXQYCCSISEKGLEQIATSCPTSKEIDLTDCGVNDAALRPLAKCSELLVLKLGLCSSISDKGLAFISSSCGKLIELDLYRCNSITDDGLAALANGCKKIKMLNLCYCNKITDTGLGHLGSLEELTNLELRCLVRITGIGISSVAIGCKNLIEIDLKRCYSVDDAGLWALARYALNLKQLTISYCQVTGPGXLCHLLSSLRCLQDVKMVHLSWVSIEGFEMALRAACGRLKKLKMLSGLKSVLSPELLQMLQACGCRIRWVNKPLVYKD

SEQ ID NO: 9921 - protein, 659 aa, Triticum aestivum
  unsure (1)..(659): unsure at all Xaa locations
MSEEEAXRYGGGTGGGGVGALSVDLLGQVHRVLERRDRKACRLVSRAFARAEAAHRRALRVLRREPLPRLLRAFPALERLDLSACASLDDASLAAALAGADLGTVRQVCLARASGVGWRGLEALVAACPRLEAVDLSHCVGAGDREAAALAAASGLRELNLEKCLGVTDMGLAKVAVGCPRLENLSFKWCREISDIGVDLLVKKCRELRSLDISYLKVSNESLRSISTLEKLEELAMVACSCIDDEGLELLSRGSNSLQSVDVSRCDHVTSQGLASLIDGHSFLQKLYAADSLHEIGQDFLSKLVTLKATLTVLIDGFEVSSSLLSAIGEGCTNLVEIGLSKCNGVTDEGISSLVACCSYLRTIDLTCCNLVTNNSLDSIADNCKLLECLRLESCSSINEKGLERIASCCPNLKEIDLTDCGVNDEALHHLAKCSELLILKLGLSSSISDKGLGFISSKCGKLIELDLYRCSSITDDGLAALANGCKKIKLLNLCYCNKITDSGLSHLGALEELTNLELRCLVRITGIGISSVVIGCKSLVELDLKRCYSVDDSGLWALARYALNLRQLTISYCQVTGLGLCHLLSSLRCLQDVKMVHLSWVSIEGFEMALRAACGRLKKLKILSGLKTVLSPDLLQLLQACGCRIRWVNKPLVYKDAI

SEQ ID NO: 9922 - protein, 205 aa, Triticum aestivum
  unsure (1)..(205): unsure at all Xaa locations
MSEEEAXRYGGGTGGGGVGALSVDLLGQVHRVLERRDRKACRLVSRAFARAEAAHRRALRVLRREPLPRLLRAFPALERLDLSACASLDDASLAAALAGADLGTVRQVCLARASGVGWRGLEALVAACPRLEAVDLSHCVGAGDREAAALAAASGLRELNLEKCLGVTDMGLAKVAVGCPKLENLSFKWCREISDIGVDLLXKKX

SEQ ID NO: 9923 - protein, 191 aa, Triticum aestivum
  unsure (1)..(191): unsure at all Xaa locations
XILTSKLLPTQGISLVPSKILEITSFCELYIXFNXFSFSXLQVSNESLRSISTLEKLEELAMVACSCIDDEGLELLSRGSNSLQSVDVSRCDHVTSQGLASLIDGHSFLQKLYAADSLHEIGQDFLSKLVTLKATLTVLIDGFEVSSSLLSAIGEGCTNLVEIGLSKCNGVTDEGISSLVACCSYLRTIDX

SEQ ID NO: 9924 - protein, 92 aa, Triticum aestivum
QLTISYCQVTGLGLCHLLSSLRCLQDVKMVHLSWVSIEGFEMALRAACGRLKKLKILSGLKTVLSPDLLQLLQACGCRIRWVNKPLVYKDAI

SEQ ID NO: 9925 - protein, 635 aa, Populus tremula x Populus tremuloides
MITNKKPRSSETDSNYMRDDRTEMSEDDDRSPPSNSITHDSSPTRTCTPGPGSGSSSVPEYLAPYPDQVLENVLENVLWFLTSRKDRNAASLVCRSWYRVEALTRSDLFIGNCYAVSPKRAMSRFTRIRSVTLKGKPRFADFNLMPPYWGAHFAPWVSAMAMTYPWLEKVHLKRMSVTDDDLALLAESFSGFKELVLVCCEGFGTSGLAIVVSRCRQLKVLDLIESDVSDDEVDWISCFPDTETCLESLIFDCVDCPIDFDELERLVARSPSLKKLRLNRYVSIGQLYRLMIRAPHLTHLGTGSFSPSEDVSQVEQGPDYASAFAACKSLVCLSGFREIIPDYLPAINPVCANLTSLNFSFADVSAEQLKPIISNCHKLQIFWVLDSICDEGLQAVAATCKELRELRVFPVDPREDIEGPVSEVGLQAISEGCRKLQSILYFCHRMTNAAVVAMSKNCPDLVVFRLCIMGRHQPDHVTGEPMDEGFGAIVKNCKKLTRLAVSGLLTDRAFAYIGKYGKIVRTLSVAFAGDSDMGLKYVLEGCPRLQKLEIRDSPFGDAALLSGLHHYYNMRFLWMSACKLSRQGCQQITQALPRLVVEVIKHDDNVDMDEYVDTLYMYRSLEGPRDDAPRFVSIL

SEQ ID NO: 9926 - protein, 463 aa, Schizosaccharomyces pombe
MRVPNEVCFNILSYLEADELRCKSTVCTSWRNFIIPTLWEKVVFQNEAQLNNFFDTLQYSKDVSYYFRYLRKLNCSRVRKFLTDKHLMLMTLATGISRLNLSGCTRISEPLIGKLLYQNLNLVTINFSNIFSLPANILEYISDNCPNLKALNIGNCGLVEDTGMVQIIKRCPYLNRLIIPNCRKLTDVSLQILSEKEDLIELDISGCEGFHNADTLSRLVSRNRGLKELSMDGCTELSHFITFLNLNCELDAMRALSLNNLPDLKDSDIELITCKFSKLNSLFLSKCIGLTDSSLLSLTKLSQSLTTLHLGHCYEITDIGVQCLLKSCKNITYIDFGGCLRLSDIAVSAIAKLPYLQRVGLVKCICLTDLSVILLSGSFSRNLERVHLSYCIGLTAKSVSYLMYNCKTLKHLSVTGINSILCTELRSFSRPIPDGINPSQVPVFCAFTKVEIDLFREFIRNRI

SEQ ID NO: 9927 - protein, 1151 aa, Saccharomyces cerevisiae
MDQDNNNHNDSNRLHPPDIHPNLGPQLWLNSSGDFDDNNNNNNNNNNNNSTRPQMPSRTRETATSERNASEVRDATLNNIFRFDSIQRETLLPTNNGQPLNQNFSLTFQPQQQTNALNGIDINTVNTNLMNGVNVQIDQLNRLLPNLPEEERKQIHEFKLIVGKKIQEFLVVIEKRRKKILNEIELDNLKLKELRIDNSPQAISYLHKLQRMRLRALETENMEIRNLRLKILTIIEEYKKSLYAYCHSKLRGQQVENPTDNFIIWINSIDTTESSDLKEGLQDLSRYSRQFINNVLSNPSNQNICTSVTRRSPVFALNMLPSEILHLILDKLNQKYDIVKFLTVSKLWAEIIVKILYYRPHINKKSQLDLFLRTMKLTSEETVFNYRLMIKRLNFSFVGDYMHDTELNYFVGCKNLERLTLVFCKHITSVPISAVLRGCKFLQSVDITGIRDVSDDVFDTLATYCPRVQGFYVPQARNVTFDSLRNFIVHSPMLKRIKITANNNMNDELVELLANKCPLLVEVDITLSPNVTDSSLLKLLTRLVQLREFRITHNTNITDNLFQELSKVVDDMPSLRLIDLSGCENITDKTIESIVNLAPKLRNVFLGKCSRITDASLFQLSKLGKNLQTVHFGHCFNITDNGVRALFHSCTRIQYVDFACCTNLTNRTLYELADLPKLKRIGLVKCTQMTDEGLLNMVSLRGRNDTLERVHLSYCSNLTIYPIYELLMSCPRLSHLSLTAVPSFLRPDITMYCRPAPSDFSENQRQIFCVFSGKGVHKLRHYLVNLTSPAFGPHVDVNDVLTKYIRSKNLIFNGETLEDALRRIITDLNQDSAAIIAATGLNQINGLNNDFLFQNINFERIDEVFSWYLNTFDGIRMSSEEVNSLLLQVNKTFCEDPFSDVDDDQDYVVAPGVNREINSEMCHIVRKFHELNDHIDDFEVNVASLVRVQFQFTGFLLHEMTQTYMQMIELNRQICLVQKTVQESGNIDYQKGLLIWRLLFIDKFIMVVQKYKLSTVVLRLYLKDNITLLTRQRELLIAHQRSAWNNNNDNDANRNANNIVNIVSDAGANDTSNNETNNGNDDNETENPNFWRQFGNRMQISPDQMRNLQMGLRNQNMVRNNNNNTIDESMPDTAIDSQMDEASGTPDEDML

SEQ ID NO: 9928 - protein, 783 aa, Neurospora crassa
MAHGDAAPEAHSEAAQQQAQDDSRSTSSSSTPPPVDNEESDFFLAANDSQSSLGVPNIENMQVADEECRVAPINRLPNELLIAIFVKLTTSSDILHVMLTCKSWARNAVEILWHRPACSSWERHTIICQTLSAPRPYFAYRHFIRRLNLSALAPELNDGSVESLEMCSRVERLTMTGCKRITDAGLLKLLRNNTGLLALDISGMEDITETSINAVAEKCSRLQGLNISNCTKISIASLVQLAQSCRFIKRLKLNECAQVTDEAVIAFAENCPNILEIDLHQCRLIGNDPVTALMSKGKALRELRLASCDLIDDSAFLSLPPNKTYEQLRILDLTSCSRLTDRAVEKIIDVAPRLRNLVLAKCRNITDAAVFAIARLGKNLHYVHLGHCGNITDEAVKRLVQCCNRIRYIDLGCCVHLTDDSVVRLATLPKLKRIGLVKCSNITDESVYALARANQRRPRRDADGNLVPGDCYNNMHHSSLERVHLSYCTNLTLRSVLRLLNACPRLTHLSVTGVQAFLREDLESFCREAPAEFTEHQRAVFCVFSGQGVTNLRRYLNSEHNLTEIARGARPIDEGVPNRVGPVFPGTAVNPMQVTPPGHHGAAAAFIDDGEPDAVDDDDGLEDGSEMVIDTQPMLHNHHAVMGGTAFPIQGVASTEQLLPPPPPAIQPQQHLVTNPFHFVPGQPFAIPPHGLQFYEAVRATESGAVSGTPTHVPLVGQATGLESTIAEGSHHSGVARNSPGTATSQNPDASQAVPPNPMGNIELAILTGNRNPDLGGSGGASV

SEQ ID NO: 9929 - protein, 366 aa, Neurospora crassa
MRLRASLDIIADDRRTPMAHGDAAPEAHSEAAQQQAQDDSRSTSSSSTPPPVDNEESDFFLAANDSQSSLGVPNIENMQVADEECRVAPINRLPNELLIAIFVKLTTSSDILHVMLTCKSWARNAVEILWHRPACSSWERHTIICQTLSAPRPYFAYRHFIRRLNLSALAPELNDGSVESLEMCSRVERLTMTGCKRITDAGLLKLLRNNTGLLALDISGMEDITETSINAVAEKCSRLQGLNISNCTKISIASLVQLAQSCRFIKRLKLNECAQVTDEAVIAFAENCPNILEIDLHQCRLIGNDPVTALMSKGKALRELRLASCDLIDDSAFLSLPPNKTYEQLRILDLTSCSRLTDRAVEKIID

SEQ ID NO: 9930 - protein, 364 aa, Neurospora crassa
MRLRASLDIIADDRRTPMAHGDAAPEAHSEAAQQQAQDDSRSTSSSSTPPPVDNEESDFFLAANDSQSSLGVPNIENMQVADEECRVAPINRLPNELLIAIFVKLTTSSDILHVMLTCKSWARNAVEILWHRPACSSWERHTIICQTLSAPRPYFAYRHFIRRLNLSALAPELNDGSVESLEMCSRVERLTMTGCKRITDAGLLKLLRNNTGLLALDISGMEDITETSINAVAEKCSRLQGLNISNCTKISIASLVQLAQSCRFIKRLKLNECAQVTDEAVIAFAENCPNILEIDLHQCRLIGNDPVTALMSKGKALRELRLASCDLIDDSAFLSLPPNKTYEQLRILDLTSCSRLTDRAVEKI

SEQ ID NO: 9931 - protein, 994 aa, Neurospora crassa
MRRSRTPPPSPYRVLAHHGGPQPPQDSGALIRSFNVETNPTRPIRPSPLTASTIPDMPLDLVDRIRSFPLFVSAPEGFLVAIGTHLKPQVHAAQDHILTEGDEAKAMYWLVRGVVAVTSRDGEAVYAELKPGAFFGEIGVLMDVPRTATIISRTKCLLVVLKKEDLHAELPKYPDMEKAIRQEAQERLTILKKKRQEGRQMANSSSNNLAREAVPGEVSTGESGSIKEGAVVRSKKRKSPSPGVIDDPTISGSALGSGYVNVRKTLKELPLFSTLPPDILHFLGLSAQPKSYSPFTDIVRQGSPGNDIFFIVRGEAEVVHESEKTFSRPRLKQGQYFGEVASLGLSEGRTATVRSITAVECLMIGGDALEELWKRCPPEIRSQVEETARRRIKGTDEDVEMVDAQPEVTFTTPSKPTSPAKDKTQQPTDPDPFLSVDMENIRNRRRNSIVPPTPQTDASAIVNGMKAMTPESSPLRHSVADGSPIPSKRARTLPWRPSTIEDEAKKLSLPDDILVCIFKHMDLLELIRLRIVCRDWRRLLTTSPNLCTHVDLSLINRKVTDWSLVHILAPFIGLRPVEVDISNCFHITDEGFQALWKQCGKNIKVWKMRSVWDVSASQILEMSENAKNLEELDWSNCRKVGDNLLARVVGWVVPEPPPSRSSENGKVVIASSNSRSRRSKPTTANGSATAPAQPPPGTVIGCPNLARLNLSYCKHITDRSMHHLALHASSRLQSLSLTRCTSVTDQGFQTWSPHRFPNLTTLCLADCTHLTDTSIIALVNSCKSLTHLDLSFCCALSDTATEVIALGLPGLRELRMAFCGSAVSDASLGCVALHLNELRGLSVRGCVRVTGVGVENVLEGCGRLEWVDVSQCRNLGGWLVGGGVGRWGFDERVAKKKGGDDALRIMESKAQGGKMGAGGVGGGVQRPRGNNGGLRQSKVLGPGPVMRPIIPPKGVTNHRTRKPIRFVVEKCGLELRLASVSHKRGKVELFASTG

SEQ ID NO: 9932 - protein, 751 aa, Neurospora crassa
MDSQPSRPSTPISASNGMPENGEVMRARSKGREKLLRGLQRISSSPALAPFQRQRSSSSPYHGHSNLSCVSLATPNAPSPFGQTSISSSYFSHGASTASSSVPSTAPTTPGFESPACNVSDPMLAVRKVGHPIHATTSIALPHHKKKLTTFNLWANMPHEIRIHVLSFLTPKELVRTSRVSKDLYNMCYDGQLWTRCDASEFYQQIPAEALAQIIVSAGSFIKDLNLRGCVQLEHHRRAEMVVKASRNLVNATLEGCRNLQRQTLHDLIKRNNRLVNLNLTGLPAVCNTTLRLIAESCPQLEMLNVSWCKHMDAKAIQTVLEGCPKLKDLRVGEVKGFKDLEVAKSIFTTNNLERLVLAGCEDLSDAALQVMMHGVDPEIDVLTNTPMVPPRKLRHLDLSRCNRLTSQGIQALGHLVPDLEGLILSGITTLTDSALEPILASAPRLTHLELEDLGELTNSLLSEHLAKAPCASKLEHLSIGYCGNLGDTGMLPVFRACTSLRSVIMDNTRISDLVLAEAASMVRQRAMDARRRAISVSPQQVSGLPNVTLHLTVYDCGNVTWTGIREVLSRNTEPMKISVPTTDTPSITLTEEPSSSDLTTSMFDTDNKSGTATTTPINPSPTTSTTVGTTTYSCPPTETIALKCYYGWQQTVDEHTKRVLRGSFPSARRLEAKWAQYMQAEEEERAGGDGAGRRRRRRRAREAAMVHANEEGLGHLGEDGEDVWGAGGGDEGMGVAGGRRRARTAVCVVM

SEQ ID NO: 9933 - protein, 846 aa, Trypanosoma brucei
MADPIAVNFRRARFPNTPPAQLLTVIVSYRRGCAPLALLAVSPTARRAVEETGCAIGGLRVIHKNNDVKKCDDVRFVAPEELELAASNKQSLQSAVFGLWWYKRYPFTSLVVDHAGKENMPLIIRLKKALNIKKMVILKSAVTNEMMHIVSMARDLESLTVRNCFSESEASLCSVTSILNSRATNRRDARTFYLSGVTSLGVLRCLRSLTLFATPLSNQIMSYFCECTNLERVVVDSCCGLVSLECFAALQRLTHLSVLNCTITDEGLPPISKCFSLQYVMLDNCMKLRSLNCLGSLRNLRTLIVSRNRIPEEGVQGLRKLRDLEVLRFSVFNRPTAVEFISSLGSLVELDLRDNWVGDAGCASFVHCRQLQQLKLSCCRRVSDVRWLAALTCLRTLDLSHTNVRSRWLESLRACRYLVELNVAYCRDVVEVSFLSELRLLKHLDLSGTDIGEQNLDPIGQCEGLTFLLLKDCSSVKDLHFLETLRELVKLDTERTGIMDANVCQVVACKKLEFLSFRYCHLLTDVKCLEGLRNLKTLDLAGTNVTNEGISSLPKCVSLEYVDVSECCLITHLEFLRPLPNLQQVVADQMNLTDIGGLTGAPSLRRVTLNESKRLGTVGEVRLPYLQELSLRKSTISNAGIRSLLASCRSLQHLDMQHCHSVTELSALSQLPNLRELLLRNIRVTGEFMTHIASCVNLRKLQMTECADITDVNCLSALQSLEDIDLSRTSVTTEGIKGLSKCYALRKLNLSECRYVTNVNCLGKLPFLRELHLEKTNVTDKGIAGLSNCIQLETLALTKCSRITNVERLHSSLPHLEEFDVYGTSVDKFHRCLGGSQRTQHACSVL

SEQ ID NO: 9934 - protein, 1449 aa, Trypanosoma brucei
MKVRITDHNTFWHAPQLLPYNTSPPRLIHRLALLLKKKKHFLNTQHLKESETGTTMSGNQGRKRQRSSSPEQSEALKEPSTTEQNKLTTITITEETRDASNDETVVSLLNEHEKLIKQTTRLESSVKALRCFMSNLTAMSGERQGGVCDDTECIHRVTLYNAADNAFSDEGLYEGALSSLCGRIQAKKLTITLSKGWKFNLEGVSKLKQLEELRIEYPRGKLVNMISLNNLDMLKRLCLRSNNIDNNDIHCIFSVGTLEELAITDTMQLTNIRGISRLTNLKCLELNSTDIDDSCIGEISACVKLSKLSVSECNNITDATPISQLAALEELNVNSCYHITKGIGTLGMLLRLRMLDLSGVPVEDNCLKDLCDCGSLERLNLSYCIQLTDINPLSSATAIEELNLNGCRRITRGIGVVWALPKLRVLHMKDVQLEDSVIGSLGNGNSFVRLSLENCAGFGDMTLLSSIVTLEELNIQKCADIISGVGCLGTLPYLRVLNVKEVHISSLDFTGIGASKSLLQLTLESITGLIDVEALANILTLEKLSLHGCTGIDAGIGCLGNLPQLKMLDLSGTNTDNESLRSLCLSQTMVSLNLSHCWKMTNVSHISSLEALNELNLNNCFGINAGWEAIEKLQQLHVAILSNTHITDRDISHFSKCKNLVTLDLSFCNKLLDVTTLSNITTLEELNLDSCSNIRKGLSVLGELPRLCVLNIKGVELEDSVIGSLGNGNSFVRLSLEHCKGFGDVTPLSNLVTLEELNLHYCDKVTSGMGTLGRLLQLRVLDLGRTQVDNNSLENICTSSIPLVLLNLSHCKKITSISAIASLTALEELNIDNCCNVTSGWNVFGTLHQLRVATLSNTRINDENVRYVSECKSLNTLNLAFCKDITDVTALSKITMLEELNLDCCHNIRKGIETLGKLPKARILSMKECYMGDSDAQQCSILGNSKSLVKLNLERSMGFISVKALSNIATLEELVLDHAREVCCIPSFSCLPRLRVLNLKYTDINGDVTKNISESKSLRLLNLSHCKWVTDISVLSSLSTLEELNVSSCYGIKKGWESLGKLPLLRVAILSDTNITAKDIACLSSCKTLVKLQFSWCEELSDVTVVYEIQSLEELIVKKYSDGLKGLNALGTLPRLRFLHLRNVRGSDISVESIGTSKSLVRLNIEMRGELTDITPLSNITSLEELSLWECRDTLEGAWTLERLPRLRSLDLGLSDISDSTLYYICLSRFITSLNLTSSWKLTDISGISKLTALEELNLRGCHRITSGWEALSELPRLRVLNLESTSVTTRDGGYYISRCKSLVTLNIQLSDMTDASCLANIKTLEELHIGECDELTQGFSALFTLPRLRILNLMGSLITDEDLREIQPPHTIEELNLSYCKNLNDITPLGRIKSIKKLHLSQSHDVRRLREGFRSLLELPCLSWVDLRNVYGWFDVYVELRKRRVHIR

SEQ ID NO: 9935 - protein, 630 aa, Trypanosoma equiperdum
MTGRSTYGMCAVCREPWAEGALELFPCRHVFCTVCVVERWRCPSCQRRIGGRRKANPHLLREIAEVTMELKRYRKGRSGIDVTQMARKLGGGGVTTSSEIFRRLEGSKNGRWKILNLSGCGSELQDLTALRDLEALEDLDLSECANLELRELMVVLTLRNLRKLRMKRTMVNDMWCSSIGLLKFLVHLEVDGSRGVTDITGLCRLKTLEALSLDSCINITKGFDKICALPQLTSLSLCQTNVTDKDLRCIHPDGKLKVLRYSSCHEITDLTAIGGMRSLEKLSLSGCWNVTKGLEELCKFSNLRELDISGCLVLGSAVVLKNLINLKVLSVSNCKNFKDLNGLERLVNLDKLNLSGCHGVSSLGFVANLSNLKELDISGCESLVCFDGLQDLNNLEVLYLRDVKSFTNVGAIKNLSKMRELDLSGCERITSLSGLETLKGLEELSLEGCGEIMSFDPIWSLHHLRVLYVSECGNLEDLSGLEGITGLEELYLHGCRKCTNFGPIWNLRNVCVVELSCCENLEDLSGLQCLTGLEELYLIGCEEITPIGVVGNLRNLKCLSTCWCANLKELGGLDRLVNLEKLDLSGCCGLSSSVFMELMSLPKLQWFYGFGSRVPDIVLEELKRRGVHIF

SEQ ID NO: 9936 - protein, 630 aa, Trypanosoma brucei brucei
MTGRSTYGMCAVCREPWAEGAVELLPCRHVFCTACVVQRWRCPSCQRRIGGRRKANPHLLREIADVTMELKRYRKGRSGIDVTQMARKLGGGGVTTSSEIFRRLEGSKNGRWKILNLSGCGSELQDLTALRDLEALEDLDLSECANLELRELMVVLTLRNLRKLRMKRTMVNDMWCSSIGLLKFLVHLEVDGSRGVTDITGLFRLKTLEALSLDNCINITKGFDKICALPQLTSLSLCQTNVTDKDLRCIHPDGKLKMLDISSCHEITDLTAIGGVRSLEKLSLSGCWNVTKGLEELCKFSNLRELDISGCLVLGSAVVLKNLINLKVLSVSNCKNFKDLNGLERLVNLEKLNLSGCHGVSSLGFVANLSNLKELDISGCESLVCFDGLQDLNNLEVLYLRDVKSFTNVGAIKNLSKMRELDLSGCERITSLSGLETLKGLEELSLEGCGEIMSFDPIWSLYHLRVLYVSECGNLEDLSGLQCLTGLEEMYLHGCRKCTNFGPIWNLRNVCVLELSCCENLDDLSGLQCLTGLEELYLIGCEEITTIGVVGNLRNLKCLSTCWCANLKELGGLERLVNLEKLDLSGCCGLSSSVFMELMSLPKLQWFYGFGSRVPDIVLKELKRRGVHIF

SEQ ID NO: 9937 - protein, 489 aa, Caenorhabditis elegans
METAERISAAASAASSRRAKRLAQQAHKTHPVIQAKQNQMYLITTLSPAQVDNSLINRVLPKEVLLKVFSFLDTKALCRSAQVCRSWSILALDGSNWQRVDLFTFQRDVKTAVVENLARRCGGFLKELSLKGCENVHDSALRTFTSRCPNLEHLSLYRCKRVTDASCENLGRYCHKLNYLNLENCSSITDRAMKYIGDGCPNLSYLNISWCDAIQDRGVQIILSNCKSLDTLILRGCEGLTENVFGSVEAHMGAIKKLNLLQCFQLTDITVQNIANGATALEYLCMSNCNQISDRSLVSLGQHSHNLKVLELSGCTLLGDNGFIPLARGCRQLERLDMEDCSLISDHTINSLANNCTALRELSLSHCELITDESIQNLASKHRETLNVLELDNCPQLTDSTLSHLRHCKALKRIDLYDCQNVSKEAIVRFQVYVDAVLSYDCIYVPCSTRSTENWYKLTKLTKSDINRAPCAHRVEAQLWYSIKNVLKF

SEQ ID NO: 9938 - protein, 461 aa, Caenorhabditis elegans
METAERISAAASAASSRRAKRLAQQAHKTHPVIQAKQNQMYLITTLSPAQVDNSLINRVLPKEVLLKVFSFLDTKALCRSAQVCRSWSILALDGSNWQRVDLFTFQRDVKTAVVENLARRCGGFLKELSLKGCENVHDSALRTFTSRCPNLEHLSLYRCKRVTDASCENLGRYCHKLNYLNLENCSSITDRAMKYIGDGCPNLSYLNISWCDAIQDRGVQIILSNCKSLDTLILRGCEGLTENVFGSVEAHMGAIKKLNLLQCFQLTDITVQNIANGATALEYLCMSNCNQISDRSLVSLGQHSHNLKVLELSGCTLLGDNGFIPLARGCRQLERLDMEDCSLISDHTINSLANNCTALRELSLSHCELITDESIQNLASKHRETLNVLELDNCPQLTDSTLSHLRHCKALKRIDLYDCQNVSKEAIVRFQHHRPNIEIHAYFAPVTPPTDQVVNRGGMLF

SEQ ID NO: 9939 - protein, 466 aa, Caenorhabditis elegans
METAERISAAASAASSRRAKRLAQQAHKTHPVIQAKQNQMYLITTLSPAQVDNSLINRVLPKEVLLKVFSFLDTKALCRSAQVCRSWSILALDGSNWQRVDLFTFQRDVKTAVVENLARRCGGFLKELSLKGCENVHDSALRTFTSRCPNLEHLSLYRCKRVTDASCENLGRYCHKLNYLNLENCSSITDRAMKYIGDGCPNLSYLNISWCDAIQDRGVQIILSNCKSLDTLILRGCEGLTENVFGSVEAHMGAIKKLNLLQCFQLTDITVQNIANGATALEYLCMSNCNQISDRSLVSLGQHSHNLKVLELSGCTLLGDNGFIPLARGCRQLERLDMEDCSLISDHTINSLANNCTALRELSLSHCELITDESIQNLASKHRETLNVLELDNCPQLTDSTLSHLRHCKALKRIDLYDCQNVSKEAIVRFQHHRPNIEIHAYFAPVTPPTDQVVNRGGICRCCVIL

SEQ ID NO: 9940 - protein, 464 aa, Drosophila melanogaster
MESSSDSCSLSSSTTPDVGLADQQRNMAGSAQDQSEDQSQTFLGATELDDELIKQLPKEVLLRVFSYLDVVSLCRCAQVCKYWNVLALDGSSWQKINLFDFQRDIEGPVIENISQRCRGFLKSLSLRGCQSVGDQSVRTLANHCHNIEHLDLSDCKKITDISTQSISRYCSKLTAINLHSCSNITDNSLKYLSDGCPNLMEINVSWCHLISENGVEALARGCVKLRKFSSKGCKQINDNAIMCLAKYCPDLMVLNLHSCETITDSSIRQLAANCHKLQKLCVSKCADLTDLTLLSLSQHNHLLNTLEVSGCRNFTDIGFQALGRNCKYLERMDLEECSQITDLTLAHLATGCPSLEKLTLSHCELITDDGIRHLTTGSCAAEILSVLELDNCPLITDRTLEHLVSCHNLQRIELFDCQLITRTAIRKLKNHLPNIKVHAYFAPGTPPAVTSGHRPRYCRCCEIL

SEQ ID NO: 9941 - protein, 772 aa, Drosophila melanogaster
MSHKTSNRRSSDLECPLASLGRNSNAVRDHYHHPHPLSSSPLDPQAYKMMSRKSPNPGLEVAEALASRSSTPPSDQAGASSTAAAAAVLHMVQQKAATFELRGRHSRPTEQQTSYGAHSTASVGRHAKKSPELPAPASRNVAPVPQPRNFLTLEHVLQFGTQRPSWMHGNSADTEDSSDNNAGGGGAGSGSGGAGGRRRAQGGRCSVPTVLSSNGSGGNGAQYLLDKKMESLYLGNALRTLPLGAEASQFQNERYYLEDYSSGSGNERLPERLHHPRTSSPSETSGSDRYLLNRSSNSNHLHSKGQSLSDGLCNLGRFSPSLDQGYATLVSPSPTGHHSSGGAGNVTNSTTASGAGIMASSTPTTTPRRGASSNGLGGGAASAIGPPPWNRKGPFRCGPLFDRLPDEAVVRIFSWLDSCELCNVARVCRRFEHLAWRPILWKVISLRGEHLNGDKTLKMIFRQLCGQSCNGACPEVERVMLADGCRISDKGLQLLTRRCPELTHLQLQTCVDITNQALVEALTKCSNLQHLDVTGCSQVSSISPNPHMEPPRRLLLQYLDLTDCMAIDDMGLKIVVKNCPQLVYLYLRRCIQVTDAGLKFVPSFCVSLKELSVSDCLNITDFGLYELAKLGAALRYLSVAKCERVSDAGLKVIARRCYKLRYLNARGCEAVSDDSITVLARSCPRLRALDIGKCDVSDAGLRALAESCPNLKKLSLRSCDMITDRGVQCIAYYCRGLQQLNIQDCPVSIEGYRAVKKYCKRCIIEHTNPGFC

SEQ ID NO: 9942 - protein, 538 aa, Drosophila melanogaster
MATNTELLPFHHQTIAVLNNLNSHCGGSGSNGAATSGGAAIGGAGAGGAPSWAMDELYQQTELPGLTRTGATTTHHHLLRFTPYALHHRPPHHQLQTLPPALYLQHAAAAAAAAAAAAAHAQHHHHHHHHLPHRPASPESPPPVEGTHISNLFPELLEQIFEHLPVRDLGRAAQVCTAWRDAAYAKSVWKGVEAKLHLKRSSPSLFNCLVKRGIKKVQILSLRRSLKDLVLGVPALTSLNLSGCFNVADMNLGHAFSVDLPNLKTLDLSLCKQITDTSLGRIAQHLRNLETLELGGCCNITNTGLLLIAWGLKKLKHLNLRSCWHISDQGIGHLAGFSRETAEGNLQLEYLGLQDCQRLSDEALGHIAQGLTSLKSINLSFCVSVTDSGLKHLARMPKLEQLNLRSCDNISDIGMAYLTEGGSGINSLDVSFCDKISDQALTHIAQGLYRLRSLSLNQCQITDHGMLKIAKALHELENLNIGQCSRITDKGLQTLAEDLTNLKTIDLYGCTQLSSKGIDIIMKLPKLQKLNLGLWLVR

SEQ ID NO: 9943 - protein, 666 aa, Drosophila melanogaster
MSSISAQGVVERASAELSKRINGLGLRSKHHHSSTSSGAGGAGDAASPAGATPTPAAPSGKTSVMERVTNALCGGGNSNSNSGSNSSNSNTSSASATAATSPASNANPPQTPDKPSRGSSPSPGGITMPGGQSQVQNSTHHLLQQQQQQQQHMQLQQSQQQHLQLQASTLINSNHHVMVGPAPPTGMPLGAPPTPTVKSIAKQMNITIPGGGVNPGSPTFSTMGMVAAQKAAASAGGTPLQLRKQLPNPHLHHPYGSMGINAASPLIMQHQLHPPPIHSIEQLMLDDRFLSRFFQYFSPYERRILAQVCIKWRDTLYRSPRYWSGLLPTLQCRELRQMPGCDRGKLYNSLIRRGFHALGLVGASDEDALDVVHSFPLASKHVHSLSLRCSSISDRGLETLLDHLQSLFELELAGCNEVTEAGLWACLTPRIVSLSLADCINIADEAVGAVAQLLPSLYEFSLQAYHVTDAALGYFSPKQSHSLSILRLQSCWELTNHGIVNIVHSLPHLTVLSLSGCSKLTDDGVELIAENLQKLRALDLSWCPRITDASLEYIACDLNQLEELTLDRCVHITDIGVGYISTMLSLTALFLRWCSQVRDFGLQHLCSMRNLQVLSLAGCPLLTSSGLSSLIQLRHLQELELTNCPGASHELFDYLKEHLPRCLIIE

SEQ ID NO: 9944 - protein, 666 aa, Drosophila melanogaster
MSSISAQGVVERASAELSKRINGLGLRSKHHHSSTSSGAGGAGDAASPAGATPTPAAPSGKTSVMERVTNALCGGGNSNSNSGSNSSNSNTSSASATAATSPASNANPPQTPDKPSRGSSPSPGGITMPGGQSQVQNSTHHLLQQQQQQQQHMQLQQSQQQHLQLQASTLINSNHHVMVGPAPPTGMPLGAPPTPTVKSIAKQMNITIPGGGVNPGSPTFSTMSMVAAQKAAASAGGTPLQLRKQLPNPHLHHPYGSMGINAASPLIMQHQLHPPPIHSIEQLMLDDRFLSRFFQYFSPYERRILAQVCIKWRDTLYRSPRYWSGLLPTLQCRELRQMPGCDRGKLYNSLIRRGFHALGLVGASDEDALDVVHSFPLASKHVHSLSLRCSSISDRGLETLLDHLQSLFELELAGCNEVTEAGLWACLTPRIVSLSLADCINIADEAVGAVAQLLPSLYEFSLQAYHVTDAALGYFSPKQSHSLSILRLQSCWELTNHGIVNIVHSLPHLTVLSLSGCSKLTDDGVELIAENLQKLRALDLSWCPRITDASLEYIACDLNQLEELTLDRCVHITDIGVGYISTMLSLTALFLRWCSQVRDFGLQHLCSMRNLQVLSLAGCPLLTSSGLSSLIQLRHLQELELTNCPGASHELFDYLKEHLPRCLIIE

SEQ ID NO: 9945 - protein, 689 aa, Drosophila melanogaster
MSGLEYGLHRYDDLPLEIVLKIFSYLGYSDLQAAGSTCQRWHAALDQAEFNQRTRVCFSKVVLSDQLSPGVDLMRCERRFQHFLFEDVTLGQVKELMRFMGRTAQSLALDNVDLNDKQFYGMLGVLPHLHSLSLKRCLPLFMSGSFLDSYNNSCPDLNDLASNLAGIKELTLCENQYLTDAILMRLTSFMPSLEAINMSGCHIAFHNAIHRRFYPATSSSDHVLPSESVLTFKFILTILNLQRRTLRVLNFSHTLIGQALLALCDLNLQLQRLYLAGCRQLNCTTILNFLATQPQLCALDLSATMCVNDENLAALVQTNPQLEHLKVNGCLSITNAGAIHLAKLKCLKSLDISNCDNLTSSGIIEGIASEENPVIQELNVSYLQICEECIKAIASNLRCLRSLHLNHCVNGATDEAIQSVIGQLRWLRELSLEHCSGLTDAALTGINISKLEMSRKQSGSQVSSMDNFYPPYSNTLAERDSLAGSLQSIKISLRSKAEDEIVRDARRKQAMLAAYEMNLIREDDFEGHNIQQLRGLRSLNLRGCNKISDVSLKYGLKHIELRRLMLSNCQQISLLGMEAMASSCPSIEELDLSDCYNITDKTIQVVTSKLPRLKALHISGCSQLTEHTLDAIITNCSCLQTLSIYRCRSMYTDLEERLSGVKTLRNLNMDNLTSIDNAEFFRLKKRLDY

SEQ ID NO: 9946 - protein, 386 aa, Danio rerio
WCLFPEFLAMIFNYLDVKGKGRVAQVCTAWRDASYHKSVWRGVEAKLHLRRANPSLFPSLQTRGIKKVQILSLRRSLSYVIQGMPNIESLNLSGCYNLTDNGLGHAFVQDIPSLRILNLSLCKQITDSSLGRIAQYLKNLELLDLGGCSNITNTGLLLIAWGLHNLKSLNLRSCRHVSDVGIGHLAGMTRSAAEGCLTLEHLTLQDCQKLTDLSLKHISKGLNKLKGLNLSFCGGISDAGMIHLSHMTQLWTLNLRSCDNISDTGIMHLSMGALRLYGLDVSFCDKVGDQSLAYIAQGLYQLKSLSLCSCHISDDGINRMVRQMHELKTLNIGQCVRITDKGLELIADHLTQLTGIDLYGCTKITKRGLERITQLPCLKVFNLGLW

SEQ ID NO: 9947 - protein, 392 aa, Danio rerio
PEFCCLFPELLAMIFSYLDVRDKGRVAQVCTAWRDASYHKSVWRGVEAKLHLRRANPSLFPSLQARGIRRVQTLSLRRSLSYVIQGMPNIESLNLSGCYNLTDNGLGHAFVQEIPSLRVLNLSLCKQITDSSLGRIAQYLKNLEVLELGGCSNITNTGLLLIAWGLHRLKSLNLRSCRHVSDVGIGHLAGMTRSAAEGCLSLEYLTLQDCQKLTDLSLKHISKGLTKLKVLNLSFCGGISDAGMIHLSHMTSLWSLNLRSCDNISDTGIMHLAMGTLRLSGLDVSFCDKIGDQSLACIAQGLYQLKSLSLCSCHISDDGINRMVRQMHELRTLNIGQCVRITDKGLELIADHLTQLTGIDLYGCTKITKRGLERITQLPCLKVFNLGLWQMT

SEQ ID NO: 9948 - protein, 188 aa, Gallus gallus
LTLQDCQKLSDLSLKHLARGLGRLRQLNLSFCGGISDAGLLHLSHMSSLRSLNLRSCDNISDTGIMHLAMGSLRLSGLDVSFCDKVGDQSLAYIAQGLDGLRSLSLCSCHISDEGINRMVRQMHGLRTLNIGQCVRITDKGLELIAEHLSQLTGIDLYGCTRITKRGLERITQLPCPKVLNLGLWQMT

SEQ ID NO: 9949 - protein, 423 aa, Homo sapiens
MVFSNNDEGLINKKLPKELLLRIFSFLDIVTLCRCAQISKAWNILALDGSNWQRIDLFNFQTDVEGRVVENISKRCGGFLKKLSLRGCIGVGDSSLKTFAQNCRNIEHLNLNGCTKITDSTCYSLSRFCSKLKHLDLTSCVSITNSSLKGISEGCRNLEYLNLSWCDQITKDGIEALVRGCRGLKALLLRGCTQLEDEALKHIQNYCHELVSLNLQSCSRITDEGVVQICRGCHRLQALCLSGCSNLTDASLTALGLNCPRLQILEAARCSHLTDAGFTLLARNCHELEKMDLEECILITDSTLIQLSIHCPKLQALSLSHCELITDDGILHLSNSTCGHERLRVLELDNCLLITDVALEHLENCRGLERLELYDCQQVTRAGIKRMRAQLPHVKVHAYFAPVTPPTAVAGSGQRLCRCCVIL

SEQ ID NO: 9950 - protein, 423 aa, Homo sapiens
MVFSNNDEGLINKKLPKELLLRIFSFLDIVTLCRCAQISKAWNILALDGSNWQRIDLFNFQTDVEGRVVENISKRCGGFLRKLSLRGCIGVGDSSLKTFAQNCRNIEHLNLNGCTKITDSTCYSLSRFCSKLKHLDLTSCVSITNSSLKGISEGCRNLEYLNLSWCDQITKDGIEALVRGCRGLKALLLRGCTQLEDEALKHIQNYCHELVSLNLQSCSRITDEGVVQICRGCHRLQALCLSGCSNLTDASLTALGLNCPRLQILEAARCSHLTDAGFTLLARNCHELEKMDLEECILITDSTLIQLSIHCPKLQALSLSHCELITDDGILHLSNSTCGHERLRVLELDNCLLITDVALEHLENCRGLERLELYDCQQVTRAGIKRMRAQLPHVKVHAYFAPVTPPTAVAGSGQRLCRCCVIL

SEQ ID NO: 9951 - protein, 423 aa, Homo sapiens
MVFSNNDEGLINKKLPKELLLRIFSFLDIVTLCRCAQISKAWNILALDGSNWQRIDLFNFQIDVEGRVVENISKRCGGFLRKLSLRGCIGVGDSSLKTFAQNCRNIEHLNLNGCTKITDSTCYSLSRFCSKLKHLDLTSCVSITNSSLKGISEGCRNLEYLNLSWCDQITKDGIEALVRGCRGLKALLLRGCTQLEDEALKHIQNYCHELVSLNLQSCSRITDEGVVQICRGCHRLQALCLSGCSNLTDASLTALGLNCPRLQILEAARCSHLTDAGFTLLARNCHELEKMDLEECILITDSTLIQLSIHCPKLQALSLSHCELITDDGILHLSNSTCGHERLRVLELDNCLLITDVALEHLENCRGLERLELYDCQQVTRAGIKRMRAQLPHVKVHAYFAPVTPPTAVAGSGQRLCRCCVIL

SEQ ID NO: 9952 - protein, 425 aa, Homo sapiens
SAMVFSNNDEGLINKKLPKELLLRIFSFLDIVTLCRCAQISKAWNILALDGSNWQRIDLFNFQIDVEGRVVENISKRCGGFLRKLSLRGCIGVGDSSLKTFAQNCRNIEHLNLNGCTKITDSTCYSLSRFCSKLKHLDLTSCVSITNSSLKGISEGCRNLEYLNLSWCDQITKDGIEALVRGCRGLKALLLRGCTQLEDEALKHIQNYCHELVSLNLQSCSRITDEGVVQICRGCHRLQALCLSGCSNLTDASLTALGLNCPRLQILEAARCSHLTDAGFTLLARNCHELEKMDLEECILITDSTLIQLSIHCPKLQALSLSHCELITDDGILHLSNSTCGHERLRVLELDNCLLITDVALEHLENCRGLERLELYDCQQVTRAGIKRMRAQLPHVKVHAYFAPVTPPTAVAGSGQRLCRCCVIL

SEQ ID NO: 9953 - protein, 423 aa, Homo sapiens
  unsure (1)..(423): unsure at all Xaa locations
MVFSNNDEGLINKKLPKELLLRIFSFLDIVTLCRCAQISKAWNILALDGSNWQRIDLFNFQIDVEGRVVENISKRCVGFLRKLSLRGCIGVGDSSLKTFAQNCRNIEHLNLNGCTKITDSTCYSLSRFCSKLKHLXLTSCVSITNSSLKGISEGCRNLEYLNLSWCDQITKDGIEALVRGCRGLKALLLRGCTQLEDEALKHIQNYCHELVSLNLQSCSRITDEGVVQICRGCHRLQALCLSGCSNLTDASLTALGLNCPRLQILEAARCSHLTDAGFTLLARNCHELEKMDLEXCILITDSTLIQLSIHCPKLQALSLSHCELIXDDGILHLSNSTCGHERLRVLELDNCLLITDVALXHLENCRGLERLELYDCQQVTRAGIKRMRAQLPHVKVHAYFAPVTPPTAVAGSGQRLCRCCVIL

SEQ ID NO: 9954 - protein, 436 aa, Homo sapiens
MRRDVNGVTKSRFEMFSNSDEAVINKKLPKELLLRIFSFLDVVTLCRCAQVSRAWNVLALDGSNWQRIDLFDFQRDIEGRVVENISKRCGGFLRKLSLRGCLGVGDNALRTFAQNCRNIEVLNLNGCTKTTDATCTSLSKFCSKLRHLDLASCTSITNMSLKALSEGCPLLEQLNISWCDQVTKDGIQALVRGCGGLKALFLKGCTQLEDEALKYIGAHCPELVTLNLQTCLQITDEGLITICRGCHKLQSLCASGCSNITDAILNALGQNCPRLRILEVARCSQLTDVGFTTLARNCHELEKMDLEECVQITDSTLIQLSIHCPRLQVLSLSHCELITDDGIRHLGNGACAHDQLEVIELDNCPLITDASLEHLKSCHSLERIELYDCQQITRAGIKRLRTHLPNIKVHAYFAPVTPPPSVGGSRQRFCRCCIIL

SEQ ID NO: 9955 - protein, 483 aa, Homo sapiens
YGSEGKGSSSISSDVSSSTDHTPTKAQKNVATSEDSDLSMRTLSTPSPALICPPNLPGFQNGRGSSTSSSSITGETVAMVHSPPPTRLTHPLIRLASRPQKEQASIDRLPDHSMVQIFSFLPTNQLCRCARVCRRWYNLAWDPRLWRTIRLTGETINVDRALKVLTRRLCQDTPNVCLMLETVTVSGCRRLTDRGLYTIAQCCPELRRLEVSGCYNISNEAVFDVVSLCPNLEHLDVSGCSKVTCISLTREASIKLSPLHGKQISIRYLDMTDCFVLEDEGLHTIAAHCTQLTHLYLRRCVRLTDEGLRYLVIYCASIKELSVSDCRFVSDFGLREIAKLESRLRYLSIAHCGRVTDVGIRYVAKYCSKLRYLNARGCEGITDHGVEYLAKNCTKLKSLDIGKCPLVSDTGLECLALNCFNLKRLSLKSCESITGQGLQIVAANCFDLQTLNVQDCEVSVEALRFVKRHCKRCVIEHTNPAFF

SEQ ID NO: 9956 - protein, 491 aa, Homo sapiens
MGANNGKQYGSEGKGSSSISSDVSSSTDHTPTKAQKNVATSEDSDLSMRTLSTPSPALICPPNLPGFQNGRGSSTSSSSITGETVAMVHSPPPTRLTHPLIRLASRPQKEQASIDRLPDHSMVQIFSFLPTNQLCRCARVCRRWYNLAWDPRLWRTIRLTGETINVDRALKVLTRRLCQDTPNVCLMLETVTVSGCRRLTDRGLYTIAQCCPELRRLEVSGCYNISNEAVFDVVSLCPNLEHLDVSGCSKVTCISLTREASIKLSPLHGKQISIRYLDMTDCFVLEDEGLHTIAAHCTQLTHLYLRRCVRLTDEGLRYLVIYCASIKELSVSDCRFVSDFGLREIAKLESRLRYLSIAHCGRVTDVGIRYVAKYCSKLRYLNARGCEGITDHGVEYLAKNCTKLKSLDIGKCPLVSDTGLECLALNCFNLKRLSLKSCESITGQGLQIVAANCFDLQTLNVQDCEVSVEALRFVKRHCKRCVIEHTNPAFF

SEQ ID NO: 9957 - protein, 523 aa, Homo sapiens
RSRRAGFPRAERAGRAPQLWSVPGDGGHDGYRMGANNGKQYGSEGKGSSSISSDVSSSTDHTPTKAQKNVATSEDSDLSMRTLSTPSPALICPPNLPGFQNGRGSSTSSSSITGETVAMVHSPPPTRLTHPLIRLASRPQKEQASIDRLPDHSMVQIFSFLPTNQLCRCARVCRRWYNLAWDPRLWRTIRLTGETINVDRALKVLTRRLCQDTPNVCLMLETVTVSGCRRLTDRGLYTIAQCCPELRRLEVSGCYNISNEAVFDVVSLCPNLEHLDVSGCSKVTCISLTREASIKLSPLHGKQISIRYLDMTDCFVLEDEGLHTIAAHCTQLTHLYLRRCVRLTDEGLRYLVIYCASIKELSVSDCRFVSDFGLREIAKLESRLRYLSIAHCGRVTDVGIRYVAKYCSKLRYLNARGCEGITDHGVEYLAKNCTKLKSLDIGKCPLVSDTGLECLALNCFNLKRLSLKSCESITGQGLQIVAANCFDLQTLNVQDCEVSVEALRFVKRHCKRCVIEHTNPAFF

SEQ ID NO: 9958 - protein, 418 aa, Homo sapiens
METHISCLFPELLAMIFGYLDVRDKGRAAQVCTAWRDAAYHKSVWRGVEAKLHLRRANPSLFPSLQARGIRRVQILSLRRSLSYVIQGMANIESLNLSGCYNLTDNGLGHAFVQEIGSLRALNLSLCKQITDSSLGRIAQYLKGLEVLELGGCSNITNTGLLLIAWGLQRLKSLNLRSCRHLSDVGIGHLAGMTRSAAEGCLGLEQLTLQDCQKLTDLSLKHISRGLTGLRLLNLSFCGGISDAGLLHLSHMGSLRSLNLRSCDNISDTGIMHLAMGSLRLSGLDVSFCDKVGDQSLAYIAQGLDGLKSLSLCSCHISDDGINRMVRQMHGLRTLNIGQCVRITDKGLELIAEHLSQLTGIDLYGCTRITKRGLERITQLPCLKVLNLGLWQMTDSEKEARGDFSPLFTVRTRGSSRR

SEQ ID NO: 9959 - protein, 707 aa, Homo sapiens
MTPELMIKACSFYTGHLVKTHFCTWRDIARTNENVVLAEKMNRAVTCYNFRLQKSVFHHWHSYMEDQKEKLKNMLLRIQQIIYCHKLTIILTKWRNTARHKSKKKEDELILKHELQLKKWKNRLILKRAAAEESNFPERSSSEVFLVDETLKCDISLLPERAILQIFFYLSLKDVIICGQVNHAWMLMTQLNSLWNAIDFSSVKNVIPDKYIVSTLQRWRLNVLRLNFRGCLLRPKTFRSVSHCRNLQELNVSDCPTFTDESMRHISEGCPGVLCLNLSNTTITNRTMRLLPRHFHNLQNLSLAYCRRFTDKGLQYLNLGNGCHKLIYLDLSGCTQISVQGFRYIANSCTGIMHLTINDMPTLTDNCVKALVEKCSRITSLVFTGAPHISDCTFRALSACKLRKIRFEGNKRVTDASFKFIDKNYPNLSHIYMADCKGITDSSLRSLSPLKQLTVLNLANCVRIGDMGLKQFLDGPASMRIRELNLSNCVRLSDASVMKLSERCPNLNYLSLRNCEHLTAQGIGYIVNIFSLVSIDLSGTDISNEAFCKSSLILEHLDVSYCSQLSDMIIKALAIYCINLTSLSIAGCPKITDSAMEMLSAKCHYLHILDISGCVLLTDQILEDLQIGCKQLRILKMQYCTNISKKAAQRMSSKVQQQEYNTNGPPRWFGYDREGNPVTELDNITSSKGALELTVKKSTYSSEDQAA

SEQ ID NO: 9960 - protein, 381 aa, Homo sapiens
IFSNLSLDERCLSASLVCKYWRDLCLDFQFWKQLDLSSRQQVTDELLEKIASRSQNIIEINISDCRSMSDNGVCVLAFKCPGLLRYTAYRCKQLSDTSIIAVASHCPLLQKVHVGNQDKLTDEGLKQLGSKCRELKDIHFGQCYKISDEGMIVIAKGCLKLQRIYMQENKLVTDQSVKAFAEHCPELQYVGFMGCSVTSKGVIHLTKLRNLSSLDLRHITELDNETVMEIVKRCKNLSSLNLCLNWIINDRCVEVIAKEGQNLKELYLVSCKITDYALIAIGRYSMTIETVDVGWCKEITDQGATLIAQSSKSLRYLGLMRCDKVRVDYQVVCFLHISIVNSLMSYPLSFSISTPVYYILYIHFICIYAIIAMHCLPAFVN

SEQ ID NO: 9961 - protein, 250 aa, Homo sapiens
WEALVRGCRGLKALLLRGCTQLEDEALKHIQNYCHELVSLNLQSCSRITDEGVVQICRGCHRLQALCLSGCSNLTDASLTALGLNCPRLQILEAARCSHLTDAGFTLLARNCHELEKMDLEECILITDSTLIQLSIHCPKLQALSLPHCELITDDGILHLSNSTCGHERLRVLELDNCLLITDVALEHLENCRGLERLELYDCQQVTRAGIKRMRAQLPHVKVHAYFAPVTPPTAVAGSGQRLCRCCVIL

SEQ ID NO: 9962 - protein, 319 aa, Prunus mume
MENFPIINLEGLNGEGRKATMEKIKDACENWGFFELVSHGIPTEFLDTVERLTKEHYRQCLEQRFKELVASKGLEAVKTEVNDMDWESTFYLRHLPKSNISEVPDLEDQYRNVMKEFALKLEKLAEQLLDLLCENLGLEKGYLKKAFYGTNGPTFGTKVSNYPPCPNPELIKGLRAHTDAGGLILLFQDDKVSGLQLLKDGQWIDVPPMRHSIVINLGDQLEVITNGKYRSVEHRVIAQTDGTRMSIASFYNPGSDAVIYPAPTLVEKEAEEKNQVYPKFVFEDYMKLYAGLKFQPKEPRFEAMKAVETNISLVPIATA

SEQ ID NO: 9963 - protein, 319 aa, Populus euramericana
MEFPVISMEKLNGEERAATMEKIKDACENWGFFELLNHGISHEFLDTVERMTKEHYKKCMEQRFKELVASKALDGVQTEIKDLDWESTFQLRHLPKSNIAEIPDLDDEYRKVMKEFALKLEKLAEELLDLLCENLGLEKGYLKRAFYGSNGSPTFGTKVSNYPPCPKPDLVKGLRAHTDAGGIILLFQDDKVSGLQLLKDGQWIDVPPMRHSIVVNLGDQLEVITNGKYKSVEHRVIAQTDGTRMSVASFYNPGSEAVIYPAPALVEKEAEEKKKVYPKFVFDDYMKLYAGLKFQAKEPRFEAMKAVETTVNLGPIATA

SEQ ID NO: 9964 - protein, 412 aa, Rhodopseudomonas palustris
MRQPRPPTTDNSVGKTNSERPQQRNNSSRPTLINSTTDAIFDEASTACRPVRIIRSSRHSWSQSMTASPSQLPVLDLSRFRSDTAERAEFLRDVRDAAFGPGFFYLVGHGISDRLIRDVLFASRNFFALPEADKLDIEMINSPHFRGYTRAGREFTRGQPDWREQLDVGAEREAFPLSRSAPPWTRLQGPNQWPDALPELKPLLLRYQQEVTELAIKVLRVFAAALGQAEDVFEPIYVPSPNQLIKIIRYPGRAADESDQGVGTHKDSGFVTILLQDTVAGLQVETADGWIDAPPLPGSFVVNIGEILELASNGALRANVHRVVSPPPDTDRLSVAFFLGARLDATVPVLTLPPELADYARGVTQDPQNPLFRDVGRNYLKGRLRSHPDVAERHHADLLDEYAIKPGLAAAY

SEQ ID NO: 9965 - protein, 345 aa, Rhodospirillum rubrum
MTMGWDGARQGPPVLSLKAGEGEAARRDEFLATLRQAARDPGAFYLEGHGIDPSVIDQVEALSRRFFALPEDEKRAIDMVNSPHFHGYTRVGAELTRGAPDWREQLDIGSERPLLPQGPDTPAWARLQGPNQWPAALPDLRAAVLRLQAELTAVALALLERIALALGERADFFADLYEGGPDQLLKIIRYPGRAAGEGDQGVGPHKDSGLLTFVLQRDRGGLQIEREGHWVDVPPRPGTFAVNIGELLELATNGYLKATVHRVVSPPADSDRLSIAFFLGARLGSKVPLLDLPPDLAALATGPERDPDNPLFLDVGENRLKGRLRSHPDVARRHYADLLGPDGPS

SEQ ID NO: 9966 - protein, 339 aa, Hordeum vulgare subsp. vulgare
MENILHATPAHVSLPESFVFASDKVPPATKAVVSLPIIDLSCGRDEVRRSILEAGKELGFFQVVNHGVSKQVMRDMEGMCEQFFHLPAADKASLYSEERHKPNRLFSGATYDTGGERYWRDCLRLACPFPVDDSINEWPDTPKGLRDVIEKFTSQTRDVGKELLRLLCEGMGIRADYFEGDLSGGNVILNINHYPSCPNPDKALGQPPHCDRNLITLLLPGAVNGLEVSYKGDWIKVDPAPNAFVVNFGQQLEVVTNGLLRSIEHRAMTNSVLARTSVATFIMPTQECLIGPAKEFLSEENPPCYRTIMFRDFMRIYNVVKLGSSLNLTTNLKNVQKEI

SEQ ID NO: 9967 - protein, 339 aa, Hordeum vulgare subsp. vulgare
MENILHATPAPVSLPESFVFASDKVPPATKAVVSLPIIDLSCGRDEVRRSILEAGKELGFFQVVNHGVSKQVMRDMEGMCEQFFHLPAADKASLYSEERHKPNRLFSGATYDTGGEKYWRDCLRLACPFPVDDSINEWPDTPKGLRDVIEKFTSQTRDVGKELLRLLCEGMGIRADYFEGDLSGGNVILNINHYPSCPNPDKALGQPPHCDRNLITLLLPGAVNGLEVSYKGDWIKVDPAPNAFVVNFGQQLEVVTNGLLKSIEHRAMTNSALARTSVATFIMPTQECLIGPAKEFLSKENPPCYRTTMFRDFMRIYNVVKLGSSLNLTTNLKNVQKEI

SEQ ID NO: 9968 - protein, 261 aa, Psidium guajava
NWGFFELVNHGIPPEMMDTIERMTKGHYKKCMEQRFRELVVSKGLEYVQKEVHDLDWESTFHLKHLPESNISQISDLDDDYRKVMKEFAVKLEKLAEQLLDLLCENLGLEKGYLKKAFYGSNGPTFGTKVSNYPPCPKPDLIKGLRAHTDAGGIILLFQDDKVSGLQLLKDGQWVDVPPMHHSIVVNLGDQLEVITNGKYKSVLHRVVAQTDGNRMSIASFYNPSTDAVIYPAPALVEREEEEAGKGTYPKFVFEDYMKLR

SEQ ID NO: 9969 - protein, 277 aa, Rosa hybrid cultivar
ACENWGFFELVNHGISHELMDKVEKLTKEHYRKCVEQRFKEMVASKGLESVNSEIEDLDWESTFFLRHLPFSNISQIPDLDEDYREAMKEFAVELEKLAEKLLDLLCENLGLDKGYLKKAFYGSEGPNFGTKVSNYPPCPKPDLIKGLRAHTDAGGIILLFQDDKVSGLQLLKDDQWIDVPPMHHSIVINLGDQLEVITNGKYKSVMHRVIAQPDGNRMSIASFYNPGNDAFISPAPAMLEKQTEECPTYPKFVFDDYMKLYAGLKFQAKEPRFEAM

SEQ ID NO: 9970 - protein, 187 aa, Thujopsis dolabrata
ICTYFAQPLHQRDYSRWPLKPEGWREIVDKYSEALMGLASKMLAIVSEALGLEPDAVTKACVEMDQKVVINYYPKCPEPDMTLGLKRHTDPGTITLLLQDQVGGLQATKDDGLNWITVQPVQGAFVVNLGDHMHFLSNGKFKTADHQAVVNSNYSRLSIATFQNPSQDAIVYPLKLEEGEECFMEEP

SEQ ID NO: 9971 - protein, 187 aa, Thujopsis dolabrata
ICTYFAQPLHQRDYSRWPLKPEGWREIVDKYSEALMDLASKMLTIVSEALGLEPDAVTKACVEMDQKVVINYYPKCPEPDMTLGLKRHTDPGTITLLLQDQVGGLQATKDNGLNWITVQPVQGAFVVNLGDHMHYLSNGKFKTADHQAVVNSNYSRLSIATFQNPSQEAIVYPLKLEEGEECFMEEP

SEQ ID NO: 9972 - protein, 317 aa, Vigna radiata
MANFPVVDMGKLNTEERGTAMEMIKDACENWGFFELVNHGISIELMDTVEKLTKEHYKKTMEQRFKEMVANKGLESVQSEINDLDWESTFFLRHLPVSNVSENTDLDQDYRKIMKQFAEELEKLAEHLLDLLCENLGLEKGYLKKVFYGSKGPNFGTKVSNYPPCPTPDLIKGLRAHTDAGGIILLFQDDKVSGLQLLKDDQWIDVPPMRHSIVINLGDQLEVITNGKYKSVMHRVIAQTDGTRMSLASFYNPGDDAVISPAPALVKESDETSQVYPKFVFNDYMKLYAGLKFQAKEPRFEAMKAVSSVDVGAIATV

SEQ ID NO: 9973 - protein, 308 aa, Vigna radiata
PVVDMKNLNNEERGATMEKIKDACENWGFFEVVNHGISIELMDSVDRLTKEHYKRCMEERFKEMVASKGLECAESEINDLDWESTFFLRHLPVSNISEIPDLADDYRKVMKDFAVELEKLAELVLELVCENLGLEKGYLKKAFYGSKGPNFGTKVSNYPPCPKPELIKGLRAHTDAGGIILLFQDHKVSGLQLFKDGHWIDVPPMRHSIVVNLGDQLEVITNGKYKSVMHRVITQTDGNRMSIASFYNPGNDAVIAPAEALVKEDESSKVYPKFVFDDYMKLYAGLKFQAKEPRFEAMKAIDGPIATV

SEQ ID NO: 9974 - protein, 272 aa, Juglans nigra
EDERPKVAYNQFSTEIPIISLAGIDEVHGRRTEICQKIVEACEDWGIFQVVDHGVDASLISDMTRLARDFFAMPPEEKLRFDMSGGKKGGFIVSSHLQGEAVQDWREIVTYFSYPIRTRDYSRWPDKPEGWRKVTEEYSDKLMGLACKLLEVLSEAMGLEKEALTKACVDMDQKVVVNYYPKCPQPDLTLGLKRHTDPGTITLLLQDQVGGLQATRDGGKTWITVQPVEGAFVVNLGDHGHFLSNGRFKNADHQAVVNSNYSRLSIATFQNP

SEQ ID NO: 9975 - protein, 164 aa, Datura ferox
FSSKLPWKETLSFRYSAQKDSSHIVEEYFQRTLGESFNHLGNTYQEYCNSMSTLSLGIMELLGMSLGVEKNHFKEFFEENESIMRLNYYPPCQKPELTLGTGPHCDPTSLTILHQDCVGGLQVFVDNEWRSISPNFNAFVVNIGDTFMALSNGRYKSCLHRAVV

SEQ ID NO: 9976 - protein, 94 aa, Vaccinium myrtillus
QMKINYYPKCPQPELALGVEAHTDVSALTFILHNVVPGLQLFYEGKWVTAKCVPNSIIMHIGDTVEILSNGKCKSILHRGLVNKEKVRISWAVF

SEQ ID NO: 9977 - protein, 309 aa, Yersinia pestis KIM
MRHAARDVGFFYLTGHGIDTSLLRQIQILSRQFFALSDEEKLSIAMIRSPHFRGYNRAASEFTRGQPDWREQFDIGAERTPLPQIAGAPSWTRLQGPNQWPTALPELKPVLLQWQEEMTRMSLRLLRAFALALDLDEQAFDALYGDKPNEHIKLIRYPGREATQSGQGVGAHKDSGFLSFLLQDTQRGLQVEVEEGQWIDAVPREGTFVVNIGELLELASNGYLRATVHRVETPPAGIDRLSIAFFLGARLDAVVPLYPLSAALAAEARGPASDPHNPLFRDVGLNYLKGRLRSHPDVAERYYSDALCS

SEQ ID NO: 9978 - protein, 342 aa, Magnetospirillum magnetotacticum
DLRYGCELPVLDLRRFDGGDAERAAFLDDLRVAARDVGFFYLTGHGLPDTELAAIQALARRFFALPLPEKRAVAMVHSPHFRGYTEAGREITRGRPDWREQFDAGAERTVLPWHPGLPAWTRLQGPNLWPDSLPDLRTGVLAWQEAVTGIGIRLLRAFALSLGQPADAFEPIYAGAPNQHLKIIRYPGRDEAEDAQGVGAHKDSGFLTLLLQDGEGGLEVEGEDGGWIAAAPVEGAFVVNVGELLELASNGFLRATVHRVVAPAAGRDRLSVAFFLGARHDATVPLLSLPPDLAAQARGPASDPDNPLFREVGRNYLKGRLRSHPDVAARHYADLVEDVRAA

SEQ ID NO: 9979 - protein, 321 aa, Stellaria longipes
MENFPIINMENIERKNTRDMIKDACENWGFFELVNHGIPHSLLDKMEKLTKDHVRKCLEERFKEMVASKGLEAVEAEVTDLDWESIFFLKHLPVSSISELPDLDEEYREVMIDFSKRKEKKAETKKDKKCENKGKEKSYLKNTFYGSKGPNFGTSVSNYPPLPKPDLIKGLSAHTDAGGIILLSEDDKVSGLELLKDGDWIDVPPMRHSIVVNLGDELEVITNGKYWSVEHRVQIDTNITRMSTASFYVPGNDRVIAPAEALPKEFKKDEVYPKFVFKSYMKAYAKLIRQSGLKFEAKEPRFEAMKAHRIGSSCNSHLEHD

SEQ ID NO: 9980 - protein, 324 aa, Stellaria longipes
MENFPIINMENIERKNTRDMIKDACENWGFFECVNHGIPHSLLDKMEKMEKLTKDHVRECLEERFKEMVASKGLEGVESEVTDLDWESIFFLKHLPVSSISELPDLDEEYREVMIDFSKRKEKKAETKKDKKCENKGKEKSYLKNTFYGSKRPNFGTSVSNYPPLPKPDLIKGLSAHTDAGGIKLLSEDDKVSGLELLKDSDWIDVPPMRHSIVVNLGDELEVITNGKYWSVMHRVQIDTNITRMSTASFYVPGNDRVIAPAEALPKEFKDDEVYPKFVFKSYMKAYAKLIRQSGLKFEAKEPRFEAMKAHRIGSSCNSHLEHD

SEQ ID NO: 9981 - protein, 160 aa, Stellaria longipes
VSNYPPLPKPDLIKGLSAHTDAGGIILLSEDDKVSGLELLKDSDWIDVPPMRHSIVVNLGDELEVITNGKYWSVMHRVQIDTNITRMSTASFYVPGNDRVIAPAEALPKEFKDDEVYPKFVFKSYMKAYAKLIRQSGLKFEAKEPRFEAMKAHRIGSSCN

SEQ ID NO: 9982 - protein, 345 aa, Streptomyces avermitilis MA-4680
MTNTATTPSYQRYQQLPIIDLSAADRGPQARALLHAQLHSAAHDVGFFQLVGHGVTQAETDELLRAMHAFFALPEADRLAIDNVNSPHFRGYTRTGDERTGGSRDWRDQLDIGAERPVRTPGPGEPAYWWLEGPNQWPAALPELRTAALAWIDKLSAVAQRLLHELLTAIGAPAGFYDPVFGEHAHPHLKLVRYPGSAGDGADQGVGAHKDYGFLTLLLQDQVGGLQVQREDGLFHEVPPLPGAFVVNLGELLEVATNGYLLATNHRVVSPPGATERFSVPFFYNPRLDARVEPLPFPHASTAPGVTDDPANPLFAEYGLNELKGKLRAHPLVAARHHAELLTPA

SEQ ID NO: 9983 - protein, 324 aa, Streptomyces avermitilis MA-4680
MSDARTPRIPTVDLRPWLSGDPDARARIARTVDDALRTAGFLLVTGHGVDPSLRTRIRVAARAFFTLPAETKQRYAARVGGRGWLGPGAEANGYSEGTETPPDLKESLTFATHEPFEDPETNAEWYAPNVWPAEAPELREPCEEYLAEMAGLEDRLLTLLGEALGLEPDFFTKHMTHPTYGFNINWYPGTEVTGDPAPGQFRIGPHTDFGTVTILDRQAGKGGLQVYTDDGGWADAPFDPAAFTINIGDLMARWTGDRWRSGRHRVLPPPADAPAEELMSLVYFGECTPGTLVESVPAPVGRVAYEPVDSHTYLREKLNSITVD

SEQ ID NO: 9984 - protein, 313 aa, Pyrus communis
MATFPVVDLSLVNGEERVATLEKINDACENWGFFELVNHGMSTELLDTVEKMTKDHYKKTMEQRFKEMVAAKGLDAVQSDIHDLDWESTFFLRHLPSNISEVPDLEEDYRKTMKEFAVELEKLAEKLLDLLCENLGLEKGYLKKVFYGSKGPNFGTKVSNYPPCPKPDLIKGLRAHSDAGGIILLFQDDKVSGLQLLKDGDWVDVPPMHHSIVINLGDQIEVITNGKYKSVMHRVIAQSDRDRMSIASFYNPGDDAFISPAPAVLEKKTEDAPTYPKFVFDDYMKLYSGLKFQAKEPRFEAMKAKESTLVATT

SEQ ID NO: 9985 - protein, 319 aa, Citrus sinensis
MENFPVISLENINGAERAAILEKINEACEKWGFFELVNHGIEPEFMDTVERLTKAHYRKCMEQRFKELVASRALEGIQTEVNDMDWESTFYVRHLPQSTINEVPDLDEEYRKVMKEFALKLEKLAEELLDLLCENLGIEKGYLKKVFHGANGPTFGTKVSNYPPCPKPDLIKGLRAHTDAGGIILLFQDDKVSGLQLLKDGQWIDVPPLRHSIVVNLGDQIEVITNGKYKSVEHRVVSQTDGEGRMSLASFYNPGSDAVIYPAPALLEKEAEKKQVYPKFVFEDYMKLYVPLKFQAKEPRFEAMKAVETNVNLGPIATA

SEQ ID NO: 9986 - protein, 130 aa, Citrus sinensis
LRAHTDAGGIILLFQDDKVSGLQLLKDGQWIDVPPLRHSIVVNLGDQIEVITNGKYKSVEHRVVSQTDGEGRMSLASSYNPGSDAVIYPAPALLEKEAEKKQVYPKFVFEDYMKLYVPLKFQAKEPRFEA

SEQ ID NO: 9987 - protein, 319 aa, Fagus sylvatica
MENFPVINLEKLNGEERGTTMEKIKDACENWGFFELVNHGLPHELLDTVERLAKEHYKKCMEQRFKELVTAQGLEGVQTEVNDLDWESTFHVRHLPQSNISEIPDLEDEYRKVMKEFALKLEKLAEELLDLLCENLGLEKGYLKKAFHGSKGPNFGTKVSNYPPCPKPDLIKGLRAHTDAGGIILLFQDDKVSGLQLLKDGQWIDVPPMRHSIVINLGDQLEVITNGKYKSVLHRVIAQTNGNRMSIASFYNPGGDAVIYPATALVEKEAEEKNNVYPKFVFEDYMKLYAGLKFQAKEPRFEAMKAVESNVTVGPIATA

SEQ ID NO: 9988 - protein, 280 aa, Fagus sylvatica
DACENWGFFELVNHGLPHELLDTVERLTKEHYKKCMEQRFKELVTAKGLEGVQTEVNDLDWESTFHVRHLPQSNISEIPDLEDEFRKVMKEFALKLEKLAEELLDLLCENLGLEKGYLKKAFHGSKGPNFSTKVSNYLPCPKPDLNKGLRAHTDAGGIILLFQDDKVSGLQLLKDGQWIDVPPMRHSIVINLGDQLEVITNGKYKSVLHRVIAQTNGNRMSIASFYNPGGDAVIYPATALVEKEAEEKNNVYPKFVFEDYMKLYAGLKFQAKEPRFEAMK

SEQ ID NO: 9989 - protein, 187 aa, Glyptostrobus lineatus
ICTYFAQPLHQRDYTRWPEKPEGWREIVDKYSEALMGLASKLLGIVSEALGLEPEAVTKACVEMDQKVVINYYPKCPQPDMTLGLKRHTDPGTITLLLQDQVGGLQATKDDGLNWITVEPVQGAFVVNLGDHMHFLSNGKFKTADHQAVVNSNYSRLSIATFQNPSQEAIVYPLKLEEGEQSFMEEP

SEQ ID NO: 9990 - protein, 187 aa, Glyptostrobus lineatus
ICTYFAQPLHQRDYTRWPEKPEGWREIVDKYSEALMGLASKLLAIISEALGLEPEAVTKACVEMDQKVVINYYPKCPQPDMTLGLKRHTDPGTITLLLQDQVGGLQATKDDGLNWITVEPVQGAFVVNLGDHMHYLSNGKFKTADHQAVVNSNYSRLSIATFQNPSQEAIVYPLKLEEGEQSFMEEP

SEQ ID NO: 9991 - protein, 187 aa, Sequoia sempervirens
ICTYFAQPLHQRDYTRWPEKPEGWREIVDKYSETLMGLATKLLAIVSEALGLEPEAVTKACVEMDQKVVINYYPKCPQPDMTLGLKRHTDPGTITLLLQDQVGGLQATKDNGVNWITVEPVQGAFVVNLGDHMHYLSNGKFKSADHQAVVNSNSSRLSIATFQNPSQEAIVYPLKLEEGEQSFMEEP

SEQ ID NO: 9992 - protein, 187 aa, Taxodium distichum
ICTYFAQPLHQRDYTRWPEKPEGWREIVDKYSEALMGLASKLLAIISEALGLDPEAVTKACVEMDQKVVINYYPTCPQPDMTLGLKRHTDPGTITLLLQDQVGGLQATKDDGLNWITVQPVQGAFVVNLGDHMHYLSNGKFKTADHQAVVNSNCSRLSIATFQNPSQEAIVYPLKLEEGEQSFMEEP

SEQ ID NO: 9993 - protein, 293 aa, Vitis vinifera
DACENWGFFELVNHGISHELMDTVEKLTKEHYKKCMEQRFKEMVASKGLEAVQSEINDLDWESTFFLRHLPTSNMSEIPDLEEDYRKAMKEFTAHLEKLAELLLDLLCENLGLEKGYLKKAFYGSQGPSFGTKVSNYPPCPQPELIKGLRAHTDAGGIILLFQDDKVSGLQLLKDGQWIDVPPMRHSIVISLGDQLEVITNGKYKGVMHRVIAQTDGNGMSLASFYNPGSDAVIYPAPALVEKEKETSEVYPKFVFEDYMKLYAGLKFQAKEPRFEAMKAMEPTVNLGPIATV

SEQ ID NO: 9994 - protein, 323 aa, Mangifera indica
MESLSFPVINLEKLNGEERAATMEKIKDACENWGFFELVNHGIPIEELDTLERKTKEHYRKCMEQRFKELVASKALEGVQTEIKDMDWESTFYVRHLPQTNLKCTPDLDDEYRKVMKEFASKLEKLAEELLDLLCENLGLEKGYLKKTFYGSKGPTFGTKVSHYPPCPQPDLIKGLRAHTDADGIILLFQDDKVSGLPASERWAVDIDVPPMRHSIVVNLGDQLEVITNGKYKSVEHRVVAQRDGNGRMSIASFYNPGSDAVIYPAPPLLEPEAEEKKQVYPKFVCEDYMKLYARLKFQAKEPRFEAMKAVETTVNLGPIATA

SEQ ID NO: 9995 - protein, 343 aa, Atropa belladonna
MATLVSNWSTNNVSESFVAPLEKRAENDVPLGNDVPIIDLQQDHLVVVQQITKACQDFGLFQVINHGLPEKLMAETMDVCKEFFALPAEEKEKLQPKGEPAKFELPLEQKAKLYVEGEQLSDEAFLYWKDTLAHGCHPLDEELVNSWPEKPATYREVVAKYSVEVRKLTMRILDYICEGLGLKLGYFDNELSQIQMMLTNYYPPCPDPSSTLGSGGHYDGNLITLLQQNLPGLQQLIEDAKWIAVEPIPTAFVVNLGLTLKVITNEKFEGSIHRVVTNPTRDRVSIATLIGPDYSCTIEPAKELLSQDNPPLYKPYSYAEFGEIYLSDKSDYDAGVKPYKINA

SEQ ID NO: 9996 - protein, 187 aa, Cryptomeria japonica
ICTYFAQPLHQRDYTRWPDKPEGWREIVDKYSEALMGLASKLLQIVSEALGLEPEAVTKACVEMDQKVVINYYPKCPQPDMTLGLKRHTDPGTITLLLQDQVGGLQATKDDGLNWITVEPVQGAFVVNLGDHMHFLSNGKFKTADHQAVVNSNYSRLSIATFQNPSQEAIVYPLKLEEGEQSFMEEP

SEQ ID NO: 9997 - protein, 187 aa, Cryptomeria japonica
ICTYFAQPLHQRDYTRWPEKPEGWREIVDKYSEVLMGLASKLLAIISEALGLEPEAVTKACVEMDQKVVINYYPKCPQPDMTLGLKRHTDPGTITLLLQDQVGGLQATKDDGLNWITVEPVQGAFVVNLGDHMHYLSNGKFKTADHQAVVNSNYSRLSIATFQNPSQGAIVYPLKLEEGEQSFMEEP

SEQ ID NO: 9998 - protein, 320 aa, Persea americana
MDSFPVINMEKLEGQERAATMKLINDACENWGFFELVNHSIPVELMDEVERLTKEHYKKCMEQRFKELMASKVEGAVVDANDMDWESTFFIRHLPVSNLSEIPDLTDEHRKVMKEFAEKLEKLAEQVLDLLCENLGLEKGYLKMAFAGTTTGLPTFGTKVSNYPPCPRPELFKGLRAHTDAGGLILLFQDDRVAGLQLLKDGEWVDVPPMNHSIVINLGDQVEVITNGKYKSVMHRVVAQTDGNRMSLASFYNPGSDAVIFPAPALVEKEAEEKKEVYPKFVFEDYMNLYAGLKFQAKEPRFEVMKMKAVETANLSPITT

SEQ ID NO: 9999 - protein, 318 aa, Betula pendula
MATFPVIDMEKLNGEERGATMELIEDACENWGFFELVNHGISHDLLDTVEKLNKEHYRKCMEERFKDMVASKGLEAAQSEVRDMDWESTFFLRHLPASNMSEIPDLDEDYRKAMKEFAGNLEKLAEQLLDLLCENLGLEKGYLKKSFYGSKGPNFGTKVSNYPPCPKPELIQGLRAHTDAGGLILLFQDDKVSGLQLLKDGKWVDVPPMRHSIVINLGDQLEVITNGKYKSVLHRVLAQPDGNRMSLASFYNPGSDALIYPAPVLVEKEAEKGQVYPKFVFEDYMKLYAGLKFQAKEPRFEAMKAMESTVKLGPIATA

SEQ ID NO: 10000 - protein, 59 aa, Betula pendula
KPELIQGLRAHTDAGGLILLFQDDKVSGLQLLKDGKWVDVPPMRHSIVINLGDQLEVIT

SEQ ID NO: 10001 - protein, 148 aa, Mesembryanthemum crystallinum
GTAPFYLRHLPSSNIAEVPDLDDEYRSVMKEFALRLEKLAEEILDLFCENLGLEKGYLKKVFYGDKAPNFGTKVSNYPPCPKPDLIKGLRAHTDAGGVILLFQDDRVSGLQLLKDGEWIDVPPMRHSIVVNLGDQLEVITNGKYKSVM

SEQ ID NO: 10002 - protein, 138 aa, Artemisia annua
EERAATLSLINDACENWGFFEIVNHGISTELLDTVEKMTKGHYKKCMEERFKEMVASKGLEAVQSEIEDLDWESTFYLRHLPQSNISEVPDLEDEYRKVMKLFAEELEKLAENLLDIFCENLGLEKGYLKKAFYGAGK

SEQ ID NO: 10003 - protein, 382 aa, Spinacia oleracea
MPSRPSRVVKEQHPTKKSFLDLESLNELPDSFAWGSFEDPCSIDNPSGYGPDSVPVINLQDPQAQQLVGLACRSWGVFQVTNHGIQKSLLDDIEAAGKSLFALPVNQKLKAARSSCGVTGYGPAGISSFFPKRMWSEGFTILGSPLDHARQLWPNNYNKFCDIIEKYQKEMNQLAKKLMQLVVGSLGISNQDIMNWADLLEGANGAMQLNSYPIRPDPNRAMGLAAHTDSTLLTILHQSNTTGLQVFRERSGWVTVPPISGGLVINIGDLLHILSNGRYPSVYHRAMVNRVQHRLSVAYLYGPASGVRVQPLPKLIDATHPPLYRPVTWSEYLGIKSEHLTKALSLIRINHNTNPSLTGLIGNDEPKSINVDSDKTILAVFG

SEQ ID NO: 10004 - protein, 321 aa, Dianthus caryophyllus
MANIVNFPIIDMEKLNNYNGVERSLVLDQIKDACHNWGFFQVVNHSLSHELMDKVERMTKEHYKKFREQKFKDMVQTKGLVSAESQVNDIDWESTFYLRHRPTSNISEVPDLDDQYRKLMKEFAAQIERLSEQLLDLLCENLGLEKGYLKNAFYGANGPTFGTKVSNYPPCPKPDLIKGLRAHTDAGGIILLFQDDKVSGLQLLKDGHWVDVPPMKHSIVVNLGDQLEVITNGKYKSVMHRVIAQTDGNRMSIASFYNPGSDAVIYPAPTLVEKEEEKCRAYPKFVFEDYMNLYLKLKFQEKEPRFEAMKAMETTGPIPTA

SEQ ID NO: 10005 - protein, 321 aa, Dianthus caryophyllus
MANIVNFPIIDMEKLNNYNGVERSLVLDQIKDACHNWGFFQVVNHSLSHELMDKVERMTKEHYKKFREQKFKDMVQTKGLVSAESQVNDIDWESTFYLRHRPTSNISEVPDLDDQYRKLMKEFAAQIERLSEQLLDLLCENLGLEKAYLKNAFYGANGPTFGTKVSNYPPCPKPDLIKGLRAHTDAGGIILLFQDDKVSGLQLLKDGHWVDVPPMKHSIVVNLGDQLEVITNGKYKSVMHRVIAQTDGNRMSIASFYNPGSDAVIYPAPTLVEKEEEKCRAYPKFVFEDYMNLYLKLKFQEKEPRFEAMKAMETTGPIPTA

SEQ ID NO: 10006 - protein, 320 aa, Nicotiana glutinosa
MENFPIINLEKLNGSERADTMEMIKDACENWGFFELVNHGIPHEVMDTVEKLTKGHYKKCMEQRFKELVANKGLEAVQAEVTDLDWESTFFLRHLPVSNISEVPDLDDQYREVMRDFAKRLEKLAEELLDLLCENLGLEKGYLKNVFYGSKGPNFGTKVSNYPPCPKPNLNKGLRAHTDAGGIILLFQDDKVSGLQLLKDGQWIDVPPMRHSIVVNLGDQLEVITNGKYKSVMHRVIAQTDGTRMSLASFYNPGSDAVIFPAPALVEKEAEESKAIYPKFVFDDYMKLYALLKFQAKEPRFEAMIKAMETDVKCDPVATA

SEQ ID NO: 10007 - protein, 320 aa, Nicotiana glutinosa
MESFPIVDMEMLNTEQRAVIMEKLKDACENWGFLELVNHGISHELMDTVEKLTKEHYNKSMEQRFKEMVTNKGLEVVQTEIDDLDWESAFFLKHLPVSNISDIPDLDHDYRKVMKEFAQKLEKLAEDLLDLLCENLGLEQGYQKKAFYGTFGPTFGTKVANYPPCPKPELIKGLRAHTDAGGIILLFQDDKVSGLQLLKDGKWIDVPPMSHSIVVNIGDQLEVITNGKYKSVEHRVIAQPDGNRMSIASFYNPGSDAVIFPAPELAEKEEKENKLKYPKFVFEDYMKLYAALKFQAKEPRFEAMNKAMKTTVNLGPIATA

SEQ ID NO: 10008 - protein, 316 aa, Nicotiana glutinosa
MESFPVVNMELLNSEQRAATMETIKDACENWGFFEVVNHGISHELLDTVEKFTKGHYNECMERRFKEMVASKGLEAVQTEIKDLDWESTFYLKHLPVSTISQVPDLEDEYRKIMKEFAEKLEKLAEQLLDLLCENLGLEQGYLKKAFYGSNGPTFGTKVSNYPPCPKPDLIKGLRAHTDAGGIILLFQDDKVSGLQLLKDDKWIGVPPMRHSIVINLGDQLEVITNGKYKSMEHRVIAQPDGNRMSIASFYNPGSDAGISPAPELLEKENKVIYPKFVFEDYMKLYAGLKFQAKEPRFEAMKAVETAVNSAPIATV

SEQ ID NO: 10009 - protein, 320 aa, Diospyros kaki
MEAFPVINMEILNGEGREAAMEKLRNACENWGFFEVVNHGISHELMDSVERLTKEHYKKFMEQRFKEMVASKGLEVVQSEINDLDWESTFFLRHLPSSNLSELPDLEDDYKKAMKEFAEDLEKLAEQLLDYLCENLGLEKGYLKKAFYGSKGPTFGTKVSNYPPCPRPELIKGLRAHTDAGGIILLFQDDKVSGLQLLKDGQWIDVPPLKHSIVINIGDQLEVITNGKYKSVMHRVIAQTDGNRMSIASFYNPGSDAVIYPAPALVEKEADHEQKQVYPKFVFEDYMKLYAGLKFQAKEPRFEAMKAMETPLNLGPIATV

SEQ ID NO: 10010 - protein, 318 aa, Diospyros kaki
MESFPVINMEKMNGEERAATMGLINDACENWGFFELVNHGIPPELMDTVERVTKAHYKKCMEQRFKELVASKALEGIQAEVTDMDWESTYFLRHLPQSNISEVPDLDEEYRRVMKDFAERLEKLAEYLLDLLCENLGLEKGYLKKAFYGTKGPNFGTKVANYPPCPKADLIKGLRAHTDAGGIILLFQDDKVSGLQLLKDDQWIDVPPMKHSIVINLGDQLEVITNGKYKSVLHRVVAQTDGTRMSIASFYNPGNDAVIYPAPALVEKEVEEKEVYPKFVFDDYMKLYAALKFQAKEPRFEAMKAVEANVNLGPIATV

SEQ ID NO: 10011 - protein, 270 aa, Diospyros kaki
NWGLFELVNHGIPPELMDTVERLTKEHYKKCMEQRFKELVASKALEGVQAEVTDMDWESTYFLRHLPQSNISELPDLDEEYRRVMKDFAERLEKLAEYLLDLLCENLGLEKGYLKKAFYGTKGPNFGTKVANYPPCPKADLIKGLRAHTDAGGIILLFQDDKVSGLQLLKDDQWIDVPPMKHSIVINLGDQLEVITNGKYKSVLHRVVAQTDGTRMSIASFYNPGNDAVIYPAPALVEKEIQEKEIYPKFVFDDYMKLYAALKFQAKEPR

SEQ ID NO: 10012 - protein, 319 aa, Actinidia chinensis
MEAFPVIDMEKLNGEERAPTMEKIKDACENWGFFELVNHGISHELMDTVERLTKEHYNKCMEQRFKEMVATKGLEAVQSEINDLDWESTFFLRHLPVSNISEIPDLEQDHRKAMKEFAEKLEKLAEQLLDLLCENVGLEKGYLKKAFYGSKGPTFGTKVSNYPPCPRPELIKGLRAHTDAGGIILLFQDNKVSGLQLLKDGEWIDVPPMKHSIVINIGDQLEVITNGKYKSVMHRVIAQPDGNRMSIASFYNPGSDAVMYPAPALVDKEEDQQKQVYPKFVFEDYMKLYAGLKFQAKEPRFEAMKAMENAVNLGPIATI

SEQ ID NO: 10013 - protein, 317 aa, Actinidia deliciosa
TFPVIDMEKLTGKERSPTMEKINDACENWGFFELMNHGISHELMDTVERLTKEHYKKCMEQRFKEMVATKGLEAVQSEIDDLDWESTFFLRHLPVSNISEIPDLEQDHRKAMKEFAEKLEKLAEQLLDLLCENLGLEKGYLKKAFSGSKGPTFGTKVSNYPPCPLPELIKGLRAHTDAGGIILLFQDNKVSGLQLLKEGEWIDVPPMKHSIVINIGDQLEVITNGKYKSVMHRVIAQTDGNRMSIASFYNPGSDAVIYPAPALVDKEEDQQKQVYPKFVFEDYMKLYAGLKFQAKEPRFEAMKAMESAVKLGPISTI

SEQ ID NO: 10014 - protein, 318 aa, Carica papaya
MENFPVIDLSKLNGEERASTMELIHDACENWGFFELVNHGISHDLMDTVERLTKEHYKKCMEQRFKEMVESNGLEAVQSEINDMDWESTFFLRHLPASNMHEIPDLEDDYRKAMKEFAVGLQKLAEQMLDLLCENLGLEKGYLKKVFYGSKGPNFGTKVSNYPPCPKPDLIKGLRAHTDAGGIILLFQDDKVSGLQLLKDDQWVDVPPMKHSIVINLGDQLEVITNGKYKSVMHRVIAQTDGNRMSLASFYNPGDDAVIYPAPSLVEKEAEKNQIYPKFVFDDYMKLYVGLKFQAKEPRFEAMKAMESTVTPGAIATV

SEQ ID NO: 10015 - protein, 310 aa, Carica papaya
MENFPVINMEGLNGEERAATMKKIEDACENWGFFELVNHGIPIELLDTVERLTKGHYRKCMEQRFKEIMASKGLDGIQTEVTDMDWESTFFIRHLPEPNIAEIPDLDDEYRKVMKEFALKLEKIAEELLDLLCENLGLEKGYLKKAFYGSRGPTFGTKVSNYPPCPKPNLIKGLRAHTDAGGIILLFQDDKVSGLQLLKDGKWVDVPPMRHSIVVNLGDQLEVITNGKYKSVEHRVVAQTDGTRMSIASFYNPGSDAVIYPAPILVEKETEEKKTAYPKFVFEDYMKLYAGLKFQAKEPRFDAMKAAAKA

SEQ ID NO: 10016 - protein, 318 aa, Carica papaya
MENFPVIDLSKLNGEERALTMELIHDACENWGFFELVNHGISHDLMDTVERLTKEHYMKCMEQRFKEMVESNGLEAVQSEINDMDWESTFFLRHLPASNMHEIPDLEDDYRKAMKEFAVGLQKLAEQMLDLLCENLGLEKGYLKKVFYGSKGPNFGTKVSNYPPCPKPDLIKGLRAHTDAGGIILLFQDDKVSGLQLLKDDQWVDVPPMKHSIVINLGDQLEVITNGKYKSVMHRVIAQTDGNRMSLASFYNPGDDAVIYPAPSLVEKEAEKNQIYPKFVFDDYMKLYVGLKFQAKEPRFEAMKAMESTVTPGAIATV

SEQ ID NO: 10017 - protein, 318 aa, Carica papaya
MENFPVIDLSKLNGEERASTMELIHDACENWGFFELVNHGISHDLMDTVERLTKEHYKKCMEQRFKEMVESNGLEAVQSEINDMDWESTFFLRHLPASNMHEIPDLEDDYRKAMKEFAVGLQKLAEQMLDLLCENLGLEKGYLKKVFYGSKGPNFGTKVRNYPPCPKPDLIKGLRAHTDAGGIILVFQDDKVSGLQLLKDDQWVDVPPMKHSIVINLGDQLEVITNGKYKSVMHRVIAQTDGNRMSLASFYNPGDDAVIYPAPSLVEKEAEKNQIYPKFVFDDYMKLYVGLKFQAKEPRFEAMKAMESTVTPGAIATV

SEQ ID NO: 10018 - protein, 318 aa, Carica papaya
MENFPVIDLSKLNGEERALTMELIHDACENWGFFELVNHGISHDLMDTVERLTKEHYMKCMEQRFKEMVESNGLEAVQSEINDMDWESTFFLRHLPASNMHEIPDLEDDYRKAMKEFAVGLQKLAEQMLDLLCENLGLQKGYLKKVFYGSKGPNFGTKVSNYPPCPKPDLIEGLRAHTDAGGIILLFQDGKVSGLQLLKDDQWVDVPPMKHSIVINLGDQLEVITNGKYKSVMHRVIAQTDGNRMSLASFYNPGDDAVIYPAPSLVEKEAEKNQIYPKFVFDDYMKLYVGLKFQAKEPRFEAMKAMESTVTPGAIATV

SEQ ID NO: 10019 - protein, 310 aa, Carica papaya
MENFPVINMEGLNGEERAATMKKIEDACENWGFFELVNHGIPIELLDTVERLTKGHYRKCMEQRFKEIMASKGLDGIQTEVTDMDWESTFFNCHLPEPNIAEIPDLDDEYRKVMKEFALKLEKIAEELLDLLCENLGLEKGYLKKAFTWSRGPTFGTKVSNYPPCPKPNLIKGLRAHTDAGGIILLFQDDKVSGLQLLKDGKWVDVPPMRHSIVVNLGDQLEVITNGKYKSVEHRVVAQTDGTRMSIASFYNPGSDAVISPAELLVEKETEEKKTAYPKFVFEDYMKLYAGLKFQAKEPRFDAMKAAAKA

SEQ ID NO: 10020 - protein, 349 aa, Citrullus lanatus
MADQELPPPSQLVPLDFNSIQTVPESHLWPNSIELSPAIKLDERISLPIIDFLDDGASELLGRACEQWGMFQLINHGVPKTLIDEAEEETRRLFSLPARQKMKTLRTDSLTATGYGMAGISKYHQKLMWHEGFTMSGSPVDDAKKLWPNDYKRFCDVMEEYQSQMKGLGERIIRLIFKFLDISEEEMMKLLTSTDESAGKPYMALRLNSYPPCPDPSRVMGLAAHTDTSLFTIVHQARHDGLQVFKDGTGWVPLSPMSGTLIVNVGDILHILSNGRFPSILHRVMIHENKEHRFSLAYFYDPPGDLYISPYCKPLSESPQIPLYRCVNVKEYFTIKAKKEGKGLSAIKI

SEQ ID NO: 10021 - protein, 318 aa, Cucumis melo
MAVFPIINLENINDDGRAKILEQIEDACQNWGFFELVNHGIPHEFLDMVEKMTRDHYKKCMEERFKETVLSKGLEAAQAEVNDMDWESTFFLRHLPESNISQMSDLDEEYKKIMKEFAKKLENLAEELLDLLCENLGLEKGYLKKAFYGSKGPTFGTKVSNYPPCPKPDLIKGLRAHTDAGGIILLFQDDKVSGLQLLKDGNWIDVPPMRHAIVVNLGDQLEVITNGRYKSVMHRVLTQTSGTGRMSIASFYNPGSDAVIYPAPALVEKDQDEEKKEVYPKFVFEDYMKLYLGVKFQAKEPRFEAMKANANLGPMATA

SEQ ID NO: 10022 - protein, 320 aa, Cucumis melo
MEMDFPVINMNNLNGESRVSVLNQINDACENWGFFELVNHGISHELMDKVEKLTKEHYRKCMEQRFKEMVASKGLDSVETEINDTDWESTFFLRHLPVSNMSEIGDLDEEYKKVMKEFADELEKLAEEVLDLLCENLGLEKGYLKKVFYGSKGPNFGTKVSNYPPCPKPELIKGLRAHTDAGGLILLFQDDKVSGLHVLKDGKWVDVPPMHHSIVINLGDQLEVITNGKYKSVMHRVIAQEDGNRMSIASFYNPGNDAVIYPAPALVEGEQEKTKLYPKFVFDDYMKLYVGLKFQAKEPRFEAMKAMESTNLNMGPIATV

SEQ ID NO: 10023 - protein, 318 aa, Cucumis sativus
  unsure (1)..(318): unsure at all Xaa locations
MDFPVINMNNLNGESRVSFLNQINDVCENWGFFELVNHGIPHELMDKVEKMTKEHYRKCMEQRFKEMVASKGLDSVETEINDTDWESTFFLRHLPVSNMSEIGDLDEEYKKVMKEFAAELEKLAXEILNLLCENLGLEKGYLKKVFYGSKGPNFGTKVSNYPPCPKPELIKGLRAHTDAGGLILLFQDDKVSGLQLLKDGKWVDVPPMHHSIVINLGDQLEVITNGKYKSVMHRVIAQEDGNRMSIASFYNPGNDAVIYPAPALVEGEQEKTKLYPKFVFDDYMKLYMGLKFQAKEPRFEAMKAMESTNINMGPIATV

SEQ ID NO: 10024 - protein, 317 aa, Cucumis sativus
MAVFPIINLENINGDGRAKILEQIEDACQNWGFFELVNHGIPHEFLDMVEKMTRDHDKKCMEERFKETVLSKGLEAAQAEVNDMDWESTFFLRHLPESNISQMSDLDEEYKKIMKEFAKKLENLAEELLDLLCENLGLEKGYLKNAFYGSKGPTFGTKVSKYPPCPKPDLIKGLRAHTDAGGIILLFQDDKVGGLQLLKDGDWIDVPPMRHAIVVNLGDQLEVITNGRYKSVMHRVLITQTSGTGRMSIASFYNPGSDAVIYPAPALVEKDEEKKEVYPKFVFEDYMKLYLGVKFQAKEPRFEAMKANANLGPMATA

SEQ ID NO: 10025 - protein, 314 aa, Cucumis sativus
MEFPIINLEKLNGEERSSILAKIKDACENWGFFEVLNHGIDTEFLDKVEKLTKEHYKKCMEERFKEHIASKGLNDVVTEVNDVDWESTFFLRHLPVSNIADLPELSDDYKSVMKQFASKLQVLAELLLDLLCENLNLPKSYLKNAFHGSNGPTFGTKVSNYPPCPNPDLIKGLRAHTDAGGIILLFQDDKVSGLQLLKEGEWVDVPPVRHSIVVNIGDRLEVITNGKYKSVLHRAIAHREGEGRMSLASFYNPGSDAVIFPAPSLVAEEKNEIYPKFVFEDYMKLYAGLKFEAKEPRFEAMKGNNVKLDPIATV

SEQ ID NO: 10026 - protein, 317 aa, Cucumis sativus
MAVFPIINLENINGDGRAKILEQIEDACQNWGFFELVNHGIPHEFLDMVEKMTRDHDKKCMEERFKETVLSKGLEAAQAEVNDMDWESTFFLRHLPESNISQMSDLDEEYKKIMKEFAKKLENLAEELLDLLCENLGLEKGYLKNAFYGSKGPTFGTKVSKYPPCPKPDLIKGLRAHTDAGGIILLFQDDKVGGLQLLKDGDWIDVPPMRHAIVVNLGDQLEVITNGRYKSVMHRVLITQNSGTGRMSIASFYNPGSDAVIYPAPALVEKDEEKKEVYPKFVFEDYMKLYLGVKFQAKEPRFEAMKANANLGPMATA

SEQ ID NO: 10027 - protein, 282 aa, Cucumis sativus
MEFPIINLEKLNGEERSSILAKIKDACENWGFFEVLNHGIDTEFLDKVEKLTKEHYKKCMEERFKEHIASKGLNDVVTEVNDVDWESTFFLRHLPVSNIADLPELSDDYKSVMKQFASKLQVLAELLLDLLCENLNLPKSYLKNAFHGSNGPTFGTKVSNYPPCPNPDLIKGLRAHTDAGGIILLFQDDKVSGLQLLKEGEWVDVPPVRHSIVVNIGDQLEVITNGKYKSVLHRVIAHPEGEGRMSLASFYNPGSDAVIFPAPSLVAEEKNEYTQNLYLRII

SEQ ID NO: 10028 - protein, 317 aa, Phalaenopsis sp.
MELLQGSQRPAAMALLRDACENWGLYELLNHGISHELMNRVETVNKEHYRRFREQRFKEFASKTLDTVENVEPENLDWESTFFLRHLPTSNISQIPDLDDDCRSTMKEFALELENLAERLLDLLCEDLGLEKGYLKKVFCGGSDGLPTFGTKVSNYPPCPKPELIKGLRAHTDAGGIILLFQDDKVSGLQLLKDGEWIDVPPVRHSIVVNIGDQLEVITNGKYKSVLHRVVAQTDGNRMSIASFYNPGSDAVIFPAPALVEKEAEEKEEKKKEIYPKFVFQDYMNLYIRKKFEAKEPRFEAMKSMEIVMSSQPIPTA

SEQ ID NO: 10029 - protein, 385 aa, Populus nigra
MAIDCIKTMPSITTPHHHPKDQDQCKDDGKSFVFDAQVLRHQTNIPQQFIWPDHEKPNINAPELQVPLVDLGDFLSGNPVAAVEASRLVGEACQKHGFFLVVNHGVDKTLIAHAHNYMDTFFELPLSEKQKAQRKIGESCGYASSFTGRFSSKLPWKETLSFRYTAEKNSSKHIEEYFHNRMGEDFAEFGRVYQDYCEAMSTLSLGIMELLGMSLGVSREHFREFFNENDSIMRLNYYPPCQKPDLTLGTGPHCDPTSLTILHQDQVGGLQVFVDNEWRSISPNFDAFVVNIGDTFMALSNGIYKSCLHRAVVNSQTPRKSLAFFLCPKNDKMVTPPHELVDTCNPRIYPDFTWPMLLEFTQKHYRADMKTLEVFTNWLHQQSFS

SEQ ID NO: 10030 - protein, 323 aa, Arabidopsis thaliana
MESFPIINLEKLNGEERAITMEKIKDACENWGFFECVNHGISLELLDKVEKMTKEHYKKCMEERFKESIKNRGLDSLRSEVNDVDWESTFYLKHLPVSNISDVPDLDDDYRTLMKDFAGKIEKLSEELLDLLCENLGLEKGYLKKVFYGSKRPTFGTKVSNYPPCPNPDLVKGLRAHTDAGGIILLFQDDKVSGLQLLKDGEWVDVPPVKHSIVVNLGDQLEVITNGKYKSVEHRVLSQTDGEGRMSIASFYNPGSDSVIFPAPELIGKEAEKEKKENYPRFVFEDYMKLYSAVKFQAKEPRFEAMKAMETTVANNVGPLATA

SEQ ID NO: 10031 - protein, 323 aa, Arabidopsis thaliana
MESFPIINLEKLNGEERAITMEKIKDACENWGFFECVNHGISLELLDKVEKMTKEHYKKCMEERFKESIKNRGLDSLRSEVNDVDWESTFYLKHLPVSNISDVPDLDDDYRTLMKDFAGKIEKLSEELLDLLCENLGLEKGYLKKVFYGSKRPTFGTKVSNYPPCPNPDLVKGLRAHTDAGGIILLFQDDKVSGLQLLKDGEWVDVPPVKHSIVVNLGDQLEVITNGKYKSVEHRVLSQTDGEGRMSIASFYNPGSDSVIFPVPELIGKEAEKEKKENYPRFVFEDYMKLYSAVKFQAKEPRFEAMKAMETTVANNVGPLATA

SEQ ID NO: 10032 - protein, 323 aa, Arabidopsis thaliana
MESFPIINLEKLNGEERAITMEKIKDACENWGFFECVNHGISLELLDKVEKMTKEHYKKCMEERFKESIKNRGLDSLRSEVNDVDWESTFYLKHLPVSNISDVPDLDDDYRTLMKDFAGKIEKLSEELLDLLCENLGLEKGYLKKVFYGSKRPTFGTKVSNYPPCPNPDLVKGLRAHTDAGGIILLFQDDKVSGLQLLKDGEWVDVPPVKHSIVVNLGDQLEVITNGKYKSVEHRVLSQTDGEGRMSIASFYNPGSDSVIFPAPELIGKEAEKEKKENYPRFVFEDYMKLCSAVKFQAKEPRFEAMKAMETTVANNVGPLATA

SEQ ID NO: 10033 - protein, 320 aa, Arabidopsis thaliana
MEKNMKFPVVDLSKLNGEERDQTMALINEACENWGFFEIVNHGLPHDLMDKIEKMTKDHYKTCQEQKFNDMLKSKGLDNLETEVEDVDWESTFYVRHLPQSNLNDISDVSDEYRTAMKDFGKRLENLAEDLLDLLCENLGLEKGYLKKVFHGTKGPTFGTKVSNYPPCPKPEMIKGLRAHTDAGGIILLFQDDKVSGLQLLKDGDWIDVPPLNHSIVINLGDQLEVITNGKYKSVLHRVVTQQEGNRMSVASFYNPGSDAEISPATSLVEKDSEYPSFVFDDYMKLYAGVKFQPKEPRFAAMKNASAVTELNPTAAVETF

SEQ ID NO: 10034 - protein, 320 aa, Arabidopsis thaliana
MEKNMKFPVVDLSKLNGEERDQTMALINEACENWGFFEIVNHGLPHDLMDKIEKMTKDHYKTCQEQKFNDMLKSKGLDNLETEVEDVDWESTFYVRHLPQSNLNDISDVSDEYRTAMKDFGKRLENLAEDLLDLLCENLGLEKGYLKKVFHGTKGPTFGTKVSNYPPCPKPEMIKGLRAHTDAGGIILLFQDDKVSGLQLLKDGDWIDVPPLNHSIVINLGDQLEVITNGKYKSVLHRVVTQQEGNRMSVASFYNPGSDADISPATSLVEKDSEYPSFVFDDYMKLYAGVKFQPKEPRFAAMKNASAVTELNPTAAVETF

SEQ ID NO: 10035 - protein, 320 aa, Arabidopsis thaliana
MEMNIKFPVIDLSKLNGEERDQTMALIDDACQNWGFFELVNHGLPYDLMDNIERMTKEHYKKHMEQKFKEMLRSKGLDTLETEVEDVDWESTFYLHHLPQSNLYDIPDMSNEYRLAMKDFGKRLEILAEELLDLLCENLGLEKGYLKKVFHGTTGPTFATKLSNYPPCPKPEMIKGLRAHTDAGGLILLFQDDKVSGLQLLKDGDWVDVPPLKHSIVINLGDQLEVITNGKYKSVMHRVMTQKEGNRMSIASFYNPGSDAEISPATSLVDKDSKYPSFVFDDYMKLYAGLKFQAKEPRFEAMKNAEAAADLNPVAVVETF

SEQ ID NO: 10036 - protein, 310 aa, Arabidopsis thaliana
MVLIKEREMEIPVIDFAELDGEKRSKTMSLLDHACDKWGFFMVDNHGIDKELMEKVKKMINSHYEEHLKEKFYQSEMVKALSEGKTSDADWESSFFISHKPTSNICQIPNISEELSKTMDEYVCQLHKFAERLSKLMCENLGLDQEDIMNAFSGPKGPAFGTKVAKYPECPRPELMRGLREHTDAGGIILLLQDDQVPGLEFFKDGKWVPIPPSKNNTIFVNTGDQLEILSNGRYKSVVHRVMTVKHGSRLSIATFYNPAGDAIISPAPKLLYPSGYRFQDYLKLYSTTKFGDKGPRLETMKKMGNADSA

SEQ ID NO: 10037 - protein, 320 aa, Brassica juncea
MEKNIKFPVVDLSKLIGEERDQTMALINDACENWGFFEIVNHGLPHDLMDNAEKMTKEHYKISMEQKFNDMLKSKGLENLEREVEDVDWESTFYLRHLPQSNLYDIPDMSDEYRTAMKDFGKRLENLAEDLLDLLCENLGLEKGYLKKVFHGTKGPTFGTKVSNYPACPKPEMIKGLRAHTDAGGIILLFQDDKVTGLQLLKDGDWIDVPPLNHSIVINLGDQLEVITNGRYKSMMHRVVTQKEGNRMSIASFYNPGSDAEISPASSLACKETEYPSFVFDDYMKLYAGVKFQPKEPRFEAMKNANAVTELNPTAAVETF

SEQ ID NO: 10038 - protein, 321 aa, Brassica juncea
MEKNIKFPVVDLSKLIGEERDQTMAWINDACENWGFFEIVNHGLPHDLMDNAPKKMTKEHYKKSMEQKFNDMLKSKGLEILEREVEDVDWESTFYLRYLPQSNLYDVPDMSDEYRTAMKDFGKRLENLAEDLLDLLCENLGLEKGYLKKVFHGTKGPTFGTKVSNYPACPKPEMIKGLRAHTDAGGIILLFQDDKVSGLQLLKDGDWIDVPPLNHSIVINLGDQLEVITNGRYKSVMHRVVTQKEGNRMSIASFYNPGSDAEISPASSLACKETEYPSFVFYDYMKLYAGVKFQPKEPRFEAMKNANAVTELNPTAAVETF

SEQ ID NO: 10039 - protein, 321 aa, Brassica napus
MEKNIKFPVIDLSKLNGEERDQTMALIDDACQNWGFFELLNHGIPYDLMDNIERMTKEHYKQFMEHKFKEMLRSKGLDTLETEVEDIDWESTFFLHHLPQTNLYDIPNMSEQYRTAMKDFGKRLEKLAEELLDLLCENLGLEKGYLKKVFRGTKGPTFGTKVSNYPPCPNPEMIKGLRAHTDAGGLILLFQDDKVSGLQLLKDGDWVDVPPLKHSIVINLGDQLEVITNGWYKSIMHRVMTQKEGNRMSIASFYNPGSDAEISPAHSLVDKESEYPSFVFDDYMKLYSGVKFQPKEPRFEAMKNAAAVTTDVNPVATEETF

SEQ ID NO: 10040 - protein, 321 aa, Brassica oleracea
MESFPIINLEKLNGEERGLTMEKIKDACENWGFFECVNHGIPHELLDRVEKMTKEHYKKCMEDRFKESIKNRGLDSVRSEVNDVDWESTFYLKHLPASNISHVPDLDDDYRTLMKEFAGKIEKLSEELLDLLCENLGLEKGYLKKVFYGSKSPTFGTKVSNYPPCPKPDLIKGLRAHTDAGGIILLFQDDKVSGLQLLKDGEWVDVPPVKHSIVVNLGDQLEVITNGKYKSVEHRVIAQTDGEGRMSIASFYNPGSDSVIFPAPELIGKENEKKDNYPKFVFEDYMRLYSAVKFQAKEPRFETMKAMETTVANNVGPLATA

SEQ ID NO: 10041 - protein, 321 aa, Brassica oleracea
MEKNIKFPVVDLSKLNGEERDQTMALVDDACQNWGFFELLNHGIPYDLMDNIERMTKEHYKKFMEQKFKEMLRSKNLDTLETEVENVDWESTFFLHHLPQTNLYDIPDMSDEYRAAMKDFGKRLENLAEELLDLLCENLGLEKGYLKKVFSGTKGPTFGTKVSNYPPCPKPEMIKGLRAHTDAGGLILLFQDDKVSGLQLLKDGVWVDVPPLKHSIVINLGDQLEVITNGKYKSIMHRVMTQKEGNRMSIASFYNPGSDAEISPAPSLVEKDSDEYPSFVFDDYMKLYAGVKFQPKEPRFEAMKNVAATTDLNPVATVETF

SEQ ID NO: 10042 - protein, 320 aa, Brassica oleracea
MEKNIKFPVVDLSKLIGEERDQTMALINDACENWGFFEIVNHGLPHDLMDNVEKMTKEHYKISMEQKFNDMLKSKGLENLEREVEDVDWESTFYLRHLPQSNLYDIPDMSDEYRTAMKDFGKRLENLAEDLLDLLCENLGLEKGYLKKVFHGTKGPTFGTKVSNYPACPKPEMIKGLRAHTDAGGIILLFQDDKVSGLQLLKDGDWIDVPPLNHSIVINLGDQLEVITNGRYKSVMHRVVTQKEGNRMSIASFYNPGSDAEISPASSLACKETEYPSFVFDDYMKLYAGVKFQPKEPRFEAMKNANAVTELNPTAAVETF

SEQ ID NO: 10043 - protein, 357 aa, Matthiola incana
APGTLTELAGESKLNSKFVRDEDERPKVAYNEFSDEIPVISLAGIDDVDGKRGEICREIVEACENWGIFQVVDHGVDTSLVADMTRLARDFFALPPEEKLRFDMSGGKKGGFIVSSHLQGEAVQDWREIVTYFSYPVRNRDYSRWPDKPQGWAKVTEEYSEKLMGLACKLLEVLSEAMGLEKESLTNACVDMDQKIVVNYYPKCPQPDLTLGLKRHTDPGTITLLLQDQVGGLQATRDDGNTWITVQPVEGAFVVNLGDHGHFLSNGRFKNADHQAVVNSNSSRLSIATFQNPAPEATVYPLKVREGEKAIMEEPITFAEMYKRKMGRDLELARLKKLAKEEHNHKEAAKPLDQILA

SEQ ID NO: 10044 - protein, 183 aa, Raphanus sativus
KGKIQGYGSKLANNASGQLEWEDYFFHLVYPEDKRDLSLWPKTPTDYIEATSEYAKCLRLLATKVFKALSIGLGLEPDRIEKEVGGLEELLLQMKINYYPKCPQPELALGVEAHTDVSALTFILHNMVPGLQLFYEGKWVIAKCVPDSIVMHIGDTLEILSNGKFKSILHRGLVNKEKVRVSW

SEQ ID NO: 10045 - protein, 191 aa, Raphanus sativus
VDTSLVADMTRLARDFFALAPEEKLKFDMSGGKKGGFIVSSHLQGESVQDWREIVTYFSYPVRNRDYSRWPTKPEGWVKVTEEYSEKLMSLACKLLEVLSEAMGLEKEALTNACVDMDQKIVVNYYPKCPQPDLTLGLKRHTDPGTITLLLQDQVGGLQATRDDGKTWITVQPVEGAFVVNLGDHGHYLSN

SEQ ID NO: 10046 - protein, 322 aa, Malus x domestica
MENFPVINLESLNGEGRKATMEKIKDACENWGFFELVSHGIPTEFLDTVERLTKEHYKQCLEQRFKELVASKGLEGVQTEVKDMDWESTFHLRHLPQSNISEVPDLKDEYRNVMKEFALKLEKLAEQLLDLLCENLGLEQGYLKKAFYGTKGPTFGTKVSNYPPCPNPDLIKGLRAHTDAGGLILLFQDDKVSGLQLLKDGEWVDVPPMRHSIVINLGDQLEVITNGKYKSVEHRVIAQTDGTRMSIASFYNPGSDAVIYPAPTLVEKEAEEKNQVYPKSVFEDYMKLYAGVKFEAKEPRFEAMKAVEIKASFGLGPVISTA

SEQ ID NO: 10047 - protein, 330 aa, Malus x domestica
MATFPVVDMDLINGEERAATLEKINDACENWGFFELVNHGISTELLDTVEKMNKDHYKKTMEQRFKEMVAAKGLEAVQSEIHYLDWESTFFLRHLPSSNISEIPDLEEDYRKTMKEFAVELEKLAEKLLDLLCENLGLEKGYLKKAFYGSKGPNFGTKVSNYPPCPKPDLIKGLRAHTDAGGIILLFQDDKVSGLQLLKDGEWMDVPPVHHSIVINLGDQIEVITNGKYKSIMHRVIAQSDGTRMSIASFYNPGDDAFISPAPALLEEKSEVSPTYPKFLFDDYMKLYSGLKFQAKEPRFEAMKARETTPVETARGLRAVRWNTTKRNQN

SEQ ID NO: 10048 - protein, 314 aa, Malus x domestica
MATFPVVDLSLVNGEERAATLEKINDACENWGFFELVNHGMSTELLDTVEKMTKDHYKKTMEQRFKEMVAAKGLDDVQSEIHDLDWESTFFLRHLPSSNISEIPDLEEEYRKTMKEFAVELEKLAEKLLDLLCENLGLEKGYLKKVFYGSKGPNFGTKVSNYPPCPKPDLIKGLRAHSDAGGIILLFQDDKVSGLQLLKDGEWVDVPPMHHSIVINLGDQIEVITNGKYKSVMHRVIAQSDGTRMSIASFYNPGNDSFISPAPAVLEKKTEDAPTYPKFVFDDYMKLYSGLKFQAKEPRFEAMKAKESTPVATA

SEQ ID NO: 10049 - protein, 314 aa, Malus x domestica
MATFPVVDLSLVNGEERAATLEKINDACENWGFFELVNHGMSTELLDTVEKMTKDHYKKTMEQRFKEMVAAKGLDDVQSEIHDLDWESTFFLRHLPSSNISEIPDLEEDYRKTMKEFAVELEKLAEKLLDLLCENLGLEKGYLKKVFYGSKGPNFGTKVSNYPPCPKPDLIKGLRAHSDAGGIILLFQDDKVSGLQLLKDGEWVDVPPMHHSIVINLGDQIEVITNGKYKSVMHRVIAQSDGTRMSIASFYNPGNDAFISPAPAVLEKKTGDAPTYPKFVFDDYMKLYSGLKFQAKEPRFEAMKAKEPTPVATA

SEQ ID NO: 10050 - protein, 318 aa, Prunus persica
METFPVVDLSQITGEKREAAMEKMNDACENWGFFELVNHGISHELMDTVEKLTKEHYKKCMEQRFKEMVASKGLEAVQSEIHDLDWESTFFLRHLPVSNISQIPDLDEDYRKVMKEFAVELEKLAEQLLDLLCENLGLEKGYLKKAFYGSKGPNFGTKVSNYPPCPKPDLIKGLRAHTDAGGIILLFQDDKVSGLQLLKDGQWIDVPPMHHSIVINLGDQLEVITNGKYKSVMHRVIAQPDGTRMSIASFYNPGDDAFICPAPALLEKETENISAYPKFVFDDYMKLYSGLKFHAKEPRFEAMKAMESTVNLDPVATV

SEQ ID NO: 10051 - protein, 319 aa, Prunus persica
MENFPIINLEGLNGEGRKATMEKIKDACENWGFFELVSHGIPTEFLDTVERLTKEHYRQCLEQRFKELVASKGLEAVKTEVNDMDWESTFYLRHLPKSNISEVPDLEDQYRNVMKEFALKLEKLAEQLLDLLCENLGLEQGYLKKAFYGTNGPTFGTKVSNYPPCPKPELIKGLRAHTDAGGLILLFQDDKVSGLQLLKDGQWIDVPPMRHSIVINLGDQLEVITNGKYKSVEHRVIAQTDGTRMSIASFYNPGSDAVIYPAPTLVEKEAEEKNQVYPKFVFEDYMKLYAGLKFQPKEPRFEAMKAVETNISLGPIATA

SEQ ID NO: 10052 - protein, 319 aa, Prunus persica
MENFPIINLEGLNGEGRKATMEKIKDACENWGFFELVSHGIPTEFLDTVERLTKEHYRQCLEQRFKELVASKGLEAVKTEVNDMDWESTFYLRHLPKSNISEVPDLEDQYRNVMKEFALKLEKLAEQLLDLLCENLGLEQGYLKKAFYGTNGPTFGTKVSNYPPCPNPELIKGLRAHTDAGGLILLFQDDKVSGLQLLKDGQWIDVPPMRHSIVINLGDQLEVITNGKYKSVEHRVIAQTDGTRMSIASFYNPGSDAVIYPAPTLVEKEAEEKNQVYPKFVFEDYMKLYAGLKFQPKEPRFEAMKAVETNISLGPIATA

SEQ ID NO: 10053 - protein, 270 aa, Prunus persica
CENWGFFELVNHGISHELMDTVEKLTKEHYKKCMEQRFKEMVASKGLEAVQSEIHDLDWESTFFLRHLPVSNISQIPDLDEDYRKVMKEFAVELEKLAEQLLDLLCENLGLEKGYLKKAFYGSKGPNFGTKVSNYPPCPKPDLIKGLRAHTDAGGIILLFQDDKVSGLQLLKDGQWIDVPPMHHSIVINLGDQIEVITNGKYKSVMHRVVAQPDGTRMSIASFYNPGDDAFICPATALLEKETENISAYPKFVFDDYMKLYSGLKFQAKE

SEQ ID NO: 10054 - protein, 268 aa, Prunus persica
ELVSHGIPTEFLDTVERLTKEHYRQCLEQRFKELVASKGLEAVKTEVNDMDWESTFYLRHLPKSNISEAPDLEDQYRNVMKEFALKLEKLAEQLLDLLCENLGLEQGYLKKAFYGTNGPTFGTKVSNYPPCPNPELIKGLRAHTDAGGLILLFQDDKVSGLQLLKDGQWVDVPPMRHSIVINLGDQLEVITNGKYKSVEHRVIAQTDGTRMSIASFYNPGSDAVIYPAPTLVEKEAEEKNQVYPKFVFEDYMKLYAGLKFQAKEPLQF

SEQ ID NO: 10055 - protein, 314 aa, Pyrus pyrifolia
MATFPVVDLSLVNGEERVATLEKINDACENWGFFELVNHGISTELLDTVEKMTKDHYKKTMEQRFKEMVAAKGLDAVQSEIHDLDWESTFFLRHLPSSNISEVPDLEEDYRKTMKEFAVELEKLAEKLLDLLCENLGLEKGYLKKVFYGSKGPNFGTKVSNYPPCPKPDLIKGLRAHSDAGGIILLFQDDKVSGLQLLKDGEWVDVPPMHHSIVINLGDQIEVITNGKYKSVMHRVIAQSDGTRMSIASFYNPGDDAFISPAPAVLEKKTEDAPTYPKFVFDDYMKLYSGLKFQAKEPRFEAMKAKESTPVATT

SEQ ID NO: 10056 - protein, 366 aa, Mesorhizobium loti
MPACSIGWVFRTEISSNIRKALGKELDMPRIVPVLDLSRLEQGASERRTFLADLRSASRDIGFFYLAGHGISWAEISEVLTASRQFFALPEADKLAIEMVKSSQFRGYTRAGGELTKGREDWREQLDIGVERQAIAQGPGTPAWTRLQGPNQWPAALPDLKPALLAWQSKVTAVAIRLLKAFAQSLDQPEDAFDPIYSSEPNHRMKIVRYPGRDTTGGDQGVGAHKDGGFLTLLLQDDNKGLQVDYDGSWVDVDPIPGTLVVNIGELLELASNGYLRATVHRVVTPPAGVERISVPFFFSARLDATIPLLGLSEELAAQARGPASDPDNPLFRDVGTNVLKSRLRSHPDVARRHYADLLKGESRVG

SEQ ID NO: 10057 - protein, 308 aa, Cicer arietinum
MAVPVIDFSKLNGEERAKTMAQIANGCEEWGFFQLINHGIPEELLERVKKVSSEFYKLEREENFKNSTTVKLLNDIAEKKSSEKLENVDWEDVITLLDNNEWPENTPCFRETMLEYRSELKKLAENIMEVMDENLGLPKGYIKKALNDGDEDNAFFGTKVSHYPPCPYPELVNGLRAHTDAGGVILLFQDDKVGGLQMLKDGEWIDVQPLPNAIVINTGDQIEVLTNGRYKSCWHRVLTSTDGNRRSIASFYNPPLKATISPAPQLAEKENQQVDDTYPKFVFGDYMSVYAEQKFLPKEPRFKAVKAI

SEQ ID NO: 10058 - protein, 318 aa, Glycine max
MEKFPVVDMGNLNNEERSATMEIIKDACENWGFFELVNHGISIELMDTVERMTKEHYKKCMEQRFKEMVASKGLESAQSEINDLDWESTFFLRHLPASNISEIPDLDEDYRKVMKDFAVELEELAELVLDLLCENLGLEKGYLKKVFYGSKGPNFGTKVSNYPPCPKPELIKGLRAHTDAGGIILLFQDHKVSGLQLLKDGHWIDVPPMRHSIVINLGDQLEVITNGKYKSVMHRVITQTDGNRMSIASFYNPGNDALIAPAPALVKEDETSQVYPKFVFDDYMKLYAGLKFQAKEPRFQAMKATESSNINLGPIATV

SEQ ID NO: 10059 - protein, 318 aa, Glycine max
MENFPVVDMGNLNNEERSATMEIIKDACENWGFFELVNHGISIELMDTVERMTKEHYKKCMEQRFKEMVASKGLESAQSEINDLDWESTFFLRHLPVSNISEIPDLDEDYRKVMKDFAVELEKLAELLLDLLCENLGLEKGYLKKVFYGSKGPNFGTKVSNYPPCPTPDLIKGLRAHTDAGGIILLFQDDKVSGLQLLKDDQWIDVPPMRHSIVINLGDQLEVITNGKYKSVMHRVIAQTDGTRMSIASFYNPGDDAVISPAPALVKELDETSQVYPKFVFDDYMKLYAGLKFQAKEPRFEAMKANASVVDVGAIATV

SEQ ID NO: 10060 - protein, 316 aa, Glycine max
  unsure (1)..(316): unsure at all Xaa locations
MTNFPLINLEKLSGEERNDTMXEKIKDACENWGFFELVNHGIPHDILDTVERLTKEHYRKCMEERFKEFMASKGLDAVQTEVKDMDWESTFHLRHLPESNISEIPDLIDEYRKVMKDFALRLEKLAEQLLDLLCENLGLEKGYLKKAFYGSRGPTFGTKVANYPPCPNPDLVKGLRPHTDAGGIVLLFQDDKVSGLQLLKDGQWVDVPPMRHSIVVNIGDQLEVITNGKYRSVEHRVIAQTDGTRMSIASFYNPGSDAVIYPAPELLEKEAEEKSQLYPKFVFEDYMKLYAKLKFQAKEPRFEAFKASNFGPIATA

SEQ ID NO: 10061 - protein, 315 aa, Glycine max
MTNFPLINLEKLSGEERNDTMEKIKDACENWGFFELVNHGIPHDILDTVERLTKEHYRKCMEERFKELVASKGLDAVQTEVKDMDWESTFHLRHLPESNISEIPDLIDEYRKVMKDFALRLEKLAEQLLDLLCENLGLEKGYLKKAFYGSRGPTFGTKVANYPPCPNPELVKGLRPHTDAGGIILLFQDDKVSGLQLLKDGQWVDVPPMRHSIVVNIGDQLEVITNGKYKSVEHRVIAQTDGTRMSIASFYNPGSDAVIYPAPELLEKEAEEKNQLYPKFVFEDYMKLYAKLKFQAKEPRFEAFKASNFGPIATV

SEQ ID NO: 10062 - protein, 320 aa, Glycine max
  unsure (1)..(320): unsure at all Xaa locations
MANFPVVDMGKLNTEERSAAMEIIKDACENWGFFELVNHGISIELMDTVERLTKEHYKKTMEQRFKEMVASKGLESXVQSEINDLDWESTFFLRHLPVSNVSDNSDLDEDYRKTMKKFALELEKLAEQLLDLLCENLGLEKGYLKKVFYGSKGPNFGXTKVSNYPPCPTPDLIKGLRAHTDAGGIILLFQDDKVSGMQLLKDDQWIDVPPMRHSIVINLGDQLEVITNGKYKSVMHRVIAQADDTRMSIASFYNPGDDAVISPAPALVKELDETSQVYPKFVFDDYMKLYAGLKFQAKEPRFEAMKANASVVDVGAIATV

SEQ ID NO: 10063 - protein, 307 aa, Glycine max
MENFPVINLENLNGEARKATLHQIEDACQNWGFFELVNHGIPLELLDTVERLTKEHYRKCMEKRFKEAVSSKGLEDEVKDMDWESTFFLRHLPTSNISEIPDLSQEYRDAMKEFAQKLEKLAEELLDLLCENLGLEKGYLKNAFYGSRGPNFGTKVANYPACPKPELVKGLRAHTDAGGIILLLQDDKVSGLQLLKNGQWVDVPPMRHSIVVNLGDQIEVITNGRYKSVEHRVIAQTNGTRMSVASFYNPASDALIYPAPALLEQKAEDTEQVYPKFVFEDYMKLYATLKFQPKEPRFEAMKAVNSF

SEQ ID NO: 10064 - protein, 308 aa, Glycine max
  unsure (1)..(308): unsure at all Xaa locations
MENFPVINLENLNGEERKATLNQIEDACQNWGFFELVSHGIPLELLDTVERLTKEHYRKCMEKRFKEAVSSKGLEAEVKDMDWESTFFLRHLPTSNISEIPDLSQEYRDAMKEFAQKLEKLAEELLDLLCENLGLEKGYLKNAFYGSRGPNFGTKVANYPACPKPELVKGLRAHTDAGGIILLLXQDDKVSGLQLLKNGQWVDVPPMRHSIVVNLGDQIEVITNGRYKSVEHRVIAQTNGTRMSVASFYNPASDALIYPAPALLEQKAEDTEQVYPKFVFEDYMKLYATLKFQPKEPRFEAMKAVNSF

SEQ ID NO: 10065 - protein, 317 aa, Glycine max
  unsure (1)..(317): unsure at all Xaa locations
MTNFPLINLEKLSGEERNDTMEKIKDACENWGFFELVNHGIPHDILDTVERLTKEHYRKCMEERFKELVASKGLDAVQTEVKDMDWESTFHLRHLPESNISEIPDLIDEYRKVMKDFALRLEKLAEQLLDLLCENLGLEKGXYLKKALYGSRGPTFGTQVANYPACPTPETVNGXMDHTDASGIMLVXDDDKVSGLQXLLRDGQWSDVPPMRHSIAVTIGDQLEVITNGKHKSVEHRVIAQTDGTRMSIASFYNPGSDAVIYPAPELLEKEAEEKNQLYPKFVFEDYMKLYAKLKFQAKEPRFEAFKASNFGPIATV

SEQ ID NO: 10066 - protein, 357 aa, Medicago sativa
MAQAKTITSLSEENTFESGFIRDEDERPKVAYNQFSNEIPVISIAGIDEVNGRREEICKKIVEACEEWGIFQIVDHGVDTKLISEMTHLSREFFALPPEEKLRFDMSGGKKGGFVVSSHLQGEVVQDWREMVIYFSYPIKDRDYSRWPDKPEEWKKVIEEYSENLMNLGCKLLEVLSEAMDLEKDALTKACVDMDQKIVVNLYPKCPKPDLTLGNKRHTDPGTITLLLQDQVGGLQATKDNGKTWITIQPIEGAFVVNLGDHGHVLSNGRFKNADHQAVVNSNHDRLSIATFQNPAQDATVYPLKIREGEKSLLEEPITFAEMYRRKMSKDIETAKLKKLAKEKQLQDMEINAKVED

SEQ ID NO: 10067 - protein, 357 aa, Medicago sativa
MAQAKTITSLSEENTFESGFIRDEDERPKVAYNQFSNEIPVISIAGIDEVNGRREEICKKIVEACEEWGIFQIVDHGVDTKLISEMTHLSREFFALPPEEKLRFDMSGGKKGGFVVSSHLQGEVVQDWREMVIYFSYPIKDRDYSRWPDKPEEWKKVIEEYSENLMNLGCKLLEVLSEAMDLEKDALTKACVDMDQKIVVNLYPKCPKPDLTLGNKRHTDPGTITLLLQDQVGGLQATKDDGKTWITIQPIEGAFVVNLGDHGHVLSNGRFKNADHQAVVNSNHDRLSIATFQNPSQDATVYPLKIREGEKSLLEEPITFAEMYKRKMSKDIETAKLKKLAKEKQLQDLEINAKVED

SEQ ID NO: 10068 - protein, 313 aa, Medicago truncatula
MDSFPIINLENLNGDERKATMEKIKDACENWGFFELVNHGIPHDLMDTVERLTKEHYRKCMEQRFKELVSSKGLEAVQTEVKDMDWESTFHLRHLPESNISEIPDLSDEYRKSMKEFALKLETLAEELLDLLCENLGLEKGYLKKALYGSKGPTFGTKVANYPPCPKPDLVKGLRAHTDAGGIILLFQDDKVSGLQLLKDGNWVDVPPMHHSIVINLGDQLEVITNGKYKSVEHRVVAQTDGTRMSIASFYNPGSDAVIYPAPTLIEENNEIYPKFVFEDYMNLYARLKFQAKEPRFEAFKESNVNLGPIATV

SEQ ID NO: 10069 - protein, 315 aa, Phaseolus lunatus
MSNFPVINFERLNGEERKDTMEKIKDACENWGFFELVNHGIPHDLLDTVERLTKEHYQKCMEERFKELMASKGLEAIQTEVKDMDWESTFHLRHLPESNISEVPDLVDEYRKVMKDFALRLEKLAEQLLDLLCENLGLEKGYLKKAFYGSRGPTFGTKVANYPPCPNPELVKGLRPHTDAGGIILLFQDDKVSGLQLLKDDQWVDVPPMRHSIVVNIGDQLEVITNGKYKSVEHRVIAQTDGTRMSIASFYNPGSDAVIYPAPELLEKEAEEKAQLYPKFVFEDYMKLYAKLKFQAKEPRFEAFKASNFDPIATA

SEQ ID NO: 10070 - protein, 315 aa, Phaseolus vulgaris
MSNFPVINFEKLNGEERKDIMEKIKDACENWGFFELVDHGIPHDLLDTVERLTKEHYEKCMEEKFKESMASKGLEAIQTEVKDMDWESTFHLRHLPESNISEVPDLVDEYRKVMKDFALRLEKLAEQLMDLLCENLGLEKGYLKKAFYGSRGPTLPTKVANYPPCPNPRVVKGLRAHTDAGGIILLFQDDKVSGLQLLKDDQWVDVPPMRHSIVVNIGDQLEVITNGKYKSVEHRVIAQTDGARMSIASFYNPGSDAVIYPAPELLEKEAEEKAQLYPKFVFEDYMKLYADLKFQAKEPRFEAFKESNFDPIATA

SEQ ID NO: 10071 - protein, 332 aa, Phaseolus coccineus
MVVLSQPALNQFFLLKPFKSTPLFTGIPVVDLTHPDAKNLIVNACRDFGFFKLVNHGVPLELMANLENEALRFFKKSQSEKDRAGPPDPFGYGSKRIGPNGDVGWVEYLLLNTNPDVISPKSLCIFRENPHHFRAVVENYITAVKNMCYAVLELMAEGLGIRQRNTLSRLLKDEKSDSCFRLNHYPPCPEVQALNRNLVGFGEHTDPQIISVLRSNSTSGLQICLTDGTWVSVPPDQTSFFINVGDALQVMTNGRFKSVKHRVLADTTKSRLSMIYFGGPALSENIAPLPSVMLKGEECLYKEFTWCEYKKAAYTSRLADNRLAPFQKSAAD

SEQ ID NO: 10072 - protein, 317 aa, Pisum sativum
MENFPIVDMGKLNTEDRKSTMELIKDACENWGFFECVNHGISIEMMDTVEKLTKEHYKKCMEQRFKEMVATKGLECVQSEIDDLDWESTFFLRHLPVSSISEIPDLDDDYRKVMKEFALKLEELAEELLDLLCENLGLEKGYLKKAFYGSKGPNFGTKVSNYPPCPKPELIKGLRAHTDAGGIILLFQDDKVSGLQLLKDDQWIDVPPMRHSIVINLGDQLEVITNGKYKSVMHRVIAQTDGARMSIASFYNPGDDAVISPASTLLKENETSEVYPKFVFDDYMKLYMGLKFQAKEPRFEAMMKAMSSVKVGPVVSI

SEQ ID NO: 10073 - protein, 288 aa, Trifolium repens
ACENWGFFELVNHGISHDLMDTVERLTKEHYRICMEQRFKDLVANKGLEAVQTEVKDMDWESTFHLRHLPESNISEVPDLTDEYRKAMKEFALKLEKLAEELLDLLCENLGLEKGYLKKAFYGSKGPTFGTKVANYPPCPKPDLVKGLRAHTDAGGIILLFQDDKVSGLQLLKDGKWVDVPPMHHSIVINLGDQLEVITNGKYKSVEHRVIAQSDGTRMSIASFYNPGSDAVIYPATTLIEENNEVYPKFVFEDYMNLYAGLKFQAKEPRFEAFKESSNVKLGPIATV

SEQ ID NO: 10074 - protein, 292 aa, Trifolium repens
ACENWGFFELVNHGISIEMMDKVEKLTKDHYKKCMEQRFKEMVSSKGLECVQSEINDLDWESTFFLRHLPFSNISEIPDLDDDYRKIMKEFAQKLENLAEELLDLLCENLGLEKGYLKKVFYGSKGPNFGTKVSNYPPCPKPDLIKGLRAHTDAGGIILLFQDDKVSGLQLLKDDQWIDVPPMRHSIVINLGDQLEVITNGKYKSVMHRVIAQTDGARMSLASFYNPSDDAIISPAPTLLKENETTSEIYPKFVFDDYMKLYMGLKFQAKEPRFEAMMKAMSSVDVGPVVSI

SEQ ID NO: 10075 - protein, 280 aa, Trifolium repens
ACQNWGFFELVNHGIPHDLMDTLERLTKEHYRKCMEQRFKELVSSKGLDAVQTEVKDMDWESTFHVRHLPESNISELPDLSDEYRKVMKEFSLRLEKLAEELLDLLCENLGLEKGYLKKAFYGSRGPTFGTKVANYPQCPNPELVKGLRAHTDAGGIILLFQDDKVSGLQLLKDDEWIDVPPMRHSIVVNLGDQLEVITNGKYKSVEHRVIAQTNGTRMSIASFYNPGSDAVIYPAPELLEKETEEKTNVYPKFVFEEYMKIYAALKFQAKEPRFEALKA

SEQ ID NO: 10076 - protein, 310 aa, Vigna angularis
MENFPVINLENINGEERKAVLEKIEDACENWGFFELVNHGIPLELLDTVERLTKEHYRKCMEQRFKEAVASKGLEGVQGEIKDMDWESTFFLRHLPHSNISEIPDLSEEYRKAMKDFAQKLEKLAEELLDLLCENLGLEKGYLKKAFYGSKGPNFGTKVANYPPCPKPELVKGLRAHTDAGGIILLLQDDKVSGLQLLKDGQWVDVPPMRHSIVVNLGDQLEVITNGKYKSVEHRVIARTDGTRMSIASFYNPAGDAVIYPAPALLERKTQVIDKVYPKFVFEDYMRLYATLKFQPKEPRFEAMKGVNTV

SEQ ID NO: 10077 - protein, 329 aa, Euphorbia esula
MTTDFKTIPIIDISSLVSKCDEPGMAQDPTVCEVVKQLDQACREAGFFYVRGHGIPDSLIKEVKSLAHKFFHLPYEEKLKIKMTPAAGYRGYQRVGENVTKGTPDMHEAIDCYKEVTPGMYGALGKPMEGCNQWPLNLPNFKSLMEEYVSLCTDLSRKILRGIALTLCGSADALEGEIGGNPFWVLRIIGYPDVSSVKGHDSNENDIGCGAHPDYGLLTLVNQDDDITALEVRNMSGEWIAAPPIPGTFVCNIGDMLKIWSNGLYDSTLHRVVNNSPKYRVCVAYFHEPNFDAAIEPSEFCVKKTGGTRRSGKAVYGEHLVSKVQTNFG

SEQ ID NO: 10078 - protein, 312 aa, Oryza sativa (japonica cultivar-group)
MEIPVIDLKGLAGGDEERERTMAQLHEACKDWGFFWVENHGVEAALMEEVKSFVYRHYDEHLEKKFYASDLAKNLHLNKDDGDVLVDGGDLADQADWEATYFIQHRPKNTAADFPDIPPAARESLDAYIAQAVSLAELLAGCISTNLGLAGAAGVVDAFAPPFVGTKFAMYPPCPRPDLVWGLRAHTDAGGIILLLQDDAVGGLEFHRGGREWVPVGPTRRGRLFVNIGDQVEVLSGGAYKSVVHRVAAGAEGRRLSVATFYNPGPDAVIAPATAAAPYPGPYRYGDYLDYYQGTKFGDKTARFQAVKKLFS

SEQ ID NO: 10079 - protein, 323 aa, Pelargonium x hortorum
MENFPVIDMEMLNGEERSAAMNMIKDACENWGFFEIKNHGISHELMDKVERLTKEHYAKFMEQRFKEMVASKGLDATQSEIDDLDWESTFFLRHLPTSNISEIPDLEHDYRLAMKEFAERLEKLAEELLDLLCENLGLEKGYLKKAFYGSKGPTFGTKVSNYPPCPKPELIKGLRAHTDAGGLILLFQDDKVSGLQLLKDGRWIDVPPMRHSIVINLGDQLEVITNGKYKSVMHRVIAQTDGNRMSLASFYNPGSDAVIYPAPALIEEENQNPIYPKFVFEDYMKLYAGLKFQAKEPRFEAMKAMPLPMAMDTTPLQGPVATA

SEQ ID NO: 10080 - protein, 318 aa, Pelargonium x hortorum
MESFPVINMEKLNGEERAATMEKIKDACENWGFFELLNHGIPYELLDTVEKMTKEHYRKCMEQRFKEMVASKGLEGVEVEVEDLDWESTFFLKHLPESNISQVPDLQDEYRKVMKEFAAKLEKLAEELLDLLSENLGLEKGYLKKAFYGSKGPTFGTKVSNYPPCPKPDLIKGLRAHTDAGGLILLFQDDKVSGLQLLKDGKWVDVPPMHHSIVINLGDQLEVITNGKYKSIEHRVIAQSDGTRMSIASFYNPGSDAVIYPAPALLEKETEEKQVYPKFVFEDYMKLYSGLKFQAKEPRFEAMKAVEANVTLDPIRTA

SEQ ID NO: 10081 - protein, 320 aa, Pelargonium x hortorum
MEKFPVINLEKLNGEGRAETMDKIKDACENWGFFEVLNHGIPYELLDTVEKMTKEHYKKCMEQRFKEMVTSKGLDGVEAEVEDMDWESTFFLKHLPESNISQVPDLQDNYRKVMKEFALKLENLAEELLDLLCENLGLEKGYLKKAFYGSKGPTFGTKVSNYPPCPKPDLIKGLRAHTDAGGLILLFQDDKVSGLQLLKDGNWVDVPPMHHSIVINLGDQLEVITNGKYKSVEHRVIAQSDGTRMSIASFYNPGSDAVIYPAPALLAKETEEKQVYPKFVFEDYMKLYSGLKFKAKEPRFEVMKAREDNINVTLDPIATS

SEQ ID NO: 10082 - protein, 386 aa, Catharanthus roseus
FLPNSEQERKMKDLNFHAATLSEEESLRELKAFDETKAGVKGIVDTGITKIPRIFIDQPKNLDRISVCRGKSDIKIPVINLNGLSSNSEIRREIVEKIGEASEKYGFFQIVNHGIPQDVMDKMVDGVRKFHEQDDQIKRQYYSRDRFNKNFLYSSNYVLIPGIACNWRDTMECIMNSNQPDPQEFPDVCRDILMKYSNYVRNLGLILFELLSEALGLKPNHLEEMDCAEGLILLGHYYPACPQPELTFGTSKHSDSGFLTILMQDQIGGLQILLENQWIDVPFIPGALVINIADLLQLITNDKFKSVEHRVLANKVGPRISVAVAFGIKTQTQEGVSPRLYGPIKELISEENPPIYKEVTVKDFITIRFAKRFDDSSSLSPFRLNN

SEQ ID NO: 10083 - protein, 382 aa, Catharanthus roseus
SEQERKMKDLNFHAATLSEEESLRELKAFDETKAGVKGIVDTGITKIPRIFIDQPKNLDRISVCRGKSDIKIPVINLNGLSSNSEIRREIVEKIGEASEKYGFFQIVNHGIPQDVMDKMVDGVRKFHEQDDQIKRQYYSRDRFNKNFLYSSNYVLIPGIACNWRDTMECIMNSNQPDPQEFPDVCRDILMKYSNYVRNLGLILFELLSEALGLKPNHLEEMDCAEGLILLGHYYPACPQPELTFGTSKHSDSGFLTILMQDQIGGLQILLENQWIDVPFIPGALVINIADLLQLITNDKFKSVEHRVLANKVGPRISVAVAFGIKTQTQEGVSPRLYGPIKELISEENPPIYKEVTVKDFITIRFAKRFDDSSSLSPFRLNN

SEQ ID NO: 10084 - protein, 401 aa, Catharanthus roseus
MPKSWPIVISSHSFCFLPNSEQERKMKDLNFHAATLSEEESLRELKAFDETKAGVKGIVDTGITKIPRIFIDQPKNLDRISVCRGKSDIKIPVINLNGLSSNSEIRREIVEKIGEASEKYGFFQIVNHGIPQDVMDKMVDGVRKFHEQDDQIKRQYYSRDRFNKNFLYSSNYVLIPGIACNWRDTMECIMNSNQPDPQEFPDVCRDILMKYSNYVRNLGLILFELLSEALGLKPNHLEEMDCAEGLILLGHYYPACPQPELTFGTSKHSDSGFLTILMQDQIGGLQILLENQWIDVPFIPGALVINIADLLQLITNDKFKSVEHRVLANKVGPRISVAVAFGIKTQTQEGVSPRLYGPIKELISEENPPIYKEVTVKDFITIRFAKRFDDSSSLSPFRLNN

SEQ ID NO: 10085 - protein, 344 aa, Hyoscyamus niger
MATFVSNWSTKSVSESFIAPLQKRAEKDVPVGNDVPIIDLQQHHHLLVQQITKACQDFGLFQVINHGFPEELMLETMEVCKEFFALPAEEKEKFKPKGEAAKFELPLEQKAKLYVEGEQLSNEEFLYWKDTLAHGCHPLDQDLVNSWPEKPAKYREVVAKYSVEVRKLTMRMLDYICEGLGLKLGYFDNELSQIQMMLTNYYPPCPDPSSTLGSGGHYDGNLITLLQQDLPGLQQLIVKDATWIAVQPIPTAFVVNLGLTLKVITNEKFEGSIHRVVTDPTRDRVSIATLIGPDYSCTIEPAKELLNQDNPPLYKPYSYSEFADIYLSDKSDYDSGVKPYKINV

SEQ ID NO: 10086 - protein, 320 aa, Lycopersicon esculentum
MESNFPVVDMGLLQTEKRPEAMDKIKDACENWGFFELVNHGISHELLDAVENLTKGHYKKCMEQRFKEMVASKGLEAVQTEIDDLDWESTFFLKHLPVSNVYEVPDLDDEYRKVMKDFALKLEKLAENLLDLLCENLGLEKGYLKKAFYGSKGPTFGTKVSNYPPCPKPDLIKGLRAHTDAGGIILLFQDDKVSGLQLLKDGNWIDVPPMKHSIVINLGDQLEVITNGRYKSIEHRVIAQQDGTRMSIASFYNPGSDAVIFPAPELIEKTEEDIKLKYPKFVFEDYMKLYAGLKFQAKEPRFEAMKAVETTVNLGPIETV

SEQ ID NO: 10087 - protein, 315 aa, Lycopersicon esculentum
MENFPIINLEKLNGDERANTMEMIKDACENWGFFELVNHGIPHEVMDTVEKMTKGHYKKCMEQRFKELVASKGLEAVQAEVTDLDWESTFFLRHLPTSNISQVPDLDEEYREVMRDFAKRLEKLAEELLDLLCENLGLEKGYLKNAFYGSKGPNFGTKVSNYPPCPKPDLIKGLRAHTDAGGIILLFQDDKVSGLQLLKDEQWIDVPPMRHSIVVNLGDQLEVITNGKYKSVLHRVIAQTDGTRMSLASFYNPGSDAVIYPAKTLVEKEAEESTQVYPKFVFDDYMKLYAGLKFQAKEPRFEAMKAMESDPIASA

SEQ ID NO: 10088 - protein, 316 aa, Lycopersicon esculentum
MENFPIINLEKLNGAERVATMEKINDACENWGFFELVNHGIPHEVMDTVEKLTKGHYKKCMEQRFKELVAKKGLEGVEVEVTDMDWESTFFLRHLPSSNISQLPDLDDVYREVMRDFRKRLEKLAEELLDLLCENLGLEKSYLKNTFYGSKGPNFGTKVSNYPPCPKPDLIKGLRAHTDAGGIILLFQDDKVSGLQLLKDGRWIDVPPMRHSIVVNLGDQLEVITNGKYKSVMHRVIAQKDGTRMSLASFYNPGNDALIYPAPALVDKEAEEHNKQVYPKFMFDDYMKLYANLKFQAKEPRFEAMKAMESDPIAIA

SEQ ID NO: 10089 - protein, 316 aa, Lycopersicon esculentum
MENFPIINLENLNGDERAKTMEMIKDACENWGFFELVNHGIPHEVMDTVEKLTKGHYKKCMEQRFKELVASKGLEAVQAEVTDLDWESTFFLRHLPTSNISQVPDLDEEYREVMRDFAKRLEKLAEELLDLLCENLGLEKGYLKNAFYGSKGPNFGTKVSNYPPCPKPDLIKGLRAHTDAGGIILLFQDDKVSGLQLLKDEQWIDVPPMRHSIVVNLGDQLEVITNGKYKSVMHRVIAQTDGTRMSLASFYNPGNDAVIYPAPSLIEESKQVYPKFVFDDYMKLYAGLKFQPKEPRFEAMKAMEANVELVDQIASA

SEQ ID NO: 10090 - protein, 295 aa, Lycopersicon esculentum
MEMIKDACENWGFFELVNHGIPHEVMDTVEKMTKGHYKKCMEQRFKELVASKGLEAVQAEVTDLDWESTFFLRHLPTSNISQVPDLDEEYREVMRDFAKRLEKLAEELLDLLCENLGLEKGYLKNAFYGSKGPNFGTKVSNYPPCPKPDLIKGLRAHTDAGGIILLFQDDKVSGLQLLKDEQWIDVPPMRHSIVVNLGDQLEVITNGKYKSVLHRVIAQTDGTRMSLASFYNPGSDAVIYPAKTLVEKEAEESTQVYPKFVFDDYMKLYAGLKFQAKEPRFEAMKAMESDPIASA

SEQ ID NO: 10091 - protein, 360 aa, Nicotiana sylvestris
  unsure (1)..(360): unsure at all Xaa locations
MPSRISDDVHQKQLDLYTIKELPESHAWRSSLDHDYQCNDSLESIPVIDLNDEKFAIENIGHACKTWGAFQIINHNISQRLLDNMEEAGKRLFSLPMQQKLKAARSADGIAGYGVARISSFFSKLMWSEGFTIVGSPFDHARQLWPHDYKKFCDVIEEYEKEMEKLAGRLMWLMLGSLGISKDDMKWACCGPRXECSALQLNSYPACPDPDRAMGLAAHTDSTILTILHQNNTSGLQVFKEGNGWVTVPPLSGALVINVGDLLHILSNGLYPSVLHRAVVNRTRHRLSVAYLYGPPSGVKISPLSKLVDQGHPPLYRSVTWSEYLGTKAKHFDKALSSFQLCAPRIGFANPKDRNSVQVG

SEQ ID NO: 10092 - protein, 370 aa, Nicotiana sylvestris
MPFRISDSFRTHSQKHLDLNSIKELPESHAWTSSNDYPSENSCNFESIPVIDLNNNNHNNINVLEHIGQACKKWGAFQIINHNISERLLQDIELAGKNLFSLPMQQKLKAARSPDGVTGYGVARISSFFSKLMWSEGFTIVGSPLEHARQIWPQDYKKFCDAIEEYEREMEKLAGRLMWLMLGSLGITKEDVNWAVGPKGESKGGSAALQLNSYPACPDPDRAMGLAAHTDSTILTILHQNNTSGLQVFKEGSGWVTVPPFLGALVVNVGDLLHILSNGSYPSVLHRAVVNRTRHRLSVAYLYGPPSGVKISPLAKLVDQRHPPLYRAITWSEYLGTKAKHFDKALSSVRLCAPLTGFADAKDHNGVQVG

SEQ ID NO: 10093 - protein, 319 aa, Nicotiana tabacum
MENFPIINLEKLNGSERADTMEMIKDACENWGFFELVNHGIPHEVMDTVEKMTKGHYKKCMEQRFKELVASKGLEAVQAEVTDLDWESTFFLRHLPVSNICEVPDLDDQYREVMRDFAQRLEKLAEELLDLLCENLGLEKGYLKKIFYGTQGPNFGAKVSNYPPCPQPDLIKGLRAHTDAGGIILLFQDDKVSGLQLLKDGQWIDVPPMRHSIVVNLGDQLEVITNGKYKSVMHRVITQTDGTRMSLASFYNPGSDAVIFPAPTLVEKEAEESKAIYPKFVFDDNMKLYAGLKFQAKEPRFEAMIKAMETVKSDPVATA

SEQ ID NO: 10094 - protein, 319 aa, Nicotiana tabacum
MENFPIINLEKLNGSERADTMEMIKDACENWGFFELVNHGIPHEVMDTVEKMTKGHYKKCMEQRFKELVASKGLEAVQAEVTDLDWESTFFLRHLPVSNICEVPDLDDQYREVMRDFAKRLEKLAEELLDLLCENLGLEKGYLKKIFYGTKGPNFGSKVSNYPPCPKPDLIKGLRAHTDAGGIILLFQDDKVTGLQLLKDGQWIDVPPMRLSIVVNLGDQLEVITNGKYKSVMHRVITQTDGTRMSLASFYNPGSDAVIFPAPTLVEKEAEESKAIYPKFVFDDYMKLYAGLKFQAKEPRFEAMIKAMETVKSDPVATA

SEQ ID NO: 10095 - protein, 308 aa, Nicotiana tabacum
MELLNTEQRAATMETIKDACENWGFFEVVNHGISHELLDTVEKLTKGHYKKCMEERFKEMVASKGLEAVQTEIKDLDWESTFFLKHLPISNISEVPDLEDEYRKIMKEFAEKLEKLAEQLLDLLCENLGLEQGYLKKAFYGSKGPTFGTKVSNYPPCPKPDLIKGLRAHTDAGGIILLFQDDKVSGLQLLKDDKWIDVPPMRHSIVINLGDQLEVITNGKYKSVEHRVIAQPDGNRMSIASFYNPGSDAVIYPAPELLEKENKVIYPKFVFEDYMKLYAGLKFQAKEPRFEAMKAVETTVNSAPIATV

SEQ ID NO: 10096 - protein, 319 aa, Nicotiana tabacum
MENFPIINLEKLNGSEKAATMEMIKDACENWGFFELVNHGIPHEVMDTVEKLTKGHYKKCMEQRFKELVASKGLEGVQAEVTDMDWVCTFFLRHLPVSNISEVPDLDDQYREVMRDFAKRLENLAEELLYLLCENLGLEKGYLKNVFYGSKGPNFGTKVSNYSPCPKPDLIKGLRAHTDAGGIILLFQDDKVSGLQLLKDGQWIDVPPMRHSIVVNLGDQLEVITNGKYKSVMHRVVAQKDGTRMSLASFYNPGSDAVIYPAPALVEKEAAESKQVYPKFVFDDYMKLYAGLKFQAKEPRFEAMKSIESDVKMDPIVTA

SEQ ID NO: 10097 - protein, 299 aa, Nicotiana tabacum
MEMIKDACENWGFFELVNHGIPHEVMDTVEKLTKGHYKKCMEQRFKELVASKGLEGVQAEVTDMDWESTFFLRHLPVSNISEVPDLDDQYREVMKDFAKRLENLAEELLDLLCENLGLEKGYLKNVFYGSKGPNFGTKVSNYPPCPKPDLIKGLRAHTDAGGIILLFQDDKVSGLQLLKDGQWIDVPPMRHSIVVNLGDQLEVITNGKYKSVMHRVIAQKDGTRMSLASFYNPGSDAVIYPAPALVEKEAAESKQVYPKFVFDDYMKLYAGLKFQAKEPRFEAMKSIESDVKMDPIATA

SEQ ID NO: 10098 - protein, 320 aa, Petunia x hybrida
MENFPIINLEKLNGSERDATMEMIKDACENWGFFELVNHGIPHEVMDTVEKLTKGHYKKCMEQRFKELVASKGLEAVQAEVTDLDWESTFFLRHLPVSNISEVPDLDDEYREVMRDFAKRLEKLAEELLDLLCENLGLEKGYLKKAFYGSKGPNFGTKVSNYPPCPKPDLIKGLRAHTDAGGIILLFQDDKVSGLQLLKDGQWIDVPPMRHSIVVNLGDQLEVITNGKYKSVLHRVIAQTDGTRMSLASFYNPGSDAVIYPAPTLVEKEADQECKQVYPKFVFDDYMKLYAGLKFQAKEPRFEAMKAREADVKSDPIATA

SEQ ID NO: 10099 - protein, 319 aa, Petunia x hybrida
MENFPIINLENLCGAERDATMEMIKDACENWGFFELVNHGIPHEVMDTVEKFTKGHYKKCMEQRFKELVASKGLEAVQAEVTDLDWESTFFLRHLPVSNISEVPDLDDEYREVMRDFAKRLEKLAEELLDLLCENLGLEKGYLKKAFYGSKGPNFGTKVSNYPPCPKPDLIKGLRAHTDAGGIILLFQDDKVSGLQLLKDDQWIDVPPMRHSIVINLGDQLEVITNGKYKSVPHRVIAQTDGTRMSLASFYNPASDAVIYPAPALVERDAEENKQIYPKFVFDDYMKLYARLKFQAKEPRFEAMKAMEADVKIDPVATV

SEQ ID NO: 10100 - protein, 319 aa, Petunia x hybrida
MENFPIISLDKVNGVERAATMEMIKDACENWGFFELVNHGIPREVMDTVEKMTKGHYKKCMEQRFKELVASKALEGVQAEVTDMDWESTFFLKHLPISNISEVPDLDEEYREVMRDFAKRLEKLAEELLDLLCENLGLEKGYLKNAFYGSKGPNFGTKVSNYPPCPKPDLIKGLRAHTDAGGIILLFQDDKVSGLQLLKDGQWIDVPPMRHSIVVNLGDQLEVITNGKYKSVMHRVIAQKDGARMSLASFYNPGSDAVIYPAPALVEKEAEENKQVYPKFVFDDYMKLYAGLKFQAKEPRFEAMKAMETDVKMDPIATV

SEQ ID NO: 10101 - protein, 320 aa, Petunia x hybrida
MENFPIISLDKVNGVERAATMEMIKDACENWGFFELVNHGIPREVMDTVEKMTKGHYKKCMEQRFKELVASKALEGVQAEVTDMDWESTFFLKHLPISNISEVPDLDEEYREVMRDFAKRLEKLAEELLDLLCENLGLEKGYLKNAFYGSKGPNFGTKVSNLPPCPKPDLIKGLRAHTDAGGIILLFQDVKVSGLQLLKDGQWIDVPPMRHSIVVNLGDQLEVITNGKYKSVMHRVIAQKDGARMSLASFYNPGSDAVIYPAPALVEKEEAEKNKQVYPKFVFDDYMKLYAGLKFQAKEPRFEAMKAMETDVKMDPIATV

SEQ ID NO: 10102 - protein, 341 aa, Solanum chacoense
MAELLSNWSSTLEAVPPSHCIPVHERPSDPVEIVDSIPVIDLGKANGEERSAVVKDLLKAFEEYGFFQIINHGVPVDLMDEAMKVYKEFFSLPAEEKAEYAKDAANDTNRGAATLYSSSAKHYDSEEHRYWRDVLEHSCNLDGKDKKTWPSNPPRYREVIGAYGDELRRVSKVILGLLAEGLGLEAGFFDKELGQRMLVNHYPACPDPSLTLGVGGHCDPNLITIIQQEVYGLQILKDDKWIGVQPIRNAFVVNSGLPITVVSNGKLTSVAHRVVTNTTHSRTSIGTFICPHDIVEPAKALVGPENPPQFKSFNWGIDFMPHYLSKKSVYHASLEPFKIDA

SEQ ID NO: 10103 - protein, 341 aa, Solanum melongena
MADLLSNYSSKLEAVPPSHCLPLHERPVDPVEIVNTIPVIDLGKAKGDERPAVVQQLMKAFEEYGFFQIINHGVPEKLMEEAMKVYKEFFSLPAEEKERYAKDAANNTATGAAKMYSSSAKHYDSEEHRYWRDVLEHSANLDGKDRETWPDKPSRYREVIGEYSDELRRVSKVILGMVAEGLGLEPGFFDKGLGQRMLVNHYPACPDPSLTLGVGGHCDPNLITIIQQEVYGLQILKDDKWIGVEPKPNAFVVNSGLPITVISNGKLASVAHRVVTNTTHSRTSIGTFICPENIVEPAKALVGPGNPPQFKSFNWGIDFMPHYLSKKSVYHAALEPFKIDA

SEQ ID NO: 10104 - protein, 319 aa, Solanum tuberosum
METFPVVNMEMLNTEKRAAILEKIKDACENWGFFEVIYHGISHDLMDTVEKFTKEHYKKCMEQRFKEMVASKGLEAVQTEIDDLDWESTFFLKHLPVSNISEVPDLEDDYRKIMKEFADKLEKLAEQLLDLLCENLGLEQGYLKKVFYGSKGPTFGTKVSNYPPCPKPDLIKGLRAHTDAGGIILLFQDDKVSGLQLLKDGKWIDVPPMRHSIVINLGDQLEVITNGKYKSVEHRVIAQPDGNRMSLASFYNPGSDAVIYPAPELLEKEEKENTVMYPKFVFEDYMKLYAGLKFQAKEPRFEAMKAVETAVNLGPIATV

SEQ ID NO: 10105 - protein, 315 aa, Solanum tuberosum
MENFPIINLEKLNGDERANTMEMIKDACENWGFFELVNHGIPHEVMDTVDKMTKGHYKKCMEQRFKELVASKGLEAVQAEVTDLDWESTFFLRHLPTSNISQVPDLDGEYREVMRDFAKRLEKLAEELLDLLCENLGLEKGYLKNAFFGSKGPNFGTKVSNYPPCPKPDLIKGLRAHTDAGGIILLFQDDKVSGLQLLKDEQWIDVPPMRHSIVVNLGDQLEVITNGKYKSVMHRVIAQTDGTRMSLASFYNPGSDAVIYPAKTLVEKEAEESTQVYPKFVFDDYMKLYAGLKFQAKEPRFEAMKAMESDPIASA

SEQ ID NO: 10106 - protein, 312 aa, Solanum tuberosum
MQARAEFGTSGTRIPVIDFSKLEGEERSATMSLLHQACEKWGFFMIENHGIDTYLMDNVKQLVNQHYEANMKKRFYESELPMSLEKKGNISNTDWESTFFVWHRPTSNIYEIQGLSKELCKAVDDYIDQLIELAENLSELMCENLGLEKSCIKEHFQAARVPSVGTKVAIYPQCPRPDLVRGLREHTDAGGIILLLQDEQVPGLEFFKDGHWVNIPPSKNNRLFVNIGDQIEILSNGMYKSIRHRVMAEKDGNRLSIATFYNPAGEAIISPAPKLLYPCHLRFQDYLNLYSKTKFAEKGPRFESAKTLANGH

SEQ ID NO: 10107 - protein, 368 aa, Ipomoea batatas
MAATLSTLTALAGEKALQSSFVRDEDERPKVGYNEFSDEIPVISLKGIDDVNGRRVQIRNDIVKACEDWGIFQVVDHGVDAGLIGEMTRLSKDFFALPPEEKLRFDMSGGKKGGFIVSSHLQGEAVKDWREIVTYFSYPVRARDYSRWPDKPEGWRAVTEKYSEKLMDLACKLLEVLSEAMGLEKEALTKACVDMDQKVVVNFYPKCPQPDLTLGLKRHTDPGTITLLLQDQVGGLQATKDGGKTWITVQPVDGAFVVNLGDHGHFLSNGRFKNADHQAVVNSERSRVSIATFQNPAPEATVYPLTVREGDKPIMEEPITFAEMYRRKMSKDLELARLKKFAKEQQQIVKAAAADKNLETKPIDQILA

SEQ ID NO: 10108 - protein, 368 aa, Ipomoea batatas
MAATLSTLTALAGEKSLQSSFVRDEDERPKVGYNEFSDEIPVISLKGIDDVNGRRVQIRNDIVKACEDWGIFQVVDHGVDAGLIGEMTRLSKDFFALPPEEKLRFDMSGGKKGGFIVSSHLQGEAVKDWREIVTYFSYPVRARDYSRWPDKPEGWRAVTEKYSEKLMDLACKLLEVLSEAMGLEKEALTKACVDMDQKVVVNFYPKCPQPDLTLGLKRHTDPGTITLLLQDQVGGLQATKDGGKTWITVQPVDGAFVVNLGDHGHFLSNGRFKNADHQAVVNSERSRVSIATFQNPAPEATVYPLTVREGDKPIMEEPITFAEMYRRKMSKDLELARLKKFAKEQQQIVKAAAADKNLETKPIDQILA

SEQ ID NO: 10109 - protein, 368 aa, Ipomoea batatas
MATTLSTLTALAGETALQSSFVRDEDERPKVGYNEFSDEIPVISLKGIDDVNGRRVQIRNDIVKACEDWGIFQVVDHGVDAGLIGEMTRLSKDFFALPPEEKLRFDMSGGKKGGFIVSSHLQGEAVKDWREIVTYFSYPVRARDYSRWPDKPEGWRAVTEKYSEKFMDLACKLLEVLSEAMGLEKEALTKACVDMDQKVVVNFYPKCPQPDLTLGLKRHTDPGTITLLLQDQVGGLQATKDGGKTWITVQPIDGAFVVNLGDHGHFLSNGRFKNADHQAVVNSERSRVSIATFQNPAPEAKVYPLKVREGEKPILEEPITFAEMYRRKMSKDLELARLKKFAKEQQQIINAATADKNLETKPIDQILA

SEQ ID NO: 10110 - protein, 374 aa, Bromheadia finlaysoniana
MAPVPFLPTAVTENTLRESFVRDEDERPKVAYNVFSHEIPVISLRGSTMREMEVEIEICWKIVAACEDWGIFQVVDHGVDAGLIADMTRLAREFFELPPEEKLRFDMSGGKKGGFIVSSHLQGEVVQDWREIVTYFSYPIRTRDYSRWPDKPEGWRAVVEEYSAKLMELACNLLGVLSEAMGLDREALAQACVDMDQKLVVNFYPKCPQPDLTLGLKRHTDPGTITLLLQDQVGGLQATKDGGETWITVQPVQNAFVVNLGDHGHYLSNGRFKNADHQAVVNSNCSRLSIATFQNPAPDGVVYPLAVREGEKPVMEEAITFAEMYRRKMSRDLELARLKKMGKMESKQKGAAGENAEAIGAAATKPKALNEILA

SEQ ID NO: 10111 - protein, 367 aa, Ipomoea purpurea
MTTVSTLTALAGETALRSSFVRDEDERPKVGYNEFSDEIPVISLKGIDDVLGRRVQIRKEIVKACEDWGIFQVVDHGVDAGLIGEMTRLSKDFFSLPPEEKLRFDMSGGKKGGFIVSSHLQGEAVKDWREIVTYFSYPVRARDYSRWPDKPEGLRAVTEKYSEKLMDLACKLLEVLSEAMGLEKEALTKACVEMDQKLVVNFYPKCPQPDLTLGLKRHTDPGTITLLLQDQVGGLQATKDGGKTWITVQPVDGAFVVNLGDHGHFLSNGRFKNADHQAVVNSEHSRMSIATFQNPAPEAKVYPLKVREGEKAILEEPITFAEMYRRKMSKDLELARIKKFAKEQQMIKAAAAADTNLETKPIDQILA

SEQ ID NO: 10112 - protein, 307 aa, Helianthus annuus
MANFPVINMENLNGSERGVTMEKINDACENWGFFELVNHGIPHDLLDKVEKMTKDHYKKCMEQRFKEMVAAKALEGVKAEVTDMDWESTFFLRHRPTSNISEIPDLVDEYRELMKDFAGKLEKLAEELLDLLCENLGLEKGYLKKAFYGSKGPNFGTKVSNYPPCPTPDLIKGLRAHTDAGGIILLFQDDKVSGLQLLKDGEWIDVPPMRHSIVINLGDQIEVITNGKYKSVMHRVIAQTDGTRMSIASFYNPGNDAVIYPAPTLLEKEPTEKEQSYPKFVFDDYMKLYAGLKFQAKEPRFEAHESS

SEQ ID NO: 10113 - protein, 295 aa, Helianthus annuus
NLNGSERGVTMEKINDACENWGFFELVNHGIPHDLLDKVEKMTKDHYKKCMEQRFKEMVAAKALEGVKAEVTDMDWESTFFLRHRPTSNISEIPDLVDEYRELMKDFAGKLEKLAEELLDLLCENLGLEKGYLKKAFYGSKGPNFGTKVSNYPPCPTPDLIKGLRAHTDAGGIILLFQDDKVSGLQLLKDGEWIDVPPMRHSIVINLGDQIEVITNGKYKSVMHRVIAQTDGTRMSIASFYNPGNDAVIYPAPTLLEKEPTEKEQSYPKFVFDDYMKLYAGLKFQAKEPRFEAHE

SEQ ID NO: 10114 - protein, 271 aa, Helianthus annuus
NWGFFEIVNHGISTELLDTVEKMTKGHYKKCMEDRFKDMVASKGLEAVQNQIDDLDWESTFYIRHLPESNISEIPDLEDEYRKVMREFAKELEKLAENILDIFCENLGLEKGYLKKAFYGAKGPTFGTKVSNYPPCPKPDLIEGLRAHTDAGGVILLFQDDKVSGLQLLKDDKWIDVPPMHHSIVINLGDQLEVITNGRYKSVMHRVIAQPDGTRMSIASFYNPGSDAVIYPAPQLVNKEEEKSNIYPKFVFEDYMKLYTAVKFQAKEPRF

SEQ ID NO: 10115 - protein, 144 aa, Helianthus annuus
NWGFFEIVHHGISTELLDRVQKMTKGHYKKCMEDRFKEMVAAKGLEAVQTEIDDLDWESTFYLRHLPKSNISEIPDLEHDYREVMKEFAKELEKLAEAILDILCENLGLEKGYLKEVFYGGKGPTFGTKVSNYPPCPKPDLIKV

SEQ ID NO: 10116 - protein, 117 aa, Helianthus annuus
MEEETFPVVNMEKLNGEQRAATMNLINDACENWGFFEIVHHGISTELLDRVQKMTKGHYKKCMEDRFKEMVAANASEAVQTEIDDLDWGSTFYLRHLPKSNISEIPDLEHDYREVIK

SEQ ID NO: 10117 - protein, 363 aa, Lactuca sativa
MHTRVADAFKAHPMVNQKHLDLKSMKELPESHAWLSQDGSPSYGSSSSEQVPVINLKDPNAMKLVGHACKTWGVFQVTNHGVPTNLLEEMEAAGRKLFALPIQQKLKAARAPDGVSGYGVARISSFFPKLMWSEGFTIIGSPYEHARKLWPNRYSRFCDVIEGYKHEMNNLAQRLMWLMLGSLGVTTEDVKWDGSQGSCPALQLNSYPACPDPDRAMGLAAHTDSTLLTILYQNNTSGLQAHREGAGWVTVPPIPGALVVNVGDLLHILSNGLYPSVLHRAMVNRTQHRLSVAYLYGPPSNVQISPLSKLTDHVHPPLYRPVTWSEYLGTKAKHFNKALSSVRLCVPLNGFVDANDHSGVPVG

SEQ ID NO: 10118 - protein, 362 aa, Lactuca sativa
MSLQQLDAFREKHLDLNSIKELPESYAWSSEDNCPSSSNSEPVPVINLKDSNAMKHVGYACKTWGVFQVTNHDIPITLLNNMEASGRKLFSLPFQQKLKAARSLDGVSGYGVARISSFFPKLMWSEGFTLIDSPHQHAQKLWPQGSGNFCDVIEEYNKEMNKLSNRVMWLILGSLGIKKGDIKWANQEGEIKEACAALQLNSYPSCPDPDRAMGLAAHTDSTLLTILHQSNTSGLQVQRGVGWVTVKPIAGALVVNIGDLIQILSNGLYSSVLHRAMVNRTQHRLSVAYLYGPPSNVRIAPLSKLTDNVHPPLYRPVTWSEYLGTKAKHFNKALLFVRLCAPITMSGFVDASTDNHNSVLVG

SEQ ID NO: 10119 - protein, 377 aa, Hordeum vulgare
MAPVSNETFLPTEAWGEATLRPSFVRDEDERPKVAHDRFSDAVPLISLHGIDGARRAQIRDRVAAACEDWGIFQVIDHGVDADLIADMTRLAREFFALPAEDKLRYDMSGGKKGGFIVSSHLQGEAVQDWREIVTYFSYPVKARDYGRWPEKPAGWCAVVERYSERLMGLSCNLMGVLSEAMGLETEALAKACVDMDQKVVVNFYPRCPQPDLTLGLKRHTDPGTITLLLQDLVGGLQATRDGGKNWITVQPISGAFVVNLGDHGHFMSNGRFKNADHQAVVNGESSRLSIATFQNPAPDARVWPLAVREGEEPILEEPITFTEMYRRKMERDLDLAKRKKQAKDQLMQQQLQLQQQQAVAAAPMPTATKPLNEILA

SEQ ID NO: 10120 - protein, 321 aa, Oryza sativa
MASVASFPVINMENLETEERGARMEVIRDACENWGFFEMLNHGIAHELMDEVERVSKAHYANCREEKFKEFARRMLEAGEKGADVKGIDWESTFFVRHRPVSNLADLPDVDDHYRQVMKQFASEIEKLSERVLDLLCENLGLEKGYLKKAFAGSNGPTFGTKVSSYPPCPRPDLVDGLRAHTDAGGIILLFQDDQVSGLQLLKDGEWVDVPPMRHAIVANIGDQLEVITNGRYKSVMHRVLTRPDGNRMSIASFYNPGADAVIFPAPALAGADAAAAAYPRFVFEDYMNLYVRHKFEAKEPRFEAMKSAAEVVHAAPIATA

SEQ ID NO: 10121 - protein, 321 aa, Oryza sativa
MASVASFPVINMENLETEERGARMEVIRDACENWGFFEMLNHGIAHELMDEVERVSKAHYANCREEKFKEFARRMLEAGEKGADVKGIDWESTFFVRHRPVSNLADLPDVDDHYRQVMKQFASEIEKLSERVLDLLCENLGLEKGYLKKAFAGSNGPTFGTKVSSYPPCPRPDLVDGLRAHTDAGGIILLFQDDQVSGLQLLKDGEWVDVPPMRHAIVANIGDQLEVITNGRYKSVMHRVLTRPDGNRMSIASFYNPGADAVIFPAPALAAADAAAAAYPRFVFEDYMNLYVRHKFEAKEPRFEAMKSAAEVVHAAPIATA

SEQ ID NO: 10122 - protein, 321 aa, Oryza sativa
  unsure (1)..(321): unsure at all Xaa locations
MASVASFPVINMENLETEERGAAMEVIRDACENWGFFEMLNHGIAHELMDEVERVSKAHYANCREEKFKEFARRMLEAGEKGADVKGIDWESTFFVRHRPVSNLADLPDVDDHYRQVMKQFASEIEKLSERVLDLLCENLGLEKGYLKKAFAGSNGPTFGTKVSSYPPCPRPDLVDGLRAHTDAGGIILLFQDDQVSGLQLLKDGEWVDVPPMRHAIVANIGDQLEVITNGRYKSVMHRVLTRPDGNRMSIASFYNPGADAVIFPAPALAAADAAGATXFGSKYPRFMTLXVRGKSRAQAPLFMALKSASQVVHLTPIAVA

SEQ ID NO: 10123 - protein, 279 aa, Saccharum officinarum
DACEKWGFFEILNHGISTELMDEVEKLTKDHYKRVREQRFLEFASKTLKDAQDVKAAENLDWESTFFVRHLPESNIAEIPDLDEDYRRAMRQFTGELEALAERLLDLLCENLGLDRGYLARAFAGPRTGAPTFGTKVSSYPPCPRPDLVSGLRAHTDAGGIILLFQDDALGGLQLLKDGAWVDVPPLRHSIVVNLGDQLEVITNGRYKSVMHRVVAQPDGNRMSIASFYNPGSDAVIFPAPALVKAEEAAAGAYPRFVFEDYMKQYVRHKFEAKEPRFE

SEQ ID NO: 10124 - protein, 194 aa, Sorghum bicolor
QKLSEKLLDLLCENLGLEPGYLKSAFAGSNGPTFGTKVSAYPPCPRPDLVDGLRAHTDAGGIILLFQDDQVSGLQLLKDGEWVDVPPMRHAIVVNIGDQLEVITNGRYKSVMHRVLTRPDGNRMSIASFYNPGADAVIFPAPALVGAAGAEEERAGQATYPRFVFEDYMNLYVRHKFEAKEPRFEAMKSAIATA

SEQ ID NO: 10125 - protein, 323 aa, Triticum aestivum
  unsure (1)..(323): unsure at all Xaa locations
MALPANAAVSLSFPVIHMEKLETGERGAAMGVIRDACENWGFFELLNHGISHKLMDEVERVSKAHYAACREDKFKEFAAKTLEAGEKGADVKDVDWESTFFVRHLPASNLADLPDLDHHYRQVMKEFASEIEKLAEKVLDLLCENLGLEQGYLKRAFAGSRGPTFGTKVSSYPPCPRPDMVDGLRAHTDAGGVILLFQDDQVSGLQLLKDGAWVDVPPMRHAIVVNIGDQLEVITNGRYKSVMHRVLTRPDGNRMSIASFYNPGADAIIFPAPALVGAADAAAVYPRFVFEDYMNLYVRYKFEAKEPRFKAMKAXXAAPIATA

SEQ ID NO: 10126 - protein, 323 aa, Triticum aestivum
  unsure (1)..(323): unsure at all Xaa locations
MAIPADAAVSLNFPVINMEKLETGERGAAMEVIRDACENWGFFELLNHGISHELMDEVERVSKANYTACREGQFKEFAARTLEAGDKGADVKDVDWESTFFVRHLPASNLADLPDLDHHYRQLIKEFASEIEKLAEKVLDLLCENLGLEQGYLKRAFAGSRGPTFGTKVSSYPPCPRPDLITGLRAHTDAGGVILLFQDDQVSGLQLLKDGAWVEVPPMRHAIVVNIGDQLEVITNGRYKSVMHRVLTRADGNRMSIASFYNPGADAVIFPAPALVAAAGASAVYPKFVFEDYMNLYVRHKFEAKEPRFKAMKAXXAAPIATA

SEQ ID NO: 10127 - protein, 328 aa, Triticum aestivum
  unsure (1)..(328): unsure at all Xaa locations
MALPANAAASLSFPVIHVEKLETGERGATMGVIRDACENWGFFELLNHGISAELMDEVERVSKAHYAACREEQFKEFAAKTLEAGEKGDDVKGXVDWEXSTFFVRHLPASNLADLPDLDHHYREVMKEFAAEIEKXLAEKVLDXLLCENLGLEQGYLKRAFAGSQGPXTFGTKVSSYPPCPRPDMVDGLRAHTDAGGVILLFQDDQVSGLQLLKDGAWVDVPPMRHAIVVNIGDQLEVITNGRYKSVMHRVLTRPDGNRMSIASFYNPGADAIIFPAPALVGAADAAAVYPRFVFEDYMNLYVRYKFEAKEPRFKGHEGXXAAPIATA

SEQ ID NO: 10128 - protein, 203 aa, Ananas comosus
ACENWGFFEILNHGITREMMDEVERLTKDHYRRSREQRFEEFANKALEDGTNGVDVSSNLDWESTFFVRHLPVSNISELSDLNDHYRNVMKEFAVELEKLAERLLDLLCENLGLEKGYLKKAFCGSNGPTFGTKVSSYPPCPRPDLIKGLRAHTDAGGIILLFQDDRVSGLQLLKDGEWVDVPPTPYSIVVNLGDQLEVITNG

SEQ ID NO: 10129 - protein, 318 aa, Musa acuminata
MDSFPVIDMEKLLGRERGAAMEILRDACEKWGFFEILNHGISHDLMDEVEKVNKEQYNKCREQKFNEFANKALENADSEIDHLDWESTFFLRHLPVSNISEIPDLDDQYRKAMKEFAAAIEKLAERLLDLLGENLELEKGYLKKAFSNGSKGPTFGTKVSSYPPCPRPDLVKGLRAHTDAGGIILLFQDDQVSGLQFLKDGEWLDVPPMRHAIVVNLGDQLEVITNGKYKSVVHRVVAQTDGNRMSIASFYNPGSDAVIFPAPALVEKEAEEKKEVYPRFVFEDYMKLYVGHKFQAKEPRFEAMKAMEAVATHPIATS

SEQ ID NO: 10130 - protein, 315 aa, Musa acuminata
MDCSFPVINMEKLQGGEREKAMELLRDACENWGFFELLNHGISPELMDEVERLTKEHYRKCREQKFKEFASKALENGSEVTDVDWESTFFLADLPVSNMSELVDMGADYRKVMKEFAAKLEMLADGLLDLLCENLGLEKGYLKKAFCGSKGPSFGTKVSAYPPCPRPELIKGLRAHTDAGGIILLFQDDRVSGLQLLKDGQWVDGPPMRHSIVVNLGDQLEVITNGKYKSVLHRVVALTDGNRMSIASFYNPGSDAVVFPAPTLVQKEAEKDDAAAVYPRFVFEDYMKLYVIQKFQAKEPRFEAMKATALPIPTS

SEQ ID NO: 10131 - protein, 318 aa, Musa acuminata
MDSFPVIDMEKLLGRERGAAMEILRDACEKWGFFEILNHGISHDLMDEVEKVNKEQYNKCREQKFNEFANKALENADSEIDHLDWESTFFLRHLPVSNISEIPDLDDQYRKAMKEFAAAIEKLAERLLDLLGENLELEKGYLKKAFSNGSKGPTFGTKVSSYPPCPRPDLVKGLRAHADAGGIILLFQDDQVSGLQFLKDGEWLDVPPMRHAIVVNLGDQLEVITNGKYKSVVHRVVAQTDGNRMSIASFYNPGSDAVIFPAPALVEKEAEEKKEVYPRFVFEDYMKLYVGHKFQAKEPRFEAMKAMEAVATHPIATS

SEQ ID NO: 10132 - protein, 277 aa, Asparagus officinalis
ACENWGFFELLNHGISIELLDKVEGMTKGHYKKCMEQKFKEFAKQALERGEELDMISNMDWESTFFLKHLPQSNITGIPDLEDEYREVMKEFALELEKLAERLLDLLCENLGLEQGYLKNRFGGSNGPTFGTKVTNYPPCPRPELFKGLRAHTDAGGLILLFQDDKVTGLQLLKDANWVDVPPMTHSIVVNLGDQLEVITNGKYKSVMHRVVAQTDGNRMSIASFYNPGGDAVIYPAPALIKEEEEEKENEVTTYPKFVFEDYMKLYVAQKFQAKEP

SEQ ID NO: 10133 - protein, 251 aa, Polygonum hydropiper
AYNQFSSDIPVISLAGIDDVGGKREEICGKIVAACEDWGVFQVVDHGVDTQLVSEMTRLAREFFALPAEEKLRFDMTGGKKGGFIVSSHLQGEAVQDWREIVTYFSYPIKNRDYSRWPDTPEGWLKATEHYSEQLMGLACKLLGVLSEAMGLEAEALTKACVDMDQKVVVNYYPKCPQPDLTLGLKRHTDPGTITLLLQDQVGGLQATRDDGKTWITVQPVEGAFVVNLGDHGHFLSNGRFKNADHQAVVN

SEQ ID NO: 10134 - protein, 106 aa, Lotus corniculatus
KEHTDPGTIILLLQDQLGGLQATRDNGKTWITVQPVEGAFVVNLGDHGHYLSNGRFKNADHQAAVNSNSSRLSIATFQNPAPDATVYPLKVREGEKSVMEEPITFA

SEQ ID NO: 10135 - protein, 325 aa, x Doritaenopsis sp.
MESGSFPVINMELLQGSQRPAAMALLRDACENWGFFELLNHGISHELMNRVEAVNKEHYRRFREQRFKEFASKTLDSVENVDPDNLDWESTFFLRHLPTSNISQIPDLDDDCRATMKEFARELEKLAERLLDLLCEDLGLEKGYLKRVFCGGSDGLPTFGTKVSNYPPCPKPDLIKGLRAHTDAGGIILLFQDDKVSGLQLLKDREWIEVPPLRYSIVVNIGDQLEVITNGKYKSVLHRVVAQTDGNRMSIASFYNPGSDAVIFPAPALVEKEAEEEEKKEIYPKFVFQDYMNLYIRKKFEAKEPRFEAMKSMEIVMSSQPIPTA

SEQ ID NO: 10136 - protein, 327 aa, x Doritaenopsis sp.
MESGSFPVINMELLQGSQRPAAMALLRDACENWGLYELLNHGISHELMNRVETVNKEHYRRFREQRFKEFASKTLDTVENVEPENLDWESTFFLRHLPTSNISQIPDLDDDCRSTMKEFALELENLAERLLDLLCEDLGLEKGYLKKVFCGGSDGLPTFGTKVSNYPPCPKPELIKGLRAHTDAGGIILLFQDDKVSGLQLLKDGEWIDVPPVRHSIVVNIGDQLEVITNGKYKSVLHRVVAQTDGNRMSIASFYNPGSDAVIFPAPALVEKEAEEKEEKKKEIYPKFVFQDYMNLYIRKKFEAKEPRFEAMKSMEIVMSSQPIPTA

SEQ ID NO: 10137 - protein, 310 aa, Populus tremula x Populus tremuloides
MAIPVIDFSKVNGTGEERAKTMAQIANGCEEWGFFQLMNHGIPEELLEKVKKVCSEYFKLEREEIFNNSTVANTLNALAEKNSGEKLENVDWEDVITLLDDNEWPSKTSGFKETMTEYRAELKKLAEKVMEVMDENLSLPKGYIKKAFNDGEGHSAFFGTKVSHYPPCPHPELVNGLRAHTDAGGVILLFQDDVVGGLQILKDGQWIDVQPMKNTIVINTGDQIEVLSNGRYKSTWHRVLASPDGNRRSIASFYNPSLKATIAPAPGLVEKDGEEIDQTYPKFLFGDYMSIYAKQKFLPKEPRFQAVRAL

SEQ ID NO: 10138 - protein, 372 aa, Perilla frutescens
MAQAVGVSLTTQAKESTLHPKFIRDEDERPKVAYDQFSSEIPVISLARIDESGDKRAEVCRRIVAACEDWGIFQVVDHGVHPMVVEGMTRLAREFFALPDHEKLRFDMSGGKKGGFIVSSHLQGEVVQDWREIVTYFSYPITARDYSRWPDKPVEWRAVTEGYSQLVMELGCKLLEILSEAMGLERDGLSKACVEMDQKIVVNFYPKCPQPDLTLGLKRHTDPGLITLLLQDQVGGLQATRDAGNTWITVQPIQGAFVVNLGDFAHYLSNGRFKNADHQAVVNSKCSRLSIATFQNPAPDAKVYPLKLREGEKAVMEEAITFSEMYKRKMSNDLELARLKKLANEKKLQEDSKNPKFENKVEPCKVLEEILA

SEQ ID NO: 10139 - protein, 314 aa, Rumex palustris
MEFPIINLEKVNGDERKATMDMIKDACENWGFFELVNHGIPVEVMDTVERLTKEHYKKSMEQRFKELVASNGLVDASAEVNDVDWECTFHLKHLPDSNISELPDLEDKYRKVMKDFALRLEKLAEDLLDLLCENLALEKGYLKEAFYGARGPTFGTKVANYPPCPKPELIKGLRAHTDAGGIILLFQDDRVSGLQLLKDDEWIDVPPMRHSIVVNLGDQLEVITNGKYKSVLHRVIAQTEGTRMSIASFYNPGSDAVIYPAPELVEDAQEKTQVYPKFVFEDYMKLYSALKFQAKEPRFEAMKADVSMGPIATA

SEQ ID NO: 10140 - protein, 314 aa, Rumex palustris
MEFPIINLEKVNGDERKATMDMIKDACENWGFFELVNHGIPVEVMDTVERLTKEHYKKSMEQRFKELVASNGLVNASAEVNDVDWECTFHLKHLPDSNISELPDLEEEYRKVMKDFALRLEKLAEDLLDLLCENLGLEKGYLKKAFYGARGPTFGTKVANYPPCPKPELIKGLRAHTDAGGIILLFQDDRVSGLQLLKDDEWIDVPPMPHSIVVNLGDQLEVITNGKYKSVLHRVIAQTDGTRMSIASFYNPGSDAVIYPAPELVEEAQEKTQVYPKFVFEDYMKLYSALKFQAKEPRFEAMKAVSTWDPIATA

SEQ ID NO: 10141 - protein, 318 aa, Dendrobium crumenatum
MELLEGSRRSDAMAVLRDACENWGFFELLNHGISHEPNEQSETVNKEHYREHYRRFREQRFKEFAAKTLDSGENVDGDNLDWESTFFLRHLPTSNISQVPDLDEDCGSTMKEFALGLEKLAERLLDLLCENLGLEKGYLKRVFCGGSDGLPTFGTKVSNYPPCPKPELIKGLRAHTDAGGIILLFQDDTVSGLQLLKDEEWIDVPPMRHSIVVNIGDQLEVITNGKYKSVMHRVVAQTNGNRMSIASFYNPGSDAVIFPAPELVEKEAAEKKKETYPKFVFEDYMKLYVRQKFEAKEPRFEAMKTMDAVISSQPIPTA

SEQ ID NO: 10142 - protein, 320 aa, Brassica rapa subsp. rapa
MEENIKPPVIDLSKLNDEERDQTMALIDDACQNWGFFELLNHGIPYDLMDNIERMTKEHYKKFMEQKFKEMLRSKGLDTLETEVEDIDWESTFFLHHLPQTNLYDIPNMSDEYRTAMKDFGKRLENLTEELLDLLCENLRLEKGYLKKVFRGTKGPTFGTKVSNYPPCPNPEMIKGLRAHTDAGGLILLFQDDKVSGLQLLKDGDWVDVPPLKHSIVINLGDQLEVITNGKYKSVMHRVMTQKEGNRMSIASFYNPGSDAEISPAQSLVDKESEYPSFVFDDYMKLYSGVKFQPKEPRFEAMKNAAVTTDVNPVATEETF

SEQ ID NO: 10143 - protein, 166 aa, Brassica rapa subsp. pekinensis
VEEYEEHMKKLASKLMWLALNSLGVSEEDIEWASLSSDLNWAQAALQLNHYPVCPEPDRAMGLAAHTDSTLLTILYQNNTAGLQVFRDDLGWVTVPPFPGSLVVNVGDLFHILSNGLFKSVLHRARVNQTRARLSVAFLWGPQSDIKISPVPKLVSPVESPLYQSV

SEQ ID NO: 10144 - protein, 374 aa, Neurospora crassa
MSTQDQQPATTTLRLASGNGPITRSILPHPPRDALPSELPIISLAPLFSPSSSLSSRLEVAKQIRQAATTNGFFYITSHGIPPSIIQEAQESAFQFFRSPVSEKEKASMHNSLYKYGWKPPRTQRLNPFESVDHRESFSWRYDPRYDPSVKNVEEEIPDEVKAMIKHDPDDYPWSAVPPEFKAAVIRYFQAVLHLGRVLQRAFALSLGLEETAFDEKSRWPDLGMAVNYYPPLSASGKEEGKGDETKVSIGSHTDFQLFTILGQDEVGGLQVLSRSGQWLNAKPIPGTFVVNFGDYMQRITNDKYVSTVHRVQNYSGKERLSMAFFFGFNLNETCEVLDSCVEEGEEPKYEAVSCWEWTQRRVRMMHDVKGNGS

SEQ ID NO: 10145 - protein, 297 aa, Elaeis guineensis
MAVPVINLRELDGDRRTETKSLLHEACEKWGFFWVENHGIKEALMEKVKGLVNSHYEEYLKQSFYESELAMGLGPQTQSSEADWESTYFIQHQPESNNIHDIPGHEIEFCEAMEDYIRQLIKLAETLAELMSENLGLDKCYLKEAFSPAFVGTKVAKYPQCPQPKLLMGLRARTDGGGIILLLQDDMVPGLEFFKHGKWVPITPKKDNRIFVNLGDQVEVMSNGLYKSILHRVAADKDGSRLSIATFYNPGADAIISPAPKLLYPGGYRFKDYLDYYTGTKFSDKGARFQTIKDMFK

SEQ ID NO: 10146 - protein, 334 aa, Eustoma grandiflorum
MEVQRVQEIASLSKVIDTIPAEYIRSENEQPVISTVHGVVLEVPVIDLSDSDEKKIVGLVSEASKEWGIFQVVNHGIPNEVIRKLQEVGKHFFELPQEEKELIAKPEGSQSIEGYGTRLQKEVDGKKGWVDHLFHKIWPPSAINYQFWPKNPPAYREANEEYAKRLQLVVDNLFKYLSLGLDLEPNSFKDGAGGDDLVYLMKINYYPPCPRPDLALGVAHTDMSAITVLVPNEVPGLQVYKDGHWYDCKYIPNALIVHIGDQVEIMSNGKYKSVYHRTTVNKEKTRMSWPVFLEPPPDHEVGPIPKLVNEENPAKFKTKKYKDYAYCKLNKLPQ

SEQ ID NO: 10147 - protein, 155 aa, Eustoma grandiflorum
GYGVARISSFFPKLMWSEGFTILGSPLEHARKIWPHDYTKFCELIETYEKEMKKLAWRLMWLTLGSLGINDDDVKWASPKGTFDGACAALQLNSYPACPEPDRAMGLAAHTDSSILTILHQNGTRGLEVLQEGLGWVTVPPLPGALVVNVRDLFQ

SEQ ID NO: 10148 - protein, 344 aa, Arabidopsis lyrata subsp. petraea
LNSKFVRDEDERPKVAYNEFSDEIPVISLAGIDDVDGKRGEICRQIVEACENWGIFQVVDHGVDTNLVADMTRLARDFFALPPEEKLRFDMSGGKKGGFIVSSHLQGEAVQDWREIVTYFSYPVRNRDYSRWPDKPEGWVKLTEEYSERLMSLACKLLEVLSEAMGLEKESLTNACVDMDQKIVVNYYPKCPQPDLTLGLKRHTDPGTITLLLQDQVGGLQATRDNGKTWITVQPVEGAFVVNLGDHGHFLSNGRFKNADHQAVVNSNSSRLSIATFQNPAPDATVYPLKVREGEKPILEEPITFAEMYKRKMGRDLELARLKKLAKEESDHKEVAKPVDQIFA

SEQ ID NO: 10149 - protein, 318 aa, Striga hermonthica
MATFPVINMAKLNGEGRPATMAQIEDACQNWGFFEVVNHGISAEFMDRVERLTKEHYKKCMEQRFKEMVAAKGLEAVQSEINDLDWESTFFLRHLPSSNISEIPDLHPEYREVMKEFAAHLEKLAEHLLDLLCENLGLEMGYLKKVFYGSKGPTFGTKVSNYPPCPKPDLIKGLRAHTDAGGIILLFQDDKVSGLQLLKDGQWVDVPPMRHSIVVNIGDQLEVITNGKYKSVMHRVIAQTDGTGRMSLASFYNPGSDAVIYPAPALVEKAENNELYPKFVFEDYMKLYAGLKFQAKEPRFEAFKNMDKAANLGPIATA

SEQ ID NO: 10150 - protein, 263 aa, Torenia fournieri
FFELLNHGISPEFMDTVERLTKDHYKKCMELRFKEMVASKGLEAVQSQADDIDWESTFYVKHLPESNISEIPDLDDDYRKVMKEFAAQIEKLAEELLDLLCENLGLEKGYLKKVFYGSKGPPFGTKVSNYPPCPKPDFIKGLRAHTDAGGIILLFQDDKVSGLQLLKDGEWVDVPPMKHSIVINLGDQLEVITNGKYKSVMHRVIAQTDGNRMSIASFYNPGTDAVIYSAPALVEKEEEKKDLYPKFVFDDYMKLYAGLKFQA

SEQ ID NO: 10151 - protein, 210 aa, Pinus pinaster
  unsure (1)..(210): unsure at all Xaa locations
TSTLDSLVSQIHAACRDWGFFQVINHGVSPHFLQTILSEAANFFSLPMQEKCKVRRDFENPLGYYDTELTKNVRDWKEVFDFXMPSEFRLPASFEGESAEILTATNQWPENPPGLREACEKYAEAVEKLSFRLLELISLSLGLPARYFHSKFEDPTSRLRLNHYSPCPAPELAXGVGRHKDGGALTVLAQDEVGGLQVRRKDGEWIGVKP

SEQ ID NO: 10152 - protein, 261 aa, Passiflora edulis
VLNHGIPNEFMDTVERMTKAHYNKCMEQRFNELVASKALEGVQVELKDMDWESTFYIRHLPESNIAEIPDLDDEYRKVMKDFAAKLEKLAEELLDLFCENLGLEKGYLKKALYGSRGPTFGSKVSNYPPCPKPELVKGLRPHTDAGGIVLLFQDGKVGGLQLLKDGQWVDVPPIPHAIVINIGDQLEVITNGKYKSVDHRVVAQTDGARMSLASFFNPGSDAVIYPAPALVEKEAEEKKQLYPKFVFEDYMKIYAGLKFHA

SEQ ID NO: 10153 - protein, 187 aa, Thuja standishii
ICTYFAQPLHQRDYSRWPVKPEGWREIVDKYSEALMGLAKKMLAIVSEALGLEPDAVTKACVEMDQKVVINYYPKCPEPDMTLGLKRHTDPGTITLLLQDQVGGLQATKDNGLNWITVQPVQGAFVVNLGDHMHYLSNGKFKTADHQAVVNSNYSRLSIATFQNPSQDAIVYPLKLEEGEECFMEEP

SEQ ID NO: 10154 - protein, 187 aa, Thuja standishii
ICTYFAQPLHQRDYSRWPLKPEGWREIVDKYSEALMGLAKKMLAIVSEALGLEPDAVTKACVEMDQKVVINYYPKCPEPDMTLGLKRHTDPGTITLLLQDQVGGLQATKDDGLNWITVQPVQGAFVVNLGDHMHYLSNGKFKTADHQAVVNSNYSRLSIATFQNPSQDAIVYPLKLEEGEESFMEEP

SEQ ID NO: 10155 - protein, 187 aa, Chamaecyparis pisifera
ICTYFAQPLYQRDYSRWPDKPEGWREIVDKYSEALMGLASKLLAIVSEALGLEADAVTKACVEMDQKVVINYYPKCPEPDMTLGLKRHTDPGTITLLLQDQVGGLQATKDDGLNWITVQPVQGAFVVNLGDHMHYLSNGKFKTADHQAVVNSNYSRLSIATFQNPSQEASVYPLELEEGEKSFMEEP

SEQ ID NO: 10156 - protein, 479 aa, Mus musculus
MDSGYGDGLQGECLRKPDQTQPKLYGVGDPTATFSSDSSCLSSRGRVIKWFWDSAEEGYRTYHMDEYDEDKNPSGIINLGTSENKLCFDLLSWRLTQGDMLHVEPSLLQYPDWRGHLFLREEVAKFLSFYCKSPAPLKPENVVVLNGCASLFSALATVLCEAGEALLIPTPYYGAITQHIYLYGNVRLAYVYLDSKVTGLNTRPFQLTVEKLEMVLQGVSSEGVKVKGLILINPQNPLGDVYSPEELQDFLRFAMRHKLHVIMDEVYMLSVFEESLGYRSVLSLERLPDPQRTHVMWATSKDFGMSGLRFGVLYTENQHVATAVASLCRYHGLSGLVQHQMAQLLRDHDWISQVYLPENHARLKAAHTYVSEELRALGIPFVSRGAGFFIWVDLRKYLCKGTFEEEALLWRQFLDNKVLLSSGKTFECKEPGWFRVVFSDKENRLRLGMQRMRQVLEGQSQVVEDASPCHAQEPQSQPR

SEQ ID NO: 10157 - protein, 217 aa, Mus musculus
MDEVYMLSVFEESLGYRSVLSLERLPDPQRTHVMWATSKDFGMSGLRFGVLYTENQHVATAVASLCRYHGLSGLVQHQMAQLLRDHDWISQVYLPENHARLKAAHTYVSEELRALGIPFVSRGAGFFIWVDLRKYLCKGTFEEEALLWRQFLDNKVLLSSGKTFECKEPGWFRVVFSDKENRLRLGMQRMRQVLEGQSQVVEDASPCHAQEPQSQPR

SEQ ID NO: 10158 - protein, 1207 aa, Rattus norvegicus
MEEELKSGGTGRLQAAGTFWREGVILKDRPCRGEEGGGGTSFCSLNDEDTPGGHKDLDFIDMSENGKEVSSQAAKTESSTQTPSHWESIHSKPRDQLKKRSSRKKAFKILQEKMLKLQCVFMDHFLQRTSQQMQCLPPGDQQCTRASRKQEKKMGFLLSQIINHIWSNTVKKLKFKVPPLPCSDSRCGIKAGHQALSSWQTGQPRPRLGDFEDAFADRTLSKRGTGIYEFYHLSFQGYEAYQTDKYHQDKNPSGYINLSTSENKLCLDLITARLTQCDMNFLDEAQLQYSDWKGEPSLREELASFLTHYCKAPTPLDPENVVVLNGCSSVFSSLVMVLCDPGDALLIPTPCYSGFTFSSYLYSKVELIPVYLESQVTETNKYSFQLTVDKLKLTLTQAKKKGKKVKGLVLINPQNPLGDVYTQGSLQEYLVFAKKHKLHVIMDEIYMLSVFEPTVTFHSILSIENLPDPNMIHMIWGTSKDFGMSGIRFGVLYTHNKEVASAMKAFGYHHSVSGIIQYKLRQLLQDKEWINKVYLPKNHSRLREAYSYVTKMLEDLKIPFCNCGSGLFVWINLKAYLNPCTFDQEQILHQRFQDKKLLLSSGKSFMCIEPGWFRLVFAEKHPQLQVAMGQFCQVLAEHKKGETTEQQEKPTGTDDVARGQATPVSRKYSPKNTARENPRSKVGAAIRHCTPKRPGSQPGSLNRFLPLGLEILSAVTLQTLWFRKTRAGPADHSVLVASFGLKDSTVPTTCTGSASTQDMESGYGDDLQGECLRKPDQKQPKLYGVGDPTATFSSDSFCLSSRGRVIKWFWDSAEEGYRTYHMDEYDEDKNPSGIINLGTSENKLCFDLLSWRLTQNDMLHVEPSLLQYPDWRGHRFLRKEVARFLSFYCKSPAPLKPENVVVLNGCASLFSALATVLCEPGEVLLIPTPYYGAITQHIYLYGNIRLAYVYLDSKGVKVKGLILINPQNPLGDIYSPEELQDFLGFAMRHKLHVIMDEVYMLSVFEESLGYRSVLSLERLPDPQRTHVMWATSKDFGMSGLRFGVLYTENQHVATAVASLCRYHGLSGLVQHQMAQLLQDHDWISQVYLPENHARLKAAHTYVSEELRALGIPFVSRGAGFFIWVDLRKYLREGTFEEEAMLWRRFLDNKVLLSSGKTFECKEPGWFRVVFSDKENRLRLGMQRMRQVLKGQSQMVEDASRCHTQELQ

SEQ ID NO: 10159 - protein, 467 aa, Vigna radiata
MRLLSTIATCNSHGQDSSYFLGWQEYEKNPYDELHNPKGIIQMGLAENQLSFDLLESWLAKNPDVAGFKRDGKSIFRELALFQDYHGLPSFKKALVDFMSEIRGNKVTFDPNHIVLTAGSTSANETLMFCLAEQGDAFLLPTPYYPGFDRDLKWRTGAEIVPIQCTSSNNFQITEPALKQAYEEARKRNLRVKGVLVTNPSNPLGTTMSRSELNLLVDFIKEKKDTHLISDEIYSGTVFSSPGFVSVMEILKERNDTEEIWNRVHVVYSLSKDLGLPGFRVGAIYSENDTVVAAATKMSSFGLVSSQTQYLLSAMLGDKKFARNYIVENQKRLKRRQRMMVSGLQKAGISCLESNAGLFCWVDMRHLLHSNTFEAEMELWKKIVYQVGLNISPGSSCHCTEPGWFRVCFANMSEETLTLAMKRLKNFVVESTCTQRSALFNGTSKRKSLTKWVFRLSSRDHREQEER

SEQ ID NO: 10160 - protein, 467 aa, Vigna radiata
MRLLSTIATCNSHGQDSSYFLGWQEYEKNPYDELHNPKGIIQMGLAENQLSFDLLESWLAKNPDVAGFKRDGKSIFRELALFQDYHGLPSFKKALVDFMSEIRGNKVTFDPNHIVLTAGSTSANETLMFCLAEQGDAFLLPTPYYPGFDRDLKWRTGAEIVPIQCTSSNNFQITEPALKQAYEEARKRNLRVKGLLVTNPSNPLGTTMSRSELNLLVDFIKEKKDTHLISDEIYSGTVFSSPGFVSVMEILKERNDTEEIWNRVHVVYSLSKDLGLPGFRVGAIYSENDTVVAAATKMSSFGLVSSQTQYLLSAMLGDKKFARNYIVENQKRLKRRQRMMVSGLQKAGISCLESNAGLFCWVDMRHLLHSNTFEAEMELWKKIVYQVGLNISPGSSCHCTEPGWFRVCFANMSEETLTLAMKRLKNFVVESTCTQRSALFNGTSKRKSLTKWVFRLSSRDHREQEER

SEQ ID NO: 10161 - protein, 472 aa, Vigna radiata
MKFLSTKATCNSHGQDSSYFLGWQEYEKNPYDEVLNPEGIIQMGLAENQLSFDLLESWLAKNPDVAGFKSDGKSIFRELALFQDYHGLPSFKKALVDFMAEIRGNKVTFDPNHIVLTAGSTSANQTLMFCLAELGDAFLLPTPYYPGFDRDLKWRTGVEIVPIQCTSSNNFQITEAALKQAYQEAKKRNLRVKGVLVTNPSNPLGTTMSRSELNLLVDFIKDKNMHLISDEIYSGTVYNSPGFVSIMEILKDRNDLKDCGANVWDRVHIVYSLSKDLGLPGFRVGAIYSENEVVVAAATKMSSFGLVSSQTQYLLSAMLGDKKFTKNYISENLKRLKRRQRNLVSGLQKAGISCLKTNNAGLFCWVDMRHLLHSNTFEAEMELWKKILYEVRLNISPGSSCHCTEPGWFRMCFANMSEETLNLAMKRLKTFVQESNHDNGCTAKRVQSSRRKSLSNWVFRLSSREHREQEQR

SEQ ID NO: 10162 - protein, 472 aa, Vigna radiata
MKFLSTKATCNSHGQDSSYFLGWQEYEKNPYDEVLNPQGIIQMGLAENQLSFDLLESWLAKNPDVAGFKSDGKSIFRELALFQDYHGLPSFKKALVDFMAEIRGNKVTFDPNHIVLTAGSTSANETLMFCLAELGDAFLLPTPYYPGFDRDLKWRTGVEIVPIQCTSSNNFQITEAALKQAYQEAKKRNLRVKGVLVTNPSNPLGTTMSRSELNLLVDFIKDKNMHLISDEIYSGTVYNSPGFVSIMEILKDRNDLKDCGANVWDRVHIVYSLSKDLGLPGFRVGAIYSENEVVVAAATKMSSFGLVSSQTQYLLSAMLGDKKFTKNYISENLKRLKRRQRNLVSGLQKAGISCLKTNNAGLFCWVDMRHLLHSNTFEAEMELWKKILYQERLNISPGSSCHCTEPGWFRMCFANMSEETLNLAMNGLKTFVQESNHDNGCTTKRVQSSRRKSLSNWVFRLSSREHREQEQR

SEQ ID NO: 10163 - protein, 359 aa, Annona cherimola x Annona squamosa
QMGFAENQVSFDLLEQYLEQHPEASGWGSRLSSFRDNALFQDYHGLKTFRQAMASFMEQIRGGRAKFDPERIVLTAGATAANELLTFILADPGDALLVPTPYYPGFDRDLRWRTGVKIVPIHCDSNNKFQVTPQALENAYAAAKSMDIKVRGVLITNPSNPLGAAISRPILEEILDFVSRKNIHLISDEIYSGSVFSAAEFTSVAEILAASNYKDSERVHIVYSLSKDLGLPGFRVGTIYSYNDKVVTTARRMSSFSLISSQTQNLLASMLSDVDFTKKYIETNRERLRRRYASTIRGLRNAGIECLKGNAGLFCWMNLSPLLEKPTREAELKLWDSMLHEVKLNISPGSSCHCLEPGW

SEQ ID NO: 10164 - protein, 395 aa, Anopheles gambiae str. PEST
MPKISNRAEHMPASPIRKLVPFSIAAKQKGIKVYHLNIGQPDIETPQSALDALKDIHLKVLEYSLSEGNIEYREQLAKYYNKIGFADITPKNFIVTNGGSEALNFAISVLCDQDDEIIIPEPYYANYNGFSNALGVVVKSIPSSIDTGFALPPIEEFEKKITDKTKAILICNPGNPTGYLYTREELAKLAEIALKHDIVVISDEVYREYVYDGKSQVSMLAFPELADNCIIIDSESKRYSMCGVRIGFMVTRSQKILDAAMKFAQARLSPVLIGQIIAAAAHVDDDAYIRSVREEYTKRRNLLVDLLNSIPGVICPNPKGAFYCMVELPVKDTDDFAQWLLESYNFNGETIMVAPAGGFYSDPALGKKQVRMAYVLNEEDLRKSVEVLRNALQVY

SEQ ID NO: 10165 - protein, 363 aa, Rosa hybrid cultivar 'Kardinal'
MGLAENQLSFDVIEEWIKKNPKASICTPEGVAEFKNVANFQDYHGFPDFRKAIANFMSKARGGRVKFDPDRVVMAGGATGANETVMFCLADPGDAFLVPSPYYPAFYRDLGWRTGVKIVPVDCDSSNNFQVTRAALEAAYEKARNNNINIKGLIITNPSNPLGTTVDRDTLTSLVKFINDKNIHLVCDEIYAGTVFSCPKFTCVTEVLQDVKNCNRDLIHIVYSLSKDMGVPGLRIGIVYSYNDAVVNCARKMSSFGLVSSQTQHMLSAMLLDDEFVSNFLETSSKRLARRHRFFTTGLEEVGINCLKGNAGLYCWMDLRKLLKDQTFEAEMVLWRMIINEVKLNVSPGSSFRCVEPGWFRVC

SEQ ID NO: 10166 - protein, 437 aa, Magnetospirillum magnetotacticum
MIPSGLPSILNRHRATVSRHAIGIPLMNSQHDFHRIKRLPPYVFAEVNAMKARARAAGEDIIDFGMGNPDQPTPTHIVDKLVEAARNPRAHRYSMSRGIPGLRKALSAYYQRRFAVDIDPEAECIVTLGSKEGLANLANAITSPGDIVLVPNPSYPIHPYGFIIAGGSCRFVPVTPDAEFLKALDRAVRHSVPKPIALVLNYPSNPTALLADLDFYGQVVEFCRHHGIWILSDLAYSEIYFDVAPPPSILQIPGAKDIAVEFTSMSKTYNMPGWRIGFAAGNKTLINALARIKSYLDYGAFTPIQVAATAALNGPQDCVDEIRALYKSRRDALIEGLAAAGWDIPSPPATMFAWAPIPKPFAHLGSLEFSKLLMREAQVAVAPGIGFGEYGDSHVRIGLVENVQRTRQAVRNIKTFLGSTGQVLEASEKQRAAGTEP

SEQ ID NO: 10167 - protein, 396 aa, Fusobacterium nucleatum subsp. nucleatum ATCC 25586
MRISDRVKNMKYSAVRKLAPLAAEAEKKGIKVYRLNIGQPNIETPKLFFEGLKNIPDHVIRYADSRGISILLEQVIEVYARDGHILKKEDIIVTEGGSEALTFAMLAICNPNDEVLIPEPFYSNYKSFLDIAGAKIIPIPTDIKNDFALPKKEEIQKLITSKTKAILYSNPCNPTGKVYTEEEVKLLANLAAENDLFVIADEPYREFIYDDNDKHYSLLDIEKAKENVIIIDSVSKHYSACGARVGFLISKNKDFMTYIMKLCQARLAAPTVEQYAVASLMKAPKEYFKEIKEIYKRRRDIIVNSLNKIEGVTCSTPKGAIYAFAKLPVESSEDFCKWLLTEFVYDNSTVMLAPGEGFYETEGLGKNEVRFSFCVGENDIEKAMRVLEEALKVYKK

SEQ ID NO: 10168 - protein, 404 aa, Chlorobium tepidum TLS
MFDEIEFDRIKRLPKYVFAAVNELKMAERRAGRDVIDFSMGNPDGPTPQHIVDKLVESVSKPKTHGYSVSKGIYKLRGAIGGWYRDKYNVDLDLDREVVVTMGSKEGYVHLVQAITNPGDLAIVPDPCYPIHSQAFILAGGNVHRMKLEMNEDYTLDEEAFFHNVETALRESSPKPKYLVVNFPNNPTTATVELPFYERLVELARRERFYIISDIAYAEITFDGYVTPSILQVSGAKDVAVESYTLSKTYNMAGWRMGFMVGNAKLVGALEKIKSWLDYGTFTPIQVAATIALTGDQSCVREIREVYRKRRDVLISSFANAGWDIVSPKASMFVWARIPEQMRAMGSLEFSKKLLIEGKVAVSPGIGFGTYGDEYVRVAMIENEERIRQAARNIKRFLKNNAGS

SEQ ID NO: 10169 - protein, 498 aa, Stellaria longipes
MVSQSKNNQDQVLSKIAVNEEHGEDSSYFLGWKAYEKDQNPFFHPYHEINQNSNGVIQMGLAENQLCFDLIEEWIKRNPDAAICTNDGIKSIFRALFQDYHGLQEFRQAVARFMEKTRGGRVRFDSNLVLTAGATSANETIIFCTANPGDAFLVPTPYYAAFDRDLKWRTGAEILPICHESSNNFKITSKAKEAYENAQSKYKAKKLDLNVKGLLMTNPSNPLGTTTLDRDTLKKISTFTNQKGIHLVCDEIYAATVFSPKFVSIADILLDDHVNQDLVHIVYSLSKDLGLPGFRVGIVYSKDEMVVSAATKMSSFGLVCFANMDDSSQTQLMIAALLSDKNFTEEFLIESSDRLRKYEMITEGLKSAGINCLQGNAGLFVWMDLRQLLKDNTFDSETELWNAILHEVKLNISPGSSCHSECSEPGWFRCFANMDIDETLDLDLGVKRLKDFAQRGRVDNSTMTTTKQPFKLPLKKTVRSNLRPAHSPMNSPLVRART

SEQ ID NO: 10170 - protein, 498 aa, Stellaria longipes
MVLPSKNNSEQVLSKMAVNFNSGEDSSYFLGWKAYNKDDNPHFHPYAEIEQNYNGVIQMGLAENQLSSDLIEEWIKRNPDAAICVEDGIKSIFRALFQDYHGLIEFRQLVARFMEKVRGGRVRFDSNLVLTAGATGANETIIFCTDNPGDAFLVPTPYYAAGDRDLKWRTRAEILPICHCSSNNFKITSKAKEAYEKAQSKYKAKKLDLNVKGLIMTNPSNPLGTTTLDRDTLKKISTFIDQKNIHLVCDEIYAATVFKAKTVSIADILLDDHVNQDLVHILYSLSKDLGLPGFRVVIVYSKDEMVVSAATKMSSFGLSSGLYIHTVIRLLQRLGECLVLPLSQTQNLLATMLSDKKFTWNYIKINRERLKRRYEMIINGLKKVGIECLKGNGGLFCWMNLSPFLEKPTKEGELDLWSSIVNEVKLNISPGSSCHCSNPGWFRVCFANMDESMAVQLAMQRLQNFVGEYVADNMEKKQQWKKSRLSLSFRRPSPLVRT

SEQ ID NO: 10171 - protein, 283 aa, Stellaria longipes
FQDYHGLPSFRKAMASFMEEICEGRAPFDYNRILLTAGATAANELLSFFILTDPGEAFVGHNQRSLKYRGVLITNPSNPLGAIYYWGAVPRNKFSDFVSRRNIHLVSDEIYSGSVFNPEEFTSVAEILQERNYKDAGRIHIVYSLSKDLGLPGFRVGTIYSYGDKVVTTARRMSSFTLVLCSSQTQNLLATMLSDKKFTWNYIKINRERLKRRYEMIINGLKKVGIECLKGNGGLFCWMNLSPFLEKPTKEGELDLWSSIVDEVKLNISPGSSCHCSNPGWFR

SEQ ID NO: 10172 - protein, 407 aa, Microbulbifer degradans 2-40
MNPDLSKLQPYPFEKLNALKATVSAPADKSHIALSIGEPKHQPPAFALKALTDNLARFANYPSTKGLPELRTAIANWANTRFNLQRATLDAEANVLPVNGTREALFAFAQACIDSSKADAKVLMPNPFYQIYEGAAFLAGAEPVFLNCLPENGFIPDFDAISEQTWQACQLLFICTPGNPTGAVMSRELLEKLIGLADKHNFIIASDECYSELYFDEANPPTGLLEACESLGKTDFKNCVVFHSLSKRSNLPGLRSGFVAGDAHIIDQFFQYRTYHGCAMSVPCQLASIAAWQDEAHVLENRNLYRQKFDAVIEILKDVLPVSTPDASFYLWPKTPIADTDFAQQLFAQQNVTVLPGRFLARDCDGVNPGENYVRLALVAELEECIEAAHRIKAFVQSLNQTLYTNS

SEQ ID NO: 10173 - protein, 400 aa, Fusobacterium nucleatum subsp. vincentii ATCC 49256
MEEKMKISDRVKNMKYSAVRKLAPLAAEAEKKGIKVYRLNIGQPNIETPKLFFEGLKNIPDQVIKYADSRGISVLLEQVIEVYARDGHILKKEDIIVTEGGSEALTFAMLAICNPDDEVLIPEPFYSNYKSFLDISGAKIIPIPTDIKNNFALPKKEEIQKLITSKTKAILYSNPCNPTGKVYTEVEVKLLADLAIENDLFIIADEPYREFIYDDKDKHHSLLDIEKAKENVIIIDSVSKHYSACGARVGFLISKNKDFMTYIMKLCQARLAAPTVEQYAVANLMKAPKEYFKEIKEIYRRRRDIIVDSLNKIEGVTCSTPKGAIYAFAKLPVESSEDFCKWLLTEFVYDNSTVMLAPGEGFYETEGLGKNEVRFSFCVGEDDIEKAMKVLEEALKVYKK

SEQ ID NO: 10174 - protein, 399 aa, Bacteroides thetaiotaomicron VPI-5482
MPTISIRGNEMPASPIRKLAPLADAAKQRGVHVFHLNIGQPDLPTPQAAIDAIRNIDRKVLEYSPSAGNRSYREKLVGYYAKFNINLTADDIIITSGGSEAVLFSFLSCLNPGDEIIVPEPAYANYMAFAISAGAKIRTIATTIEEGFSLPKVEKFEELINERTKAILICNPNNPTGYLYTRREMNQIRDLVKKYDLFLFSDEVYREFIYTGSPYISACHLEGIENNVVLIDSVSKRYSECGIRIGALITKNKEIRDAVMKFCQARLSPPLIGQIAAEASLDAPEEYSRETYDEYVERRKCLIDGLNRIPGVYSPIPMGAFYTVAKLPVDDSDKFCAWCLSDFEYEGQTVFMAPASGFYTTPGSGINEVRIAYVLKKEDLTRALFILQKALEVYPGRTE

SEQ ID NO: 10175 - protein, 473 aa, Pyrus communis
MCMLSRNATFNSHGQDSSYFLGWQEYEKTPYHEVHNTNGIIQMGLAENQLCFDLLESWLAKNPEAAAFKKNGESIFAELALFQDYHGLPAFKKAMVDFMAEIRGNKVTFDPNHLVLTAGATSANETFIFCLADPGEVLLIPTPYYPGFDRDSKWRTGVAIVPIHCTSSNGFQITETALEEAYQEAEKRNLRVKGVLVTNPSNPLGTTMTRNELYLLLSFVEDKGIHLISDEIYSGTAFSTPSFRSVMEVLKDRNCDENSEVWQRVHVVYSLSKDLGLPGFRVGAIYSNDDMVVAAATKMSSFGLVSSQTQHLLSAMLSDRKLTKNYIAENHKRLKQRQKNLVSGLQKAGISCLNGNAGLFCWVDMRHLLRSNTFEAEMELWKKIVYEVHLNISPGSSCHCTEPGWFRVCFANLPERTLDLAMQRLKAFVGEYYNVPEVNGRSQSSHLSHSRGQSLRKWVSRLSFDDRCPIHGR

SEQ ID NO: 10176 - protein, 241 aa, Fagus sylvatica
RAESARGIAEIIQEEIECNHDLIHIVYSLSKDLGFPGFRVGIVYSYNDAVVNCCRKMSSFGLVSSQTQYLIASMLSDDEFVNKFIAENAISLANRHKVFTEGLAQVDIGCLKSNAGLFVWMDLRHLLKEQTFKAEMELWKVIINKVKLNVSPGSSFHCSAPGWFRVCFANMDDKTMDVALTRIVAFVHQNKETTVPMKKKCWQTNLRLSFSSRRVDDIMMAQCMMSPHSPLPQSPLVRARN

SEQ ID NO: 10177 - protein, 106 aa, Fagus sylvatica
TNPSNPLGTVMDRTTLRTVVNFINQKRIHLISDEIYAATVFSHPSFISVAEIIEQDTDIECDRDLIHIIYSLSKDMGFPGFRVGIIYSYNDSVVNCARKMSSFGLG

SEQ ID NO: 10178 - protein, 105 aa, Fagus sylvatica
TNPSNPLGTILDKETLRMVVSFINEKSIHLVCDEIYAATVFSTQPDFISIAEIIQEEIECNHDLIHIVYSLSKDLGFPGFRVGIVYSYNDAVVNCCRKMSSFGLV

SEQ ID NO: 10179 - protein, 369 aa, Averrhoa carambola
PDQMGLAENQLCFDLIEDWVKNNPKASICTPQGVDKFKEIANFQDYHGLPEFRQAVAKFMGRVRGNKVTFDPNRIVMSGGATGANETIIFCLADPGDAFLVPSPYYPAFNRDLGWRTRVQLIPAECDVSNGFKITRSALEAAYQKAQEANVNVKGLIITNPSNPLGTTLDRDTLKSLVSFINDKNIHLVCDEIYVATVFSSPRFISVAEVIEEMDCNRDLIHIVYSLSKDMGFPGFRVGIVYSYNDAVVSCARKMSSFGLVSAQTQYMLASMLSDEIFVEKFLAESPKRLAKRYNKFTKGFEEVGINCLNSNAGLYFWMDLRWLLKEQSNKGEIDLWRIIVNDVKLNVSPGSSSHCNEPGWFRVCFAAE

SEQ ID NO: 10180 - protein, 431 aa, Rhizobium etli
MNVLRKETSQPPASVSIIGAGGICDLIGNSVLDFHRIQRLPPYVFEQVNRLKASARAGGADIIDLGMGNPDLPTPQSIVDKLCEVVQDPRTHRYSSSKGIPGLRRAQAAYYARRFGVKLNPDTQVVATLGSKEGFANMAQAITAPGDVILCPNPTYPIHAFGFLMAGGVIRSMSVEPDESFFPPLERAVRHSIPKPLALILNYPSNPTALVATLDFYKDVVAFAKKHDIIVLSDLAYSEIYFDGAPPPSVLEVPGAMDVTVEFTSMSKTFSMPGWRMGFAVGNERLIAALTRVKSYLDYGAFTPIQVAATHALNGDGSDIAEVRNVYKRRRDVMVESFGKAGFDVPPPAATMFAWAKIPEKFRHLGSLEFSKLLVEKADVAVAPGIGFGEMGDDYVRLALVENEHRIRQAARNIKRWLSGDEKFEINVMNQ

SEQ ID NO: 10181 - protein, 251 aa, Sinapis arvensis
ENQLCFDLIESWLAKNPDAASLKRNGQSIFRELALFQDYHGMPEFKKAMAEFMEEIRGNRVTFDPKKIVLAAGSTSANETLMFCLAEPGDAFLLPTPYYPGFDRDLKWRTGAEIVPIHCSSSNGFQITESALQQAYQQAHKLDLKVKGVLVTNPSNPLGTALTRRELNLLVDFIASKNIHLISDEIYSGTMFGFEQFISVMDVLKDKKLENTEVSKRVHVVYSLSKDLGLPGFRVGAIYSNDEMIVSAATK

SEQ ID NO: 10182 - protein, 251 aa, Sinapis arvensis
ENQLCFDLIETWLAKNPDAAELKKDGQSIFKELALFQDYHGLPEFKKALAEFMEEIRGNRVSFDPSKIVLAAGSTSANETLMFCLAEPGDAFLLPTPYYPGFDRDLKWRTGAEIVPIHCSSSNGFQITESALQQAYQQAQKLDLKVKGVLVTNPSNPLGTMLTRRELNLLVDFITSKNIHLISDEIYSGTVFGFEQFVSVMDVLKDKKLENSEVSKRVHVVYSLSKDLGLPGFRVGAIYSNDEMVVSAATK

SEQ ID NO: 10183 - protein, 251 aa, Sinapis arvensis
ENQLCFDLIESWLAKNQDAASLKRNGQSIFRELALFQDYHGMPEFKKAMAEFMEEIRGNRVTFDPKKIVLAAGSTSANETLMFCLAEPGDAFLLPTPYYPGFDRDLKWRTGAEIVPIHCSSSNGFQITESALQQAYQRAHKLDLKVKGVLVTNPSNPLGTALTRRELNLLVDFVNSKNIHLISDEIYSGTMFGFEQFISVMDVLKDKKLEDTEVSKRVHIVYSLSKDLGLPGFRVGAIYSNDEMIISAATK

SEQ ID NO: 10184 - protein, 248 aa, Sinapis arvensis
ENQLSFDLIESWLDDHPEVLGLKKNEESVFKHLALFQDYYGLPAFKDAMAKFMEKIRGSKVKFNTNKMVLTAGSTSANETLMFCLANPGDAFLIPAPYYPGFDRDLKWRTGVEIVPIHCVSSNGYKITREALEDAYERAHKLNLKVKGVLITNPSNPLGTSTTRAELDLLLTFTSAKKIHMVSDEIYSGTVFDSPEFTSVLEVAKDKNMDFDDKIHVVYSLSKDLGLPGFRVGLIYSDNEKVVSAATK

SEQ ID NO: 10185 - protein, 252 aa, Sinapis arvensis
ENQLCFDLLESWLIQNPDAAGFKRDGQSIFRELALFQDYHSLSSFKNALAVFMSENRQNRVSFDSNNLVLTAGATSANETLMFCLANPGDAFLLPTPYYPGFDRDLKWRTGVEIVPIQCSSSNGFRITKLALEEAYEQAKKLNLNVKGVLITNPSNPLGTTTTQTELNILFEFISKNKNIHLVSDEIYSGTAFSSSEFISVMEILKNNQLENTDVFNRVHIVYSLSKDLGLPGFRVGAMYSNDKDVISAATK

SEQ ID NO: 10186 - protein, 248 aa, Sinapis arvensis
ENQLCGDLMRKWVLEHPEASICTAEGVNQFSDIAIFQDYHGLPEFRQAVAKFMEKTRNNKVKFDPDRIVMSGGATGAHETVAFCLANPGEGFLVPTPYYPGFDRDLRWRTGVNLVPVTCHSSNGFKITVEALEAAYENARVSNIPVKGLLITNPSNPLGTTLDRDCLKSLVKFTNDKRIHLVADEIYAATTFGQSEFISVAEVIEEVPDCNPDLIHIVYSLSKDMGLPGLRVGIVYSYNDRVVQIARK

SEQ ID NO: 10187 - protein, 365 aa, Mangifera indica
QMGLAENQLCFDLIEDWIRKNPYASICTAEGVDEFKEIANFQDYHGLPEFRKAVAKFMGKVRGGRVTFDPDRIVMGGGVTGANEQIIFCLADPGDAFLVPSPYYPAFDRDLGWRTGGEIVPVPCDSSTNFQITRDALEEAYEKAREANINIKGLIITNPSNPLGITLDRDTLKSLVSFIDEKNIHFVCDEIYAATLFCPPKFVSVAEVIQEMDCNLDLIHIVYSLSKDMGLPGFRVGIVYSYNDAVVSCIRKMSSFGLVSSQTQYLLASMLSDDEFVEKFLAESSKRLAKRYHIFTKRLEKVGINCLKGNAGLFFWMDLRHLLQQETVDAEMKLWGTILNDVKLNVSPGSSFHCQEPGWFRVCFA

SEQ ID NO: 10188 - protein, 366 aa, Mangifera indica
QMGLAENPLCFDLVQEWVLSNPKASICTAEGISDFRDIAIFQDYHGLPEFKNAVANFMARVRGNRVKYDPDRIVMSGGATGAHETVAFCLADPGEAFLVPTPYYPGFDRDLRWRTGVQLFSVVCDNSYNFKNTKKKPWKQHMKKLKKTTSESRGLLLTNPSNPLGTRLDRETLRSLVSFINEKNIHLVCDEIYAATIFMGQPDFISISEIIEEDIHCNRNLIHLVYSLSKDMGLPGFRVGIIYSYNDTVVSCARKMSSFGLVSSQTQHLIASMLSDDEFVDRFITESAKRLAKRHRAFTWGLSQVGIGCLKSNAGLFFWMDLHHLLKEQTDEAEIELWKVIINEVKLNVSPGSSFHCANPGWFRVC

SEQ ID NO: 10189 - protein, 618 aa, Fugu rubripes
MLTEALVAVRQGTQTPAAQTTCAPSTMSSSSRPPLETLQAQSVSADETPGSALPACAQPCETARSATPTGGETPNRSRYLSHRGNSIRQQQGILQEGFLLYSLDKFHETDKPDGIINLGTSENKLCHDLLHERLTRPDMLLLDPPLLQYPDWSGHQFLREEVAKFLTDYCCSPKPLKAENVVVMNGCASLFSCIASVICDPKDAILISTPFYGAITEHLGLYSDVKLYHIHLDCEASGEDGRLFHLTVDKLEEGLRRAEHEGFIVRGLVLMNPHNPLADIYTPKEMVGFLEFAKRNELHTIVDEVYMLSVFDESVTFDSVLSLESVPDPQRTHVMWGLGKDFAMAGIRVGTLYSESRDLVEAVAKLGAFHGIPGTTQRQVAQLLQDREWIDTQYLPRNRSRLKAARSYVTGELRGLDVPYLDRSAAMFVWADLRKFLAEPSFEEEMRLWRHFLKHKVVLSCGQAFSCSTPGWFRIVFSDQDRRLKLGMKRIKEALEEYKDQITVTDCYSIKDGGPRVRASGKDSDNAAIVGSTLPQGKSSDMLEEKDHTVQAGLGADELVLRDCQPSKPAEGLDSLIGTLRHQIRSSDWLEKNTPELSAGEDPEILDVFKALLERARK

SEQ ID NO: 10190 - protein, 471 aa, Diospyros kaki
MKLLSRKAACNTHGQDSSYFLGWQEYEKNPYDESHNPTGIIQMGLAENQLSFDLLESWLASNPDAAGFKRDGQSIFRELALFQDYHGLPDFKKALVEFMSEIRGNKVSFDPKKLVLTAGATSANETLMFCLADPGEAFLLPTPYYPGFDRDLKWRTGVEIVPIKCTSSNGFRITESALEEAYQAAGKRNLKVKGVLVTNPSNPLGTTLSRHELNLLLSFVTEKGIHLISDEIYSGTVFSSPGFLSVMEILMDKKYSMNTEVWKRVHIVYSLSKDLGLPGFRVGAIYSNDDVVVEAATKMSSFGLVSSQTQYLLSAMLSDKKFRKNYISENQKRLRHRQEMLISGLESAGIRCLKSNAGLFCWVDMRHLLSSETFDAEMELWKKIVYDVGLNISPGSSCHCDEPGWFRVCFANMSAATLNLAIQRIKLFVQSTAAGSKQNQSYHQSLNNSRRKSLTKWVFRLSFDGREPDER

SEQ ID NO: 10191 - protein, 247 aa, Actinidia chinensis
LCFDLLESWLANNPEPAGFMRDGQSIFRELALFQDYHGLPAFKNAMVDFMSEIRGNKVSFDPKKLVLTAGATSANETLMFCLAEPGEAFLLPTPYYPGFDRDLQWRTGVEIVPIHCTSANSFQITDSALEEAYQSAQKRNLRVKGVLVTNPSNPLGTTLTRPELNLLLTFITSKNIHLISDEIYSGTVFSSPDFVSIMEVLKDSSHSTEVWNRVHIVYSLSKDLGLPGFRVGAIYSNDDVVLAAAKK

SEQ ID NO: 10192 - protein, 467 aa, Actinidia deliciosa
MKLLSRKAACNSHGQDSSYFLGWQEYEKKPYDEVRNPTGIIQMGLAENQLSFDLLESWLANNPEPAGFMRDGQSIFRELALFQDYHGLPAFKNAMVDFMSEIRGNKVSFDPKKLVLTAGATSANETLMFCLAEPGEAFLLPTPYYPGFDRDLQWRTGVEIVPIHCTSANSFQITDSALEEAYQSAQKRNLRVKGVLVTNPSNPLGTTLTRPELNLLLTFITSKNIHLISDEIYSGTVFSSPDFVSIMEVLKDSSHSTEVWNRVHIVYSLSKDLGLPGFRVGAIYSNDDVVVAAATKMSSFGLVSSQTQYLLASMLSDKNFTKHYISENQKRLKKRQEMLISGLQSAGIGCLKSNAGLFCWVDMRHLLSSKSFDSEMELWKKIVYQVGLNISPGSSCHCSEPGWFRVCFANMSEDTLDIAIQRIKTFVQTTNNNHSQRIHPSVKKSKRKSLTKWVFRLSFDGREPDER

SEQ ID NO: 10193 - protein, 370 aa, Cucumis melo
QMGLAENQLSFDLLESWLTKNPDAASFKRDGKSIFRELALFQDYHGLPAFKKALVEFMAEIRGNKVTFEANNIVLTAGATSANETLMFCLAEAGDAFLLPTPYYPGFDRDLKWRTGVEIVPIHYTSSNGFQVTQPALEQAYKEAESRNLRVKGVLVTNPSNPLGTTMTRNELDLVFDFITSKGIHLISDEIYSGTVFGSPGFVSAMEVLKERSNEEEEVWKRVHIVYSLSKDLGLPGFRVGAIYSNDVMVVAAATKMSSFGLVSSQTQYLLSAMLSDKKFTRTYISENQKRLKQRQKMLVSGLEKAGIKCLESNAGLFCWVDMRHLLESDTFESELKLWKKIGYEVGLNISPGSSCHCTEPGWFRVCFAN

SEQ ID NO: 10194 - protein, 481 aa, Cucumis sativus
MKMLSTKATCNSHGQDSSYFLGWEAYEKNPFDETSNPNGIIQMGLAENQLSFDLLESWLTKNPDAASFKRDGKSIFRELALFQDYHGLPAFKKALVEFMAEIRGNKVTFEANNIVLTAGATSANETLMFCLAEAGDAFLLPTPYYPGFDRDLKWRTGVEIVPIHCTSSNGFQVTQPALEQAYQEAQARNLRVKGVLVTNPSNPLGTTMTRNELDLVFDFITSKGIHLISDEIYSGTVFGSPGFVSAMEVLKERSNEDEEVWKRVHIVYSLSKDLGLPGFRVGAIYSNDEMVVAAATKMSSFGLVSSQTHYLLSAMLSDKKFTRTYISENQKRLKQRQKMLVSGLEKAGIKCLESSAGLFCWVDMRHLLESDTFECELKLWKKIVYEVGLNISPGSSCHCTEPGWFRVCFANMSQSTLKLAIRRLKSFVQELRSVSTPNVSTTTTNIHDSKFSKNIKKNIFTKWVFRQSVQDQANRKLHYER

SEQ ID NO: 10195 - protein, 388 aa, Prunus armeniaca
YFDGWKAYDRNPFHPTKNPEGVIQMGLAENQLSFDLIEERIKKNPKASICTPEGVEEFKNVAIFQDYHGFPEFRKAVAMFMSKARGGRVTFDPNRVVMSGGATGANELVMFCLADPGDAFLVPSPYYPAFFRDLGWRTGVQIVPVDCHSSNNFKITKEALEAAYEKAQKNNIKVKGLIITNPSNPLGTTLDRDTLESLVEFINQKNIHLVCDEIYAATVFSSPTFTCISEVIQNMNCNPNLIHIVYSLSKDMGLPGLRVGIVYSYNDDVVNIGRKMSSFGLVSSQTQHMLASMLLDEEFVARFLETSSKRLANRHGVFTKGLEEVGINCLKSNAGLFCWMDLRRLLKDQTFDGEMVLWRVIVNEVGLNVSPGSSFKCVEPGWFRVCFA

SEQ ID NO: 10196 - protein, 368 aa, Prunus armeniaca
QMGLAENQVSFDLLEKYLELEKHSKSSNLGSKGVSGFKKNALFQNYHGLLSFKKAMAIFMDQIKGGRAKFDPDRVFLTAGATAANELLTFIIADPGDALLVPTPYYPGFDKNLRWRTGVNIVPIHTDSSNNFQVTPQALEAAYKEAEAKNMKVRGVLITNPSNPLGATIQRQVLERILGFVTQKNIHLVSDEIYSGSAFSSSEFISVAEILESQQYKNSERVHIVYSLSKDLGLPGFRVGTVYSYNDKVVTTARRMSSFTLISSQTQHLLASMLSDKEFTENYIKTNRERLRKRYDMIIEGLKKAGIECLRGNAGLFCWMNLSPLLEKPTRGGELALWDSMLHEVKLNISPGSSCHCSEPGWFRVCFA

SEQ ID NO: 10197 - protein, 475 aa, Cucurbita maxima
MKMLSTKATCNSHGQDSSYFLGWEAYENNPFHHTSNPNGIIQMGLAENQLSFDLLESWLSKNPDAASFKRDGKSIFRELALFQDYHGLPAFKKALVEFMAEIRGNKVSFEANNIVLTAGATSANETLMFCLAEAGDAFLLPTPYYPGFDRDLKWRTGVEIVPIHCTSSNGFQITQSALEQAYKDAQTRNLRVKGVLVTNPSNPLGTTMNRDELNLVFDFITSKGIHLISDEIYSGTVFGSPGFVSAMEVLKERSSEDEEVWKRVHIVYSLSKDLGLPGFRVGAIYSNDDMVVAAATKMSSFGLVSSQTQYLLSAMLSDKKFTISYISENQKRLKQRQKMLVSGLQKAGINCLDSNAGLFCWVDMRHLLESDKFESELELWKKIVYEVGLNISPGSSCHCTEPGWFRVCFANMSESTLKLAVRRLKSFVTELRSTTTSNHRNHDNKICKNIKKNIFTKWVFRQSAQEANRKMQAER

SEQ ID NO: 10198 - protein, 475 aa, Cucurbita maxima
MGILSRKATCNSHGQDSSYFLGWEEYDKNPYDEILNPKGIIQMGLAENQLCFDLLERWLKENPDAAGFKRDGKSIFRELALFQDYNGLPAFKKALAEFMSEIRGNRVTFNPDHIVLTAGATSANETLMFCLAEPGDAFLLPTPYYPGFDRDLKWRTGIEIVPIHCSSSNGFRITESALLEAYQSAQSRDLKVKGVLVTNPSNPLGTTITTQELNLLLQFIASKNLHLISDEIYSGTVFRNPGFVSVMDILNQNYKHNHQIRKQVHIVYSLSKDLGLPGFRVGAIYSNDDVVVAAATKMSSFGLVSSQTQYLLSAMLSDKKFTKNYIKENQKRLEKRQKMLVRGLQKAGIKCHKGNAGLFCWVDMRHLLGANTFESEMELWRKIVFEGAVERVARTVVPLLRTRLVPCLFCQHVRGNVGPCNAETKGFWVYSTELHSPTTTTTTNHLPTKRKNMVKWVFRLSFNDRVVDHTNDNLG

SEQ ID NO: 10199 - protein, 371 aa, Brassica oleracea var. italica
QMGQAENQVSFDLLESYLEKKNPEGSLWESKGSRGFRENALFQDYHGLKNFRQAMASFMEKNRGGKARFDPDRIVLTAGATAANELLTFILANPNDALLVPTPYYPGFDRDLRWRTGVRIVPIHCDSSNHFQITPEALEAAYKTARDANIRVRGVLITNPSNPLGATVQKKVLEDLLDFCVRKNIHLVSDEIYSGSVFHASEFTSVAEIVENIDDVSVKERVHIVYSLSKDLGLPGFRVGTIYSYNDNVVRTARRMSSFTLVSSQTQHMLASMLSDEEFTDKYIRINRERLRRRYETIVEGLKKEGIECLKGNAGLFCWMNLGFLLNTNTKEGELELWDVILKELELNISPGSSCHCSEFGWFRVCFANMD

SEQ ID NO: 10200 - protein, 369 aa, Brassica oleracea var. italica
QMGLAENQLCLDLIKEWIKENPKASVCTPEGVHQFSDIANFQDYHGLKEFRQAIAHFMGKARGGRVTFDPERIVMSGGATGANETIMFCLADPGDVFLVPSPYYAAFDRDLRWRTGVEIVPVHCSSSNNFKLTVEAVEWAYKKAVESNKNVKGLLFTNPSNPLGTILDKDTLKNLVRFVTKKNIHLVVDEIYAATVFAGENLVSVAEVVKDSEVNADLIHIVYSLSKDMGLPGFRVGIVYSYNDSVVSCARKMSSFGLVSSQTQFMLASMLSDDSFVGNFLMESSKRLGIRHGVFTLGLKKAGINCLISTAGLFVWMDLRHLLRVRNSFESEIELWHIIIDKVKLNVSPGSSFQCTEPGWFRVCFANMD

SEQ ID NO: 10201 - protein, 469 aa, Arabidopsis thaliana
MGLLSKKASCNTHGQDSSYFWGWEEYEKNPYDEIKNPDGIIQMGLAENQLSFDLIESWLAKNPDAANFQREGQSIFRELALFQDYHGLPSFKNAMADFMSENRGNRVSFNPNKLVLTAGATPANETLMFCLADPGDAFLLPTPYYPGFDRDLKWRTGAEIVPIQCKSANGFRITKVALEEAYEQAQKLNLKVKGVLITNPSNPLGTTTTRTELNHLLDFISRKKIHLISDEIYSGTVFTNPGFISVMEVLKDRKLENTDVFDRVHIVYSLSKDLGLPGFRVGVIYSNDDFVVSAATKMSSFGLISSQTQYLLSALLSDKTFTKNYLEENQIRLKNRHKKLVSGLEAAGIECLKSNAGLFCWVDMRHLLKSNTFEAEIELWKKIVYEVKLNISPGSSCHCNEPGWFRVCFANLSEETLKVALDRLKRFVDGPSPTRRSQSEHQRLKNLRKMKVSNWVFRLSFHDREPEER

SEQ ID NO: 10202 - protein, 470 aa, Arabidopsis thaliana
MKQLSRKVTSNAHGQDSSYFLGWEEYEKNPYDEIKNPNGIIQMGLAENQLCFDLIETWLAKNPDAAGLKKDGQSIFKELALFQDYHGLPEFKKALAEFMEEIRGNRVTFDPSKIVLAAGSTSANETLMFCLAEPGDAFLLPTPYYPGFDRDLKWRTGAEIVPIHCSSSNGFQITESALQQAYQQAQKLDLKVKGVLVTNPSNPLGTMLTRRELNLLVDFITSKNIHLISDEIYSGTVFGFEQFVSVMDVLKDKNLENSEVSKRVHIVYSLSKDLGLPGFRVGAIYSNDEMVVSAATKMSSFGLVSSQTQYLLSALLSDKKFTSTYLDENQKRLKIRQKKLVSGLEAAGITCLKSNAGLFCWVDMRHLLDTNTFEAELELWKKIVYDVKLNISPGSSCHCTEPGWFRVCFANMSEDTLDLAMKRLKEYVESTDSRRVISKSSHDRIKSLRKRTVSNWVFRVSWTDRVPDER

SEQ ID NO: 10203 - protein, 470 aa, Arabidopsis thaliana
MKQLSTKVTSNGHGQDSSYFLGWEEYEKNPYDEIKNPNGMIQMGLAENQLCFDLIESWLTKNPDAASLKRNGQSIFRELALFQDYHGMPEFKKAMAEFMEEIRGNRVTFDPKKIVLAAGSTSANETLMFCLAEPGDAFLLPTPYYPGFDRDLKWRTGAEIVPIHCSSSNGFQITESALQQAYQQAQKLDLKVKGVLVTNPSNPLGTALTRRELNLLVDFITSKNIHLISDEIYSGTMFGFEQFISVMDVLKDKKLEDTEVSKRVHVVYSLSKDLGLPGFRVGAIYSNDEMIVSAATKMSSFGLVSSQTQYLLSALLSDKKFTSQYLEENQKRLKSRQRRLVSGLESAGITCLRSNAGLFCWVDMRHLLDTNTFEAELDLWKKIVYNVKLNISPGSSCHCTEPGWFRVCFANMSEDTLDLALKRLKTFVESTDCGRMISRSSHERLKSLRKKTVSNWVFRVSWTDRVPDER

SEQ ID NO: 10204 - protein, 460 aa, Arabidopsis thaliana
MLSSKVVGDSHGQDSSYFLGWQEYEKNPFHESFNTSGIVQMGLAENQLSFDLIEKWLEEHPEVLGLKKNDESVFRQLALFQDYHGLPAFKDAMAKFMGKIRENKVKFDTNKMVLTAGSTSANETLMFCLANPGDAFLIPAPYYPGFDRDLKWRTGVEIVPIHCVSSNGYKITEDALEDAYERALKHNLNVKGVLITNPSNPLGTSTTREELDLLLTFTSTKKIHMVSDEIYSGTVFDSPEFTSVLEVAKDKNMGLDGKIHVVYSLSKDLGLPGFRVGLIYSNNEKVVSAATKMSSFGLISSQTQHLLANLLSDERFTTNYLEENKKRLRERKDRLVSGLKEAGISCLKSNAGLFCWVDLRHLLKSNTFEAEHSLWTKIVCEVGLNISPGSSCHCDEPGWFRVCFANMSDQTMEVAMDRVKGFVDNNNGGKQKRTMWDTRRRSLINKWVSKLSSVTCESER

SEQ ID NO: 10205 - protein, 474 aa, Arabidopsis thaliana
MVQLSRKATCNSHGQVSSYFLGWEEYEKNPYDVTKNPQGIIQMGLAENQLCFDLLESWLAQNTDAACFKRDGQSVFRELALFQDYHGLSSFKNAFADFMSENRGNRVSFDSNNLVLTAGATSANETLMFCLADPGDAFLLPTPYYPGFDRDLKWRTGVEIVPIQSSSTNGFRITKLALEEAYEQAKKLDLNVKGILITNPSNPLGTTTTQTELNILFDFITKNKNIHLVSDEIYSGTVFNSSEFISVMEILKNNQLENTDVLNRVHIVCSLSKDLGLPGFRVGAIYSNDKDVISAATKMSSFGLVSSQTQYLLSSLLSDKKFTKNYLRENQKRLKNRQRKLVLGLEAIGIKCLKSNAGLFCWVDMRPLLRSKTFEAEMDLWKKIVYEVKLNISPGSSCHCEEPGWFRVCFANMIDETLKLALKRLKMLVDDENSSRRCQKSKSERLNGSRKKTMSNVSNWVFRLSFHDREAEER

SEQ ID NO: 10206 - protein, 497 aa, Brassica juncea
MVALTAEKQDQNLLSRMAAGDGHGENSAYFDGWKAYEENPFHPINRPDGVIQMGLAENQLCGDLMRKWVLEHPEASICTAEGVNQFSDIAIFQDYHGLPEFRQAVAKFMEKTRNNKVRFDPDRIVMSGGATGAHETVAFCLANTGEGFLVPTPYYPGFDRDLRWRTGVNLVPVTCHSSNGFKITVEALEAAYENARVSNIPVKGLLITNPSNPLGTTLDRDCLKSLVNFTNNKGIHLIADEIYAATTFGQSEFISVAEVIEEVPHSNRDLIHIVYSLSKDMGLPGLRVGIVYSYNDRVVQIARKMSSFGLVSSQTQHLIAKMLSDEDFVDEFIRKSKLRLAARHAELTTGLDGLGIGWLKAGAGLFIWMDLRNLLKTATFDSEMELWRVIATNKVKLNVSPGGSCHCNEPGWFSMFANMDHKTMETALERIRVFTSQLEEESLKQTKPMAAPTVMAKKKMCWQSSLRLSFKDTRRFEEGFFSPHSPVPHSPLVRAQI

SEQ ID NO: 10207 - protein, 474 aa, Brassica oleracea
MDLLSRKATCNSHGQDSSYFLGWEEYEKNPHDVVKNPHGIIQMGLAENQLCFDLLESWLIQNPDAASFKRDGQSIFRELALFQDYNGLSSFKKALADFMSENRQNRVSFDSKNLVLTAGATSANETLMFCLANPGDAFLLPTPYYPGFDRDLKWRTGVEIVPIQCSSRNGFCITKLALEEAYEQAKKLNLNVKGVLITNPSNPLGTTATQTELNILFEFISKNKNIHLVSDEIYSGTAFSSSEFISVMEILKTNQLENTDVFKRVHIVYSLSKDLGLPGFRVGAIYSNDKDVISAATKMSSFGLVSSQTQYLLSSLLSDKKFTKNYLRENQRRLNNRQRMLVTGLEAIGIGCLKSNAGLFCWVDMRHLLSSKTFEAEMDLWKKIVYEVKLNISPGSSCHCEEPGWFRVCFANMSEETLKLAMKRLKKFVDNGTLSRSCQVGESQSLKSSRKKTTTTVSNWVFRLSFHDRDTEER

SEQ ID NO: 10208 - protein, 435 aa, Malus x domestica
MRMLSRNATFNSHGQDSSYFLGWQEYEKNPYHEVHNTNGIIQMGLAENQLCFDLLESWLAKNPEAAAFKKNGESIFAELALFQDYHGLPAFKKAMVDFMAEIRGNKVTFDPNHLVLTAGATSANETFIFCLADPGEAVLIPTPYYPGFDRDLKWRTGVEIVPIHCTSSNGFQITETALEEAYQEAEKRNLRVKGVLVTNPSNPLGTTMTRNELYLLLSFVEDKGIHLISDEIYSGTAFSSPSFISVMEVLKDRNCDENSEVWQRVHVVYSLSKDLGLPGFRVGAIYSNDDMVVAAATKMSSFGLVSSQTQHLLSAMLSDKKLTKNYIAENHKRLKQRQKKLVSGLQKSGISCLNGNAGLFCWVDMRHLLRSNTFEAEMELWKKIVYEVHLNISPGSSCHCTEPGWFRVCFANLPERTLDLAMQRLKAFVGEYYNV

SEQ ID NO: 10209 - protein, 473 aa, Malus x domestica
MRMLSRNATFNSHGQDSSYFLGWQEYEKNPYHEVHNTNGIIQMGLAENQLCFDLLESWLAKNPEAAAFKKNGESIFAELALFQDYHGLPAFKKAMVDFMAEIRGNKVTFDPNHLVLTAGATSANETFIFCLADPGEAVLIPTPYYPGFDRDLKWRTGVEIVPIHCTSSNGFQITETALEEAYQEAEKRNLRVKGVLVTNPSNPLGTTMTRNELYLLLSFVEDKGIHLISDEIYSGTAFSSPSFISVMEVLKDRNCDENSEVWQRVHVVYSLSKDLGLPGFRVGAIYSNDDMVVAAATKMSSFGLVSSQTQHLLSAMLSDKKLTKNYIAENHKRLKQRQKKLVSGLQKSGISCLNGNAGLFCWVDMRHLLRSNTFEAEMELWKKIVYEVHLNISPGSSCHCTEPGWFRVCFANLPERTLDLAMQRLKAFVGEYYNVPEVNGGSQSSHLSHSRRQSLTKWVSRLSFDDRSPIPGR

SEQ ID NO: 10210 - protein, 473 aa, Malus x domestica
MRMLSRNATFNSHGQDSSYFLGWQEYEKNPYHEVHNTNGIIQMGLAENQLCFDLLESWLAKNPEAAAFKKNGESIFAELALFQDYHGLPAFKKAMVDFMAEIRGNKVTFDPNHLVLTAGATSANETFIFCLADPGEAVLIPTPYYPGFDRDLKWRTGVEIVPIHCTSSNGFQITETALEEAYQEAEKRNLRVKGVLVTNPSNPLGTTMTRNELYLLLSFVEDKGIHLISDEIYSGTAFSSPSFISVMEVLKDRNCDENSEVWQRVHVVYSLSKDLGLPGFRVGAIYSNDDMVVAAATKMSSFGLVSSQTQHLLSAMLSDKKLTKNYIAENHKRLKQRQKKLVSGLQKSGISCLNGNAGLFCWVDMRHLLRSNTFEAEMELWKKIVYEVHLNISPGSSCHCTEPGWFRVCFANLPERTLDLAMQRLKAFVGEYYNVPEVNGGSQSSHLSHSRRQSLTKWVSRLSFDDRGPIPGR

SEQ ID NO: 10211 - protein, 429 aa, Malus x domestica
MLSRNATFNSHGQDSSYFLGWQEYEKNPYHEVHNTNGIIQMGLAENQLCFDLLESWLAKNPEAAAFKKNGESIFAELALFQDYHGLPAFKKAMVDFMAEIRGNKVTFDPNHLVLTAGATSANETFIFCLADPGEAVLIPTPYYPGFDRDLKWRTGVEIVPIHCTSSNGFQITETALEEAYQEAEKRNLRVKGVLVTNPSNPLGTTMTRNELYLLLSFVEDKGIHLISDEIYSGTAFSSPSFISVMEVLKDRNCDENSEVWQRVHVVYSLSKDLGLPGFRVGAIYSNDDMVVAAATKMSSFGLVSSQTQHLLSAMLSDKKLTKNYIAENHKRLKQRQKKLVSGLQKSGISCLNGNAGLFCWVDMRHLLRSNTFEAEMELWKKIVYEVHLNISPGSSCHCTEPGWFRVCFANLPERTLDLAMQRLKAFVGE

SEQ ID NO: 10212 - protein, 460 aa, Malus x domestica
GQDSSYFLGWQEYEKNPYHEVHNTNGIIQMGLAENQLCFDLLESWLAKNPEAAAFKKNGESIFAELALFQDYHGLPAFKKAMVDFMAEIRGNKVTFDPNHLVLTAGATSANETFIFCLADPGEAVLIPTPYYPGFDRDLKWRTGVEIVPIHCTSSNGFQITETALEEAYQEAEKRNLRVKGVLVTNPSNPLGTTMTRNELYLLLSFVEDKGIHLISDEIYSGTAFSSPSFISVMEVLKDRNCDENSEVWQRVHVVYSLSKDLGLPGFRVGAIYSNDDMVVAAATKMSSFGLVSSQTQHLLSAMLSDKKLTKNYIAENHKRLKQRQKKLVSGLQKSGISCLNGNAGLFCWVDMRHLLRSNTFEAEMELWKKIVYEVHLNISPGSSCHCTEPGWFRVCFANLPERTLDLAMQRLKAFVGEYYNVPEVNGGSQSSHLSHSRRQSLTKWVSRLSFDDRGPIPGR

SEQ ID NO: 10213 - protein, 403 aa, Malus x domestica
NTNGIIQMGLAENQLCFDLLESWLAKNPEAAAFKKNGESIFAELALFQDYHGLPAFKKAMVDFMAEIRGNKVTFDPNHLVLTAGATSANETFIFCLADPGEAVLIPTPYYPRFDRDLKWRTGVEIVPIHCTSSNGFQITETALEEAYQEAEKRNLRVKGVLVTNPSNPLGTTMTRNELYLLLSFVEDKGIHLISDEIYSGTAFSSPSFISVMEVLKDRNCDENSEVWQRVHVVYSLSKDLGLPGFRVGAIYSNDDMVVAAATKMSSFGLVSSQTQHLLSAMLSDKKLTKNYIAENHKRLKQRQKKLVSGLQKSGISCLNGNAGLFCWVDMRHLLRSNTFEAEMELWKKIVYEVHLNISPGSSCHCTEPGWFRVCFANLPERTLDLAMQRLKAFVGEYYNVPEV

SEQ ID NO: 10214 - protein, 464 aa, Malus sylvestris
FNSHGEDSSYFLGWQEYEKNPYHEVHNTNGIIQMGLAENQLCFDLLESWLAKNPEAAAFKKNGESIFAELALFQDYHGLPAFKKAMVDFMAKIRGNKVTFDPNHLVLTAGATSANETFIFCLADPGEAVLIPTPYYPGFDRDLKWRTGVEIVPIHCTSSNGFQITETALEEAYQEAEKRNLRVKGVLVTNPSNPLGTTMTRNELYLLLSFVEDKGIHLISDEIYSGTAFSSPSFISVMEVLKDRNCDENSEVWQRVHVVYSLSKDLGLPGFRVGAIYSNDDMVVAAATKMSSFGLVSSQTQHLLSAMLSDKKLTKNYIAENHKRLKQRQKKLVSGLQKSGISCLNGNAGLFCWVDMRHLLRSNTFEAEMELWKKIVYEVHLNISPGSSCHCTEPGWFRVCFANLPERTLDLAMQRLKAFVGEYYNVPEVNGGSQSSHLSHSRRQSLTKWVSRLSFDDRGPIPGR

SEQ ID NO: 10215 - protein, 454 aa, Malus sylvestris
FNSHGEDSSYFLGWQEYEKNPYHEVLNTNGIIQMGLAENQLCFDLLESWLAKNPEAAAFKKNGESIFAELALFQDYHGLPAFKKAMVDFMAKIRGNKVTFDPNHLVLTAGATSANETFIFCLADPGEAVLIPTPYYPGFDRDLKWRTGVEIVPIHCTSSNGFQITETALEEAYQEAEKRNLRVKGVLVTNPSNPLGTTMTRNELYLLLSFVEDKGIHLISDEIYSGTAFSSPSFISVMEVLKDRNCDENSEVWQRVHVVYSLSKDLGLPGFRVGAIYSNDDMVVAAATKMSSFGLVSSQTQHLLSAMLSDKKLTKNYIAENHKRLKQRQKKLVSGLQKSGISCLNGNAGLFCWVDMRHLLRSNTFEAEMELWKKIVYEVHLNISPGSSCHCTEPGWFRVCFANLPERTLDLAMQRLKAFVGEYYNVPEVNGGKQPFKPLKKTVAHKVGFPAILR

SEQ ID NO: 10216 - protein, 241 aa, Citrus x paradisi
QMGLAENLLCHELVEDWLMNNPKASICSAEGLNEFKGIAIFQDYHGLPEFRNAVAKFMGKVRGNRITFDPDRIVMSGGATGAHETVAFCLADPGDAFLVPTPYYPGFDRDLRWRTGVQLVPVVCDSSNDFKVTMEALEAAYEKAQESNIRIKGVLITNPSNPLGTFLDRETLKDIVSFINEKNIHLVCDEIYAATVFTKEPSFVSLAEIIDQDLHAIAISFTLYTVFLRTWDSLALGSVSF

SEQ ID NO: 10217 - protein, 473 aa, Pyrus pyrifolia
MRMLSRNATFNSHGQDSSYFLGWQEYEKNPYHEVHNTNGIIQMGLAENQLCFDLLESWLAKNPEAAAFKKNGESIFAELALFQDYHGLPAFKKAMVDFMAEIRGNKVTFDPNHLVLTAGATSANETFIFCLADPGEAFLIPTPYYPGFDRDLKWRTGVEIVPIHCTNSNGFQITETALEEAYQEAEKCNLRVKGVLVTNPSNPLGTTMTRNELYLLLSFVEDKGIHLISDEIYSGTAFSSPSFISVMEVLKDRNCDENFEVWQRVHVVYSLSKDLGLPGFRVGAIYSNDDMVVAAATKMSSFGLVSSQTQHLLSAMLSDKKLTKNYIAENHKRLKQRQKNLVSGLQKAGISCLNGNAGLFCWVDMRHLLRSNTFEAEMELWKKIVYEVHLNISPGSSCHCTEPGWFRVCFANLPERTLDLAMQRLKAFVGEYYNVPEVNGRSQSSHLSHSRGQSLTKWVSRLSFDDRCPIHGR

SEQ ID NO: 10218 - protein, 488 aa, Lupinus albus
MRLLSSKASCNTHGQDSSYFLGWEEYEKNPYDEAMNPEGIIQMGLAENQLSFDILESWLAKNQDVAGFKRDGKSIFRELALFQDYHGIPSFKKAMVDFMAEIRGNKVTFDPNHIVLTAGSTSANETLMFCLAEQGDAFLLPTPYYPGFDRDLKWRTGVEIVPIQCTSSNNFQITESALLQAHEDAKKRNLRVKGVLVTNPSNPLGTTMSRNELNLLIDFIKVNKDMHLISDEIYSGTVFSSPGFISIMEILKERNYLKDSSDAAQVWNRVHVIYSLSKDLGLPGFRVGAIYSDNDEVVAAATKMSSFGLVSSQTQYLLSAMLGDKKFTKNYLLENQKSLKRRHRMFIYGLQKTGISCLKSNAGLFCWVDMRHLLSSNTFEAEMELWKKIVYQVKLNISPGSSCHCTEPGWFRVCFANMSEDTLNLAMKRLTTFVATITGANESKKNSGTSRTMSLPNWVSGYLLVIIGTRRTIISRDDIAWSWLVCEV

SEQ ID NO: 10219 - protein, 482 aa, Phyllostachys edulis
MVSQVADEKPQLLSKKAGCNSHGQDSSYFLGWQEYEKNPFDPAANPGGIIQMGLAENQLSFNLLEDWLEANPDALGLRREGASVFREPALFQDYNGLPAFKNALARFMSEQRGYRAVFDPSNIVLTAGATSANEALMFCLADHGDAFLIPTPYYPGFDRDLKWRTGAEIVPVHCTSANGFRVTRAALDDAYRRAQKSRLRVKGVLITNPSNPLGTTVPRADLEMLVEFVAAKGIHLISDEIYSGTAFAEPGFVSVLEVVAARSPLAADVSGRVHIVYSLSKDLGLPGFRVGAIYSANAGVVSAATKMSSFGLVSSQTQYLLAMLLGDKDFTRRYVAENKKRIKERHDQLVEGPKEIGIGCLESNAGLFCWVDMSHLMRSRSFEGEMELWKKVVFEVGLNISAGLSCHCREPGWFRVCFANMSAKTLDVAMQRLSSFVHHASSFVDEAGRRRGSGPARSMSCPLAIKWAFRLPPASADRKAER

SEQ ID NO: 10220 - protein, 279 aa, Phaseolus vulgaris
QDYHGLPSFKKALVDFMAEIRGNKVTFDPNHIVLTAGATSANETLMFCLAEEGDAFLLPTPYYPGFDRDLTWRTGAEIVPIQCTSSNNFHITESALKQAYEEAGRRNLRVKGVLVTNPSNPLGTTMSRSELNLLVDFIKEKKDSHLISDEIYSGTVFSSPGFVSIMEILKERNDADGIWNRVHVVYSLSKDLGLPGFRVGAIYSENDTVVAAATKMSSFGLISSQTQYLLSAMLGDKKFTRNYIVENQKRLKRRQRMMVSGLQKAGISCLESNAGLFCW

SEQ ID NO: 10221 - protein, 480 aa, Pisum sativum
MKLLSTKATCNSHGQDSSYFLGWQEYEKNPYDHVQNPKGIIQMGLAENQLSFDLLESWLAKNQDVGGFKRDGKSIFRELALFQDYHGLPSFKKALVDFMAEIRGNKVTFDPNHIVLTAGATSANETLMFCLAEKGEAFLLPTPYYPGFDRDLKWRTGVEIVPIQCTSSNNFQMTESALQQAHEDAKKKNLKVKGVLVTNPSNPLGTTMSKNELNLLIDFIKDKNMHLISDEIYSGTVFTSPNFVSVMEILNERTDKDFLDANVSERVHIVYSLSKDLGLPGFRVGAIYSDNETVVAAATKMSSFGLVSSQTQYLLSAMLGDKKFTRNYLSENQKRLKKRQKMLVNGLQKAGISCLKTNNAGLFCWVDMRNLLTSDTFEAEMDLWKKILYEVGLNISPGSSCHCTEPGWFRVCFANMSEDTLNLAMKRLKDFVSNSNGEEGSNSDNKRTRSSQSSRSFTRKSISNWVFRLSSRDHHEQEER

SEQ ID NO: 10222 - protein, 368 aa, Vigna radiata var. radiata
QMGLAENQLTSDLVEDWILNNPEASICTPEGINDFRAIANFQDYHGLAEFRNAVAKFMARTRGNRITFDPDRIVMSGGATGAHEVTAFCLADPGEAFLVPIPYYPGFDRDLRWRTGVKLVPVMCDSSNNFVLTKEALEDAYEKAREDNIRVKGLLITNPSNPLGTIMDRKTLRTVVSFINEKRIHLVCDEIYAATVFSQPGFISIAEILEDETDIECDRNLVHIVYSLSKDMGFPGFRVGIIYSYNDAVVNCARKMSSFGLVSTQTQYLLASMLNDDEFVERFLAESAKRLAQRFRVFTGGLAKVGIKCLQSNAGLFVWMDLRQLLKKPTFDSETELWKVIIHEVKINVSPGYSFHCTEPGWFRVCFA

SEQ ID NO: 10223 - protein, 484 aa, Oryza sativa (indica cultivar-group)
MFGGGGGGRKPLDYEELNENVKKVQYAVRGELYLRASELQKEGKKIIFTNVGNPHALGQKPLTFPRQVVALCQAPFLLDDPNVGLIFPADAIARAKHYLAMAPGGLGAYSDSRGIPGIRKEVAEFIERRDGYPSDPELIYLTDGASKGVMQMLNTIIRNERDGILVPVPQYPLYSAAISPFGGSLVPYYLEEEANWGLDFVNLRQTVASARSKGITVRAMVIINPGNPTGQCLSEGNIKELLKFCFHENLVLLADEVYQQNIYQDERPFISARKVLFDMGPPMSREVQLVSFHTVSKGYWGECGQRGGYFEMTNLPPKTVDEIYKVASIALSPNVPGQIFMGLMVNPPKPGDISYLKFSAESKSILESLRRRARLMTDGFNSCRNVVCNFTEGAMYSFPQIRLPPKAIDAAKRAGKAADVFYCLKLLEATGISTVPGSGFGQKEGVFHLRTTILPAEEDMPAIMTSFKKFNDTFMDQYDGYSRM

SEQ ID NO: 10224 - protein, 363 aa, Capsicum annuum
MGLAENQLCFDLIQEWVVNNPKASICTAKGAEDFQEIAIFQDYHGLPEFRQAVARFMEKVRGDRVTFDPNRIVMSGGATGAHEMLAFCLADPGDAFLVPTPYYPGFDRDLRWRTGVQLFPVVCESSNDFKVTRKALEEAYEKAQESNIKIKRLLINNPSNPLGTLLDKDTLRDIVTFINSKNIHLVCDEIYAATVFDQPRFISVSEVVDEMIGCNQDLIHIVYSLSKDLGFPGFRVGIVYSYNDTVVDIARKMSSFGLVSTQTQHLLASMLSDEIFIEKFIAESSERLSKRQGMFTKGLAQVGISTLKSNAGLFFWMDLRRLLKEPTFDAELELWRIIIHEVKLNVSPGVSFHCSEPGWFRVC

SEQ ID NO: 10225 - protein, 469 aa, Lycopersicon esculentum
MKLLSEKATCNSHGQDSSYFLGWQEYEKNPYDEIQNPKGIIQMGLAENQLSFDLLESWLAQNPDAAGFKRNGESIFRELALFQDYHGLPAFKNAMTKFMSEIRGNRVSFDSNNLVLTAGATSANETLMFCLANQGDAFLLPTPYYPGFDRDLKWRTGAEIVPIHCSSSNGFRITESALEEAYLDAKKRNLKVKGVLVTNPSNPLGTTLNRNELELLLTFIDEKGIHLISDEIYSGTVFNSPGFVSVMEVLIEKNYMKTRVWERVHIVYSLSKDLGLPGFRIGAIYSNDEMVVSAATKMSSFGLVSSQTQYLLSCMLSDKKFTKKYISENQKRLKKRHAMLVKGLKSAGINCLESNAGLFCWVDMRHLLSSNNFDAEMDLWKKIVYDVGLNISPGSSCHCTEPGWFRVCFANMSEDTLDLAMRRIKDFVESTAPNATNHQNQQQSNANSKKKSFSKWVFRLSFNDRQRER

SEQ ID NO: 10226 - protein, 469 aa, Lycopersicon esculentum
MKLLSEKATCNSHGQDSSYFLGWQEYEKNPYDEIQNPKGIIQMGLAENQLSFDLLESWLAQNPDAAGFKRNGESIFRELALFQDYHGLPAFKNAMTKFMSEIRGNRVSFDSNNLVLTAGATSANETLMFCLANQGDAFLLPTPYYPGFDRDLKWRTGAEIVPIHCSSSNGFRITESALEEAYLDAKKRNLKVKGVLVTNPSNPLGTTLNRNELELLLTFIDEKGIHLISDEIYSGTVFNSPGLVSVMEVLIEKNYMKTRVWERVHIVYSLSKDLGLPGFRIGAIYSNDEMVVSAATKMSSFGLVSSQTQYLLSCMLSDKKFTKKYISENQKRLKRRHAMLVKGLKSAGINCLESNAGLFCWVDMRHLLSSNNFDAEMDLWKKIVYDVGLNISPGSSCHCTEPGWFRVCFANMSEDTLDLAMRRIKDFVESTAPNATNHQNQQQSNANSKKKSFSKWVFRLSFNDRQRER

SEQ ID NO: 10227 - protein, 467 aa, Lycopersicon esculentum
MKLLSKKAMCNSHGQDSSYFLGWEEYQKNPYDEIRNPKGIIQMGLAENQLSFDLLESWLTLNPDASAFKRNGHSIFRELSLFQDYHGLPAFKDALVQFMSEIRGNKVSFDSNKLVLTAGATSANETLMFCLADPGHAFLLPTPYYPGFDRDLKWRTGAEIVPIQCTSSNGFRITESALEEAYTEAERRNLRVKGVLVTNPSNPLGTTLTKKELQLLLTFVSTKQIHLISDEIYSGTVFNSPKFVSVMEVLIENNYMYTDVWDRVHIVYSLSKDLGLPGFRVGAIYSNDDRVVSAATKMSSFGLISSQTQYLLSALLSDKKFTKNYVSENQKRLKKRHEMLVGGLKQIGIRCLESNAGLFCWVDMRHLLSSNTFDGEMELWKKIVYEVGLNISAGSSCHCTEPGWFRACFANMSEDTLNIAIQRLKAFVDSRVNNKDDIQNQQQCSNKKKSFSKWVFRLSFNERQRER

SEQ ID NO: 10228 - protein, 471 aa, Lycopersicon esculentum
MKLLSDMASCNSHGQDSSYFLGWQEYEKNPYDEIQNPKGIIQMGLAENQLSFDLLESWLAQNPDTAGFKRNGESIFRELALFQDYHGLPDFKNALVQFMSEIRGNKVTFNPNKLVLTAGATSANETLMFCLANPGDAFLLPTPYYPGFDRDLKWRTGAEIVPIQCTSSNGFRITQSALEESYKLAKTRNLRVKGILVTNPSNPLGTTLTRNELELLVSFVAEKGIHLISDEIYSGTVFNSPKFVSVMEVLIENNYMYTEVWDRVHIVYSLSKDLGLPGFRIGAIYSNDAVIVSAATKMSSFGLISSQTQYLLSAMLTDKKFTKKYISENQKRLKKRHAMLVKGLESSGISCLESNAGLFCWVDMRHLLKTNTFEAEIELWKKIVYEVRLNISPGSSCHCTEPGWFRACFANMSEDTLNLAIQRIKSFVDSSDVIGINVDQSNQTNQNTSTSPKKKLFAKWGFRLSFNDRER

SEQ ID NO: 10229 - protein, 471 aa, Lycopersicon esculentum
MLKMLSKMAMCKSHGQDSSYFIGWQEYEKNPYDPLQNPSGIIQMGLAENQLSFDLIESWLTRNQDVIQFRENGGSMFRDLALFQDYHGLQAFKNVLVSLMAEIRRKKVKFDPKNLVLTAGSTSANETLIFCLAEPGEALLIPTPYYPGFDRDLKWRTGAEIVPIQCYSSNNFRITESALEEAYEQAQKRNLTVKGVFITNPSNPLGTTMSRNELNILITFAMTKNIHIVSDEIYAGTVFDSPKFVSIIEALIDRKLEKSKMWNQVHIVSSLSKDLGLPGFRVGMIYSNNETLIAAATKMSSFGLISSQTQYLLSKILGDRRFIKRYVKQNKKQLIHRREMLASGLANSGIECLDSNAGLFCFVDMRDLLNSNTFEAEMELWKKIISNVGLNVSPGSSCHCSEPGWFRVCFANMSKETLDLAMQRINNFVNFDRDIHRQQPLRFVTGAGSRRRRTIANWVVKFSSGDGRRDR

SEQ ID NO: 10230 - protein, 470 aa, Petunia x hybrida
MKLLSEKATCNSHGQDSSYFLGWQEYEKNPYDEIQNPKGIIQMGLAENQLSFDLLESWLSQNPDAAGFKRNGESIFRELALFQDYHGLPAFKNALVKFMAEIRGNKVTFDSNKLVLTAGATSANETLMFCLADRGDAFLLPTPYYPGFDRDLKWRTGAEIVPIQCTSSNGFRITESALEEAYQEAKSRNLRVKGVLVTNPSNPLGTTLTRNELELLLSFVDTKGIHLISDEIYSGTVFNSPNFVSVMEVLIENDYMYTEVWDRVHIVYSLSKDLGLPGFRVGAIYSNDELVVSAATKMSSFGLISSQTQYLLSAMLSDKKFRKKYVSENQKRLKKRHAMLVTGLQNAGISCLESNAGLFCWVDMRHLLKSNTFEAEIELWKEIVYQVGLNISPGSSCHCTEPGWFRVCFANMSEDTLTLAMARIKSFVDSSATSTDTHNNQTNQNTNTNSTKKKLFSKWGFRLSFNDRER

SEQ ID NO: 10231 - protein, 374 aa, Solanum melongena
LQEFDPDQMGLAENQLCFDLIQEWIVNNPKASICTYEGVQDFQDIAIFQDYHGLPEFRKAVARFMEKVRGDRVTFDPERIVMSGGATGAHESLAFCLADPGDAFLVPTPYYPGFDRDLRWRTGVQLFPVVCESSNNFKVTKEALEEAYKKAQESNIKVKGLLINNPSNPLGTILDKETLKDILRFINDKNIHLVCDEIYAATALCQPSFISISEVMNEVVGCNDDLVHIVYSLSKDLGFPGFRVGIIYSYNDVVVNIARKMSSFGLVSTQTQRLIASMLSDTIFVENFIAKSAMKLSQRHDLFTKGLGQVGITTLKSNAGLFIWMDLRRFLENSTFDDELKLWHIIINKVKLNVSPGCSFHCSEPGWFRVCFAA

SEQ ID NO: 10232 - protein, 465 aa, Solanum tuberosum
MKLLSKKAMCNSHGQDSSYFLGWEEYEKNPYDETRNPKGIIQMGLAENQLSFDLLESWLTQNPDAAAFKRNGDSIFRDLALFQDYHGLPAFKDALVQFMSEIRGNKVSFDSNKLVLTAGATSANETLMFCLADPGDAFLLPTPYYPGFDRDLKWRTGAEIVPIQCTSSNGFRITESALEEAYKEAERRNLRVKGVLVTNPSNPLGTTLTKKELQLLLTFVSTKQIHLISDEIYSGTVFNSPKFVSVMEVLIENNYMYTEVWDRVHIVYSLSKDLGLPGFRVGAIYSNDVMIVSAATKMSSFGLISSQTQYLLSALLSDKKFTKKYVSENQKRLKKRHEMLVGGLKQIGIRCLESNAGLFCWVDMRHLLSSNTFDGEMELWKKIVYEVGLNISPGSSCHCTEPGWFRACFANMSEDTLNIAIQRLKAFVDSRDNKDDIQNQKHSNKKKSFSKWVFRLSFNERQRER

SEQ ID NO: 10233 - protein, 465 aa, Solanum tuberosum
MKLLSKKAMCNSHGQDSSYFLGWEEYEKNPYDETRNPKGIIQMGLAENQLSFDLLESWLTQNPDAAAFKRNGNSIFRELALFQDYHGLPAFKDALVQFMSEIRGNKVSFDSNKLVLTAGATSANETLMFCLADPGDAFLLPTPYYPGFDRDLKWRTGAEIVPIQCTSSNGFRITESALEEAYKEAERRNLRVKGVLVTNPSNPLGSTLTKKELQLLLTFVSTKQIHLISDEIYSGTVFNSPKFVSVMEVLIENNYMYTEVWDRVHIVYSLSKDLGLPGFRVGAIYSNDDMIVSAATKMSSFGLISSQTQYLLSALLSDQKFMKNYVSENQKRLKKRHEMLVGGLKQIGIRCLESNAGLFCWVDMRHLLSSNTFDGEMELWKKIVYEVGLNISPGSSCHCTEPGWFRACFANMSEDTLNIAIQRLKAFVDSRDNKDDIQNQKHSNKKKSFSKWVFRLSFNERQRER

SEQ ID NO: 10234 - protein, 372 aa, Antirrhinum majus
RIQMGLAENQLSFDLLESWLSENPDAAGFKRNGESIFRELALFQDYHGLPAFKNAMVNFMSEIRGNKVNFDPNKLVLTAGATSANETLMFCLAEPGDAFLLPTPYYPGFDRDLKWRTGVEIVPIQCTSSNGFRITAPALEDAYELAQKRNLKVKGVLVTNPSNPLGITLTRQELNLLVKFIDKKGIHLISDEIYSGTVFNSRILSASWKFSRTENMLMIKSYWNRVHIEYSLSKDLGLPGFRVGCIYSNDPVVVAAATKMSSFGLVSSQTQYLLSAMLSNKKFARSYIVENQKRLRTVHAMLVRGLKSTGISCLESNAGLFCWVDMRHLLSSNTFEAEMDLWKKIVYEVGLNISPGSSCHCDEPGWFRVDLQ

SEQ ID NO: 10235 - protein, 363 aa, Antirrhinum majus
IQMGLAENQVSFDLLEEYLEKHSEATNCDSRNSGFRENALFQDYHGLLSFRKAMASFMEQIRGGRATFDPERVVITAGAPPANELLTFILANPGDALLIPTPYYPGFDRDLRWRTGVNIVPIHCDSSNNFEITPQALEAAYNEAESKNIKVKGVLITNPSNPLGATIKRAILEQILEFVTRKNIHLISDEIYSGSSFSPEEFVSIAEILEAQDYKNSERVHIVYSLSKDLGLPGFRVGTIYSYNDKVVTTARRMSSFTLISSQTQHLLASMLSDKEFTKEYININRSRLRKRYEMIVDGLKEAGIECLKGNAGLFCWMNLKPLLEKPTKEHEVELWKLIMYEVKLNISPGSSCHCSEPGWFRV

SEQ ID NO: 10236 - protein, 297 aa, Helianthus annuus
AISTALANFMNRVRGNRVKFDPDRIVMSGGATGAHETLAGCLANPGEAFLVPTPYYPAFDRDLRWRTGVELFPVVCESADNFKGHREALETAYKKAKLANVKVKGVLITNPSNPLGTFLDRDTLKDIVNFVNDKSIHLVCDEIYAGTVTNGDEFVSIAEVIEEVPKCNLDLIHLVYSLSKDMGFPGFRVGVVYSYNDNVVSIARKMSSFGLVSTQTQHMLASMLSDNEFVGTFISESRIRLAHRHDMFTRGLAQVGIGSLESKAGLFFWMDLRRFLKEPTFESEMTFWRTIINEIKL

SEQ ID NO: 10237 - protein, 471 aa, Dictyostelium discoideum
MDYNSEYEGFSDNAIRLLSAPKGNSKLAMAHFIAMSDLYNSKNNPNGYISLGIAENVLSYDILKEKLIFESDGNDGKEIMAAAAPLQSLTQYSEIGGIPQLRELIAKELLQNQIFKGYKPTNEKLLVKKEQILISGGATPLLENIFNLFCNQDEKCIIPSPFYPSFVYDAYQRFGVKVIAAKSEIFKDPLNKGTSEIIDFKLDLKEFESLYNQGGVKMVLLCNPNNPTGYIFKPSEIKELVKWCRNKKIHFVSDEIYALSVFGSEDGSDGGNEFKSIYEILEGDLGEYVHVLNGFSKDFCLNGYRIGYFYSQNETVFRYMLSTSAFYSCSNIAQYTAINILKDREYLERFIKTNQSNLKESYEFASNLLNQYSIPFIKSSSGVFLSLDLRACLKYLPNDTTTDDDQDNTDPFSKEIKLWEEIFKNKVFLNSGKLCYFEKPGFFRLVFTLPKDFIEQGIKRIAQVYNSLLNK

SEQ ID NO: 10238 - protein, 410 aa, Musa acuminata
MPQMLLSRKAACNTHGQDSSYFLGWQEYEKNPYDPRTNPTGIIQMGLAENQLSFDLIESWLERHPDAAGLRRDGALVFRELALFQDYHGLPAFKKALADFMGGLRGDKVKFEPHKLVLTAGSTSANETLMFCLAEAGEAFPSPTPYYPGFDRDLKWRTGAEIVPIHCSSSNGFRVTKAALEKAYQGPRKRHLRVKGVLVTNPSNPLGTAMTRCELDTLIDFVVAKDIHLISDEIYSGTSFDAPRFVSVMEAIEGGQHVSHRIHVVYSLSKDLGLPGFRVGAIYSNNGAVVAAATKMSSFGLVSSQTQYLLSVLLSDKEFTRNYHFENQKRIKERHDRLVQGLRRSGISCLQSNAGLFCWVDMRHLLNSDTFKGEMELWRKIVYQVGLNISPGSSCHCDEPGWFSVCFANM

SEQ ID NO: 10239 - protein, 363 aa, Musa acuminata
MGFAENHVSFDLIESWLEDHPDLTGFKKDGGLVFRELALFQDYHGLPAFKNALARYMGEVRGNKVSFEPSKLVLTAGATSANETLMFCLADPGEAFLLPTPYYPGFDRDLKWRTGVEIVPIHCSSSNGFRITRAALEAALRRAQKRRLRVKGVLVTNPSNPLGTTLTRQELDTLVDFAVANDIHLISDEIYSGTTFGSPGFVSIAEATKGRDDVSHRIHIVCSLSKDLGLPGFRVSAIYSDNEAVVSAATKMSSFGLISSQTQYLLAALLSDKEFTEKYVRESQKRLKERHDMLVEGLRRIGIGCLEGNAGLFCWVDMRHLLRSNTFEGEMELWKKIVYRVGLNVSPGSSCHCDEPGWFRVSF

SEQ ID NO: 10240 - protein, 366 aa, Musa acuminata
MGLAENQLSLDLIEGGLERHPDAVGLRRDGALVSRELALFQDYHGLPASKKALADFMGELRGNKVKFEPHKLVLTAGSTSANETLMFCLAEPGEAFLLPTPYYPGFDRDLKRRTGAEIVPIHCSSPNGFRVTKAALEKAYQGARKRHLRVKGVLVTNPSNPLGTTMTRCELDTLMTFVVAKDIHLISDEICSGTSFDAPGFVSVMEAIEGRQHVSHRIHVVYSLSKDLGLPGFRVGAIYSNNEAVVAAATKMSSFGLVSSQTQYLLSVLLSDKEFTRNYIAENQKRIKERHDRLVQGLRRSGISCLQSNAGLFCWVDMRHLLNSNTFEGEMELWKKIVYQVGLNISPGSSCHSHEPGWFRVCFANM

SEQ ID NO: 10241 - protein, 363 aa, Musa acuminata
MGFTENQLCFDLIESWLENHPDPAAFKKDGALLFRELALFQDYHGLPAFKRALTKYMGEVRGNKVAFDPNRLVLTAGATSANETLMFCLAEPGEAFLLPTPYYPGFDRDLKWRTGAEIVPIHCSSSNGFRITKPALEAAYQDAQKRSLRVKGVLVTNPSNPLGTTLTRHELDILVDFVVSKDIHLISDEIYSGTNFDSPGFISIAEATKDRNNVSHRIHIVCSLSKDLGLPGFRVGAIYSENEAVVSAATKMSSFGMVSSQTQYLLAALLSDKEFTDKYLLENQKRLKERHDMLVEGLRRIGIGCLKGSAALFCWVDVRHLLKSNTFKGAMELWKKIVYQVGLNISPGSSCHCDEPGWFSVTF

SEQ ID NO: 10242 - protein, 444 aa, x Doritaenopsis sp.
MSKMFGKEVPLSKMAVSKAHGEGSPYFAGWKAYEENRYDAVGNPDGVIQMGLAENQLSFDLLEEYLELHPEAFSWASDSSSFRENALFQDYHGLQTLRQALASFMEKIRGGRSKFDANRIVLTAGATAANEILTFILADRGDALLVPTPYYPGFLRDLQWRTGVTIFPVHCYSSNGFQLTLSSLEKAYAEAKASNFNVRGLLMTNPCNPLGTSASLSLLQDIIHFISDKTIHLISDEIYSGSVFSSTNLFSISDLITDAISEQVHIVYSLSKDLGLPGFRVGALYSYNDRVVKTARRMSSFSLVSSQTQRLLSFMLSDEEFTVRYIEKNRERLRERYELVVNGLKEAGIECLKGEAGLFCWVNMEKLMEEETKEGEAEPWKVIIDDLKLNISPGSSCCCAEPGWFRLCFANMSRETLEGVKRLKDFAQKKVAAKKKKMNNVYFC

SEQ ID NO: 10243 - protein, 425 aa, x Doritaenopsis sp.
MSKMFGKEVPLSKMAVSKAHGEGSPYFAGWKAYEENPYDVVGNPDGVIQMGLAENQLSFDLLEEYLELHPEAFSWASDSSSFRENALFQDYHGLQTLRQALASFMEKIRGGRSKFDANRIVLTAGATAANEILTFILADRGDALLVPTPYYPGSNGFQLTLSSLEKAYAEAKASNFNVRGLLMTNPCNPLGTSASLSLLQDIIHFISDKNIHLISDEIYSGSVFSSTNLFSISDLITDAISEQVHIVYSLSKDLGLPGFRVGALYSYNDRVVKTARRMSSFSLVSSQTQKLLSFMLSDEEFTVRYIEKNRERLRERYELVVNGLKEAGIECLKGEAGLFCWVNMEKLMEEETKEGEAELWKVIIDDLKLNISPGSSCCCAEPGWFRLCFANMSRETLEVALKRLKDFAQKKVAAKKKKMNNVYFC

SEQ ID NO: 10244 - protein, 366 aa, Populus tremula x Populus tremuloides
QMGLAENQLCFDLIQDWLKKNPKASICSPEGLNEFREIAIFQDYHGLPEFRSAVANFMEKVRGNRVTFDPDRIVMSGGATGAHETVAFCLADPGEAFLVPAPYYPGFDRDLRWRTGVKLIPVDSDSSNSFMVTREALENAYEKAQLDNIKVKGLLITNPSNPLGTILDRETLRSIVRFINEKNIHLVCDEIYAATVFSQPDFISVAEILQEDIECNLDLVHIVYSLSKDMGFPGLRVGIIYSYNDAVVSCARKMSSFGLVSTQTQYLIASMLSDNEFVEMFIRESKSRLAARYRVFTRGLDQVGIECLKTSNAGLFLWMDLSRLLKEQTFKAEMGLWRVIIHEVKLNVSPGCSFHCSKPGWFRVCF

SEQ ID NO: 10245 - protein, 365 aa, Populus tremula x Populus tremuloides
QMGLAENQLSVDSIIDWIEKHPEASICNPEGVHMFKDIANFQDYHGLPEFRQAIAKFMGRVRGGRVAFDPDRIVMSGGATGANELIMFCLADPGDAFLVPSPYYPAFYRDLGWRTGVQIVPVDCDSSNNFQITKGALEAAYDKAQQNGINVKGLIITNPSNPLGTTLDRETLKSLLSFINEKNIHIVCDEIYAATIFGSENFVSISEVVEEVMDCNRDLIHIVYSLSKDMGLPGFRVGIVYSYNDAVVNCGRKMSSFGLVSSQTQYLLASMLSDEEFVEDFLAGSSKRLKKRHGVFTKGLEQIGISCLESKAGLFVWMNLRHLLKEQTNDGEMALWRVIVNDVKLNVSPGSSFHCVEPGWFSVSS

SEQ ID NO: 10246 - protein, 372 aa, Annona cherimola
YETDPYHPITNPRGVIQMGLAENQLCSDLIEEWVRRNPSSSICTPEGASEFKEIAIFQDYHGLPAFRKAVANFMEKVRGGRAKFDPDRIVMSGGATGAHELIAFCLADPGDAFLVPTPYYPGFDRDLRWRTGVQLVPVECHSYNNFKVTRSALEAAYMKAQEENIRVKGLLITNPSNPLGTILDRETLESIISFINEKSIHLVCDEIYAATVFSSPPFVSIAEILTDVPHCNLDLVHIVYSLSKDLGLPGFRVGVVYSYNDHVVRIGRKMSSFGLVSTQTQHLIASLLSDDAFVNKFIVESARRLAERHSTFTRELARVRISCLKSNAGLFCWMDLRALLKEPTVEGEMELWHTIVNVIKLNVSPGASFHCS

SEQ ID NO: 10247 - protein, 431 aa, Penicillium citrinum
MTQSVLSRRAQDVVDAGSENPMWDVMKDTWHASTNPTGYVNVGVAENALMHDELLEFINKKLELPAKYLTYNDGGGGSSRLKAAIAAFLNHNLKPVIPLEPSHIMATNGVSSAIEHVAWSFADPGEGILLGRPYYGMFIPDMSLRTGSSVVPVSFGELDPLSVEGVDKYEEALLEFHRTTGKKVKALMLAHPHNPLGRCYSREVLVKLMRLCQKYQVHFISDEIYALSVFENTVDEHPPPVKFESALSIDLTGIIDPRLVHVLWGMSKDFGANGIRLGVIISQANRDIHMALTGPSLYSYASGITDHLTALILEDFDFTTRYIQQNQKLLSESYAYTANYLKEHGIEYATGCNAAFFVWMNLGKKYRELHPEDECENVGEQIMQRLLQKKVFLASGFLFGSEKDGWFRIVFTQGHDYLSVALERINAALEE

SEQ ID NO: 10248 - protein, 435 aa, Dendrobium crumenatum
MSKEFGIEAPLSKIAVSKAHGEDSPYFAGWKAYEENPYDAVDNPNGVIQMGLAENQLSFDLLEEYLEQHPEASSWGSGMSSFRENALFQDYHGLQTFRKAMASFMEKIRGGRSKFDPDRIVLTAGATAANELLTFILADPGDALLVPTPYYPGFLRDLQWRTGVTIFPVHCHSSNGFQLTLASLESAYADAKASNFNVKGLLITNPCNPLGTVASLSLLQDIILFISDKNIHLISDEIYFGCVFSSTNLFSISDLITNAVSYQIHIVYSLSKDLGLPGFRVGALFSYNDRVVKTARRMSSFSLVSSQTQKLLAFMLSDEEFTVNYIKKNRERLRERYELVVGGLKEAGIECLKGEAGLFCWVNMEELMEDKTEEGELRLWKVMVDELKLNISPGSSCCCSEPGWFRVCFANTSRETLEVALRRLKDFARKKTKNI

SEQ ID NO: 10249 - protein, 107 aa, Brassica rapa subsp. rapa
LVITNPSNPLGTTLDRDCLKSLVKFTNDKGIHLIADEIYAATTFGESEFISVAEVIEEIPDCNRDLIHIVYSLSKDMGLPGLRIGIIYSYNNRVVQIARKMSSFGLV

SEQ ID NO: 10250 - protein, 85 aa, Phalaenopsis sp. SM9108
RDLKWRTGAQIIPIRCSSTNSFRLTKTALDNAYRRATKLKLQVKGIVVTNPSNPLGTTMTSIELHTLVDFIEANNLHLICDEIYS

SEQ ID NO: 10251 - protein, 85 aa, Phalaenopsis sp. SM9108
RDLKWRTGVKIFPVHCHSSNGFQLTLPSLQSAYSIAEASNLRVKALLITNPSNPLGTTMPRSLLEDILNFISQKNIHLISDEIYS

SEQ ID NO: 10252 - protein, 3167 aa, Caenorhabditis elegans
MSPIAPPRKRLGREESLHYYRDDDEVIQEQSSTEKSRRVTVKSPEPGNTSVSMNDNVEGRNLTAGITSISMNDSCTDTSYESRFSTIPRARSSPPGNHRVNHIQVNVIGPIRVSEPESRHPVVGSVGEDVTMDIYIERRRSGSNPRRDSHVSFETLEAPPKPPRRSKYDEHIRIGDPIATSTPMTTIERKQTREERVSTESGQSSRKSTRSSRPPDINIIECETFLKETRSPARTPATPIVVINQTPSSRRSSQDLLGEPGQRRRKSTVTDIDWYAAFNMKVSWLNRLYRGLLTQFIRNSKKTVIILCHFRFSKFYIYKMVFDISKIVKIFKRKKKKKDPSSPTKIARPSFASHNEERKASRDLRRRASDSSMIGIPPADIDLNQIFLCTVPPEIKKDEKCQCNACRLIRMSEAERAETRSSTLPSRHRTAPVDIELEDIFNPKPFSHPSANSKPPTPPNRRRHPPSASVAHSQSSFVDESPSQHFVTTTIDRNQVTPVTTTTTNMRESGPLLHENSHNQLLSSSDNWVAQMMNDASEWENNVSSRKSSILSTSSTSARKASVARRISVDELTKPEKRKSRQAVPLPPSDVSIDDIFTALTPRKEEVQSERKTFIVTRKQRAQDVDAIDFEKDRETPIAPPRSGKRKSDATENQPEITLELDVEKHEIDSSKVSTSTINLNDESMETRNTNDSKDSFDDEVNPRNQRLVVEIPFSEPRVTSTATIQLESSDVAGENSENKRPVISMRSKSEIAKKEKDAQRSGFVIIPHSKEHILDESNISMDDVFNTTPHDQCRVPDIDADSSKHTSSDSREVSTVTINLDNVFPTEEPKLVAKDNCEIEAEEERIGKRIKQFERTTGEQEISKNSEPTEDEMPDEKDHRTSAVSIDLDKVFVQGTAKKPENDEFDEKIKRGIAEFERSKQEKEVQRSGVAETSHSGKHIFDESNISMDDVFNTSQKYKSDEKLSTPERTVEPEVSTATMNLDNIISASGIATREENTNVLEEEERIQKRVEEFKKTTENLEIQKEVVLTKEEVDNSDVKEHRTSAVNIDLEKVFIHGSSKKPKNDDEKIRRGIAEFERTKQEKEAQRSTVIETSQSNSRIFEESSISMDDVFNNSLHNESQVSEITEASDPSDLVLTSTTFHNVIEEKIDDDVTKTDSNVEEEKEQVRLRIDEFKRPTEEQNLQKEFELTKKEEEYSVKMENRTSAVSIDLDKVFDQSSKETTVSNETDEKIKRGIAEFERSKQEKEVQRSGVAETSHSGKHIFDESNISMDDVFNTSQKYKSDEKLSSPERTVEPEVSTATMNLDNIIFASGIATREENTDVLEEEERIQKRVEEFKKTTENLEIQKEVVLTKEEVDNSDVKEHRTSAVNIDLDDVFIQRSSKHPENDEDDEKIRRGIAEFERTKQEKEAQRSAVIETSQSNKHIFDKSNISMDEVFNESQNGQKDSSNIDMKETDMPEKERDDQRYVDVHRDKKPFENGEFEPTFNGSKISNEPKQISITTINLDNVFPTEEPKLVAEDNCEIEAEEERIRKRIKQFERTTGEQEILKNSEPAEDETSDEKKHRTAAVSIDLDKVFVQGTAKKPENDEFDEKIKRGIAEFERSKQEKEVQRSGVAETSHSSKHIFDESNISMDDVFNTSQKYKSDEKLSTPERTVEPEVSTATMNLDNIIFASGIATREKNTDVLEEEERIQKRVEEFKKTTENLEIQKEVVLTKEEGDNSDVKDHKASAVNIDLDDVFIQRSSKHPENDEDDEKIRRGIAEFERTKQEKEAQRSTVIETQYSSKDMFNESDISLDVVFNTSQKDKSDEKLSSPERTVEPEVSTATVNLDNMVALSKERRKENNETQEEEEQIQKRVEEFKESTEEQKIQKSIELTKEECTSDEKELKTYSGSIDLDKVFIQGSSKKPRNDESDERINRGIAEFERTKQEKEAQRSVVVETSPSNKHISDESSISMDEIFSRSQDNKSTSNFEKSGSIPIIVLPGEEKEVASASINLNGVFLEGKQKTSTDYGREKVNKVQENSGSYSTRHAMDGASISLDDIFNTSSTSQKTETDKIDNSQEFPQLSKPVLKSSISLDDLFNNTSGIEKTTSEKTTTTTTTRTETTTDTYSKRSTSTLVDRFGYETATPPAISIAAISFDQPSSSSPQAFPRSKHQNLSSLTVPGKWNESMMSNTSTISLDDSFNNSFSKSNTSQVYEPRMRKPLTLPVDNWIDNLVSEATNEATKEAPKTPKSDTLNYFRSPTRISQEIKYEWVADMIGDIDRKNKGGHQSEEEHLQKHDSTWVSSVVYRPTLETSAYTLRSSQLNTDCKMEIDLENVFDECLMGKKKDDEHCECSACRLTEQELEEIKKRKIELENMTSEQKIIISEPSDRRKSVDFSNPSQISLNEVFSPEVPLRIETEHAPAPSTSSPPLESTRIYYLSPKVSETVTTTHQWKDAGIPMDEIFSPVSSTADGNRRFSNFYEDRSGWDTIGSEDSGVMSGGDRGRRRSTRITDQVIDEAFQGIFDSQPSTSTAHPKPVRTETHYDDYYITSLQQEDLDATDSEVDGENLDVSTFVDDILGKSMDEAAFLSSTKSLREHTDTSIDRKKSGEKVHSYYRNRTDTSIDKRSKPEVITEDLETSELQDEIMKLVFVEPSVSKSDSSANIKASQNKSTTKPCDEELLEIEIKSEYFLIKGSYSLLIPKSDPLGKMLQKLREQNDSLATLDFSLTRKLKKLLVNCIREKAGSLDMVSMSSQYEGLSSRGQSLIESIDHASATFLKMNVDKYEPTRNPNGVVNFCTAENNICTPLLEDRFKHLELFFPNIEHLVRYPPAGGWPETRRVLVKYFKEFMGAGVTIDELVLTASTRTGYDVTSYCLFEQDDILLTNGPIYTGTISNVQEKAQCQVVCVETDLSNPRLDVKMYEAELNRQIALENTVSGVIIVNPHNPLGVTFPPEQVISLCNWASSKNLRVVIDEVFANSVFDKLNSKFRPFLSYRHRLHRPDSVAWLWSVSKDFGLPGLKFAVIHTTNEGLCQAATKLQMYYPCSPFVQDFAVNLLSDSEWLREFHREVNKRISIHYRYTSDNLKRLEIPFIPAQAGIFVFADFSKHLTSLDSVGELALFERLAEAGVMLTPGVHQKCHVFGWFRIVFACTKEELEEGFRRLYIHLGSQLQPVGTVEY

SEQ ID NO: 10253 - protein, 3147 aa, Caenorhabditis elegans
MSPIAPPRKRLGREESLHYYRDDDEVIQEQSSTEKSRRVTVKSPEPGNTSVSMNDNVEGRNLTAGITSISMNDSCTDTSYESRFSTIPRARSSPPGNHRVNHIQVNVIGPIRVSEPESRHPVVGSVGEDVTMDIYIERRRSGSNPRRDSHVSFETLEAPPKPPRRSKYDEHIRIGDPIATSTPMTTIERKQTREERVSTESGQSSRKSTRSSRPPDINIIECETFLKETRSPARTPATPIVVINQTPSSRRSSQDLLGEPGQRRRKSTVTDIDWYAAFNMKVSWLNRLYRGLLTQFIRNSKKTVIILCHFRFSKFYIYKMVFDISKIVKIFKRKKKKKDPSSPTKIARPSFASHNEERKASRDLRRRASDSSMIGIPPADIDLNQIFLCTVPPEIKKDEKCQCNACRLIRMSEAERAETRSSTLPSRHRTAPVDIELEDIFNPKPFSHPSANSKPPTPPNRRRHPPSASVAHSQSSFVDESPSQHFVTTTIDRNQVTPVTTTTTNMRESGPLLHENSHNQLLSSSDNWVAQMMNDASEWENNVSSRKSSILSTSSTSARKASVARRISVDELTKPEKRKSRQAVPLPPSDVSIDDIFTALTPRKEEVQSERKTFIVTRKQRAQDVDAIDFEKDRETPIAPPRSGKRKSDATENQPEITLELDVEKHEIDSSKVSTSTINLNDESMETRNTNDSKDSFDDEVNPRNQRLVVEIPFSEPRVTSTATIQLESSDVAGENSENKRPVISMRSKSEIAKKEKDAQRSGFVIIPHSKEHILDESNISMDDVFNTTPHDQCRVPDIDADSSKHTSSDSREVSTVTINLDNVFPTEEPKLVAKDNCEIEAEEERIGKRIKQFERTTGEQEISKNSEPTEDEMPDEKDHRTSAVSIDLDKVFVQGTAKKPENDEFDEKIKRGIAEFERSKQEKEVQRSGVAETSHSGKHIFDESNISMDDVFNTSQKYKSDEKLSTPERTVEPEVSTATMNLDNIISASGIATREENTNVLEEEERIQKRVEEFKKTTENLEIQKEVVLTKEEVDNSDVKEHRTSAVNIDLEKVFIHGSSKKPKNDDEKIRRGIAEFERTKQEKEAQRSTVIETSQSNSRIFEESSISMDDVFNNSLHNESQVSEITEASDPSDLVLTSTTFHNVIEEKIDDDVTKTDSNVEEEKEQVRLRIDEFKRPTEEQNLQKEFELTKKEEEYSVKMENRTSAVSIDLDKVFDQSSKETTVSNETDEKIKRGIAEFERSKQEKEVQRSGVAETSHSGKHIFDESNISMDDVFNTSQKYKSDEKLSSPERTVEPEVSTATMNLDNIIFASGIATREENTDVLEEEERIQKRVEEFKKTTENLEIQKEVVLTKEEVDNSDVKEHRTSAVNIDLDDVFIQRSSKHPENDEDDEKIRRGIAEFERTKQEKEAQRSAVIETSQSNKHIFDKSNISMDEVFNESQNGQKDSSNIDMKETDMPEKERDDQRYVDVHRDKKPFENGEFEPTFNGSKISNEPKQISITTINLDNVFPTEEPKLVAEDNCEIEAEEERIRKRIKQFERTTGEQEILKNSEPAEDETSDEKKHRTAAVSIDLDKVFVQGTAKKPENDEFDEKIKRGIAEFERSKQEKEVQRSGVAETSHSSKHIFDESNISMDDVFNTSQKYKSDEKLSTPERTVEPEVSTATMNLDNIIFASGIATREKNTDVLEEEERIQKRVEEFKKTTENLEIQKEVVLTKEEGDNSDVKDHKASAVNIDLDDVFIQRSSKHPENDEDDEKIRRGIAEFERTKQEKEAQRSTVIETQYSSKDMFNESDISLDVVFNTSQKDKSDEKLSSPERTVEPEVSTATVNLDNMVALSKERRKENNETQEEEEQIQKRVEEFKESTEEQKIQKSIELTKEECTSDEKELKTYSGSIDLDKVFIQGSSKKPRNDESDERINRGIAEFERTKQEKEAQRSVVVETSPSNKHISDESSISMDEIFSRSQDNKSTSNFEKSGSIPIIVLPGEEKEVASASINLNGVFLEGKQKTSTDYGREKVNKVQENSGSYSTRHAMDGASISLDDIFNTSSTSQKTETDKIDNSQEFPQLSKPVLKSSISLDDLFNNTSGIEKTTSEKTTTTTTTRTETTTDTYSKRSTSTLVDRFGYETATPPAISIAAISFDQPSSSSPQAFPRSKHQNLSSLTVPGKWNESMMSNTSTISLDDSFNNSFSKSNTSQVYEPRMRKPLTLPVDNWIDNLVSEATNEATKEAPKTPKSDTLNYFRSPTRISQEIKYEWVADMIGDIDRKNKGGHQSEEEHLQKHDSTWVSSVVYRPTLETSAYTLRSSQLNTDCKMEIDLENVFDECLMGKKKDDEHCECSACRLTEQELEEIKKRKIELENMTSEQKIIISEPSDRRKSVDFSNPSQISLNEVFSPEVPLRIETEHAPAPSTSSPPLESTRIYYLSPKVSETVTTTHQWKDAGIPMDEIFSPVSSTADGNRRFSNFYEDRSGWDTIGSEDSGVMSGGDRGRRRSTRITDQVIDEAFQGIFDSQPSTSTAHPKPVRTETHYDDYYITSLQQEDLDATDSEVDGENLDVSTFVDDILGKSMDEAAFLSSTKSLREHTDTSIDRKKSGEKVHSYYRNRTDTSIDKRSKPEVITEDLETSELQDEIMKLVFVEPSVSKSDSSANIKASQNKSTTKPCDEELLEIEIKSEYFLIKGSYSLLIPKSDPLGKMLQKLREQNDSLATLDFSLTRKLKKLLVNCIREKAGSLDMVSMSSQYEGLSSRGQSLIESIDHASATFLKMNVDKYEPTRNPNGVVNFCTAENNICTPLLEDRFKHLELFFPNIEHLVRYPPAGGWPETRRVLVKYFKEFMGAGVTIDELVLTASTRTGYDVTSYCLFEQDGKRECNKIITDLSNPRLDVKMYEAELNRQIALENTVSGVIIVNPHNPLGVTFPPEQVISLCNWASSKNLRVVIDEVFANSVFDKLNSKFRPFLSYRHRLHRPDSVAWLWSVSKDFGLPGLKFAVIHTTNEGLCQAATKLQMYYPCSPFVQDFAVNLLSDSEWLREFHREVNKRISIHYRYTSDNLKRLEIPFIPAQAGIFVFADFSKHLTSLDSVGELALFERLAEAGVMLTPGVHQKCHVFGWFRIVFACTKEELEEGFRRLYIHLGSQLQPVGTVEY

SEQ ID NO: 10254 - protein, 446 aa, Striga hermonthica
MGRMMMIEQEGRGQSVSLSRIAVSDTHGEDSPYFAGWKAYDEDPYDESLNPFGVIQMGLAENQVSFDLVEQYLEKHSDATNIGANSGFRENALFQDYHGLLSFRQAMASFMERIRGGRANFDPERIVITAGATAASELLTFILADPGDAVPVPTPYYPGFDRDLRWRTGVNIIPVHCHSANNFAITPEALDSALKHARASNTNVRALLITNPSNPLGATLSRATLDLALDFVSRHDLHLVSDEIYSGSAFSPDEFVSVSQVLESRGYKDAERVHVVYSLSKDLGLPGFRVGTIYSYNDRVVQTARRMSSFTLISSQTQKLLASMLSDKEFTEKYVRINRERLRGRYEATVEGLKRAGIRCLGGNAGLFCWMDLSGELREGSREDELELWGKLLREVKVNVSPGSSCHCSEAGWFRVCFANMSERTLEVALGRIQAFMERRRRRIAN

SEQ ID NO: 10255 - protein, 351 aa, Passiflora edulis
QVSFDLLEAYLEQHPEASTWGNGAPGFRDNALFQDYHGLKSFRQAMASFMEQIRGGRAKFDPDRIVLTAGATAANELLTFILADPGDALLVPTPYYPGFDRDLRWRTGVKIVPIHCDSSNNFQVTPQALEAAYKNAEAMNLKVRGVLLTNPSNPLGATIQRSVLEEIFDFVTRKNIHLVSDEIYSGSTFSSAEFVSIAEILEARGYTEAERVHIVYSLSKDLGLPGFRVGTIYSYNDKVVTTARRMSSFTLISSQTQHPLACMLSNKEFAENYIKTNRERLRKRYDMIIQGLKDAGIECLKGNAGLFCWMNLSPLLETPTKEGELALWESIVHEVKLNISPGSSCHCSEPG

SEQ ID NO: 10256 - protein, 354 aa, Passiflora edulis
QLCFDLVEEWLKNNPEASICTAEGLSEFRDIAIFQDYHGLPEFRNAVAKFMAKVRGDRVTFDPDRIVMSGGATGAHETIAFCLADPGERFLVPTPYYPGFDRDLRWRTGVKLIPVECESSNNFKVTRESLESAHEMAQLDGIRVKGLLITNPSNPLGTILDRDTLRSIVHFVNEKNIHLVCDEIYAATVFRQPDFVSISEILQEDDIECNLDLIHIVYSLSKDMGFPGFRVGIIYSYNDAVVSCARKMSSFGLVSAQTQHLIASMLSDDEFIEGFIKESRRRLAKRYQVFTRGLAQVGIKCLKTSNAGLFMWMDLRDPLKEKTFDGEMMLWRLIINEVKLNVSPGCSFHCPEPG

SEQ ID NO: 10257 - protein, 501 aa, Homo sapiens
MFTLPQKDFRAPTTCLGPTCMQDLGSSHGEDLEGECSRKLDQKLPELRGVGDPAMISSDTSYLSSRGRMIKWFWDSAEEGYRTYHMDEYDEDKNPSGIINLGTSENKLCFDLLSWRLSQRDMQRVEPSLLQYADWRGHLFLREEVAKFLSFYCKSPVPLRPENVVVLNGGASLFSALATVLCEAGEAFLIPTPYYGAITQHVCLYGNIRLAYVYLDSEVTGLDTRPFQLTVEKLEMALREAHSEGVKVKGLILISPQNPLGDVYSPEELQEYLVFAKRHRLHVIVDEVYMLSVFEKSVGYRSVLSLERLPDPQRTHVMWATSKDFGMSGLRFGTLYTENQDVATAVASLCRYHGLSGLVQYQMAQLLRDRDWINQVYLPENHARLKAAHTYVSEELRALGIPFLSRGAGFFIWVDLRKYLLKGTFEEEMLLWRRFLDNKVLLSFGKAFECKEPGWFRFVFSDQVHRLCLGMQRVQQVLAGKSQVAEDPRPSQSQEPSDQRR

SEQ ID NO: 10258 - protein, 501 aa, Homo sapiens
MFTLPQKDFRAPTTCLGPTCMQDLGSSHGEDLEGECSRKLDQKLPELRGVGDPAMISSDTSYLSSRGRMIKWFWDSAEEGYRTYHMDEYDEDKNPSGIINLGTSENKLCFDLLSWRLSQRDMQRVEPSLLQYADWRGHLFLREEVAKFLSFYCKSPVPLRPENVVVLNGGASLFSALATVLCEAGEAFLIPTPYYGAITQHVCLYGNIRLAYVYLDSEVTGLDTRPFQLTVEKLEMALREAHSEGVKVKGLILISPQNPLGDVYSPEELQEYLVFAKRHRLHVIVDEVYMLSVFEKSVGYRSVLSLERLPDPQRTHVMWATSKDFGMSGLRFGTLYTENQDVATAVASLCRYHGLSGLVQYQMAQLLRDRDWINQVYLPENHARLKAAHTYVSEELRALGIPFLSRGAGFFIWVDLRKYLPKGTFEEEMLLWRRFLDNKVLLSFGKAFECKEPGWFRFVFSDQVHRLCLGMQRVQQVLAGKSQVAEDPRPSQSQEPSDQRR

SEQ ID NO: 10259 - protein, 501 aa, Homo sapiens [sequence omitted]

SEQ ID NO: 10260 - protein, 652 aa, Homo sapiens
MRSHMWLWRGLSLSDILCFDLEFPHTTLGEVGFITAIFNKEKLKTRKASSCQKAASIYWADPGILVLAAREGPRVNGKVDGARQPSEASKDTRSISHRSDTLPVPSGQRRGRVPRDHSIYTQLLEITLHLQQAMTEHFVQLTSRQGLSLEERRHTEAICEHEALLSRLICRMINLLQSGAASGLELQVPLPSEDSRGDVRYGQRAQLSGQPDPVPQLSDCEAAFVNRDLSIRGIDISVFYQSSFQDYNAYQKDKYHKDKNTLGFINLGTSENKLCMDLMTERLQESDMNCIEDTLLQYPDWRGQPFLREEVARFLTYYCRAPTRLDPENVVVLNGCCSVFCALAMVLCDPGEAFLVPAPFYGGFAFSSRLYAKVELIPVHLESELTVDKLEEALLEARLEGKKVRGLVLINPQNPLGDIYSPDSLMKYLEFAKRYNLHVIIDEIYMLSVFDESITFHSILSMKSLPDSNRTHVIWGTSKDFGISGFRFGALYTHNKEVASAVSAFGYLHSISGITQHKLCQLLQNTEWIDKVYLPTNCYRLREAHKYITAELKALEIPFHNRSSGLYVWINLKKYLDPCTFEEERLLYCRFLDNKLLLSRGKTYMCKEPGWFRLIFADELPRLKLAMRRFCDVLQEQKEALIVKQLEDAMRE

SEQ ID NO: 10261 - protein, 357 aa, Streptomyces coelicolor A3(2)
MTSLFDSYRLGELTLPNRMVMAPMSRVRAAGGGLATPSMATYYAQRATAGLIVSEGVQPNEVGQSNPGTPGLHTDEQVAAWRPVTAAVHTNGGRIFAQIMHGGRVSHPDTTGMLPVGPSAVPAVGEVFTPTGPQPVPTPRALETAEVPEQARSYAEAARRAVDAGFDGVELHGANGYLISQFLSTNANLRTDRYGGPVAHRIRFAVEAVSATVEAVGADRTGIRLSPAGTFWGVEETDVLDLYTELLTELSRLGIAYVHIEATADEELLVALRRVWPGTLVMNPVLPMGPKQTGREDADHWLGLGADLISFGRGFIANPDLVERLRTGLPVAPVDESTYYQGGDAGYLTYPAYQHTV

SEQ ID NO: 10262 - protein, 376 aa, Streptomyces coelicolor A3(2)
MTVTPAEAATRAAQLLARPATINGLTVPNRIAMAPMTRMFSPGGVPGEDVVSYYSRRAAAGVGLIVTEGTYVGHDSAGQSDRVPRFHGEEQLAGWAKVAEAVHAAGGTIVPQLWHIGMVRKAGEQPFPDAPAVGPSGLRIGEDEPTGRAMTQRDLDDVIGAFAESAAAAERIGFDGVEIHGAHGYLVDQFLWSGTNRRTDAYGGDPVARTRFAAEIVAAVRETVSADFPVIFRYSQWKQEAYDARLAETPEELEAILTPLASAGVDAFHASTRRYWLPEFEDSDLNLAGWTKKLTGKAAITVGSVGLDGDFNRAFQGEGAPVGSLDNLLDRLERDEFDLVAVGRALLHDPRWAQKVLDGRFDELAPYDAASLKTLS

SEQ ID NO: 10263 - protein, 387 aa, Streptomyces coelicolor A3(2)
MHVPSTAPPPATAAPLFGPFTVGSLALENRIVMAPMTRELSPGGVPGPEVAAYYARRARNGVGLIITEGAAIGHPSSERRAAVPRIHSADALAGWTRVTQAVHAAGGRIAAQLMHVGLDPLLWGMTPAEMDAASPAGFELLSPSGVDPSQPAAATVGREMSDVDISSVIEAYARAAAEARQAGFDAIELHAAHGYLIDQFFWAVTNRRKDRYGGDLSARTRFGADVVRACRHAVGEDFPIFLRFSQWKVGHYAARLADSPDELAAVLGPLVQAGVDAFHCSTRRFWQPEFEGSDLNLAGWTKKVTGRPVIAVGSVGLKDSDFLSYLDGKGADVGDVSVVADRLAQGEFDLVAVGRALIADPAWPAKVRGGRSADLIPFDARMLTSLH

SEQ ID NO: 10264 - protein, 402 aa, Nostoc sp. PCC 7120
MSDEAERQRGNNLYKNSPLLPVSISQVSTSQLRETEIMSTNINLFSSYQLGELELPNRIVMAPLTRQRAGEGNVPHQLNAIYYGQRASAGLIIAEATQVTPQGQGYPHTPGIHSPEQVAGWKLVTDTVHQQGGRIFLQLWHVGRISHPDLQPDGGLPVAPSAIAPKGEVLTYEGKKPYVTPRALDTSEIPAIVEQYRQGAANALAAGFDGVEIHAANGYLIDQFLRDGTNQRTDEYGGAIENRARLLLEVTEAITSVWDSQRVGVRLSPSGTFNDIRDSHPLETFGYVAQALNRFNLSYLHIFEAIDADIRHGGTVVPTSHLRDRFTGTLIVNGGYTREKGDTVIANKAADLVAFGTLFISNPDLPERLEVNAPLNQADPTTFYGGGEKGYTDYPFLAVANK

SEQ ID NO: 10265 - protein, 362 aa, Rhodobacter sphaeroides
MTEKLFTPIAVGDLTLKNRVVMAPLTRNRAEPEGDLPTDLTVEYYRQRAGAGLIVTEGSQISPEGKGYAWTPGIHSEAQVAGWRKVTDAVHARGGHIAIQLWHVGRISHTSLLDGQKPVAPSALAAASRTFDGTGFVATSEPRALETDEIARVVEDYRKAARNAKAAGFDAVEIHAANGYLIDQFLRDTSNKRTDAYGGSQENRVRFLEEVVGAVVAEMGPGRTGIRFSPFSNANDVGIDSDTVGLFSRAIDVLNRHGIAFLHMVEGQTGGAREWPEGALETLRERFGGTYVANNGYDREMAVAAVESGKADMVAFGKLYISNPDLAERLAARAPLAPLPTEGLYGGGAEGYTDYPTLTPAA

SEQ ID NO: 10266 - protein, 366 aa, Rhodopseudomonas palustris
MSNSKLFEPTKLGPITLANRVVMAPLTRNRAVPEGLVPSPLAAEYYGQRASAGLLITEASQVSQQGQGYQDTPGIYSQAQVEGWRKVTGEVHKRGGKIFIQLWHVGRISHVDLQPNHGAPVAPSAIRANTKTFVGGQFADVSEPRALELSEIPGIIEDFRKAAANAIAAGFDGVEIHGANGYLLDQFARDSSNKRTDEYGGSIQNRARLMLEVAAAVAKEIGPERTGIRISPVTPANDVSDSNPQALFDYIVDELNKLKLVYIHVIEGATGGPRDIAPFDYASLRKRFSGSYIGNNAYDLALANKQLDAGAADLIAFGKPFISNPDLVERLKRNAPLNEPDKSTFYGGGAKGYTDYPTLESAQAAQ

SEQ ID NO: 10267 - protein, 190 aa, Rhodospirillum rubrum
VAGALTARYYAQRASGGLLISEGTQISPSGRGYPRTPGIHSPEQIAGWKGVTEAVHAAGGRIFAQLWHVGRISHRSLQPGGVLPVAPSAIRPKTKIFTESGLVALETPRALDTAEMADIVASFRAAAENARAAGFDGVEIHAANGYLLDQFLRDGTNHRDDAYGGSIDNRLRLVLEVVEAVLGVWDKARV

SEQ ID NO: 10268 - protein, 546 aa, Sulfolobus tokodaii
MRLLEPFYIRDVELKNRVVMSPMITNLGAPEGYPTEEHIRYFVRRASAGLLITEYTYVNKVDARGSPNQLGLYDDELIPKFARLTEAVHNMDSKIFVQLVHVGRKTRRSLIWNNDPIAPSNIPLLDPVREMTEDDINRVIMDFVKASERAEKSGFDGIELHGAHGYLIAQFLSPATNKREDKYKDGVIFLEELLKEIRRVVSIPVGMRISVTEFDPQGLTPELVAKIVKRVENLLDYIHLSAGRDGPLGGSSSFYYKRPSYVDEAKVVRKVTNLPLLLVGSVSTVEDAEKVLEVADAVVLGRQILADPDWVIKVKNNLPIRPCIRCNQLCRLLSTREVRCDVNPELGWEILNLEKGEGEVRIVGGGVMGLETARVLALRGFEVKIYEKKDKIGGQLNEIRDPWKREEFSRLIDYYEKELKRLGVKIYLSTEERKADIFALPKERQPEFKEYKGMRILVNSNLYAYQDYVFEWLKHNEVYITENVFKGLDRNRSYLLQQKYKELGVNIVKENVKADIVINDVRRNQPSIGQSIARGYWLGMTFKLKY

SEQ ID NO: 10269 - protein, 647 aa, Thermoanaerobacter tengcongensis
MSEFKFEKLLEPIQIGSMKLRNRIIMPPMVTNYAAEDGAVTERFKAYHQTRAKGGVGLIIVEATYIHPGGKGFQNQLGIYKDELISGLKELTEAVHKYGAKIAVQLYHAGRQTTLKVTGMQVVAPSPIPCPVKQEKPKELSVDEIKELIEAFGQAARRAKEAGFDAVEIHGAHGYLINQFLSPYSNKRTDEYGGSFENRMRFPLEVVRRVREEVGPDFPIIYRMSAEEYVPGGLTIEDTKIFAQKLVEEGIDALHISGGVYESSAMIIQPAAIPQGCFVENAAAIKKAINSKVPVIVVGRIKDPIMAEQIIREGKADLVSMGRALLADPELPRKVSEGKIEEIRKCIGCNQGCIDRLFQDIDIGCIANALTGHETEFDMESLAKTRKKVFIIGGGPGGLEAARVAALRGHEVILYEKQPELGGQMRIAAVPPHKGEINDLADYLINQVEKSGITIVKGKEADLNTIHEIKPDVVILATGSEPIIPEIPGINQKNVVTAHDVLKGTVTVGKKVAVIGGGLVGCETAEFLADQGKEVTVIEMLDDIAIDVGSLVRALLLNRMAEKKIKVLTKSKVKEISGDKVTIETVNGNQELSGIDTIVIAVGSKPKNDLLKLIEKEGIPVYAIGDCVKARKFMDAIHEGFRYAYSL

SEQ ID NO: 10270 - protein, 369 aa, Ralstonia metallidurans
MGAQTEAFLTEALFQPIKLGRIELANRMAMAPLTRSRADDDLVPTEMVVEYYRQRASVGLIIAEATQVSETAQGYTNTPGVYTPEQIAAWKTVTDAVHAQGGKIFLQIWHTGRMSHSHFQPDNQAPVAPSAIAANAKTYINGQGYVECSLPRALEASEIPEIVNDFRVAAANAIKAGFDGVEVHGAHGYLLDAFLRDGTNKRTDAYGGSIENRARFLLEVMAAVTAEIGADRVGVRLAPVSPVNDAVESNPQPLFEYVVRELEKLHPVYIHVVEGYTGGPRDNVPFDYEALHRLYSGVWMVNNGYSKEMAEEAIRAGRADMVSFGRKMITNPDLPRRFRENQPLNSPFEDASLYGGTGPHGYVDYPALA

SEQ ID NO: 10271 - protein, 361 aa, Ralstonia metallidurans
MHMSALFTPVRVGRYTLKNHLVMAPMTRSRASLDGTPGELAAEYYAQRASVGLIVTEGTQPSDDGQGYLATPGIYTEAHVDGWKNVTAAVHERGGRIFIQLMHAGRMSHPDNTPHHRQGVAPSAIAPGVPMFTLKGMQDIPAPRALTTAEVRQTVDDFRFAARQAIAAGADGVEIHGANGYLVQQFFAPNANTRTDKYGGSIDNRARFAIEVATAIAGEIGADRTAIRLSPGTPLWGIDEGAEGPALYRHLVTELDKLGLAYLHVSLQGNEPQLADIRERWRGTLILNRPGRTREAVGADVASGLADLEAYGQMVLANPDFVTRLKLGAPMNDALPNAFFGGDGRGYIDYPALALTDTVTS

SEQ ID NO: 10272 - protein, 285 aa, Ralstonia metallidurans
MKSALRAWLRFGTKEIMMTSTSNPLFQPYSLGPLSLPNRIVMPPMTRSRASQPGDVPNALMAEYYAQRASAGLIVSEGTWISPLGRGYAWTPGIHTPEQVAGWRKVTTAVHQAGGRIFAQLWHVGRLSHISLLDGHAPVSSSAIQAQGVNVFVAQSDGKPGFAQASQPRALSVEEIHAIVDDFRQAARNAMAAGFDGVELHAANGYLVNQFIDSGANDRTDEYGGSLENRLRFLGEVAQALIEGTGGKDRVGIRLAPLTTLNGCVDADPETTYTAAARLLGEIGG

SEQ ID NO: 10273 - protein, 371 aa, Burkholderia fungorum
MSTDSARIDSYLFEPVELGPLQLPNRIVMAPLTRSRAKEGDVPGELAIEYYAQRASAGLIIAEATQISPQGKGYVFTPGIYNDAQVQAWKRITGAVHEKGGRIFLQLWHVGRISHPSLQPGNALPVAPSAIKPEGQAYTNEGFVPLVTPRALETSEIAGIVEQYRVAAQNAKAAGFDGVEIHAANGYLLDQFLRDKTNRRTDQYGGSIGNRARLLLEVADAVTGVWGSDRVGVRISPLSSFGDIADSNPEPLFTYVVQQLSARKLVYLHVIEGDTGGPRDVPGGFDLQVLREAFDGLFMANNGYDMELAQRTLKAKRADLIAFGRPFISNPDLVARLRSGAPLNEPDKDTMYGGGAEGYIDYPTMEQEAKR

SEQ ID NO: 10274 - protein, 371 aa, Burkholderia fungorum
MNASSELKLLSPARVGPLSLAHRVVLAPMTRLRSDADDSPSAMMVEYYRQRASQGGLLITESAHPSYDSRGYIGAPGIYTNAHVEAWRKITDAVHARGARIFMQIAHDGRQSHVDLSWGNAPVAPSVVPYETTVFTQNGWVPNSPHRALELDEIPALIRSFRDAAARAKDSGFDGVELHNANGYLADTFLQDGTNKRTDAYGGSVEKRARFSLEAVEAFASVWGADRVGVRVSPSGRWGAISDNHPEATFGYFAQRLNEYGLAYLHVIEPRVMGTETLTEGEAPVASAFLRKVFTGPIIAAGGFDRDGAEQILQRGDADLVAFGRWFSSNPDLPERFRLGHALAPYNREAFWGGDERGYIDFPSLPEHAAA

SEQ ID NO: 10275 - protein, 353 aa, Burkholderia fungorum
MPTLFDPLQIGDITLPNRIIMAPLTRQRAGEIRVPNALMAKYYAERATAGLIISEATSVTPQGVGYADTPGIWSQEQVEGWKLVTSAVHAAGGRIFLQLWHVGRISDPLFLNGELPVAPSAIAAQGHVSLVRPERAYVTPRALELDEIAGVVEAFRKGAENAKAAGFDGVEVHGANGYLLDQFLQDSTNKRTDAYGGPIENRARLLLEVTDACIGVWGANRVGVHLAPRRDSHTMGDSDPAGTFGYVARELGKRKIAFIAAREALGDDRLGPQLKKAFGGPYIANEKFTTETAQQVLDAGEADAVAWGQLFIANPDLVRRFATNAPLNKPNPATYYARGETGYVDYPTLETVE

SEQ ID NO: 10276 - protein, 368 aa, Enterococcus faecium
MGGMTMSQFDQSITLPSGVQLKNRLMLSPMTTQLSFFNGVITEDEITYYKQRSKGLGAVITGAANVQDIGKGWPGELSIAHDEMIPRLSELAKAIQGEGAKAIIQIFHGGRMTSRATLSGEQPVSASAVAAKRPDAETPRAMSEEEIVETIQAFGKATRRAIESGFDGIELHGANTYLIQQFFSPHSNRREDQWGGSLENRYRFIEELLTTVFSAVEQYAKKPFIVGYRFSPEEYETPGIRFEDTIWLLERLRESKLDYLHVSLNMYDRIARSDKYNDKSILEVVHNTIQGKIPLVGVGGIRNREDVEQVLKYAELAAIGQQMIVDPDWAEKLLENREDEFVTKPFEEAYKELYLPSPLYNFLKARYQ

SEQ ID NO: 10277 - protein, 391 aa, Lactococcus lactis subsp. lactis
MPNQLTDHVTLRHGATLNNRIVMSPMQTHSGLKGGFASDDTIQYYSARSRAAGMLITEFHYVSENGGPAYVPGYPEQLGAYSDAHLEGLRKTVQALKKDGNKAILQIHHAGRAAVGRHVNGLDVVAPSAIDFSFLDYPVRELTITEIDDIILDFGKATKRAIDAGFDGVEIHGANHYLIQQFFSKLSNLRTDKWGGSLNKRMAFPLAVVKEVKAIVDEYAPKGFIIGYRISPEELHGKNVGYDYTEALTLISEVIKYELDYIHLSLWAGYNSKPENSEKSYAELFKEILDDKTKLLIVGGIFGEDTATDAIENYADLIAVARGTLIDPNFAKKVTEGKGDTILHKISPETVEYSHLTPGLLEAFSREDSLGLPPLPGGETIRHLHTGKYDI

SEQ ID NO: 10278 - protein, 351 aa, Clostridium acetobutylicum
MKKLFTEINIKNLKIKNRVCIPPMVVPVAEDGYVTSSNVERYKELAKGGPGLIIQEATCINEDGKLAEKQIGIWSDDQVEGLRKIVDAVHEEGCPIFVQIHHAGVVGISEEPLCPSPYEFNGYGRKVVGREMTLEDIKSVQNDYIEAARRAYEAGYDGIELHGCHGYLICQFLNKRVNKRNDEYGKNPENFVIEILEGIRKVTPKEFIVGIRLGGFEPAIEDGIHYAKIFEQQGIDFLDVSYGFSNGQEINVGEDYKYSNAVYAAERIKKEVSVPVFAVDGINSGDMAEAILNETNVDLVDIARGALINPNWANDAREGKDTGKCLRCSKCAWFGLSKACPGRAIFSRNNA

SEQ ID NO: 10279 - protein, 667 aa, Clostridium tyrobutyricum
MKNKSLFEPIKIGKVEVKNKISMAPMGAFGLVDNEGCYNQRAVDYYVERAKGGTGLIITSITKVENEIDKVVPGVIPIISINPGRFIMTSSEMTERVHAYGSKIFLQLTMGFGRSGAPGTLLTSQPVSASSVPNYWDPTVTCRELTTSEVEWIVAKFIQGAAIAQKAGFDGVEIHAVHEGYLLDQFTLSIFNRRTDKYGGDLRGRLQLPIEIVQGIKAQVGSDFPVGLRYSVKSCIKDWRQGGLPDEDYVEKGRDLEEGLESPQILEAAGYDELNTDVGTYDAWYWSHPPLYQKDGLYLPYTQELEKVVKIPVIVAGKLGVPQEAEKALDEGGADMIGLARPLLSDAYWPKKVLSGHPERIRPCIGCHVACLGRGFEGKPLSCAVNPAAGRERYYEIRPAAIPKKVLIAGGGVAGMEAARMAVLRGHKVTLYESTDQLGGEIVPGSVPDFKIDDRRLLDWYRNEMKELKINVIFNTEVTDKLVGKEQPDVVIVATGANDVKIKLPGMEKDKVSTAVDILNGTKKSGKNVLIVGGGLVGCETALYLAKAGKKVAIVEAKDKILDAGKPIPHMNKIMLEDLIKKYNIKVITGNSLLEVTDAGAVLIDSKFKQQEVSADTVVISIGFKSNRKLYNKLHGKVTDLYLIGDAYQAANIMDAIWSGNEIGLNC

SEQ ID NO: 10280 - protein, 667 aa, Moorella thermoacetica
MVAYTRLFEPIKIGKVEIKNKIAMTPMGVLGLATHDGCFSKRVVDYYVERAKGGTGLIITSVTKVDNEIERFKAGAVPVATANPLHFIATAGELTERVHAYGTKIFLQLGMGFGRVAAPILLESQPVAPSALPNFWDPSITCRELTTAEVETLVQRASEAAEIAVEAGFDGVEIHAMHEGYLLDQFTIALFNRRGDKYGGALEDRLTFPIEIVRAIKDRVGKDFPVVLRFSIKNYIKDWRQGGLPGENFQEKGRDVEEPLAAAKILEGAGYDGFDADAGSYDAWYWAHPPVYQKHGCYLPLTQRLKEVVKVPVIVAGRLEIPELAEEALVKGQADMIAIGRGLLTDPYWVNKVMTGRSKNIRPCIGCHDGCLGRGFLGRPLSCTVNPACGREEEYAIDRAPEAKQVMVIGGGVAGMEAARVPALRGHRVSLYEKSDRLGGHVVEAAVPDFKADDGRLLEWYKTELGELQVEIHLNQEVTPEFVEEKNPDVVVVATGSTPAIPDIPGVNKDKVTTVSDLLLGKKQAGDRVVIIGGGLVGCETALWLAQQGKDVTIIEILDDLMRAGIPVPYMNRMMLLDLLKMNGVKWLTETSVLEVTDDGVTLIGKNYQRSPLPADTVILAVGFGADQRLYNALRDKIPNLYLIGDSREPRNILAGIWEGYEVGRGI

SEQ ID NO: 10281 - protein, 365 aa, Escherichia coli O157:H7 EDL933
MSSEKLYSPLKVGAITAANRIFMAPLTRLRSIEPGDIPTPLMAEYYRQRASAGLIISEATQISAQAKGYAGAPGIHSPEQIAAWKKITAGVHAENGHMAVQLWHTGRISHASLQPGGQAPVAPSALSAGTRTSLRDENGQAIRVETSMPRALELEEIPSIVNDFRQAIANAREAGFDLVELHSAHGYLLHQFLSPSSNHRTDQYGGSVENRARLVLEVVDAGIEEWGADRIGIRVSPIGTFQNTDNGPNEEADALYLIEQLGKRGIAYLHMSEPDWAGGEPYTDAFREKVRARFHGPIIGAGAYTVEKAETLIGKGLIDAVAFGRDWIANPDLVARLQRKAELNPQRAESFYGGGAEGYTDYPTL

SEQ ID NO: 10282 - protein, 357 aa, Magnetococcus sp. MC-1
MNHLFKPLRIGDLELPNRLLMAPLTRCRADAQHVPTAMMVDYYAQRASAGLLITEATMVMQGYSAFWREPGIYSDAQIEGWKKITQAVHAKGGRIFMQIWHGGRACHPLLNDGREAVAPSPLAIAHDEVHTPQGKQPYTLPRALRDDELPAIVNGFARAARHARAAGFDGVEVHGANGYLLDQFLRDGSNHRSGAYGGSVENRARLLLEVIEAVSLAWGSERVGLRISPLNSFNDMIDSDPMGLAEWLAKRLNAYPLAYLHLMRRDFLGQQQGDVVPLVRQHYKGTLIGNMGYGGEEAEAAIAAGQLDGVAFGSAYLANPDLPERLRCGAPLNTPDPTTFYTQGAEGYTDYPTLAQG

SEQ ID NO: 10283 - protein, 375 aa, Staphylococcus aureus subsp. aureus Mu50
MKSKYEPLFDKVELPNGVELRNRFVLAPLTHISSNDDGTISDVELPYIEKRSQDVGITINAASNVSDVGKAFPGQPSIAHDSDIEGLKRLATAMKKNGAKALVQIHHGGAQALPELIPDGDVVAPSPISLKSFGQKQEHSAREMTNEEIEQAIKDFGEATRRAIEAGFDGVEIHGANHYLIHQFVSPYYNRRNDVWANQYKFPVAVIEEVLKAKEAYGNKDFIVGYRLSPEEAESPGITMEITEELVNKISHMPIDYIHVSMMDTHATTREGKYAGQERLPLIHKWINGRMPLIGIGSIFTADEALDAVENVGVDLVAIGRELLLDYQFVEKIKDGREDEIINYFDPEREDNHHLTPNLWHQFNEGFYPLPRKDK

SEQ ID NO: 10284 - protein, 399 aa, Staphylococcus aureus subsp. aureus Mu50
MYRYKPLLQSIHLPNGIKISNRFVLSPMTVNASTKEGYITKADLAYAARRSNSAGMQVTGAAYIEPYGKLFEYGFNIDHDACIPGLTNMASTMKQHGSLAIIQLAHAGRFSNQAILNFGKVYGPSPMTLHSPIEHVVIAMSHEKINSIIQQYRDATLRAIKAGFDGVEISIAQRLLIQTFFSTFSNRRTDHYGADSLKNRARLCLEVMRAVQEVIDKEAPDNFILGFRATPEETRGSDLGYTIDEFNQLIDWVMDVSNIQYLAIASWGRHIYQNTSRTPGDHFGRPVNQIVYEHLAGRIPLIASGGINSPESALDALQHADMVGMSSPFVTEPDFVHKLAEQRPHDINLEFSMADLEDLAIPHAAFKDIVKMMDYGEGLKKHTRDALRQLEQNYHDSSS

SEQ ID NO: 10285 - protein, 349 aa, Pseudomonas putida KT2440
MTTLFDPIKLGDLQLPNRIIMAPLTRCRADEGRVPNALMAEYYVQRASAGLILSEATSVSPMGVGYPDTPGIWNDEQVRGWNNVTKAVHAAGGRIFLQLWHVGRISHPSYLNGELPVAPSAIQPKGHVSLVRPLSDYPTPRALETEEINDIVEAYRSGAENAKAAGFDGVEIHGANGYLLDQFLQSSTNQRTDRYGGSLENRARLLLEVTDAAIEVWGAQRVGVHLAPRADAHDMGDADRAETFTYVARELGKRGIAFICSREREADDSIGPLIKEAFGGPYIVNERFDKASANAALASGKADAVAFGVPFIANPDLPARLAADAPLNEAHPETFYGKGPVGYIDYPRL

SEQ ID NO: 10286 - protein, 365 aa, Pseudomonas putida KT2440
MKLLQPLQIGPLTLPNRVFMAPLTRLRSLEPGDVPTALMAEYYRQRASAGLIITEATQISFQAKGYSGSPGIHSAEQIAAWKHINEGIHAEGGHSAVQVWHTGRVSHTSLQPGGKAPVAPSALPADARTTLRDAQGNLTRVETSAPRALSEAEIAGIVADFGQAAINACEAGFDFIELHAAHGYLLHQFLTPSANQREDRYGGSVENRARIVLEAVDAAIANWSADRVGIRVFPLGGFNGVDNGEDQEAAGLYLIRELAKRNLAYLHLSEPDWAGGKPLRDEFRQAIRAAYPGVIIAAGAYTAEKGEDLIGRGLIDAVAFGRAYIANPDLVERLRLQAPLNEHRAKFDYANGPEGYTDYPFLKQA

SEQ ID NO: 10287 - protein, 374 aa, Pseudomonas putida KT2440
MTQSELFKTTQLGPYTLKNRIVLPPLTRSRSSQPGNIANDLMATYYRQRSGAGFMVTEGTQIEPRGQGYAWTPGIHSPEQIQGWRKVTDAVHAEGGVIFAQLWHVGRVSHTSLQPGGEAPVAPSAIRADNVKVFIETGPGTGALADPSTPRALSTKEVKELVKLYAQAARNALDAGFDGVELHCANGYLVNQFISAHTNQRDDEYGGSLQNRLRFLREITLAVAGVVGKERMGVRFAPLFATTDEDRVYLGLVEEDPHQTYIEAVKILEEVGIAYLSLAEADWENAPELPETFREDVRKSFSGKILYAGKYTAERGNRVIKAGWGDLIAFGRPFIANPDLPARIANNWPLNPVDPSSMYGGTDKGYTDYPTYKS

SEQ ID NO: 10288 - protein, 368 aa, Xylella fastidiosa 9a5c
MADTSSMPSIVGLLEPTTFGAIPLNNRVVMAPMTRLRAQADGAPGDLMVEYYRQRAGMGLIVTEGTYPSLESQTGVGQPGIATEEQAGGWRKMTDAVHLAGGHIVLQIMHGGRTAHPGVNGGRRVIAPSAVTLGGEVYTANGKEAFTTPAPMAEADIRDVIAEHVAAAQRAVAAGFDGVEIHGANGYLGQQFLSPASNQRTDQYGGSPENRARFVVELVQAVAEAVGPGRVGLRISPEHNYQETFEPDRSDVLATYGALLDALRPLGLAYLSVLHQEPTGALVEELARRFAGKVAANSGFATFTSLEEAEQIVAAPFIDAVVVGRAALANPDLIERWKSEQPLTEPRYDLFYTHDAAGYTDYPTLAGR

SEQ ID NO: 10289 - protein, 1005 aa, Staphylococcus epidermidis ATCC 12228
MSKEIFDTFKFKCGAELKNRVLMAPMTIQAGYFDGSVTSEMIDYYQFRAGDASAIIVESCFVENHGRGFPGAIGIDNDDKIPGLKRLAEAIQAKGSKAILQLYHAGRMANPKFNEGEQPISASPIAALRPDAVPPREMTHAQINQMIDDFGEATRRAIEAGFDGVEIHGANTYLLQQFFSPHSNRRQDSWGGSREKRTRFPIEVLTKVQHVVAEKEASHFIIGYRFSPEEIEEPGIRFEDTMFLLNTLAEYEPDYFHISANSYQRTSIVNQEDTEPLINKYIKMQSAQLAKIPLIGVGSIAQRQDAEHALELGYDLLSVGKAYLVEPQWTDKISQNEEVEQFVDIHDQKVLHIPSPLWKVMDFMILDKEEEHRKYEKLKALQNKKVKFNKGTYHVYAKGHNGNLPMKVQLSEDKIVSIEVDDSGESEGIANPVFERLPQDIINGQTLNVDVISGATVTSEGIVQGIADAIEQAGEDPDILRARPKPVVQWSDEVVEETTDVVVIGTGGAGLSAAATVLDEGKEVIMLEKFAAIGGNTIRTGGQVNAAEPKWQNAFPALAGEKETLLQLLNHDENDIDEAYIEDFNTLKRQIKDYLENSSNEDEYLFDSVELHRIQTYLGGKRKDRNNVEISCDYDLVKTLTDNVLESVYWLKDKGVHFDRSFVDMPVGALWRRGHKPMKAQGLEYIENLGDYVKHNHGRIFTETTAEKLIKEGNQVVGIEARKANGAKVKIHTRHGVVLATGGFGANTKMLQQYNTYWDNIPDDIKTTNSPAITGDGIRLGVQAGADIVGMGFSQMMPISDPKTGALFTGLIVTPSNFVFVNKEGQRFVNEFESRDVLSKAALEQKDGIFYIIADANIKALAMNTTEDKINQELEDGTLVKADTLEALAQKLNIDTTTFVNTIERYNTFVEQGQDEDFNKNAFDLKIEKAPFYATPRKPAIHHTMGGLKINTHAQVIDVEGHIIEGLYAAGEVAGGIHAGNRLGGNALADIFTFGRIAGQSAVTK

SEQ ID NO: 10290 - protein, 375 aa, Staphylococcus epidermidis ATCC 12228
MNNKYEPLFKSLTLPNGVEVRNRFVLAPLTHTSSNDDGTISDIELPYIEKRSKDVGIAINAASNVNDVGKAFPGQPSVAHDSDIEGLKELAQVMKKNGAKAIVQIHHGGAQALPELTPDGDVVAPSAISLKSFGQQKEHDAREMTAEEIEQTIRDFGEATRRAIEAGFDGVEIHGANHYLIHQFVSPYYNRRNDVWADNYKFPVAVIDEVVKAKKAHAYDDFIIGYRLSPEEAESPGISMEITEELIHQIANKPLDYIHVSLMDVNSVTREGKYKGENRLELIHQWINGRMPLIGIGSVFTAEDALNAVENIGVEFVALGREILLDYDFVAKIKEGREDEIINAFDPNREDQHYLTPNLWEQFNQGFYPLPRKDK

SEQ ID NO: 10291 - protein, 370 aa, Agrobacterium tumefaciens str. C58 (Cereon)
MTSLFEPAQAGDIALANRIVMAPLTRNRSPGAIPNNLNATYYEQRATAGLIVTEGTPISQQGQGYADVPGLYKQEAIEGWKKITDGVHSAGGKIVAQIWHVGRISHTSLQPHGGQPVAPSAIPAKSKTYIINDDGTGAFAETSEPRALTIDDIGLILEDYRSGARAALEAGFDGVEIHAANGYLIEQFLKSSTNQRTDDYGGSIENRARFLLEVVDAVAEEIGAGRTGIRLSPVTPANDIFEADPQPLYNYVVEELGKRNLAFIHVVEGATGGPRDFKQGDKPFDYATFKGAYRNAGGKGLWIANNGYDRESAIEAVESGKVDAVAFGKAFIANPDLVRRLKDNAPLNEPNQPTFYGGGAEGYTDYPALG

SEQ ID NO: 10292 - protein, 364 aa, Agrobacterium tumefaciens str. C58 (Cereon)
MTDKTLFEPYALGAISLSNRIVMAPLTRNRAGAGFVPGDLTAEYYTQRASAGLIISEATQISQQGQGYQDTPGIYTRAQIDGWRKVTAAVHEKGGRIVLQLWHVGRISHIDLQPNGGQPVAPSAIRAATKTFVNNAFVDVSEPRALEIEELAGIVNDFRKAAANAIDAGFDGVEIHGANGYLLEQFAKDGANVRTDAYGGSVENRARLMLEVTAAVAQEIGPARTGIRISPVSPANGISCSDAQAQYDYIVDQLDALGVAYIHVVEGATGGPRDVAPFDYGSLRRRFSKTYIANNGYDLELAATHIAEGKADLIAFGRPFIANPDLVKRLQSGAPLAEIDPATIYGGGAEGYTDYPRFNEASGS

SEQ ID NO: 10293 - protein, 678 aa, Agrobacterium tumefaciens str. C58 (Cereon)
MSNDPLLQPYQLKHLTLRNRIIVTSHEPAYPEDGMPKGRYRAYTVERAKGGVALTMTAGSAAVSRDSPPVFNNLLAYKDEIVPWIREMTDAVHEQGAAIMIQLTHLGRRTRWDKGDWLPVLAPSHQREAAHRAFPKKIEDWDIERVIKDFADAAERMKAGGMDGVELEAYGHLIDQFVSPLTNELDGPYGGSLDNRMRFCLDVFKAMRERVGDDFILGVRYTADECLKGGTGKAEGLEISRRLRDSGLIDYLNVIRGHIDTDPGLTDVIPIQGMANAPHLDFAGEIRAATQFPTFHAAKIQDVATARHAIASGKVDMVGMTRAHMTDPHIVRKIMEKREDDIRPCVGANYCLDRIYQGGLAFCIHNAATGREETMPHDITRAAERRKVVIVGAGPAGLEAARVCAERGHDVVVFEAANDAGGQIRLTAQSERRREMIGIIDWRMSQCERLGVTFHFNSWAEADTVLSENPDVVIIATGGLPHTDVLSKGNDLVVSAWDIISGDVKPGTNVLVFDDAGDHAGLQAAECLAKAGAKVEIMTPDRAFAPEVMAMNLVPYMRALQKLDVTFTVTYRLEAAERNSNQLIAHVGSDYGGVAKSRNVDQIVVNHGTVPLDELYFELKSGSKNLGETSYDALLAGEAQTVERNPAGTYRLFRIGDAVAARNTHAAIYDALRLAKDI

SEQ ID NO: 10294 - protein, 649 aa, Rhodococcus erythropolis
MTPYPRLFAPLRLGNLTLRNRVVFSAHLTNYAENGLPTEQHASYYEARARGGAGLIITEEHSTHPSDRPYEKMIAGYRPEAIEGYRRITDAVHAHGSSILAQINHNGGQGAGTYSRSPLLAPSAVADPLFREVPKAVDDADIAEILAGFALVARNCVAGGFDGVELQASQSSIVRAFLAPSTNLRTDRYGGGVANRARFLLEVLGVLRKAIGPDRVLGVRLSGYEGTRGGIELSDAVTTAQLIEADGHVDYINTTVGMATETLHLVEASMAVPTGYANFVPSAIREVIDLPVVGVGRFKTPEQAEAALEDGVCDLVGVVRGQIADPDFVNKARAGQSSQVRTCLSCNQECVGRMGLGRWLGCTENPRAGRESVPLPMPRRRGRTVVVVGGGPAGLQAAATAAQRGHAVTLFERERRLGGQILTASVVSVRRELADLVRNLESECRRSGVTIELGVGADLAIVEERAPDVVVIATGARPVRPTWAGGSERVVSVRDVLDGRVLPSGMVLVYDELGFHQGTSVAEFLADRGCAVTIATNGMVVAQDLSVTLDFEGWNRRAFEKSIVQRTDLMATSVSAGASPLVSLVHLPTGVVEEVAVDWVVFATQQEPVDELWNTLQGSSFEIFRIGDALSPRRSHAAVIEGHRAALAI

SEQ ID NO: 10295 - protein, 615 aa, Rhodococcus erythropolis
MGRSLSDRHRAYYQRRAEGGAGIVVTEVASVLENDWPYERAPLASECGPGWQSIAAACAPYGTLVLAGLGHTGMQGSSAYSQSVLWGPSRVADPVTRELPMAMGQPEIDQLMAGFREASAMAIASGMDGVELDAGPRSILRQFLSGLTNTRQDRYGTDRVALVREIISAVREEVGSDHVVSLRLSCDEEAPWAGLTPDLAAGFARDLSPLLDLLVVVRGGLYSSEGYRPDFHCPPNFNLDLCREIKAAVSIPVVVQGSVVDIADARAALGVAEFVEMTRAQIADPDVVVKAARGDRPRPCVLCNQTCLVRDPRNPVVTCVGNPSAGFETVDPDEREQISTPRAVLVVGGGPAGMEAARISAVAGHSVTLVESSSQFGGMIRTFARGDGRSRFTLLAQWLEDECRRSGVTMRTGAAVDAQDLSDARSRGELVVVATGSAARPPTYPVDDSVRWLDASEAFGKLTTVGPGPVALIDPLGGPIAVALAEALAAEGVSISIVTLDSIVGSRLGASGDLVGANTRIQQAGVTRVLASRVIEIASGAVCVEHVHTGEWSQLECEVVIDCSPRLPNETLKEAADIQVGDSVAPRTVLESIREGRFAGFTTRTSFNSAERAIS

SEQ ID NO: 10296 - protein, 285 aa, Yersinia pestis KIM
MKTAKLFSPLKVGALTLPNRVFMAPLTRLRSIEPGDIPTPLMAEYYRQRASAGLIITEATQISFQAKGYAGAPGLHTQEQLNAWKKVTQGVHNEGGHIAVQLWHVGRISHNSLQPGQQAPVAPSAIAADTRTTVRDETGAWVRVPCSTPRALETEEIPGIINDFRQATANAREAGFDYIELHAAHGYLLHQFMSPASNQRTDQYGGSIENRTRLTLEVVDATAAEWGADRIGIRISPLGPFNGLDNGEDQEEAALYLIGPNAESGATDMTSFICRYCEPGRKPKM

SEQ ID NO: 10297 - protein, 381 aa, Magnetospirillum magnetotacticum
MRASVVRRGAGAPAHWRNLHGGTSSALPRGLGGHPRDAVPIGRSRAPPHNEETRMPSLFDPITLGALTLPNRILMAPLTRGRATRTHVPTPMMAEYYAQRASAGLIISEATGISQEGLGWPYAPGIWSDEQVEAWKPVVKAVHDAGGRIVSQLWHMGYLVHSDFLGGEPPVAPSVATAPDQAHTYEGKKPYSQARALREDEIPRLIADYERAARNALAAGFDGVQIHAANGYLLDEFIRDGSNKRSDRYGGSVENRVRLVTKVAQAVAGVVGPERTGIRFSPNGPIQGVDDSNPHETFGLAAEMMERVGLAFIELREPGPNGTFGKATVAPVAPVIKERFGGPVILNCDYDGERAKAAVASGEADAIAFGRPYIANPDLPE

SEQ ID NO: 10298 - protein, 366 aa, Methanosarcina acetivorans C2A
MVIMAEDTDLFSQYRMGDLTLPNRMVMAPMTRSRAGDDDIPVPLTATYYVQRASAGMIITEGSQVSPQGVGFMHTPGIYSAAQAASWKKITDAVHKAGGRIFIQLWHVGRVSHSDLLGGALPVAPSALPVEGYIHTPGGKKPIPVPRALKTDEVPDIVRQFRQAAENARAAGFDGVEIHGANTYLLDQFLRSGSNKRTDKYGGSLENRARLPLEVTKAVIEVWGGDRVGYRISPHNIAHSMSDANPGETFSYFAKELNKTGLGYLHLIEPIGGRSGFVPPEARLGPILRRIFERTFILNGGYGLQSGNEAIDSGEADLIAFGVPFLANPDLPERFRQNAPLNEPKLDTFYVGGEKGYTDYPALVNR

SEQ ID NO: 10299 - protein, 364 aa, Xanthomonas campestris pv. campestris str. ATCC 33913
MSTSTPSPLFSPVRLGALDLSNRVIMAPLTRNRAVAGAVPSPLAVEYYAQRATAGLIIAEGTQISPLGQGYLDTPGIHTPAQVEGWRAVTDAVHRQGGKIALQLWHVGRVSHTSLLPPGEVPVAPSAIRSTGKTFTAQGFSDVSEPRALALEEIPALIEDYRAAARNAIDAGFDGVEVHAANGYLIDQFLRDGSNQRTDAYGGDIENRTRLLAEVVQAIADEIGAERTGVRLSPVTPVYDMHDSDPQALFERAVERLNLIGGLAFVHVIEGATGGPRDNIAFDYTALRAKFDGAWISNNGYDKAMAEQAISRGDTDAVSFGRAYIANPDLVRRLREDAPLAEPNQATLYGGGAEGYTDYPALPA

SEQ ID NO: 10300 - protein, 366 aa, Xanthomonas axonopodis pv. citri str. 306
MLMSKSTQSPLFSPVRLGALDLANRVIMAPLTRNRAVAGQVPSPLAAEYYGQRATAGLIVAEGTQISPLGQGYLDTPGIHTRQQIEGWRAVTDEVHRRGGKIVLQLWHVGRVSHTSVLPPGEVPVAPSAIRAEGKTFTPNGFEDVSEPRALALDEIPGLIEDYRIAARNAIDAGFDGVEVHAANGYLLDQFLRDSSNKRTDAYGGDIENRTRLLAEVVQAIADEIGAERTGVRLSPVTPVYGAHDSDPQPLFERAVERLNLIGGLAFVHVIEGATGGPRDNIAFDYAALRAKFDGAWIANNGYDRGMSEHAISSGYADAIAYGRPFIANPDLVRRLRENAPLAELDQATMYGGGAKGYTDYPALPE

SEQ ID NO: 10301 - protein, 363 aa, Caulobacter crescentus CB15
MSLDALFQPFEFKSLKLPNRVVMAPMTRSFSPGGVPTDEVAAYYRRRAENQVGLIVTEGTGVARPASLNDANVPRFHGEKELAAWKKVVDEVHAAGGKIAPQLWHVGAAKGKDVLGKVDSPSGLSKAGGNPFTEPMTDAEIADTIQAFATAAADAKRLGFDTVELHGAHGYLIDQFFWQGTNVRSDAWGGPTIGERGRFAAEILKAVRAAVGPDYPVIIRLSQWKQQEYTARLAETPKEMEAWLQPLADAGADIFHCSQRRFWEPEFEGSDLNFAGWAKKLTGAPTITVGSVGLSGEFIAAFGGEGSQPTSIDNVIGGLERGEYDMVGVGRALLQDPEWVTKIREGRSDELKAFERAALGTLY

SEQ ID NO: 10302 - protein, 430 aa, Caulobacter crescentus CB15
MGRRDGRRAGPYERPINHVGDARGSIANFGARVDRPRLVVATSWLPARSATPRDAPFASGDSVVSTSSLFAPTTVAGLALRNRVVMSPMTRRFSPGGVPNQAVADYYRRRAEAGVGVIITEGVAVDHPAAVDHADIPNFHGPALDQWKTIAASVTSAGAAFIPQLWHIGGHRSLTADPPNASAPSLSPSGVYEPGKPFGTPATEVEIEAVIQAYAKGARDAAAIGASGVEIHGAHGYLIDQFFWAATNQRQDRYGGDMIERLRFATEVIKACREAVGPSFPIFFRYSQFKQVDYKARLCQSPDELAAFLQPLVDAGVDVFDCSQRRFWEPEFEGSPLNLAGWTKTLTGKPTMTVGSVGLDGDVVASLREGVDVIAASSLDKLDVMLDRGDFDLVGVGRALLADPHWVEKVRDGQTDGLAGFTRAALETLV

SEQ ID NO: 10303 - protein, 355 aa, Bacillus anthracis str. A2012
MTSSNKKSASIYEGTNVNAWGSFENVAETKLFNSIQIGSWPLRNRIAMAPMTRCFADNETGAVGADVVEYYRKRAADGVGLIITEGIVISPRAKGNPGVPGIYTQEQIDSWKPVTEAVHKEGGTIIAQIWHVGRMSHHEIIGGQMPQAPSAIAAEGNVPRFRKPFDTPEAMTLEEIQEVIGQYAQAAKNAIEAGFDGVEIHGAHGYLIDQFTYEFVNKRTDKYGGDLKQRLTFMKEVTEAVIEAIGADKTLLRFSAFKGDNPTYMWENPELAIETFVNMFKEVGLTMIHPSTMSYTQVIADGKNFHQLVRKYWDGAIVGVGNLNPKEAEEALQEGTIDVAAFGRPLIANPDGIIE

SEQ ID NO: 10304 - protein, 366 aa, Corynebacterium efficiens YS-314
MGTHDTDHPLYSSVTLGNVELNNRIVMAPLTRIRANTDGTPTEMMREYYAQRADFGMIITEGTWPIREGRTWGQQPGIETAEHVTAWRGITDAVHERGGKIIMQIMHGGRISHPELTGTGRTVAPSAIAAPDPIRISTGKVDPVIPHELGLDELATVIDQFVAGARNAMAAGMDGVQIHGANGYLLHEFLAPTTNLRGDAYGASPEKRASFVAEVVTAVAREIGAGNTGLRLSPQHNIQGAIETDDADVLATYTALARSLKHLGLAHVELVHHEPEGELIQTLRREFGAPLIVNTGFSRFTQREVAEELVDKQAADAVSVGRLALANPDLVRRWQLDGPLNEPNPETFYVGGEKGYTDYPVMEYSL

SEQ ID NO: 10305 - protein, 375 aa, Staphylococcus aureus subsp. aureus MW2
MKSKYEPLFDKVELPNGVELRNRFVLAPLTHISSNDDGTISDVELPYIEKRSQDVGITINAASNVSDVGKAFPGQPSIAHDSDIEGLKRLATAMKKNGAKALVQIHHGGAQALPELTPGGDVVAPSPISLKSFGQKQEHSAREMTNEEIEQAIKDFGEATRRAIEAGFDGVEIHGANHYLIHQFVSPYYNRRNDVWANQYKFPVAVIEEVLKAKEAYGNKDFIVGYRLSPEEAESPGITMEITEELVNKISHMPIDYIHVSMMDTHATTREGKYAGQERLPLIHKWINGRMPLIGIGSIFTADEALDAVENVGVDLVAIGRELLLDYQFVEKIKDGREDEIINYFDPEREDNHHLTPNLWHQFNEGFYPLPRKDK

SEQ ID NO: 10306 - protein, 399 aa, Staphylococcus aureus subsp. aureus MW2
MYRYKPLLQSIHLPNGIKISNRFVLSPMTVNTSTKEGYITKEDLAYAARRSNSAGMQVTGAAYIEPYGQLFEYGFNIDHDACIPGLTNMASTMKQHGSLAIIQLAHAGRFSNQAILNFGKVYGPSPMTLHSPIEHDVIAMSHEKINSIIQQYRDATLRAIKAGFDGVEISIAQRLLIQTFFSTFSNKRTDHYGADSLKNRARLCLEVMRAVQEVIDKEAPDNFILGFRATPEETRGSDLGYTIDEFNQLIDWVMDVSNIQYLAIASWGRHIYQNTSRTPGDHFGRPVNQIVYEHLAGRIPLIASGGINSPESALDALQHADMVGMSSPFVTEPDFVHKLAEQRPHDINLEFSMADLEDLAIPHAAFKDIVKMMDYGEGLKKHTRDALRQLEQNYHDSSS

SEQ ID NO: 10307 - protein, 365 aa, Shigella flexneri 2a str. 301
MSSEKLYSPLKVGAITAANRIFMAPLTRLRSIEPGDIPTPLMAEYYRQRASAGLIISEATQISAQAKGYAGAPGIHSPEQIAAWKKITAGVHAENGHMALQLWHTGRISHASLQPGGQAPVAPSALSAGTRTSLRDENGQAIRVETSMPRALELEEIPGIVNDFRQAIANAREAAFDLVELHSAHGYLLHQFLSPSSNHRTDQYGGSVENRARLVLEVVDAGIEEWGADRIGIRVSPIGTFQNTDNGPNEEADALYLIEQLGKRGIAYLHMSEPDWAGGEPYTDAFREKVRARFHGPIIGAGAYTVEKAETLIGKGLIDAVAFGRDWIANPDLVARLQLKAELNPQRAESFYGGGAEGYTDYPTL

SEQ ID NO: 10308 - protein, 365 aa, Escherichia coli CFT073
MSSEKLYSPLKVGAITAANRIFMAPLTRLRSIEPGDIPTPLMAEYYRQRASAGLIISEATQISAQAKGYAGAPGIHSQEQIAAWKKITAGVHAENGHMAVQLWHTGRISHASLQPGGQAPVAPSALSAGTRTSLRDENGQAIRVETSMPRALELGEIPGIVNDFRQAIANAREAGFDLVELHSAHGYLLHQFLSPSSNHRTDQYGGSVENRARLVLEVVDAGIEEWGADRIGIRISPIGTFQNTDNGPNEEADALYLIEQLGKRGIAYLHMSEPDWAGGEPYTDAFREKVRARFHGPIIGAGAYTVEKAETLIGKGLIDAVAFGRDWIANPDLVARLQRKAELNPQRAESFYGGGAEGYTDYPTL

SEQ ID NO: 10309 - protein, 414 aa, Leuconostoc mesenteroides subsp. mesenteroides ATCC 8293
MQINYDFLDSYTFKNKPITVRNHIVMAPTTLKSSLEDGSVSDNELKYYQMRSNGPGMIIVEAAYVNELGKGWEGGLSAADDDKIEGLSRLASAIHSGGAKAILQLFASGRQSNQTILRGEQIVSASAQPYPHGSHETPRELKHEEISQTIEDFAAATKRAILAGFDGVELHGANLYLLQQFFSPESNRRQDIWGGTLEKRMRFGLAVTAKVGDTIDKYAERPFLLGYRQSPEESTTPGITLADSLAFVQRLVTLQIDYLHLSLKDAFQKPFRDAKAVKQITTYYTEVLPDNVPLMVAGLIKQPMQVESLLDEGVTFAAMGRALIADPNWVQKVKLNDEKSIRYAVSPADFDLLGVPKPLKKWLLTRFKNGFPVTTDIEFDPKTPWKYYKSMPTQPRQQIDPTKLMTLKKRVDDN

SEQ ID NO: 10310 - protein, 396 aa, Leuconostoc mesenteroides subsp. mesenteroides ATCC 8293
MEKRKFLSRFKFDNGLVIKNHIVMSPMTTMTSFYNGMITTDELNYYAARAGGPGIIITGVANVSDNGKGFEGELSVAHDAMLPGLIKLAKVIHKDGTKAILQIFHAGRKANSAILRGERPVSASAIAASYPADSETPRALNDSEVHQIITEFGEATRRAIEAGFDGVELHGANTYLLQQFYSENSNQRSDEWGGSRGKRLKFPLAVIETVNKTVKKYSKKPFIVGYRISPEEIEEPGIRLEDSLFFVDQIKHKVDYIHLSMGSYKRTSLNNKANKETLISQFSQHTKNIVPLIGIGSVETPDDVNAVMSDGADLVAIGREFIREPQWVQKIERNDLESIRTLISPSDMAELAIPSVMQVYLRESFYSVMHFTDDIETQSDYQNALAPMEGLEKKLS

SEQ ID NO: 10311 - protein, 406 aa, Leuconostoc mesenteroides subsp. mesenteroides ATCC 8293
MLYFVYETEALIMKNLIDKVTFRHGATIDTRTAQSPMLTNSGLNEKVTQDTINYYNARSQSAGMVIVEYTSVSPNGGPSRSWAPDREQLAIYDDSFVPGFKKITEKLKKDGNKAILQLVHSGREAQYRYALGGQVEVPSNIDFPWINYPLHELSEDEVWQIVKDFGTATKRAIASGFDGIEIHGANHYLHQEFFSAYSNVRTDFWGGSLEKRMNFALEVAREVFKVAKENAPKDFIIGYRISPEEVHEDNIGYTWHEAQLLVNQLTENFEFDYVHLSTNDYTATPTDSDKNYAQLLGERVKKPALLMIAGGIHTVEKMKDALQYVDIVSLGRPTLIDNQIGYKIKNGQADHIFLEFNEESVKESHLTPGLIDLLANTAYFDMPGIDYLKTLTDVKLGDAVTHDGTK

SEQ ID NO: 10312 - protein, 372 aa, Oenococcus oeni MCW
MTNYQFLQTFEFKNGIKIKNRIVIPPMTECSSFEDGNVTKNELDYFALRTGGAGIFITPASNVSSLGKGFEGQLSCASDDMLPSLTQVANTIKVNGTKAILQLHHAGRISDSKILRGQQAVGPSAVASLRPGSEIPRELTNEEILQIISDFGQATRRAIEAGFDGIELHGAKTYLIQQFFSPHSNRRSDDWGGSLKKRMKFPLAVVEQVHKIVERYADRPFIIGYRISPEEIETPGIRLADTLALIDVLKKQPIDYLHISTRDVWQTSKNDSDDQIPVVDQIKEHTKNEVPLIAVGNIAKPEEAEKVIEDGFNFVALGREMLREPQWVEKVQNGQEAGINYSLNETDLKQLRITPPLWKFLTKKIHSKLTAD

SEQ ID NO: 10313 - protein, 375 aa, Trichodesmium erythraeum IMS101
MNQLKILEPFTLGDLQLPNRIVMAPLTRRRADINNAPTPLNALYYSQRSSAGLIISEASQISPQGTSLPKTPGIYSQKQIEGWQLVTKAVHNSGGRIFIQLWHGGRCSHPSLQPNGELPVAPSARAPIEEKALTAQEKEVPFVNPRSLLTTEIPEIIAQYRQGAINALEAGADGVEIHGANGYLLDQFLQDNSNQRTDKYGGSIENRSRLLLEVTQAVTEVWGSQRVGIRLSPSSTYQDMYDSNPEALFNYIVSKIDQFNLAYLHIVEPRIKGSHDDLTEKKLQLGVKHFRPLYSGNLMTAGGYTRDLGEEIISQGYTDLVAYGRLFIANPDLPKRFALNAPLNPYYRPTFTGGNEIGYTDYPFLSIDTLAKNII

SEQ ID NO: 10314 - protein, 371 aa, Brucella suis 1330
MASLFDPITIGDLKLANRIVMAPLTRNRSPHAVPNDLNVIYYEQRASAGLIITEATPISQQGQGYADVPGLYSAEQLAGWRRVSDAVHNAGGKIVAQMWHVGRISHNSLQPNGEKPVAPSAITAKSKTYLVHPDGAGEFVPTSEPRALEKSELPGIVADYARAAKDAVETAGFDGVEIHAANGYLIDQFLRGGSNQRTDEYGGSIENRARFLFEVVDAVTKAIGAGKVGIRLSPVTPANDASDPDPQPLFDYVIGKLAACGLAYIHIIEGATGGPRDFQQGPQPFDYARFKQVYRDAGGKAAWMVNNGYDRKMAEEEVEAGRADLVAFGKPFIANPDLVRRLKENAPLNELDQKHMYGGGAKGYTDYPVLA

SEQ ID NO: 10315 - protein, 371 aa, Pseudomonas syringae pv. syringae B728a
MEYLMHDPRTTTDLFSPVTLGSMELANRIVMAPVTRSRYGEDGVPNELHATYYAQRATAGLIVAEATNISAQGRGYAATPGIWSEQQVAGWRLVTDAVHAAGGKIVSQLWHVGRFSSVDLQPNGEAPVAPSAIKAEGNTYTAGGFVPVSMPRALETGEIPGIIEQYKHAAENAKRAGFDGIEVHSANSYLLDQFLRDSTNQRTDQYGGSIENRARLTLEVTQAIVDIWGSDRVGIRLSPVTPDAGNTAPDSNVMGLHGYLIQQLNTFNLAYLHFVEGATATSREVPEGVDMDALSAGFNGPFIGNNNYDLKMAIERRAQGKIDAVAFGRLFISNPDLVARLRHGAELTIAPRESYYGGGAKGYIDWPMGKY

SEQ ID NO: 10316 - protein, 349 aa, Pseudomonas syringae pv. syringae B728a
MTTIFDPITLGDLQLPNRIIMAPLTRCRADEGRVPNAMMAEYYVQRASAGLILTEATSVTPMGVGYPDTPGIWSNDQVRGWSNITKAVHNAGGRIALQLWHVGRISHPSYLNGETPVAPSAIAAEGHVSLMRPITPLPVPRALELAEIGDIVEAYRVGAENAKAAGFDGVEVHGANGYLLEQFLLTGTNQRTDEYGGSVENRARLLLEVTDAVIDVWGAGRVGVHLSPRFDMHDMSDANRAETFSYVAKELGKRGIAFICAREHDAEDSLGPQLKKDFGGVYIANEKFTKDSANAWLAEGKADAIAFGVPYIANPDLPERLASDAPLNEAHPETFYAKGPVGYIDYPRL

SEQ ID NO: 10317 - protein, 354 aa, Pseudomonas syringae pv. syringae B728a
MAPMTRSRAPEDIAAEQIALHYTQRATAGLIVSEGTPISREGQGYLFNPGIYTPEQIQGWKLVTDSVHSVGGRMFAQLWHVGRVSHTSIQIDGKAPVSATTRQAQGAVAFAYGEDGEPGFVPTSAPRPLTTEEVARVVEDFAQAAQNAIDAGFDGVEIHGANGYLLEQFLNPLVNDRGDQYGASNLQDRLRFVFEVVDAACARIGADRVGIRISPYGQLFDMPLYPEIDETYSALCAGMRERGIAYVHVMDQTHFFMAGESSAAQEQALRKLLKHCKAELGNTALILAGDMTRERADALLEENLIDLAAFGQPFIGNPDLVARLKNGWPLTTPDRDTYYGGDAHGYIDYAPYRA

SEQ ID NO: 10318 - protein, 367 aa, Pseudomonas syringae pv. syringae B728a
MSAEALFTPFRLGSLELSSRVVMAPMTRSFSPGHVPNSKVVEYYRRRAAAGVGLIITEGTTVNHKASNGYPNVPQFFGEAPLAGWRKVVEAVHAEGGKIVPQLWHVGAVRRPGTEPDGSVPAYGPMEKVKDGQVLVHGMSKQDIDEVVAAFAQAAADARAIGMDGVEIHGAHGYLVDQFFWEGSNQRSDEYGGSLANRSRFALELIKAVRGAVGPDYPIIFRFSQWKQQDYTARLVQTPEALGEFLQPLADAGVDIFHCSTRRFWEPEFEGSDLNLAGWTRKLTGKPTITVGSVGLDGEFLQFMVNTDKVAQPASLENLLKRLGNDEFDLVAVGRALLVDPDWALKVREGREQDILPFSRDALTTLV

SEQ ID NO: 10319 - protein, 365 aa, Pseudomonas syringae pv. syringae B728a
MSETHKHVTAPFDRGHLKLKNRFAVAPMTRVSADEQGSATQAMTRYYERFAKGGFGLIITEGNYTDRRFSQGYRFQPGLTDDEQAQAWRATTDAVHRHGSVMIAQLMHAGALSQANRFVSESAGPSAIRPKGEQMAFYYGVGSYRVPRAMSDKDIAEAIDGFARAAQLAIGTAGFDGVEIHGANGYLLDQFLTDYSNQRTDQWGGEVGQRLRLTLEVIAAVKKVAGQAPVGVRLSQGKVNDFQHKWAGGEGDAEVIFAALADAGVDYIHVTEHEAWQPAFTQGQASLVELARRYAPDVALIANGGLHDPQKADQVLRQGADIIAVGKGALANPDLPELLRQGAPLRDFDPAILGPIANIKDSELV

SEQ ID NO: 10320 - protein, 366 aa, Pseudomonas fluorescens PfO-1
MTKQTLFSPYTLGSLTLSNRVVLAPLTRNRAGQGFVPSEFAAVYYSQRASAGLLISEATQISQQGQGYQDTPGIYTQAQIDGWRTVTDAVHAKGGKIFLQLWHVGRVSHVDLQENGAAPVAPSALRAATKVFVNNRFEDVSEPRALETSELPGIVSDFRQAAANAVAAGFDGVEIHGANGYLLDQFLRDNANLRTDAYGGSIENRARLLLEVTAAVINEIGADRTGVRLSPVSPANGVSSSDPQAQFNYIVEQLDALGVVYLHMVEGATGGPRDVAPFDFGALRQRFKNTYIANNGYDLDLAAARLAEDQADLIAFGRPFIANPDLVERLKQGAPLSAFNPATLYGGGAAGYIDYPTLAESSVSAS

SEQ ID NO: 10321 - protein, 371 aa, Pseudomonas fluorescens PfO-1
MTQQLFRPIALGPYTLPHRVAMAPLTRSRAGQPGDIPTSMNAEYYRQRASAALIITEATQISRQGQGYAWTPGIYNDEQVQAWREVSRQVHEAGGLIFMQLWHVGRVSHPSFQPDNALPVAPSALPVPGKTFIVDDEGNGVWGDVPVPRALQTSEIADIISDYRRAARNALNAGMDGVEIHAGNGYLLDQFINSNSNQRTDGYGGPLENRARLLLEVVAAVVDEVGADRVGVRLTPMGRFMGMGDESPEATFGYIVRSLNRWKLAYLHLVEPAVVGTVKDENFDPRWDAIIAQLRDAWDGVLMIAGGYDPESAEQALADGRADIIAFGRPFLANPDLPRRIREGLTLNAPDPSTFFGGDQRGYTDYPVYAH

SEQ ID NO: 10322 - protein, 349 aa, Pseudomonas fluorescens PfO-1
MATIFDPIKLGDLELSNRIIMAPLTRCRADEGRVPNALMAEYYVQRASAGLILSEATSVTPMGVGYPDTPGIWSNDQVRGWTNVTKAVHAAGGKIVLQLWHVGRISHPSYLNGETPVAPSAIQPKGHVSLVRPLADYPTPRALETAEIADIVDAYRVGAENAKAAGFDGVEIHGANGYLLDQFLQSSTNQRTDNYGGSLENRARLLLEVTDAAIEVWGAGRVGVHLAPRADSHDMGDDNLAETFTYVARELGKRGIAFICSREKEGADSLGPQLKEAFGGAYIANERFTKDSANAWLAEGKADAVAFGIPFIANPDLPARLKADAPLNEPHPETFYGKGAVGYLDYPTL

SEQ ID NO: 10323 - protein, 374 aa, Pseudomonas fluorescens PfO-1
MNHSSFFTPVTLGRHILKNRIVLPPLTRQRSTQPGNVANELMAEYYQQRAGAGLLVTEGTQIEPRGQGYAWTPGIHTPEQIVGWRKVTEAVHASDGVIFAQLWHVGRVSHTALQPNGDAPVSASAIATDRVSVFIETAPGVGALVPPSAPRALTTDEVQELVQLYIQAARNAMDAGFDGIELHCANGYLVNQFISAHSNLRTDQYGGSLHNRLRFLREVVAGVAKCIGKEKVGVRFAPLFTTTDEARTYLGMVEEDPHTTYIEAIKVLQDVGIAYLSIAEADWDDAPVMPQTFRRAVRDTFGGAIIYAGRYNAESGARLLESGLADLVAFGRPFMANPDLPARIANDWPLNSLNPATVYGGDAEGYVDYPVYGE

SEQ ID NO: 10324 - protein, 367 aa, Pseudomonas fluorescens PfO-1
MIDNSRNTDLFSPMQMGALQLTNRIVMAPVTRSRMAEDGVPNELHATYYAQRASAGLIIAEATNISAQGRGYAMTPGIWSDAQGAGWKKVTDAVHAAGGRIVSQLWHVGRFSSVELQPDRAAPVAPSAIKAEGSTYTENGFVEVSMPRALETSEIPGIIEQYKRAAENARRAGFDGVEVHSANSYLLDQFLRDSTNQRTDRYGGTIENRARLTLEVTEAVISIWGSDRVGIRLSPVTPDAGNTPPDSNVMATYGYLIQQLNRLNLAYLHFVEGATATSRTVPDGVDLDALSAQFEGPFIGNNNYDLEMALERRAQGRIDAVAFGRLFISNPDLVERLRRGTELTIAPRESYYGGGAKGYTDWPTADH

SEQ ID NO: 10325 - protein, 381 aa, Pseudomonas fluorescens PfO-1
MNRMPVDNLFVEPPMPVQALFKPFQLGALELPTRVVMAPMTRSFSPGGVPNSKVIEYYRRRAAAGVGLIITEGTTVGHQASNGYPNVPHFYGEAALAGWKKVVEAVHAEGGKIVPQLWHVGNVRRLGTEPDASVPGYGPSEKLKDGQVVVHRMTKQDIQDVIAAFAQAAKDAQSIGMDGVEIHGAHGYLIDQFFWEGSNQRTDEYGGSLANRSRFAIELIQAVRAAVGEGFPIIFRFSQWKQQDYTARLVQTAEALGEFLKPLSDAGVDIFHCSTRRFWEPEFDGSDLNLAGWTRKLTGKPTITVGSVGLDGEFLQFMVNTDKVAQPASLEKLLERLNNEEFDLVAVGRALLVDPDWAQKVREGREQDILPFSREALMTLV

SEQ ID NO: 10326 - protein, 399 aa, Streptococcus agalactiae 2603V/R
MNNVQGNLFRPLTLPNGLSLENRFVLSPMVTNSSTSEGFVTDDDIAYAVRRAKSAPLQITGAAYITEYGQLFEYGFSVSKDEDIPGLTKLAKAMKSKGAKAVLQLTHAGRFSSHTLARHGYVYGPSPMQLQSPYPHQVKELTHKDILRIIDEYVQATRRAIQAGFDGVEISSAQRLLIQTFFSTFSNQRKDEYGPQTLTNRCRLGLEVFKAVQKVIREEAESDFILGFRATPEETRGSQIGYSIEEFMEFLEKILAIAQVDYLAIASWGHDVFRNTIRSEGVYKGQLVNQVIFEHFGDRVPIMATGGINSASKVFEALQHAHMIGASTPLVVDPEFLQKIKAKCSDQINLRIKVSDLEGLAIPKASFKDIVPLMDYGESLPKEAREVFRELRSNYREER

SEQ ID NO: 10327 - protein, 369 aa, Pseudomonas aeruginosa PAO1
MSNLLLSPLAVGNLALRNRIVMAPMTRSRAQQPGDVPTALNALYYAQRAGAGLIVSEGTQISHLGQGYAYTPGIYSEAQLAGWRQVTEAVHAAGGLIAAQLWHVGRMSHRSLQAGGEAPIAPSPIQAKAQVFIADGQGGGSMAPADAPREMTLEDIRRVRDEFVRAARNALDAGFDLVELHGANGYLIDQFLASASNRRSDAYGGSLENRARFLLEIVDALVAAVGAERVGLRLSPWGTINDMHDDEPEAMTLYLAEALQRRGIAYLHLAEWEWSGGPAYPQGFRERLRERFRAPLIVCGNYDAERAEAILQAGLADAVAIGRPFIANPDLVERIRLGAPLAEANQARFYGGDAAGYTDYPTLGQSATA

SEQ ID NO: 10328 - protein, 370 aa, Pseudomonas aeruginosa PAO1
MLFSPYTLGHLTLPNRIVMPPMTRSRAASGEVATALMAEYYSQRAGAGLIVSEGTQISRQGQGYAWTPGIHSAEQVAGWRQVTDAVHAAGGRIFAQLWHVGRVSHTSLQPGNAAPVSSSALVAEGVKVFVDPQGRGAQAGGGEMVQHSAPRALAVEEIREIVADYAQAARNALDAGFDGVELHGANGYLINQFIDSQANARNDQYGGSLENRLRFLREVAEAVTAVVGRERIGVRLAPLTTLQGAVDDTPQATYLAAARLLDEIGVAYIHIAEADWEDAPAMPAAFKEALRIVYRGSLIYSGMYTKARAEEALARGWADLVGFGRPFIANPDLPYRLEHDLALADGDRSTYFGGGAAGYTDYPSLPQAAG

SEQ ID NO: 10329 - protein, 350 aa, Pseudomonas aeruginosa PAO1
MATLFDPIVLGDLELPNRIVMAPLTRCRADEGRVPNALMAEYYAQRADAGLILSEATAVTPMGVGYPDTPGIWSDDQVRGWSNVTKAVHAAGGRIFLQLWHVGRISDPLYLNGELPVAPSAIAAEGHVSLVRPKRPYVTPRALDTEEIADIVEAYRQGAERAKAAGFDGVEIHGANGYLLDQFLQDSTNKRTDRYGGSIENRARLLLEVTDAAISVWGAQRVGVHLAPRADSHDMGDSNRLETFSHVARELGKRGIAFICAREAQADDSIGVALKKAFGGPYIANEQFTLDSANAILAKGDADAVAFGVPFIANPDLVERLRQGAELNPPRPETFYTGGTEGYLDYPTLA

SEQ ID NO: 10330 - protein, 370 aa, Pseudomonas aeruginosa PAO1
MSAPVEALFQPFRLGALELPTRVVMAPMTRNFSPGGVPNAKVVEYYRRRAAAGVGLIVSEGTTVGHKAANGYPNVPRFYGEDALAGWKQVVDAVHAEGGRIVPQLWHVGSVRRLGVEPDASVPGYGPMEKAKDGKVLVHGMSKADIQEVIAAFAQAARDAQAIGMDGVEIHGAHGYLIDQFFWEGSNQRDDEYGGSLANRSRFAVELVRAVRAAVGADFPIIFRFSQWKQQDYSARLVETPEGLREFLAPLVEAGVDIFHCSTRRFWIPEFEGSELNLAGWTRELTGKPTITVGNVGLDGSEFLQFFGKTDEVAQPASIDGLVERLDKGEFDLVAVGRALLVDPEWAVKVREGRIGDIKPFSREALASLV

SEQ ID NO: 10331 - protein, 311 aa, Mycoplasma capricolum
MNKYEKLFEPFYLNGFKLENRFVLSPMTLSLATLDGKITDKEADYVKRRSHSAPLQITGGVYFDEFGQLFEYGISAKSDDDIPSLTRLYQEMKTDSNCVILQLAHAGKFSKTSLKKYGYLYGPSYEKNHTPIEHEVLELPKEKIKQIIQDYKDATLRVIKAGFNGIEISMAQRLLIQTFFSQIINKRTDEYSATNFENRSRFCLEVVKAIREVIDKYAPKNFIFGFRATPEETYGDILGYTIEDFIQLVDKIIEIGKISYLAIASWGHDIYLNKVRSNTKYKGQLVNKVIYDIYKNKLPIISSGGINTPTK

SEQ ID NO: 10332 - protein, 398 aa, Mycoplasma pulmonis
MDKKELLKNKLFQPLKIKNFVLKNRFVLAPMALNTSTDDGIITDDDLAYAQRRSHSAPMAITGGTYINKYAQLFENGFANDRDEVLPGLTQMAKVMKKDGNLAILQIAHSWRFSIASLIRYKKVYGPSAGVFLTPFEHEVTELTIEEIEGIIQDFENAVLRAIKAGFDGVEIASAQRLLQQAFFSKYSNQRKDKYGNQSLESRALLTMQVLHRVQDVIKKHAHKDFILGFRATPEETIGEIIGYSVEEFNWLMDKILDEIDISYLSLASWGKNIYKTKVRTKGKFYNQLINKVVYEHINGRVPVIANGGINSLESAIEAIEHVDLVGLSTVFVVEPEFVQKLMEKKENQINLDITKANLEDLKIPPYAFKNIAYFFDFGQNLPESTSEVLKENSQKKD

SEQ ID NO: 10333 - protein, 399 aa, Streptococcus agalactiae NEM316
MNNVQGNLFRPLILPNGLSLENRFVLSPMVTNSSTSEGFVTDDDIAYAVRRAKSAPLQITGAAYVTEYGQLFEYGFSVSKDEDIPGLTKLAKAMKSKGAKAVLQLTHAGRFSSHTLARHGYVYGPSPMQLQSPYPHQVKELTHKDILMIIDEYVQATRRAIQAGFDGVEISSAQRLLIQTFFSTFSNQRKDEYGPQTLTNRCRLGLEVFKAVQKVIREEAESDFILGFRATPEETRGSQIGYSIEEFMEFLEKILAIAQVDYLAIASWGHDVFRNTIRSEGVYKGQLVNQVIFEHFGDRVPIMATGGINSASKVFEALQHAHMVGASTPLVVDPEFLQKIKAKRSDQINLRIKVSDLEGLAIPKASFKDIVPLMDYGESLPKEAREVFRELRSNYREER

SEQ ID NO: 10334 - protein, 378 aa, Shewanella oneidensis MR-1
MSVFTAYESGALTLQNRIVMAPMTRARTTQPGNIPNDLMVQYYAQRSSAGLIITEATQISNDSQGYSFTPGVYTEAQIDGWKKVTAAVHEAGGKIFNQIWHVGRVSHPIFQQGNAPIAPSAIAPVGTKVWIVDEAHPEGQMVDCPEPREMTQADIDRVVADFAKAGANAIAAGFDGIEIHGGNGYLIDQFLRTNSNHRTDAYGGSPEKRIRFLLEVVEAVSAQIGADKVGVRLAPYVTFKDMACPEIVETILLAAKQLSAFGVAYLHLSEADWDDAPQIPESFRIELRNVFKGSIIVAGRYDVERANDVIEKGYADLVAFGRAFIANPDLPYRLANQLPLSPFDKGPLFGGSAAGYTDYPSYQAALRAVIRSSDDEVA

SEQ ID NO: 10335 - protein, 365 aa, Shewanella oneidensis MR-1
MTQSLFQPITLGALTLKNRIVMPPMTRSRASQPGDVANHMMAIYYAQRASAGLIVSEGTQISPTAKGYAWTPGIYTPEQIAGWRIVTEAVHAKGCAIFAQLWHVGRVTHPDNIDGQQPISSSTLKAENVKVFVDNGSDEPGFVDVAVPRAMTKADIAQVIADYRQAALNAMEAGFDGIELHAANGYLINQFIDSEANNRSDEYGGSLENRLRFLDEVVAALVDAIGAERVGVRLAPLTTLNGTVDADPILTYTAAAALLNKHRIVYLHIAEVDWDDAPDTPVSFKRALREAYQGVLIYAGRYNAEKAEQAINDGLADMIGFGRPFIANPDLPERLRHGYPLAEHVPATLFGGGEKGLTDYPTYQA

SEQ ID NO: 10336 - protein, 362 aa, Shewanella oneidensis MR-1
MFKAFKGHALETKNRIVMAPMTRSRSTHPGDVPNEMMANYYRQRASAGLIITEGAPVSAVARGYSMTPGIYTPAQIEGWKKVTEAVHQEGGKIFIQLWHVGRRSHSSVSGAEPLAPSAIKIPDQVFGPLPEGGFGMIETQQPKAMSEQDIQATISDFVQAAQNAMLAGFDGVEVHAAHGYLFDTFLRLESNQRQDRYGGSQENRLRFLVDTLQALTQTIGSGKVAVRISPHIGEGFTGDNPEIIQLTLALLQKLQPMNLAYVHFSENISRYVEVSDAFRQQVRRVYQHPIMVAGKLTKQSAQRLLDQHYADFVAFGTPFVTNPDLVARFTHDWPLTEFDADARLTLYGGGEAGYIDYPAYQA

SEQ ID NO: 10337 - protein, 355 aa, Shewanella oneidensis MR-1
MTIENTVNSVENLFDTYKLNDTITLKNRILMAPLTRCMADANLVPTDDMVAYYARRAEAGLIISEATIIRPDAQGYPNTPGIFTQAQIAGWRKVTDAVHANGGKIFVQLWHTGRVAHPHFFGGGDVLAPSAQKIEGSVPRMRELTYVTPKAVTVEDIQGLVRDYAKAAENAIEAGFDGVEIHGANGYLIDQFLHHDSNRRTDEYGGTPVNMSRFALEVVDAIIARIGHDRTGLRISPGAYFNMASDSRDRVVFDYLLPELEKRDLAFVHIGIFDDSIEFDYLGGTASSYVRAHYGKTLVGVGSYSAETASKAIAEDKFDLIAIGRPFIANPDYVAKVRNSEELVAYSDEMLASLI

SEQ ID NO: 10338 - protein, 372 aa, Comamonas sp. NCIMB 9872
MKKVFDLFDLKGLKLRNRVVMAPMSRARILDSTPDSSTALYYGQRAGAGLIIAEGANVSPQACGTMGTAGIYLPEHVAGWRLTTQAVHTAGGRIFLQLAHAGRVSHRSLQPEGAAPVSSTSKHALNTTVFGINAAGHTAPLQTSMPQCLTEQELAGIRSDFVRAARLAMQAGFDGVEIHAGNGFLFEQFINGALNDRQGLYGGAPAAHRLRFLLETLDAVASAIGPDHVGVKVTPFSRLADMPSYEGETQTWLAFANEPLLGSLAYVHAAFGDVDASFALQFRQALRGTLMRPCSPDAAAANAMLEQGLADLVVMGRPFISNPDLVERMRHGWPLSLASDTTVYGGGSAGYTDYPFYKPAQEADNSSADALV

SEQ ID NO: 10339 - protein, 365 aa, Yersinia pestis CO92
MKTAKLFSPLKVGALTLPNRVFMAPLTRLRSIEPGDIPTPLMAEYYRQRASAGLIITEATQISFQAKGYAGAPGLHTQEQLNAWKKVTQGVHNEGGHIAVQLWHVGRISHNSLQPGQQAPVAPSAIAADTRTTVRDETGAWVRVPCSTPRALETEEIPGIINDFRQATANAREAGFDYIELHAAHGYLLHQFMSPASNQRTDQYGGSIENRTRLTLEVVDATAAEWGADRIGIRISPLGPFNGLDNGEDQEEAALYLIDQLNKRNIAYLHISEPDWAGGKPYSDTFRAAVRAHFNGVIVGAGAYSAEKAECLIQKGFIDAVAFGRSYISNPDLVTRLQQHAPLNEPDSNTFYGGGAKGYTDYPTL

SEQ ID NO: 10340 - protein, 364 aa, Vibrio vulnificus CMCP6
MSKLFEPTQLKHLDLQNRVAMAPMTRARTSQPGNIPNAMMATYYKQRASAGLIISEATQISDDSQGYSFTPGVYTDEQVAGWKRVTQAVKSQGAAMFCQLWHVGRVSHPVFQKGEQPIAPSALAPVETKVWIADEQGNGNMVDCVEPRAMTQDDIDRVVSDFAYAAKRAIEAGFDGVEIHGGNGYLIDQFLRTNSNHRTDQYGGSRENRIRFLLQVVDAVSQAIGADKVGVRLAPFITFKDMNCPDIVPTILEASKQLQARDIAYLHLSEADWEDAPEIPESFRIELREYFTNTIIVAGSYTQARADEVLEKGYADLVAFGRPFVSNPDLVARLKHQQPLAELDGATLFGGDERGYTDYTALHV

SEQ ID NO: 10341 - protein, 375 aa, Lactobacillus plantarum WCFS1
MKGCFIVTSFNEPLKFKSGVTLRNRLMMSPMTTTQSFYNGSITHDEIDYYTQRATGLGAVITGAANVEDLGKGWHGELSIAHDTMLPGLSALAHGIQSQGAKAIVQIFHAGRMTHRAVLNGEQIVSASAVAALRDDAETPRAMSIDEIHATISAFGEATRRAIQAGFDGIELHGANTYLIQQFFSPHSNRRTDEYGGRTPQERFRFIDELLKAVFAAVDQYADRPFIVGYRFSPEEFEEPGIRLEDTLWLLSQLRESRLDYVHVSLNNYDRVSRDPQYQDKSIMTYVHEALQGKLPLVGVGGVRTRDDVKTVLQTAELVAVGQQLLYDPTWAVKLAKNADNTMVTAPFEEAVEVTPLSRPLYEFAASRYHSVINS

SEQ ID NO: 10342 - protein, 371 aa, Lactobacillus plantarum WCFS1
MQAKYKKLFEPYTLNNDVVLKNRLVVAPLTIYDSGPDGELTPAAHNFWRNRFRGFGTWIVPFTNVHPSGIGFESPNAFHEENLPTLKAYATISHEQGAKAIIQLAHAGIHADPAMTKGYDLMGPSNLPYMGVRAMTDSEVREMVNAFAYATELAISAGLDGVEIHGANGWLIQQFVSETYNQRTDHWGGSVEKRFNFPLAIIDAIEAVRHKYHRPDFIVGYRFSPEEPGEVGLTMTETLALVDRLLDKPLQYIHISLWNFYKKIRRGGDVKKTRMEAVHDRINGRLPFIGVGDLFAEEQGLKAFNTGWADLLAVGGSVELNPNLIELIKTGQEDQIQSEFDWNEMDSYRFTPAMLYGTLAGNAMFPKVKQN

SEQ ID NO: 10343 - protein, 364 aa, Methanosarcina barkeri
MAEDTDLFSQYRMGDLTLPNRIVMAPMTRNRAGDDDIPVPLTVTYYVQRASAGIIITEGSQVSPQGVGYMHTPGIYSAAQVAGWKKVTDAVHREGGRIFIQLWHVGRVSHPDLLGGALPVAPSALPVEGFTHASGGKKPIPVPRALKTEEVPDIVRQFRQAAENAKTAGFDGVEIHGANTYLLDQFLRSGSNKRTDKYGGSLENRTRLPLEVTKAVIEVWGGDRVGYRISPHNNAHSMSDENPLETFSYFARELNKTGLGYLHLIEPIGGRMGFAPPEARLGPILRRIFERTFILNGGYGLHSGNEAIANGEADLIAFGVPFLANPDLPERFRQNAPLNEPDESTFYVGGAKGYTDYPALVVHR

SEQ ID NO: 10344 - protein, 373 aa, Oceanobacillus iheyensis HTE831
MNANNHDMFSPLTFKNGLELKNRLVMAPMTHYSSNPDGTVSDEEISYYARRSKGVGMVITATTYVTPNGKGFPNQFSAVEDGMIPSLSKLAKGIQNEGAKAILQIFHGGKMCPPSLIPDGDVVSASNIPANSEAAEPRPLKESEIEEIIEAFGETTRRAIEAGYDGVEIHGANGYLLQQFFSPFSNRRDDRFGGSLEKRMAFPLAVIEKVKSVVAEHADASFIVGYRFSPEEPETPGITMDETLQFVDVLADKQLDYLHVSLMDFFSKARRGVEDLNKTRISYLLETIDNRVPLIGVGSIYTAEDARKAFNTGIPLLAIGREIIIDPDWVEKVAEGRDDEIITEINKDKQEELVVPDPLWNVITHAPGWFPGV

SEQ ID NO: 10345 - protein, 360 aa, Pseudomonas syringae pv. tomato str. DC3000
MSEKTLFQPYALGNLTLTSRIVMAPLTRNRAGAGLAPTDLAATYYAQRASAGLIITEATQISPQAQGYQDTPGLYTPEQIAAWRVVTDAVHAEGGRIFVQLWHVGRVSHVDLQPGGAAPVAPSAIRAQTKTFVNNAFTDVSEPRALELSELPGIVNDFRQAAANAIEAGFDGVEIHGANGYLLDQFIKDSANVRTDAYGGSVENRARLLLEVVTAVVKEIGAHRTGVRISPVSPANGVASSDPQPQYEYIAEQLSEQGIAFLHVVEGATGGPRDVAPFDYDALRQRFKHTYLANNGYDLDLATARVNANKADLVAFGRPFISNPDLIERLKTGAPLAELNPATLYGGGAEGYTDYPTIAG

SEQ ID NO: 10346 - protein, 367 aa, Pseudomonas syringae pv. tomato str. DC3000
MNDLSKATDLFSPVQMGSIDLANRIVMAPVTRSRYAEDGVPKDLHATYYAQRATAGMIVAEATNISAQGRGYAATPGIWNEKQVAGWRKVTDAVHAAGGKIVSQLWHVGRFSGVDLQPGGEAPVAPSALQAEGNTYTVDGFVPVSMPRALETDEISGIIAQYRHAAENAKRAGFDGVEVHSANSYLLDQFLRDSTNQRTDHYGGSIENRARLTLEVTQAIVDIWGNDRVGIRLSPVTPDAGNTAPDSNVMGLHGYLIQQLNTLNLAYLHFVEGATATSREVPEGVDMDALSAQFHGPFIGNNNYDLEMAVERRAQGKIDAVAFGRLFISNPDLVARLFHGAELTIAPRESYYGGGAKGYTDWPLGQY

SEQ ID NO: 10347 - protein, 368 aa, Pseudomonas syringae pv. tomato str. DC3000
MNKLFTPFDLAGTSLKNRVVMAPMTRTRTLNNIPNEANALYYAQRASAGLLITEGLPISDESRGYLYTPGIYEDVHLPGWRNVTDAVHAKGGKIFAQLWHVGRMSHISVHGIVPVSSGTVPAVDTTVYAWIEPGKAGPVQPSAPRALETEEVKRVIADFVKSARMAMDAGFDGIEIMAANGFLFDQFLSSSLNTRTDQYGGSIANRQRFLLETIDAIAAEIGGSKIGVRFSPFGRLYDFGVYEGEEETWMSMASALNERELAFVHLNYQPTILAAQTPPGFGAAFREAYKGTVMAAGGFTKEIAESELAKGELDLVAFGTAYIANPDLVERMQNNWPLAESDRATYYGVSGSIEKGYTDYPEYAAAEA

SEQ ID NO: 10348 - protein, 349 aa, Pseudomonas syringae pv. tomato str. DC3000
MTTIFDPITLGDLQLPNRIILAPLTRCRADEGRVPNALMSEYYVQRASAGLILTEATSVTPMGVGYPDTPGIWSNDQVRGWSNITQAVHNAGGRIVLQLWHVGRISHPSYLNGETPVAPSAIAAQGHVSLMRPITPLPTPRALELAEIGDIVEAYRVGAENAKAAGFDGVEVHGANGYLLEQFLLTGSNQRTDQYGGSLENRARLLLEVTDAVIDVWGAGRVGVHLSPRFDMHNMSDENRAETFSYVAKELGKRGIAFICARERDAEDSLGPQLKKDFGGVYIANEKFTKDSANAWLAEGKADAFAFGVPYIANPDLPERLASDAPLNEAHPETFYGKGPVGYIDYPRL

SEQ ID NO: 10349 - protein, 367 aa, Pseudomonas syringae pv. tomato str. DC3000
MSAAALFTPFRLGGLELSSRVVMAPMTRSFSPGHVPNSKVIEYYRRRAAAGVGLIITEGTTVNHPASNGYPNVPQFFGDAPLAGWKKVVDAVHAEGGKIAPQLWHVGAVRRLGTEPDGSIPAYGPMEKVKDGQVLVHGMSKQDIDEVVAAFAQAAADAKAIGMDGVEIHGAHGYLVDQFFWEGSNQRSDEYGGSLANRSRFAIELIKAVRAAVGPDYPIIFRFSQWKQQDYSARLVQTPEALGEFVQPLSDAGVDIFHCSTRRFWEPEFEGSELNLAGWTRKLTGKPTITVGSVGLDGEFLQFMVNTEKVAQPASLENLLERLGKDEFDLVAVGRALLVDPDWAVKVREGREQDILPFSREALTTLV

SEQ ID NO: 10350 - protein, 365 aa, Pseudomonas syringae pv. tomato str. DC3000
MSEINKDVPALFNMGSLKLKNRFALAPMTRVSATEQGCATQAMARYYERFAKGGFGLIITEGNYTDRSFSQGYPFQPGLTDDEQALAWRATTDAVHRHGSAVIAQIMHAGALSQANRFVNEAAGPSAIRPKGEQMAFYYGEGRYRVPRAMSDKDIADTLDGFARATRRAVGAAGFDGVEIHGANGYLLDQFLTDYTNQRTDQWGGNVYQRLRLTLDVIAEVKKAAGQAPVGVRISQGKVNDFQHKWAGGERDAEVIFGALADAGVDYIHITEHQAWQPAFAQGEASLVRLARRYAPDVALIANGGLHDPEKAAQVFRDGADIIAVGKGALANPDLPRLLLEGGAIREFDPAILGPIANIKDSELG

SEQ ID NO: 10351 - protein, 374 aa, Vibrio parahaemolyticus RIMD 2210633
MKQRPNKLFEPAQLKALSLQNRIVMAPMTRARTTQPGNIPNEMMATYYQQRASAGLIISEATQISDDSQGYSFTPGVYTDAQVAGWQGVTQAVKLQGAAMFCQLWHVGRVSHPTFQNGEQPIAPSALAPVETQVWIADEQGNGNMVDCVEPRAMTQADINRVVGDFANAAKRAIESGFDGVEIHGGNGYLIDQFLRTNSNHRTDNYGGSRENRIRFLIEVVDAVIAAVGAHRVGVRLAPFITFKDMDCPDIVPTILEASKQLQERDIAYLHLSEADWADAPTIPETFRIELRKRFRNAIIVAGRYDPQRANEVLEKGYADLVAFGRPFVANPDLVSRLQHHHPLAELDGSTLFGGNERGYTDYPALQQECAEQA

SEQ ID NO: 10352 - protein, 366 aa, Vibrio parahaemolyticus RIMD 2210633
MTDALFQPIQLGSLSLKNRIVMPPMTRSRASQPGNVANDMMATYYAQRAEAGLIVAEGTQISPMGQGYAWTPGIYSPEQIAGWKKVTDAVHEKGGVIFAQLWHVGRVTHPDNIGGEQPISSSALKAENVKVFIDNGTDEPGFVDVVEPREMTKQDIKNVIEEYRQAALNAIKAGFDGVELHAANGYLVNQFIDSEANNRTDEYGGSIENRLRFLGEVVEAMTQAIGAERVGVRLAPFTSLNGTVDSTPVDTYTAAAALLDKLNVVYIHIAEVDWDDAPDTPHDFKTAVRKAYKGTLIYAGRYNAEKAQHAIESGLADMIGFGRPFVANPDLPSRIKHGYPLAEHDPATLFGGGEKGLVDYPAYHAG

SEQ ID NO: 10353 - protein, 372 aa, Bacillus subtilis subsp. subtilis str. 168
MNPKYKPLFEPFTFKSGVTINNRIAVAPMTHYASNEDGTISEAELDYIIPRSKEMGMVITACANVTPDGKAFPGQPAIHDDSNIPGLKKLAQAIQAQGAKAVVQIHHGGIECPSELVPQQDVVGPSDVFDNGKQIARALTEEEVENIVKAFGEATRRAIEAGFDGVEIHGANGYLIQQFYSPKTNQRTDRWGGSDEKRLAFPLAIVDEVKKAASEHAKGAFLVGYRLSPEEPETPGLTMTETYTLVDALGDKELDYLHISLMDVNSKARRGADPTRTRMDLLNERVGNKVPLIAVGSIHSADDALAVIENGIPLVAMGREILVDPNWTVKVKEGREKQIETVIKGTDKEKYHLPEPLWQAIVNTQGWVPYKD

SEQ ID NO: 10354 - protein, 375 aa, Bradyrhizobium japonicum USDA 110
MKFPALFKPLQVGPYELAHRVAMAPLTRMRAERDSFSPRPLNAEYYGQRATPGGLLIAEASPVLSHGRGNPATPGIYSEAQIAGWRKVTDAVHAKGGIIFLQLWHVGRVSHSSFHGGELPVSASAIAIKAEGMKAMTAEGKIADYETPRALETDEVKGIVEAFRQGAKNALAAGFDGVEIHGANGYLLEQFLQSRSNQRTDQYGGGIENRARLLLDVTQAAIDVWGANRVAVRLSPHGIANDSGEPDPMPLYTHVVKALDKLGLAYLHFIEPRSSGAGRADVHWENVPSAMVLFRPLYSGVLMTAGGFTGETANAAIADGHADIIAFGRIFISNPDLPRRLRHDYPITPYNRATFYGGEEKGYTDYPAYDELTPA

SEQ ID NO: 10355 - protein, 367 aa, Bradyrhizobium japonicum USDA 110
MSRSTKLFETYKLGPITLANRLVMAPLTRNRAVPGTFVPGALAADYYGQRASAGLLITEASQVSQQGQGYQDTPGIYSKDQVAGWRKVTDKVHERGGKIFIQLWHVGRISHVALQANGAAPVAPSAIRAKGKTFVNGTFADVSEPRALELSEIRGIIDDFKRATKNALEAGFDGVEIHGANGYLLDQFAKDGANKRTDAYGGSIENRARLMLEVSRAVAAEAGTERTGIRISPVTPANDVSDSNPQALFDHIVDGLSALKLVYLHVVEGATGGPRDFAPFDYASLRKRFSGAYVANNGYDFDLATKVLDANAADLIAFGKPFISNPDLVERLKQGAALNDWDKNTFYGGSAKGYTDYPTLEAAEAAQ

SEQ ID NO: 10356 - protein, 373 aa, Bradyrhizobium japonicum USDA 110
MEGPSPFSVVFEKEPAMNSLFSPVRIGGLELSNRLVMAPMTRSRADAGGVPGGLAAEYYAQRAGVGLIVTEGTQPSDDGQGYMTTPGIYTPAHVAGWRKVTDAVHGKGGHIFIQLMHAGRMSHPDNTPHHRQGVAPSAIAPDTPIFTPKGMQDIPQPRSLATDDVRRTVADFRDAARHAIAAGADGVEIHGANGYLVQQFIAPSANTRTDAYGGSIENRARFAIEVATAIAGEIGADRTAIRLSPGITMWGIDEGAEGPDLYRHLVGELDKLSLAYLHIMHQGDERLLADLRRLWRGKLIVNRPGRPRDRIGSDVAAGLADLEAYGQMILANPDFIARLKSGALLNEADRTTFFGGTARGYTDYPALDAIAAV

SEQ ID NO: 10357 - protein, 371 aa, Brucella melitensis 16M
MASLFDPITIGDLKLANRIVMAPLTRNRSPHAVPNDLNVIYYEQRASAGLIITEATPISQQGQGYADVPGLYSAEQLAGWRRVSDAVHNAGGKIVAQMWHVGRISHNSLQPNGEKPVAPSAITAKSKTYLVHPDGAGEFVPTSEPRALEKSELPGIVADYARAAKDAVETAGFDGVEIHSANGYLIDQFLRGGSNQRTDEYGGSIENRARFLFEVVDAVTKAIGAGKVGIRLSPVTPANDASDPDPQPLFDYVIGKLAACGLAYIHIIEGATGGPRDFQQGPQPFDYARFKQVYRDAGGKAAWMVNNGYDRKMAEEEVEAGRADLVAFGKPFIANPDLVRRLKENAPLNELDQKHMYGGGAKGYTDYPVLA

SEQ ID NO: 10358 - protein, 407 aa, Bacteroides thetaiotaomicron VPI-5482
MESKLFTPVTFGPLTLRNRTIRSAAFESMCPGNAPSQMLLDYHRSVAAGGVGMTTVAYAAVTQSGLSFDRQLWLRPEIISGLREVTGAIHTEGAAAGIQIGHCGNMSHKKICGTTPISASTGFNLYSPTFVRGMKREELPEMARAYGRAVHLAREAGFDAVEVHAGHGYLISQFLSPYTNHRKDDYGGLLQNRMRFMEMVMNEVMTAAGSDMAVIVKMNMRDGFKGGMETDESLQVAKRLLALGAHALVLSGGFVSKAPMYVMRGAMPIRSMAYYMDCWWLKYGVRMFGKWMIPTVPFREAYFLEDALKFRAALPEAPLIYVGGLVSREKIDEVLDAGFDAVQMARALLNEPEFVNRMRREEQARCNCGHSNYCIGRMYTIEMACHQHLKEKLPPCLQREIEKLEKQ

SEQ ID NO: 10359 - protein, 375 aa, Bacillus cereus ATCC 14579
MTSSRNKATSFYEGTNVNAGGFFENVEETKLFYPIQVGGWSLRNRIAMAPMTRCFADNETGVVGADVVEYYRKRAADGIGLIITEGIVISPRAKGNPGVPGIYTQEQIDSWKPVTEAVHKEGGTIIAQIWHVGRMSHHEIIGGQMPQAPSAIAAEGNVPRFRKPFDMPEAMTLEEIQEVIDQYAQAAKNAIEAGFDGVEIHGAHGYLIDQFTYEFANKRTDKYGGDLKQRLTFMKEVTAAVIEAVGANKTLLRFSAFKGDNPTYMWENPEFAIETFINMFKEVGLTMIHPSTMNYTQEIADGKNFHQLVRKYWDGTIVGVGNLNPKEAEEALQEGTIDVAAFGRPLIANPDFVHRIKHAESLVEYDAKEHLVTLV

SEQ ID NO: 10360 - protein, 336 aa, Streptomyces avermitilis MA-4680
MTRNRASADGVPQPLMATYYAQRASAGLIIAEAATPNAVGQTYPNITAIHDATHVAGWRGVTDAVHAAGGRMFLQLQHGGRVGHPATSGLTPVAPSPVPLPETIFTPSGHRPSVVPREMTAADIRTTVADFAAAARNAIDAGFAGVEVHSANGHLLHQFLATNTNRRTDAYGGSVAARIRFAVEVTEAVADAIGAERVGVRISPGTTVNGVEEDDTELLYPAFVEALAALGPAYLHLVHADPDQPLFRHIRENWPTTLMANPVLGPELPADGGAHAAGRLLTAGADLIALGRPFLANPDLVTRLRTGAPVNPVRDRFMMYVGGERGYTDYPTLTVA

SEQ ID NO: 10361 - protein, 375 aa, Streptomyces avermitilis MA-4680
MTVTTDATDRAAQILSRPVTLNGLTVPNRIVMAPMTRQFSPGGIPGEDVASYYARRAAAGVGLIVTEGTYVGHESAGQSDSIPRFHGEEQLAGWSKVADAVHAAGGTIVPQLWHIGMVRGAGEPPFADAPPVGPSGIGTEGAEVTGKAMTQQDLDDVIEAFAKAAADAERIGFDGVELHGAHGYLIDQFLWAGTNRRTDAYGGDPVARTKFAAEIVAAVRSAVSPSFPVLFRYSQWKQQAYDARLAETPEELEAILAPLAAAGVDAFHASTRRYWQPEFDGSDLNLAGWTKKITGKPAISVGSVGLNGEFLKAFQGEGSTVRGIDDLLDRLESGEFDLVAIGRALLQDPEWAAKVLAGRFSELAAYDASSLKTLH

SEQ ID NO: 10362 - protein, 555 aa, Sulfolobus solfataricus
MDLSKLLVPIRVGDVVLKNRIAMSPMISNLGTPEGYPSDAHIAYLAERAKGGVGLIITEYTYVNHVDARGSVNELGMYSDELTPKFTRLTELIHALGSKIFVQLVHVGRKTRKDIIWGNKPIAPSPIPIMDEVREMTKEDIERVKNDFINAAIRAKRAGFDGIELHGAHGYLIAQFLSPATNKRGDEYKDGVKFVEEILKGIREKVRITVGIRISVTEFDNGGLTPEIVAEIGKRLEKAGIDYIHLSAGRDGPLGSSMPYYYKRTSFLEEAKVVRDTVKIPIFLVGSIITPQDAIKAREIADVVVLGRQLLADPYWLEKAKRDLPIRPCIRCNQSCRGVVYKEVRCDVNPELGWELLPPLEKGRGEVTVVGGGVMGLEAARVLALRGFAVTLYEQNNKLGGQFLLYRDPWKVNEFQALIDYYERELRRLNVEIKLNVKMECSDCIMAIPDYEIPKMPDVKGEKVLIDSNLYVYHDYAFELAKYNEVYMTERSFKGLDRTREYLLRKELSEVGVKFIEESNSIKFDVEIHDIVDDQPSIGKAIQRGYWLGRSFKSY

SEQ ID NO: 10363 - protein, 548 aa, Thermoplasma acidophilum
MVLASEPGYIGTVRIRNRLVMSPMISNMADPDGNTNENHISYLEERAKGGAGLIITEYTYVDRRSGIGSRNQMGMYDERQIPKFSRLTERIHAHGAKIFVQLVHAGAKAIGAINEYKIAPSKTNFDPSVREMDASDIEDVISAYRKAANIAERSGFDGIEIHGAHGYLVDEFLSPWWNKRTDRYGGSFENRIRFAQEVIDAVRSEVDIPVGIRISLYEDEEDGYSPDYGMKIAESIRNIDYVHVSAGNNEPPGSSASFYSPHAHIFQKLRGSTGKTLIVAGSITAREDVDLVLSAADFVAVGRAMLADPYFPMKIITGKGEIRPCIRCNQGCRNLAYGEVRCTVNPYFVVPEPRKIYKGEVVVVGAGVKGLEASLYAAKSGLKVVIYEKEDRIGGQINSIFDASKAREFRQLLDYYGRTIKKYGIDVRLGERYSGDGIYCLPDTVYPDLPDKDEIWIDSNVYMYHDLALRYAAEHKVYLSSYSLTSLDRARRKAYANIARKAGVTIVDTADHYDVSIHDRNQYDIYQAMLSGIEAMRSHIAASENEYL

SEQ ID NO: 10364 - protein, 536 aa, Thermoplasma acidophilum
MRIRNRLVMSPMISNMADPDGNTNENHISYLEERAKGGAGLIITEYTYVDRRSGIGSRNQMGMYDERQIPKFSRLTERIHAHGAKIFVQLVHAGAKAIGAINEYKIAPSKTNFDPSVREMDASDIEDVISAYRKAANIAERSGFDGIEIHGAHGYLVDEFLSPWWNKRTDRYGGSFENRIRFAQEVIDAVRSEVDIPVGIRISLYEDEEDGYSPDYGMKIAESIRNIDYVHVSAGNNEPPGSSASFYSPHAHIFQKLRGSTGKTLIVAGSITAREDVDLVLSAADFVAVGRAMLADPYFPMKIITGKGEIRPCIRCNQGCRNLAYGEVRCTVNPYFVVPEPRKIYKGEVVVVGAGVKGLEASLYAAKSGLKVVIYEKEDRIGGQINSIFDASKAREFRQLLDYYGRTIKKYGIDVRLGERYSGDGIYCLPDTVYPDLPDKDEIWIDSNVYMYHDLALRYAAEHKVYLSSYSLTSLDRARRKAYANIARKAGVTIVDTADHYDVSIHDRNQYDIYQAMLSGIEAMRSHIAASENEYL

SEQ ID NO: 10365 - protein, 398 aa, Kluyveromyces lactis
MSFMNFEPKPLADTDIFKPIKIGNTELKHRVVMPALTRMRALHPGNVPNPDWAVEYYRQRSQYPGTMIITEGAFPSAQSGGYDNAPGVWSEEQLAQWRKIFKAIHDNKSFVWVQLWVLGRQAFADNLARDGLRYDSASDEVYMGEDEKERAIRSNNPQHGITKDEIKQYIRDYVDAAKKCIDAGADGVEIHSANGYLLNQFLDPISNKRTDEYGGSIENRARFVLEVVDAVVDAVGAERTSIRFSPYGVFGTMSGVSDPVLVAQFAYVLAELEKRAKAGKRLAYVDLVEPRVTSPFQPEFEGWYKGGTNEFVYSVWKGNVLRVGNYALDPDAAITDSKNPNTLIGYGRAFIANPDLVERLEKGLPLNQYDRPSFYKMSAEGYIDYPTYEEAVAKGYKK

SEQ ID NO: 10366 - protein, 349 aa, Pseudomonas fluorescens
MATIFDPIKLGDLELSNRIIMAPLTRCRADEGRVPNALMAEYYVQRASAGLILSEATSVTPMGVGYPDTPGIWSNDQVRGWTNITKAVHAAGGKIVLQLWHVGRISHPLYLNGEAPVAPSAIQPKGHVSLVRPLADYPTPRALETAEIAEIVEAYRTGAENAKAAGFDGVEIHGANGYLLDQFLQSSTNQRTDNYGGSLENRARLLLEVTDAAIDVWGAGRVGVHLAPRADSHDMGDDNLAETFTYVARELGKRGIAFICSREKEGADSLGPQLKEAFGGAYIANERFTKDSANAWLAEGKADAVAFGVPFIANPDLPARLKADAPLNEPRPELFYGKGPVGYIDYPTL

SEQ ID NO: 10367 - protein, 377 aa, Pseudomonas putida
MPDTSFSNPGLFTPLQLGSLSLPNRVIMAPLTRSRTPDSVPGRLQQIYYGQRASAGLIISEATNISPTARGYVYTPGIWTDAQEAGWKGVVEAVHAKGGRIALQLWHVGRVSHELVQPDGQQPVAPSALKAEGAECFVEFEDGTAGLHPTSTPRALETDEIPGIVEDYRQAAQRAKRAGFDMVEVHAANACLPNQFLATGTNRRTDQYGGSIENRARFPLEVVDAVAEVFGPERVGIRLTPFLELFGLTDDEPEAMAFYLAGELDRRGLAYLHFNEPDWIGGDITYPEGFREQMRQRFKGGLIYCGNYDAGRAQARLDDNTADAVAFGRPFIANPDLPERFRLGAALNEPDPSTFYGGAEVGYTDYPFLDNGHDRLG

SEQ ID NO: 10368 - protein, 377 aa, Pseudomonas putida
MPDTSFSNPGLFTPLQLGSLSLPNRVIMAPLTRSRTPDSVPGRLQQIYYGQRASAGLIISEATNISPTARGYVYTPGIWTDAQEAGWKGVVEAVHAKGGRIALQLWHVGRVSHELVQPDGQQPVAPSALKAEGAECFVEFEDGTAGLHPTSTPRALETDGIPGIVEDYRQAAQRAKRAGFDMVEVHAANACLPNQFLATGTNRRTDQYGGSIENRARFPLEVVDAVAEVFGPERVGIRLTPFLELFGLTDDEPEAMAFYLAGELDRRGLAYLHFNEPDWIGGDITYPEGFREQMRQRFKGGLIYCGNYDAGRAQARLDDNTADAVAFGRPFIANPDLPERFRLGAALNEPDPSTFYGGAEVGYTDYPFLDNGHDRLG

SEQ ID NO: 10369 - protein, 354 aa, Pseudomonas putida
MTKLFSPVQLGPLNLPNRVVMAPMTRSRALGNVPNDLMAQYYSLRAEAGLLITEGTSPSPNGLGYAHIPGIYSDAQVAGWRQVAEAVNAAGGRVFVQLMHTGRVGHPANLPLGAHLLAPSAVAAPGEMWTDTEGMQPHPVPGTMTEQDIAAAIEEYAAACKNTVAAGFDGVELHGANGYLIDQFLNTASNHRSDRWGGSIDNRIRFAVEVARAAAAAIGAERVGIRISPYGVFNGMASDADMDALYLRLIEALNDVGLVYLHVVDHSSMGAPPVSETLKVQLRTAFRGKYILSGGYDAARTNADLAANKGDLVAFGRPFIANPDLAQKLKSGGELKPADPATFYTPDAKGYTEF

SEQ ID NO: 10370 - protein, 378 aa, Ralstonia solanacearum
MFQSLFPGAEMTQQLLSPIQVGQTALANRVVMAPLTRSRAAQPGDVPTELNGTYYAQRATAGLIVTEATQVSRQGQGYAWTPGMYTDAQEAGWKAVVDAVHAKGGRISQQLWHVGRISHTLLQEGGQAPVAPSAIVAQGAQSFVVQPDGTPANVPTSEPRALATEEIPGIIAQYRQAVQRARRAGFDFVEIHAANGYLLHQFLSTNSNQRADQYGGSLENRARLILEVVDAAIAEIGAERVGIRLSPHFVAHDIADAEAETSALYLARELTRRGVAYLHIAEPDWAGGPELSDAFRRQLRDAFKGALIVCGQYTAEEGEQMIASGLADAVAFGRPFIANPDLVARFRAGAGLNTPDRSTFYGGQEKGYTDYPTLEEAA

SEQ ID NO: 10371 - protein, 359 aa, Ralstonia solanacearum
MNALFAPVRVGRHTLQNRLAMAPMTRSRAEPDGTPGELAADYYAQRASVGLIVTEGTQPSDDGQGYLTTPGIYTDAHVAGWKAVTSAVHAKGGHLFIQLMHAGRMSHPDNTPHHRPGVAPSAIAPGAPMFTATGMQDIPAPRALTTEEVRRTVDDFRLAARRAIEAGTDGVEIHGANAYLIQQFFAPSANTRTDAYGGSIENRARFAIEVAAAIADEIGADRTGIRLSPGTTMWGIDEGAEGPDLYRYLVAELDKLGLAYLHVMHQGDEPLLADLRRRWKQPLIVNRPGRPREQVGADVASGLADLEAYGQMVLANPDFVARLKAHAPMNEAQRNTFFGGSAPGYTDYPTLGETAGASA

SEQ ID NO: 10372 - protein, 360 aa, Pseudomonas syringae pv. glycinea
MPTLFDPLTLGDLQSPNRVLMAPLTRGRATREHVPTELMIEYYTQRASAGLIITEATGITQEGLGWPYAPGIWSDEQVEAWKPVTQAVHEAGGRIILQLWHMGRTVHSSFLGGAKPVSSSATRAPGQAHTYEGKQDYDEARPLSADEIPRLLNDYEHAAKNAMAAGFDGVQIHAANGYLIDQFLRDNSNVRGDAYGGSIENRIRLLVEVTRRVAETVGAEKTGVRLSPNGDSQGVNDSNPEPLFSAAAKALDEIGIAHLELREPGYEGTFGKADRPPVHPVIRQAFSRTLILNSDYTLETAQAALATGEADAITFGRPFLANPDLPHRFAERLPLNKDVMETWYSQGPEGYVDYPTADQK

SEQ ID NO: 10373 - protein, 219 aa, Lactobacillus collinoides
MKIDQIFSPYQLNKRVTLRNRLVLAPLNIQSSLFDGSVSLNNLNFHKARAKYVGLDIIGSAYISDSANTAYGAISVADDSKIDGLKKLATVIHQGGSKAILQLVHAGRMTNSYASKGAPVLTPSEVKAAHGDVDLPKAMTKTDIETVIKQFETATIRAIKAGFDGVELHGANTFLFQQFMSPLSNLRTDEYGGSLENRIRFCAETAKRVLDTAHAHKPG

SEQ ID NO: 10374 - protein, 366 aa, Lithospermum erythrorhizon
MASKKLLFTPYQLGKHLLSHRIVMSPMTRNRSFDAMPQKHAILYYSQRASKGGFILTEATGVSDTAQGYPHTPGIWTKEQPEAWKPIVDAVHAKGAVFFCQLWHVGRVSNKGFQPNGQDPISSTTKGFTPAVRASYVQEDWFSPPRALETDEIPKIIDDFRIAARNAIDAGFDGVELHGAHGYLLEQFLKDNVNDRTDKYGGSLENRCRFVLELVEAVVNEVGADKVGIKLAPFSDFMEAGDSDPATLGTYLAEALNKFGILYMHVLEPRMKTTGETNNESIDPMRKAFKGTFVVGGGYDKELGEKALEEGRADLVVYGRPFVSNPDLPKRFEIDAPLNEYDRNTFFTHDPVVGYTDYPFLEEATA

SEQ ID NO: 10375 - protein, 385 aa, Lithospermum erythrorhizon
MSIPSSKLLFTPYQLGKHLLSHRIVMSPMTRNRSFDAMPQKHAILYYSQRTSPGGFIVTEATGVSDTAQGYPHTPGIWTKEQTEAWKPIVDAVHAKGGVFFCQLWHVGRVSNKGFQPNGQDPISSTTKGFTPAVRASYVQEDWFSPPRALETDEIPKIIEDFVVSARNAIDAGFDGIELHGAHGYLLEQFLKDNVNDRTDKYGGSLENRCRFVLELVEAVVKEVGADKVGIKLAPFSDFMEAGDSDPAALGTYLVEALNKYGLLYLHVLEPRMKTTGETNNQSIDPMRKAFKGTFMVGGGYDKDLGEKALEEGRADLVVYGRPFVANPDLPKRFEVDAPLNEPDRNTFFSHDPVVGYTDYPFLEEATCLVPVFDTHCIFSIFLFN

SEQ ID NO: 10376 - protein, 379 aa, Azotobacter vinelandii
MLFTAYRLGNLDLPNRILMPPMTRSRAGAGNVPTALMAEYYAQRASAGLIVSEGTQISQQGQGYAWTPGIHSRQQVAGWRGVTDAVHAAGGRIFAQLWHVGRISHVSLQPNGAAPVSSSPLLADGVKVFIDPEGRGPRAGVGEMVQHSAPRALSEAEIAQVVRDFAAAARHALEAGFDGVELHGANGYLINQFIDSRANTRSDGYGGSLSNRLRFLREVTEAVVAVAGRGRVGVRLAPLTTLQGAVDDTPQATYLGAAKLLDDLDVAYIHIAEADWEDAPDMPVAFKEALRLIYGGTLIYAGKYTLERAEAALRDGWADLIGFGRPFIANPDLPRRLRHGWPLNEPDASRFFGGAVAGYTDYPFATQDGQAAAMEEDVR

SEQ ID NO: 10377 - protein, 459 aa, Azotobacter vinelandii
MGQPASGRLRRRPVQGHRPVPRDAPGVGQEYPFPAGPDRRCADRGSAGDRRPVFRGRHHRQANRGFAGLRQEFQRGGRRTASTRPVPGPGLRPPMSPFQEIATMSIFQSGQIGNLALANRIVMAPLGRARSDVQSRVPLPRVATYYSQRAGAGLIVSEATHVSPNSVSRPGGSAIHTAEQVEGWKAVTAAVHAAGGRIFQQLFHLGRKAHQGRLPGNALPVAPSAIAAQGEVETPQGPQPFPVPRALERAEIPALVEEFRQAARNSLLAGFDGVEIHAANGYLIDQFLRDGSNRRQDDYGGSVANRARLLLEIVDAVIGVFGPGRVGVRISPHFEVDGIGDSDPAALYTHVAEQLQARGIAYLHLIEPDSVEPARRLAPRLRQLFRGAFILAGEFDRARAIRALAEGRADFVAFGRLFIANPDLVERLRREAPLNPPDEATFYSGEEHGYIDYPFLAVG

SEQ ID NO: 10378 - protein, 349 aa, Azotobacter vinelandii
MSTLFDPIEIGDLQLPNRIVMAPLTRCRAEPGRVPGALMAEYYVQRASAGLIISEATSVCPTGVGYPDTPGIWSDEQVAGWKNVTQAVHAAGGRIVLQLWHVGRISDPLYLNGELPVAPSAIQPKGHVSLVRPQKAFETPRALETDEIPGLVEAYRQGAENARKAGFDGVEIHAANGYLLDQFLQDSTNRRTDRYGGSLENRARLLLEVTDAAISVWGAGRVGVHLAPRADLHDMGDSNRAETFSHVARELGKRGIAFICTREKEDADSLTPQIKQAFGGAVIANERFTKEQADRWLAESKADAVAFGVPFIANPDLPARLAADAPLNEAHPETFYSSGPQGYLDYPTL

SEQ ID NO: 10379 - protein, 379 aa, Azotobacter vinelandii
MWVYEMKQSALFTTAQLGPYTLKNRIVLPPLTRSRSSQPGNIPNDLMATYYRQRTGAGFMVTEGTQIEPRGQGYAWTPGIHSAEQVEGWRKVTDAVHAERGVIFAQLWHVGRVSHTSLQPGGEAPVAPSAIRADSVKVFIETGPGTGALAEPSTPRALTTAEVKELIQLYAQAARNALEAGFDGVELHCANGYLVNQFISAHTNRRDDEYGGSLHNRLRFLREITQAVADVVGKERMGVRFAPLFATTDEDRVYLGLVEEDPHQTYIEAVKILEDEGIAYLSLAEADWENAPELPEAFREDVRKTFSGKILYAGKYTAERGNRVIQAGWGDLIAFGRPFIANPDLPDRIANNWPLNPVDLTSMYGGTDKGYTDYPTYRP

SEQ ID NO: 10380 - protein, 99 aa, Chenopodium rubrum
LGTPNVGEKKECPHSLLPMRKAFDGTFIAAGGYDREDGNKAVMKSYTDLVAYGRLFLANPDLPRRFELDAPLNKYHRDTFYISDPIVGYTDYPFLEDAM

SEQ ID NO: 10381 - protein, 371 aa, Agrobacterium tumefaciens
MTSLFEPAQAGDIALANRIVMAPLTRNRSPGAIPNNLNATYYEQRATAGLIVTEGTPISQQGQGYADVPGLYKREAIEGWKKITDGVHSAGGKIVAQIWHVGRISHTSLQPHGGQPVAPSAITAKSKTYIINDDGTGAFAETSEPRALTIDDIGLILEDYRSGARAALEAGFDGVEIHAANGYLIEQFLKSSTNQRTDDYGGSIENRARFLLEVVDAVAEEIGAGRTGIRLSPVTPANDIFEADPQPLYNYVVEQLGKRNLAFIHVVEGATGGPRDFKQGDKPFDYASFKAAYRNAGGKGLWIANNGYDRQSAIEAVESGKVDAVAFGKAFIANPDLVRRLKNDAPLNAPNQPTFYGGGAEGYTDYPALAQ

SEQ ID NO: 10382 - protein, 372 aa, Arabidopsis thaliana
MENGEAKQSVPLLTPYKMGRFNLSHRVVLAPLTRQRSYGNVPQPHAAIYYSQRTTPGGFLITEATGVSDTAQGYQDTPGIWTKEHVEAWKPIVDAVHAKGGIFFCQIWHVGRVSNSGFQPNGKAPISCSDKPLMPQIRSNGIDEALFTPPRRLGIEEIPGIVNDFRLAARNAMEAGFDGVEIHGANGYLIDQFMKDTVNDRTDEYGGSLQNRCKFPLEIVDAVAKEIGPDRVGIRLSPFADYMESGDTNPGALGLYMAESLNKYGILYCHVIEARMKTMGEVHACPHTLMPMRKAFKGTFISAGGFTREDGNEAVSKGRTDLVAYGRWFLANPDLPKRFQVDAPLNKYDRPTFYTSDPVVGYTDYPFLESTA

SEQ ID NO: 10383 - protein, 374 aa, Arabidopsis thaliana
MEMVNAEAKQSVPLLTPYKMGRFNLSHRVVLAPLTRQKSYGSVPQPHAILYYSQRTSPGGFLIAEATGVSDTAQGYPDTPGIWTKEHVEAWKPIVDAVHAKGGIFFCQIWHVGRVSNRGFQPRRQAPISCTGKPIMPQMRANGIDEARFTPPRRLSIEEIPGIVNDFRLAARNAMEAGFDGVEIHGAHGYLIDQFMKDKVNDRTDEYGGSLQNRCKFALEVVDAVAKEIGPDRVGIRLSPFADYMESGDTNPEALGLYMVESLNKYGILYCHMIEPRMKTVGEIAACSHTLMPMREAFKGTFISAGGFTREDGNEAVAKGRTDLVAYGRWFLANPDLPKRFQLDAPLNKYNRSTFYTSDPVVGYTDYPSLESTA

SEQ ID NO: 10384 - protein, 372 aa, Arabidopsis thaliana
MENGEAKQSVPLLTPYKMGRFNLSHRVVLAPLTRQRSYGNVPQPHAAIYYSQRTTPGGFLITEATGVSDTAQGYQDTPGIWTKEHVEAWKPIVDAVHAKGGIFFCQIWHVGRVSNSGFQPNGKAPISCSDKPLMPQIRSNGIDEALFTPPRRLGIEEIPGIVNDFRLAARNAMEAGFDGVEIHRANGYLIDQFMKDTVNDRTDEYGGSLQNRCKFPLEIVDAVAKEIGPDRVGIRLSPFADYMESGDTNPGALGLYMAESLNKYGILYCHVIEARMKTMGEVHACPHTLMPMRKAFKGTFISAGGFTREDGNEAVSKGRTDLVAYGRWFLANPDLPKRFQVDAPLNKYDRPTFYTSDPVVGYTDYPFLESTA

SEQ ID NO: 10385 - protein, 374 aa, Arabidopsis thaliana
MEMVNAEAKQSVPLLTPYKMGRFNLSHRVVLAPLTRQKSYGSVPQPHAILYYSQRTSPGGFLIAEATGVSDTAQGYPDTPGIWTKEHVEAWKPIVDAVHAKGGIFFCQIWHVGRVSNRGFQPRRQAPISCTGKPIMPQMRANGIDEARFTPPRRLSIEEIPGIVNDFRLAARNTMEAGFDGVEIHGAHGYLIDQFMKDKVNDRTDEYGGSLQNRCKFALEVVDAVAKEIGPDRVGIRLSPFADYMESGDTNPEALGLYMVESLNKYGILYCHMIEPRMKTVGEIAACSHTLMPMREAFKGTFISAGGFTREDGNEAVAKGRTDLVAYGRWFLANPDLPKRFQLDAPLNKYNRSTFYTSDPVVGYTDYPSLESTA

SEQ ID NO: 10386 - protein, 370 aa, Arabidopsis thaliana
MENGEAKQSVPLLTPYKMGRFNLSHRVVLAPLTRQRSYGNVPHAAIYYSQRTTPGGFLITEATGVSDTAQGYQDTPGIWTKEHVEAWKPIVDAVHAKGGIFFCQIWHVGRVSNSGFQPNGKAPISCSDKPLMPQIRSNGIDEALFTPPRRLGIEEIPGIVNDFRLAARNAMEAGFDGVEIHGANGYLIDQFMKDTVNDRTDEYGGSLQNRCKFPLEIVDAVAKEIGPDRVGIRLSPFADYMESGDTNPGALGLYMAESLNKYGILYCHVIEARMKTMGEVHACPHTLMPMRKAFKGTFISAGGFTREDGNEAVSKGRTDLVAYGRWFLANPDLPKRFQVDAPLNKYDRPTFYTSDPVVGYTDYPFLESTA

SEQ ID NO: 10387 - protein, 367 aa, Arabidopsis thaliana
METKQSIPLLMPYKMGPFNLSHRVVLAPLTRSRSYGNIPQPNAKLYYTQRTTPGGLLISESCVVSETSLGYPDLPGLWNRDQVEAWKPIVDAVHSKGGIFFCQIWHGGRVFHQDQPNGEAPVSSTDKPLMCKNMYGGQFKPPRRLRSDELPAIVNDFRIAARNAIEAGFDGVEVHGAHGYLIDQFLKDKVNDRSDQYGGSLENRCRFALEVIEAVVNEIGSDRVGIRLSPFADYMESGDSNPEALGLYLVQAMNKHVVYGHMVEPRMKTLEGIFECTESLTPMRKAFKGTFIVAGGYSREDGNKAVEEGRTDLVAYGRPFLANPDLTRRFELNEPLNRYDRSTFYTSDPVVGYTDYPFLETTDTTTA

SEQ ID NO: 10388 - protein, 324 aa, Arabidopsis thaliana
MKNFNLTHRIVMAPMARMRSYGNIPQPHVALYYCQRTTPGGLLISEATGVSETAMAYQNMPGIWRKEQIEAWKPIVDAVHSHGGIFFCQLWHAGRVSHQDCQPNGESPVSSTDKPFADDPSNEFTPPRRLRTDEIPTIINDFRLAARNATEAGFDGVEIHGAHGYLIDQFMKDSVNDRTDSYGGSLENRCRFALQVIEAVSKEIGPDRVGIRLSPFADYMESGDTDPKRLGLYMAKSLNRFEILYCHMIEPRMKTVSEIFECRESLTPMRNAFNGTFIVAGGYTREDGNKAVAEGRTDLVAYGRLFLANPDLPKRFELNAPLNK

SEQ ID NO: 10389 - protein, 371 aa, Mesorhizobium loti
MTTLFDPLRAGDLTLANRIVMAPLTRNRSPNAVPGDLSVTYYSQRATAGLIVTEATAISHQGQGYANVPGLYGADQLAGWRRVTDAVHRGGGKIVVQLWHVGRISHNTLQPGGGKPVAPSAIRANSKTFLVKPDGSGEFAETSEPRALDAAELPGIVDDFRRAAKAAIEVAGFDGVEIHGANGYLIDQFLRSGTNHRNDAYGGSIENRTRFLFEVVDAVTGAVGAGRTGIRLSPVTPANDASDSDPQPLFNHVVAGLGGRGLAYIHIVEGATGGARDFSQGDRPFDYEELKATYRKAGGAGAWLVNNGYDKELAEKAVGDGYAELVAFGKLFIANPDLVSRLKRNAELNAPDKATFYGGDARGYTDYPTAA

SEQ ID NO: 10390 - protein, 373 aa, Sinorhizobium meliloti
MASLFDPITIGDISLSNRVVMAPLTRNRSPQAVPNDLNVAYYEQRASAGLLITEGTAISHQGQGYADVPGLYKPEALAGWRKVTDSVHKAGGKIVVQMWHVGRISHDSLQPQGGKPVAPSAIRAKSKTYLVNPDGTGSFAETSEPRALEPAEIAGIVEDYRKASRAAIEAGFDGVEIHAANGYLIDQFLRSGSNERTDAYGGSIENRARFLFEVVDAVTKEIGAGRVGIRISPVTPANDAFDPDPQPLFTYVVEGLARYPLAYVHVIEGATGGARDHQQGDRPFDYTSLRAAYAAAGGRAAWMTNNGYDRGLALKTVESGEADLVAFGKPFIANPDLVRRLRDNVALNAPDQATFYGGGAKGYTDYPSLENVA

SEQ ID NO: 10391 - protein, 363 aa, Sinorhizobium meliloti
MEIPMNPMFTSVRVGRYMLPNRLVMAPMTRSRAAFDGTPGELATEYYVQRARLGLIVTEGTQPSDDGQGYLTTPGIYTPAHIAGWRKITSAVHDKGGHIFIQLMHAGRMSHPDNTPHHRQGVAPSAIAPGAGMFTATGMQDIPTPRALTTEEVRRTVAEFSHAARSAIEAGADGIEIHGANAYLVQQFFAPSANTRTDEYGGSIENRARFAIEVATAIAEEVGADRTAIRLSPGTALWGIDEGAEGPDLYRYLVAELDKLGLAYVHILHQSNEPLLADIRKLWRQPLILNRPGRPRGQIGADVASGLADLEAFGQMVLANPDFVARLKADAAMNESDPKTFYGGAAKGYIDYPVLSARTDTSS

SEQ ID NO: 10392 - protein, 370 aa, Sinorhizobium meliloti
MNAPAIIPSPVFTGTSLKGLDFANRLSVAPMTRISASCAGVPGERMVRYYQRFARGGFSLVMSEGIYTDKAYAQTYSGQPGLTDREQADAWRRAVDAVHAAGGSIFAQLMHGGALSQGNPYRSDTIGPSAIRPKGSQMTGYRGDGPYAMPREISEAEIAAAIEGFAGAARLAIEVAGFDGIEIHGANGYLLDQFFTDYTNHRQDRWGGDIVARFGLSLEVLKAVRAAIGPSVPLGLRLSQGKVNDFRHKWAEREQGAARVFEALAESPADFAHVTEFEAWRPAFEGGEISLVSLARRHAPRLFLIANGSLHELARAEQVMESGADMIALGRGALVNPDWPHLTAARSALRPFELSMLAPISDIKDSELAL

SEQ ID NO: 10393 - protein, 678 aa, Sinorhizobium meliloti
MPNDPLLQPYQLKHLTLRNRIIVTAHEPAYPEDGMPKERYRAYTVERARGGVAMTMTAGSAAVSKDSPPVFNNLLAYRDEIVPWIREMTDAVHEEGAVIMIQLTHLGRRTRWDKGDWLPVVAPSHHREAAHRAFPKKIEDWDIDRIIKDFADAAERMKAGGMDGVELEAYGHLIDQFASPLTNELDGPYGGSLDNRMRFCFDVLKAIRARVGDEFILGVRYTADECLPGGTDKAEGLEISKRLKESGLIDYLNIIRGHIDTDPGLTDVIPIQGMANSPHLDFAGEIRAATNFPTFHAAKIPDVATARHAIASGKVDMVGMTRAHMTDPHIVRKIIEKREEDIRPCVGANYCLDRIYQGGAAYCIHNAATGRELTMPHSIAKAHCRRKVVVVGTGPAGLEAARVAGERGHEVIVFEAASDPGGQVRLTAQSPRRREMISIIDWRMSQCEKLGVTFHFNTWAEAEAIQAESPDVVIIATGGLPHTEVLSRGNELVVSAWDIISGDAKPGTNVLIFDDAGDHAALQAAEFLATAGARVEIMTPDRSFAPEVMAMNLVPYMRCLQKLDVTFTVTYRLEAVEKSGNELVAHVGSDYGGISKQRTFDQVVVNHGTIPLDELYFELKPFSSNLGEIAHDQMIAGEPQSVVRNAEGKFQLFRIGDAVAARNTHAAIYDALRLLKDI

SEQ ID NO: 10394 - protein, 387 aa, Glycine max
AAARRRQKGEIEFTQEMASPLLTPYKMGKFNLSHRVVLAPLTRQRSYDNVPQPHAILYYSQRTSNGGLLITEATGVSDTAQGYPQTPGIWTKDHVQAWKPIVDAVHAKGGVFFCQIWHVGRVSDSVYQPNGQAPISSTDKPLTPQIRSNGIDQVQFTPPRRLRTDEIPHIVNDFRLAARNAIEAGFDGVEIHGAHGYLLEQFMKDKVNDRTDEYGGSLENRCRFALEVVEAVVNEIGADRVGIRLSPFAEYSESGDSNPKELGLYMMNALNKYGILYCHMVEPRMKTVGEKTECPHSLVPMRKAFNGTFIAAGGYDRQDGINAVAENRADLVAYGRWFLANPDLPKRFALNAPLNKYHRETFYTSDPVLGYTDYPFLDDEESNAVAS

SEQ ID NO: 10395 - protein, 419 aa, Glycine max
  unsure (1)..(419): unsure at all Xaa locations
RTKATREKAEKEIGKEAKEFYTKMVEQKNQVIPLLTPYRMGNLNLSHRIVLAPLFRARSYNNVAQPHAILYYSQRATKGGLLITEATTISPTSKYHPNAVGIWSREQIEAWKPIVDAVHAKGGIFFCQIVHTGRAYDPDLKPDGQTLISSTNKPFTHNATEPTALRTAEIPDIVNEFRLAARNAIEAGFDGVEIHGAHGFLIDQFLKDQVNDRTDKYGGSLENRCRFALEVVEAVVEEIGADRVGMRLSPFSDFNECSDSNPQALGLYMAKSLSKHGVLYCHMVEPRWDISGETLHTLAPMKKAFNGTFIVAGGYDRKEGNKAVTEDKANLVAYGRLFLANPDLPKRLEVDEPLNKYNRETFYTPDPVVGYTDYPFIXRKCNXGSHELEGWIYSYVLHYLMFKSCLIWVYLYFSLNYIL

SEQ ID NO: 10396 - protein, 394 aa, Glycine max
  unsure (1)..(394): unsure at all Xaa locations
TSSAARRRQKGEIEFTQEMASPLLTPYKMGKFNLSHRVVLAPLTRQRSYDNVPQPHAILYYSQRTSNGGLLITEATGVSDTAQGYPQTPGIWTKDHVQAWKPIVDAVHAKGGVFFCQIWHVGRVSDSVYQPNGQAPISSTDKPLTPQIRSNGIDQVQFTPPRRLRTDEIPHIVNDFRLAARNAIEAGFDGVEIHGAHGYLLEQFMKDKVNDRTDEYGGSLENRCRFALEVVEAXVVNEIGAHRVGIRLSPFAEYSDVGXESNPNLVNXLYMLKALNKNAILYNYLAGQILHFGCGYSXYXQPLLCIRKALNGTIIGXSRHVLQNVIIAVEXKYRAVLVAYCRWFLANPDLPKRFALNAPLNKYHRETFYTSDPXXLGYTDYPFLDDEESNAVAS

SEQ ID NO: 10397 - protein, 388 aa, Glycine max
  unsure (1)..(388): unsure at all Xaa locations
MANTNSDTKEESKKMDERETIPLLTSYKMGNFNLSHRIVLAPLTRSRSYNFVPQPHAALYYSQRTTKGGFLIGEATGVSDTAKDGYPNTPGIWTREQVEAWKPIVSTVHEKGGIFFCQLWHAGKVSNYDEFQPHGEAPISSTNKRPRKEIPKLVNEFVIAAKNAMEAGFDGIELHGANGYLLDQFLKDKVNDEDDEYCGTIENRCRLPLEAVKAVADENGADKAGITLVLLADCVXDDTNNDDPQALGIHMAESLNQLGILYIHLIEPRTMVTQFHKFDTKYLSLEPIRKAFKGTFIVAGGYDRSEGNLAISSSAADLVAYGRLFLANPDLPTRFQLDAQLNEPDATTFSTHDPVLGYTDYPFLQDIXSVEVIRGHKMNRLVLQKPIN

SEQ ID NO: 10398 - protein, 300 aa, Glycine max
  unsure (1)..(300): unsure at all Xaa locations
MATEADAPVIPLLTPYKMGNFNLSHRVVLAPLTRMRSYNNVPQPHAVLYYSQRTSPGGLLISEATGVSDTAQGLVHTPGIWTKEQVEAWKPIVNAVHAKGGVFFCQIWHVGRVSSPVFQPNGQAPISSTDKPLKQNGIEEAQVTPPRRLRTDEIPHIVNDFRVAARNAIKAGFDGVEIHGAHGYLLEQFIKDKVNDRSDGYGGSLENRCRFALEVVDAVVKEIGAEKVGVRLFHLTEQXECGDSEPXXLAPFFANALXKDNILYCHMVEPRMKNALEVVECPHSLMPMRKAFNGTFISAX

SEQ ID NO: 10399 - protein, 317 aa, Glycine max
  unsure (1)..(317): unsure at all Xaa locations
MGKFNLSHRVVLAPLTRQRSYDNVPQPHAILYYSQRTSNGGLLITEATGVSDTAQGYPQTPGIWTKDHVQAWKXHASAHASGNFPXPFAXLPNTNVSNTLPNTTIISMAVQIVGFDGVEIHGAHGYLLEQFMKDKVNDRTDEYGGSLENRCRFALEVVEAVVNEIGADRVGIRLSPFAEYSESGDSNPKELGLYMMNALNKYGILYCHMVEPRMKTVGEKXTECPHSLVPMRKAFNGTFIAAGGYDRQDGINAVAENRADLVAYGRWFLANPDLPKRFALNAPLNKYHRETFYTSDPVLGYTDYPFLDDEESNAVAS

SEQ ID NO: 10400 - protein, 371 aa, Pisum sativum
MGAPIANAIPLITPYKMGNFNLSHRVVMAPLTRMRSYNNVPQPHAILYYAQRASQGGLLIAEATGVSDTAQGYPNTPGIWTKEQVEAWKPIVEAVHAKDSVFFLQIWHVGRVSNSIYQPNGQAPISSTDKAITSNDQQQFTAPRRLRTNEIPNIVNDFKLAARNAIEAGFDGVEIHGAHGYLLDQFMKDKVNDRTDEYGGSLENRCRFTFEVVEAVANEIGADKVGIRLSPFAEYAESGDSNPNALGLYMANALNKYNILYCHMVEPRLIQTFDPVETPHSLEPMRKAFNGTFMVAGGYNRQDGIKAIAENRADLVVYGRWFISNPDLPKRFALDAPLNKYNRETFYSSDPVIGYTDYPFLNDETPVESKA

SEQ ID NO: 10401 - protein, 384 aa, Vigna unguiculata
MVTATATAAATAPSHQAIPLLTPYKMGKFNLSHRVVLAPLSRERSYNNVPQPHAVVYYSQRTSNGGLLIAEATGVSDTAQGYPNTPGIWTKEQVEAWKPIVDAVHAKGGIFFCQIWHVGRVSDSSYQPNGQAPISSTDKPLPPTPRANGLGYIEHTPPRRLTTEELPGIVNDFRIAARNAIEAGFDGVEVHGAHGYLLDQFLKDQANDRTDQYGGSLENRCRLPLEVVEAVVNEVGADRVGIRLSPFADFNDCGDSNPLQLGLYMVNALNKYNILYCHMVEPRMGSVGGPDENLTPMRKVFNGTFIVAGGYDREDGIKAIAEDRADLVAYGRLFLANPDLPKRFALNAPLNQYNRKTFYHEDPDPLVGYIDYPFLDEESNGVAS

SEQ ID NO: 10402 - protein, 237 aa, Oryza sativa (japonica cultivar-group)
MVYSKPRRLRTDEIPQIIDDFRRAARNAIEAGFDGVEIHGAHGYLLEQFMKDSANDRTDEYGGSLENRCRFAVEVIDAVVAEVGAHRVGIRLSPFVDFMDCFDSDPVALGSYMVQQLNKHPGFLYCHMVEPRMAIIEGRRKIAHGLLPFRKQFNGTFIAAGGYDREEGNKVVADGYADLVAYGRLFLANPDLPRRFELDAPLNRYDRSTFYTQDPVVGYTDYPFLEEIDEESRTTYA

SEQ ID NO: 10403 - protein, 86 aa, Daucus carota
  unsure (1)..(86): unsure at all Xaa locations
MKKVGEKAETHHTLVPMRKAFHGTFIVAGGYDREDGNTAVAENCXDLVAYGRQFLANPDLPKRFELNAPLNXYDRNTFYISDPVVG

SEQ ID NO: 10404 - protein, 379 aa, Catharanthus roseus
MAKQVDNGQEEQQQNPQNPLLTPYKLGKFQLSHRIVLAPLTRQRSYGNVPQPHAVLYYSQRTSKGGLLISEAAGVSNTAQGYPMTPGIWTKEQVEAWKPIVDAVHAKGGVFFCQIGHVGRVSNYSYQPNGQAPISSTDKGLTPLYRANGIGYVEHTPPRRLTTDELPGIVNDFRAALNAIEAGFDGVEIHGAHGYLIDQFLKDQVNDSTDEYGGSLENRCRFALEIVEAVSNAIGADRVGIRLSPFAGYMESGDSNPEALGLYMAEALNKYGILYCHMVNPRMKTLGENCEVPHSLLPMRKAFRGTFMAAGGYDREDGIKALAENRADLVVYGRLFLANPDLPKRFELNAPLNKYNRETFYIPDPVLGYTDYPFLEATE

SEQ ID NO: 10405 - protein, 376 aa, Lycopersicon esculentum
MENKVVEEKQVDKIPLMSPCKMGKFELCHRVVLAPLTRQRSYGYIPQPHAILHYSQRSTNGGLLIGEATVISETGIGYKDVPGIWTKEQVEAWKPIVDAVHAKGGIFFCQIWHVGRVSNKDFQPNGEDPISCTDRGLTPQIRSNGIDIAHFTRPRRLTTDEIPQIVNEFRVAARNAIEAGFDGVEIHGAHGYLIDQFMKDQVNDRSDKYGGSLENRCRFALEIVEAVANEIGSDRVGIRISPFAHYNEAGDTNPTALGLYMVESLNKYDLAYCHVVEPRMKTAWEKIECTESLVPMRKAYKGTFIVAGGYDREDGNRALIEDRADLVAYGRLFISNPDLPKRFELNAPLNKYNRDTFYTSDPIVGYTDYPFLETMT

SEQ ID NO: 10406 - protein, 376 aa, Lycopersicon esculentum
MENKVVEEKQVDKIPLMSPCKMGKFELCHRVVLAPLTRQRSYGYIPQPHAILHYSQRSTNGGLLIGEATVISETGIGYKDVPGIWTKEQVEAWKPIVDAVHAKGGIFFCQIWHVGRVSNKDFQPNGEDPISCTDRGLTPQIMSNGIDIAHFTRPRRLTTDEIPQIVNEFRVAARNAIEAGFDGVEIHGAHGYLIDQFMKDQVNDRSDKYGGSLENRCRFALEIVEAVANEIGSDRVGIRISPFAHYNEAGDTNPTALGLYMVESLNKYDLAYCHVVEPRMKTAWEKIECTESLVPMRKAYKGTFIVAGGYDREDGNRALIEDRADLVAYGRLFISNPDLPKRFELNAPLNKYNRDTFYTSDPIVGYTDYPFLETMT

SEQ ID NO: 10407 - protein, 383 aa, Oryza sativa
REERRGEGAGQGRGGKMSSTAPLLTPYKMGRFDLSHRVVLAPLTRQRSYGNVPQPHAILYYQQRTTKGGLLIAEATGISDTAQGYKDTPGIWTKEQVEAWKPIVDGVHAKGGIFFCQIWHVGRVSNNTFQPNGQAPISSTNKSLKPAVRANGIDVATFSTPRRLETDEIPFVVNDYRVAARNAIEAGFDGVEIHGAHGYLIDQFLKDQVNDRSDKYGGSLENRCRFALEVVQAVTDEIGADKVGIRLSPFASYSEAADSNPEALGLYMANALNKFGILYCHMVEPRMVKLGEKFETPHSLRPIRDAFKGTFIAAGGYNKEDGNKAVSTGYTDLVAYGRLFLSNPDLPERFEIDAPLNKYNRETFYISDPVIGYTDYPFLPSDV

SEQ ID NO: 10408 - protein, 401 aa, Triticum aestivum
  unsure (1)..(401): unsure at all Xaa locations
STVESSTPGRHSFHQHKGPPPRTGGGRAEGGKEQTKEDEPLLTPYKMGRFDLSHRVVLAPLTRERSFGNVPQPHAILYYQQRTTKGGLLIAEATGVSDTAQGYKDTPGIWTKEQVEAWKPIVNGVHAKGGIFFCQIWHVGRVXNHTFQPNGQAPISSTDKPIKPATRADGIGLAKISTPRRLQTDEIPLVIEDFRVAARNAIEAGFDGVEIHGAHGYLIDQFLKDQVNDRTDKYGGSLENRCRFALEVVQAVADEIGADKVGIRLSPFASYSDASDSNPEALGLYMAQALNKLGILYCHMVEPRMVNIGEKLETPHSLRAMRDAFKGTFIVAGGYGRDDGDKAIADGYADLVAYGRLFLSNPDLPRRFEIDGPLNKYNRDTFYLSDPVIGYTDYPFLPSDI

SEQ ID NO: 10409 - protein, 391 aa, Triticum aestivum
  unsure (1)..(391): unsure at all Xaa locations
GRRGRKRSRERKGPKKRGREDEQRSXHNPXLLAHYKMGKFDLSHRVVLAPLTRERSFGNVPQPHAILYYQQRATKGGLLIAEATGVSDTAQGYKDTPGIWTKKQVEAWKPIVDGVHAKGGIFFCQIWHVGRVSNHTFQPNGQAPISSTDKPIKPATRADGIGLAKVSTPRRLTTDEIPLVIDDFRVAARNAIEAGFDGVEIHGAHGYLIDQFLKDQVNDRTDKYGGSLENRCRFALEVVQAVADEIGADKVGIRLSPFASYSDASDSNPEALGLYMAQALNKLGILYCHMVEPRMVNIGEKLETPHSLRAMRDAFKGTFIVAGGYGRDDGDKAIADGYADLVAYGRLFLSNPDLPRRFEIDGPLNKYNRDTFYLSDPVIGYTDYPFLPSDI

SEQ ID NO: 10410 - protein, 387 aa, Triticum aestivum
  unsure (1)..(387): unsure at all Xaa locations
GNKRSLLKQEIREEDEQAGWYXGSTVPLLTPYKMGAFDLSHRVVLAPLTRTRSYGNVPQPHAILYYQQRTTKGGLLIAEATGVSDTAQGYKDTPGIWTKEQVEAWKPIVDGVHAKGGIFFCQIWHVGRVSNHTYQPNGQAPISSTDKPLKPMVIDKHIVADFATPRPLETDEIPMVINDFRVAARNAIEAGFDGVEIHGAHGYLIDQFLKDQVNDRTDKYGGSLENRCRFALEVVQAVVDEVGADKVGIRLSPFANYPVPSDSNPEALGLYMAHALNKFGILYCHMVEPRMVNIGEKFETPHSLRPIRDAFKGTFIVAGGYDRDDGNKAIADDYADLVAYGRLFLSNPDLPRRFEIGAPLNKYIRDTFYLSDPVIGYTDYPFLPSDV

SEQ ID NO: 10411 - protein, 419 aa, Triticum aestivum
  unsure (1)..(419): unsure at all Xaa locations
QNVEDLNREKERNQRREEGKMSNAASTTPLLAHYKMGKFDLSHRVVLAPLTRERSFGNVPQPHAILYYQQRATKGGLLIAEATGVSDTAQGYKDTPGIWTKKQVEAWKPIVDGVHAKGGIFFCQIWHVGRVSNHTFQPNGQAPISSTDKPIKPATRADGIGLAKVSTPRRLTTDEIPLVIDDFRVAARNAIEAGFDGVEMHGVHGYXLIDQVLKDQVNDRTDXKYGGSLENRCRFALEVVQAVVDEVGADKVGIRLSPFANYSEASDSNPEALGLYMAHALNKFGILYCHMVEPRMVNIGEKVXNXPHSLRPIRDAFKGTFIVAGGYDRDDGNKAIADDYADLVAYGRLFLSNPDLPRRFEIGAPLNKYIRDTFYLSDPXXIGYTDYPFLPSDVXMGLSGMNPHPIRSSTSCISTMLKE

SEQ ID NO: 10412 - protein, 448 aa, Novosphingobium aromaticivorans
MPGPASTSLRTPGRCRRDARTRVPGPAQRFLSAGQGNASGVAAKSGRVHLNSSWGPLNPVAKRNRALSSRGVAEVIKEPPSMHEPLFQPVRLGAIEAPNRIIMAPLTRGRANPQAVPTPIMGEYYRQRASAGLIISEATAISPEGAGWPSAPGIWTDEQTEAWKPIVDEVHAAGGRIVLQLWHMGRVVHPYFLGGEPPVSASATRAPGHAHTPEGTKDYETARPLRLDEIPRLIDDYGRAAENARKAGFDGVQLHAANGYLIDQFLRDGTNLRDDDYGGSPENRVRLMREVMERLISIWGKERVSIRLSPNGDSQGVDDSNPEATFGEAARVLEELGVGFVELRQPGPEGTFGNTDVPKQDGLIRSIYTGPLVLNSDYTPEEAAADVASGRADAISFGRPFISNPDLVERIRVGAHLNPNKGVPATWYFPGEAGYTDYPTLAEETAIA

SEQ ID NO: 10413 - protein, 467 aa, Novosphingobium aromaticivorans
MRRRMGHHADDVFRPVRTHRRPLVLPPPPAALLVRHRPQQAAGGRPQDALAGRAALSRQLPRPVPELEDLLGTPGTAARRPGRTARPAREIHRDHAPRRPPAPPARAELTDMADLFSPVRLGEIELANRIVMAPMTRDRAGPHDEPTDLMVEYYRQRASAGLIVTEGTQPSPNGKGYWRTPGIHSPEQVEGWRRVAEAVHGEGGRIAVQLMHVGRASVRANKAPDAETVAPSAIPCPDPIPGPDGVPVPTEMPRELAAHEIPGVIAEYVAAARNARAAGIDGVELHCASGYLPMQFLSSNSNQRGDAYGGSAENRVRFVVETLSALAAAISPGRVGFRICPGVKFNGMDDADPAETYATLLRAVDHMGLAYCHLIHIPNQGFDSLDLVRANWSGPVIENCGLTRERAEKVLAEGKAEAVSFGYAFIGNPDLVERLRTGAPLAKADRDTFYTGHGDDARGYTDYPRAG

SEQ ID NO: 10414 - protein, 382 aa, Schizosaccharomyces pombe
MNDRGELFKPIKVGNMLLQHRIVHAPMTRLRATDYGKITGLMVEYYSQRSMIPGTLLIADATFVGEKSGGFPNNPRCFTKEQAESWIPLVEAVHKNKSFLFIQFWPLPGDLKDEYRNDLEKMQKITYSDCPQDPGGLPAGIHSFDAVQGVEVYKKKYMSKRDIQEHIQDFVNAADLAVNIAKADGVEIHQVNGFLLDRFVLGGFGDQCDPEYRGSIENRCRFPLEVLEAVTRKIGQERVGYRISPFSGWMQKIDFMEVNIYLMSEIAKRFPKLAYIHAIEPRKYWSGHKLVSSEQNTSFLQKYWKGPFITAGGYDPETAVQAANERGVLVAFGRNFIANPDLVFRIKHHIPLNKWDRSSFYLPKTEKGYTDYPFSKEFLQSK

SEQ ID NO: 10415 - protein, 392 aa, Schizosaccharomyces pombe
MAVQKLYESQSKLFQPIKVGNMQLQHRMVHAPATRLRCLDNGLVMTDLVKEYYKQRSSIPGTLLITESLFSGAKSGGFSNIPCLYNDEHVEAWKPIVQAIHDNDCFVFIQFWNLPGELKVDYLEDQERLEKVTQGECPMDPTGLPAALGSAYSICGEELYVDKFMTKQDIQEHITTYTEAAKRAVFGCGADGVEVHQVNGFLLDKFVLNGYGDKCDPEYCGSLENRARFCLELLESVVNAIGQERVGYRISPFSDIWKDKDSFEAHVFMIKKIKERFPNLAYLHAIEPRQYWNGHVHITQEKNTLIYKNLWGDPFITAGGHDRDSAIQMAEQENTLVAFGRYFLSNPDLPFRLKYNLPLNKWDRATFYTKMSPKGYIDYPFSKEFLDTKKVE

SEQ ID NO: 10416 - protein, 402 aa, Pichia angusta
MTPSTSLASSNLFKPIKVGKVELKNRLVFAPTTRYRASKDFVPTDSMLKYYEQRAENNGGLLTAEATYVDFNFGLYPFTPMIKTPAQVAAWAKIIEAVHKQGSYFSIQLWHLGRAADPKFNKEKGVPFVAPSAIYLDQDSEKAAREAGNELRELTIPEIEAIVKEFAAAAKRAIHEAKADFIELHSAHGYLLDQFIQPNINKRTDKYGGSIENRARLVLEVVDACIEAVGAEHVGIRLSPYAKFQGSEGVDSEINPIASFGYILSELEKRARDGNRLAYVSVVEPRVSGNVDSNDQRKFDTSWIREIWKGILFRAGGYLKENEQSLEHDVNQDDRTLIGVSRYYTSNPDLVERLKKGLSLTPYDRSRFYNHSSNDGYLTWPKYGEDEEKYKAVLDVEPKALA

SEQ ID NO: 10417 - protein, 402 aa, Pichia angusta
MSKTPTLANTNLFKPIKVGKVELKNRLVFAPTTRYRASKDFVPTDSMLKYYEQRAENNGGLLVTEATYPDYSFGLYPDTPMIKTPAQVAGWKKVIEAVHNKGSFVSIQLWHLGRTASAEFNKSKGLPLVGASPIYMDEDSEKAAKEAGNELRALTIPEIENIVTEYAAAAKRAIHEAKADFIELHGAHGYLLDQFNQPGSNKRTDKYGGSIENRARLILEAVDACIEAVGAEHVAIRLSPYAAVQGIKGVDSEIHPISYFGYVLSELERRAQEGKRLAYISVVEPRVNGIYDSKDKREFNTSWISEIWKGVLLRSGAYLNENYKFLQHDVDENDRTLIGVSRYYTSNPDLADRLKNGHELTPYDRSKFYKHSSNDGYLTWTRYGEKEPQYKDLVDVAPEPLA

SEQ ID NO: 10418 - protein, 401 aa, Pichia angusta
MSQPSLTDTNLFKPIKVGNVELKHGFFSAPTTRFRASDDFVPTDSMLSYYEQRAENNGGLIVAEATFPDYSFGLYPNAPMIKTPEQVAAWKKIVDAVHKQGSFFSIQLWHLGRVAVPQLNKKYNVPLVGPSKLYVDESSEKAAKEAGNELHELTIPEIEAIVKEFAAGAKRVVDEAKADFVEILAGGGYLLDQFNHSNINKRTDKYGGSIENRARLILEVVDACIEAVGAEHVGIKLSPYAAVNGLQGVDTEIHPISRYGYILSELERRGKEGKRIAYITMIEPRVNGTEDSKDTRAFDSSWVGEIWKSTLLRAGAYLNQFSNYLIQDVNKDDRTLIGAARYFTSNPDLIERLRKGQELTPYDRSKFYTPATNDGYITWTKYGEDPEKYKGLVAVKPQPLS

SEQ ID NO: 10419 - protein, 400 aa, Saccharomyces cerevisiae
MPFVKDFKPQALGDTNLFKPIKIGNNELLHRAVIPPLTRMRAQHPGNIPNRDWAVEYYAQRAQRPGTLIITEGTFPSPQSGGYDNAPGIWSEEQIKEWTKIFKAIHENKSFAWVQLWVLGWAAFPDTLARDGLRYDSASDNVYMNAEQEEKAKKANNPQHSITKDEIKQYVKEYVQAAKNSIAAGADGVEIHSANGYLLNQFLDPHSNNRTDEYGGSIENRARFTLEVVDAVVDAIGPEKVGLRLSPYGVFNSMSGGAETGIVAQYAYVLGELERRAKAGKRLAFVHLVEPRVTNPFLTEGEGEYNGGSNKFAYSIWKGPIIRAGNFALHPEVVREEVKDPRTLIGYGRFFISNPDLVDRLEKGLPLNKYDRDTFYKMSAEGYIDYPTYEEALKLGWDKN

SEQ ID NO: 10420 - protein, 399 aa, Saccharomyces cerevisiae
SFVKDFKPQALGDTNLFKPIKIGNNELLHRAVIPPLTRMRALHPGNIPNRDWAVEYYTQRAQRPGTMIITEGAFISPQAGGYDNAPGVWSEEQMVEWTKIFNAIHEKKSFVWVQLWVLGWAAFPDNLARDGLRYDSASDNVFMDAEQEAKAKKANNPQHSLTKDEIKQYIKEYVQAAKNSIAAGADGVEINSAHGYLLNQFLDPHSNTRTDEYGGSIENRARFTLEVVDALVEAIGHEKVGLRLSPYGVFNSMSGGAETGIVAQYAYVAGELEKRAKAGKRLAFVHLVEPRVTNPFLTEGEGEYEGGSNDFVYSIWKGPVIRAGNFALHPEVVREEVKDKRTLIGYGRFFISNPDLVDRLEKGLPLNKYDRDTFYQMSAHGYIDYPTYEEALKLGWDKS

SEQ ID NO: 10421 - protein, 400 aa, Saccharomyces cerevisiae
MSFVKDFKPQALGDTNLFKPIKIGNNELLHRAVIPPLTRMRALHPGNIPNRDWAVEYYTQRAQRPGTMIITEGAFISPQAGGYDNAPGVWSEEQMVEWTKIFNAIHEKKSFVWVQLWVLGWAAFPDNLARDGLRYDSASDNVFMDAEQEAKAKKANNPQHSLTKDEIKQYIKEYVQAAKNSIAAGADGVEIHSANGYLLNQFLDPHSNTRTDEYGGSIENRARFTLEVVDALVEAIGHEKVGLRLSPYGVFNSMSGGAETGIVAQYAYVAGELEKRAKAGKRLAFVHLVEPRVTNPFLTEGEGEYEGGSNDFVYSIWKGPVIRAGNFALHPEVVREEVKDKRTLIGYGRFFISNPDLVDRLEKGLPLNKYDRDTFYQMSAHGYIDYPTYEEALKLGWDKK

SEQ ID NO: 10422 - protein, 400 aa, Saccharomyces cerevisiae
MPFVKGFEPISLRDTNLFEPIKIGNTQLAHRAVMPPLTRMRATHPGNIPNKEWAAVYYGQRAQRPGTMIITEGTFISPQAGGYDNAPGIWSDEQVAEWKNIFLAIHDCQSFAWVQLWSLGWASFPDVLARDGLRYDCASDRVYMNATLQEKAKDANNLEHSLTKDDIKQYIKDYIHAAKNSIAAGADGVEIHSANGYLLNQFLDPHSNKRTDEYGGTIENRARFTLEVVDALIETIGPERVGLRLSPYGTFNSMSGGAEPGIIAQYSYVLGELEKRAKAGKRLAFVHLVEPRVTDPSLVEGEGEYSEGTNDFAYSIWKGPIIRAGNYALHPEVVREQVKDPRTLIGYGRFFISNPDLVYRLEEGLPLNKYDRSTFYTMSAEGYTDYPTYEEAVDLGWNKN

SEQ ID NO: 10423 - protein, 399 aa, Saccharomyces cerevisiae
SFVKDFKPQALGDTNLFKPIKIGNNELLHRAVIPPLTRMRALHPGNIPNRDWAVEYYTQRAQRPGTMIITEGAFISPQAGGYDNAPGVWSEEQMVEWTKIFNAIHEKKSFVWVNLWVLGWAAFPDNLARDGLRYDSASDNVFMDAEQEAKAKKANNPQHSLTKDEIKQYIKEYVQAAKNSIAAGADGVEIHSANGYLLNQFLDPHSNTRTDEYGGSIENRARFTLEVVDALVEAIGHEKVGLRLSPYGVFNSMSGGAETGIVAQYAYVAGELEKRAKAGKRLAFVHLVEPRVTNPFLTEGEGEYEGGSNDFVYSIWKGPVIRAGNFALHPEVVREEVKDKRTLIGYGRFFISNPDLVDRLEKGLPLNKYDRDTFYQMSAHGYIDYPTYEEALKLGWDKK

SEQ ID NO: 10424 - protein, 399 aa, Saccharomyces cerevisiae
SFVKDFKPQALGDTNLFKPIKIGNNELLHRAVIPPLTRMRALHPGNIPNRDWAVEYYTQRAQRPGTMIITEGAFISPQAGGYDNAPGVWSEEQMVEWTKIFNAIHEKKSFVWVQLWVLGWAAFPDNLARDGLRYDSASDNVFMDAEQEAKAKKANNPQHSLTKDEIKQYIKEYVQAAKNSIAAGADGVEINSANGYLLNQFLDPHSNTRTDEYGGSIENRARFTLEVVDALVEAIGHEKVGLRLSPYGVFNSMSGGAETGIVAQYAYVAGELEKRAKAGKRLAFVHLVEPRVTNPFLTEGEGEYEGGSNDFVYSIWKGPVIRAGNFALHPEVVREEVKDKRTLIGYGRFFISNPDLVDRLEKGLPLNKYDRDTFYQMSAHGYIDYPTYEEALKLGWDKS

SEQ ID NO: 10425 - protein, 181 aa, Saccharomyces cerevisiae
MPFVKGFEPISLRDTNLFEPIKIGNTQLAHRAVMPPLTRMRATHPGNIPNKEWAAVYYGQRAQRPGTMIITEGTFISPQAGGYDNAPGIWSDEQVAEWKNIFLAIHDCQSFAWVQLWSLGWASFPDVLARDGLRYDCASDRVYMNATLQEKAKDANNLEHSLTKDDIKQYIKDYIHAAKNS

SEQ ID NO: 10426 - protein, 290 aa, Desulfitobacterium hafniense
MHSPAQIDGWRQVTDAVHAAGGRIFLQLWHVGRMSHASFHDGEPPVAPSALSPDAQVWIVRDGVGAMVDCPLPRALRRDEIAGVVEQFRRGAANAIAAGFDGVEIHGANGYLIDQFLRTTSNVREDEYGGSIANRVRFLDEVTRAVAAEVGAQRTGIRLAPYITARNMNCPQIIPAILEAARRLQAIGVAYLHLSEADWDDAPHVPDSFRHELRSIYSGALIVAGRYDRERGERILSQGLADLVAFGRPFIANPDLPQRYAHDWPLAAFDPATLFGGDERGYTTYPAYAV

SEQ ID NO: 10427 - protein, 297 aa, Desulfitobacterium hafniense
MICCSVMNGHSFLEVPTMSNQDPLFSPIRIGKMELKNRIVLPAMHLNYCPDGEVTERLIEFYRVRARGGVGLVIVGGCGIDRVGNTLGMIQLDEDRYIPGLQKLVEAVHQEGAKVMTQLYQAGNYASSLLTGNQPVAPSPLPSKLTKEIPHELTVEEIKELVQTFAQAAVRTQKAGFDGVEILAGTGYLISEFLSPATNKRTDEYGGDLPNRMRFALEIMAAIRQGVGPDFPVVVRIAGHDFIPGGHTNKEARTFAKALAAAGVDAINVTGGWHETLVPQITHECSPVRLPLFSPGN

SEQ ID NO: 10428 - protein, 547 aa, Thermoplasma volcanium
MVNPGDKGRIGNVEIKNRIVMAPMISNIANSDGSPSEPYISYMRERARGGIGLIITEYTYVDPESGKGSRNQLGIYDDIFLPKFSRLAEAVHDYGSKIFVQLVHAGAKALPSSSYKIAPSKTSFDKNAREMDSSDIERVIRNYERAASIARRAGFDGIEIHGAHGYLVDEFISPYWNRRTDKYGGSLEGRIKFPQEVIDAVKSEVDIPVGIRLSLYEDEVGGYGPDYGIKVAKSLVNIDYVHFSAGNNDPPGSSAPFYSNHTHILSKFPGGSNKPTILVGSVTTAEDVRNVLKVADFVAVGRAVLADPYFARKVIDNYGHIRPCIRCNQACRNLAYGEVRCTVNPYFAFPRQLRKLSGDVVIVGGGVKGLEAARFAALNGLSVTLYEQDDKIGGQLNTIYDEAKRKEFNRLIEYYKEVLDRLGVEIITSEKYKGKGIYCLPDKTYPDLQEKPEIFIDSNVYMYHDIALKYSSTSKVFVTYRSLSSLDRARKAAFLKIAESRGIKFIEKADNYDVSIYEEKQYDIGEAMKSGINEVEKYIDDRINEFL

SEQ ID NO: 10429 - protein, 444 aa, Aspergillus parasiticus
MARAGQAVDPSPLGQPLEFHFARRSAPNRFLKAGMSERMCSWTEENPSARGIPSRELIETYRTWGRGNIGAIVTGNVMIDPNHIEAEGNPTIPPNALFSGERFDQFANLAAAARANGSLILAQISHPGRQTPSHRQPEPISASDVPLDTENMGNTFAVPRAATENEIKNIITGFAHAAEFLDRAGYDGVELHAAHGYLLNQFLSRATNLRTDKYGGTLTNRMRLILEIRAAITEKVRPGFIVGIKINSVEFQPNGIVPDEACELCCALEEHRFDFVELSGGKYKNLEEDDNAKHIISKRHEAFFLDVAQKVVSSLTKMKSYLTGGFRSTAGMVDGLQTVDGIGLARPFCQEPYLCHDILRGKIPGAIIPVMDQLNYQLTVAAACIQMRQIGNKVQPVDLSSQDAVDAITAAAEGWLKRKAIDRSEEAFKPPLLSGDAAPLSVEA

SEQ ID NO: 10430 - protein, 444 aa, Aspergillus fumigatus
MASRYHSAPVDVAPLGKPLQFKISKRTAPNRFYKAAMTERMSSWSPTDLKARGVPSRELINLYKRWGEGGYGLISTGNIMIAYDQLEAPGNPIIDLENPFHGERFDAFRELASQAKRHGSLIIGQVSHPGRQTEERLQPNPVSASDVQLDKEIMGMQFAKPHAASKDEITDFIRRWTHAAVYLHKAGYDGIQLHGAHGYLLAQFLSQTTNRRTDEYGGSLENRARLIVEIAQSIRKELPASTGFILGIKINSVEFQAGGFTADEARELCQILEENEFDFVELSGGTYEFIAFSHKRDSTKQRESFFLEFASLITPALSKTKSYVTGGLRTASGMVGALETVDGVGLARPACQEIRLPRDILDGKVTAAINPKIDQQDFGVTSVAAGTQMKQVGKDEQPIDLSDEKNVEMFMKHLSGWSQRMREDAATMNLYGYVDLPKGEAYRG

SEQ ID NO: 10431 - protein, 379 aa, Neurospora crassa
MAATAAESRLFQPLKLTPKITLGHRLAMAPLTRFRSDDEHVPIVPLMTTYYSQRASVPGTLLVTEATFISPAAGGYDNVPGIYNAAQIAAWKKITDAVHAKGSFIFCQLWSLGRAANPEVLAKEGGLKLKSSSAVPMEEGAPVPEEMTVAEIKERVAEYAAAAKNAVEAGFDGVEIHGANGYLIDQFLQDTCNQRTDEYGGSIENRSRFAHEVVKAVVEAVGAEKTGIRLSPYSTFQGMKMKKDLIPQFEDVIRKINGFGLAYLHLTQSRVAGNMDVQPEEDEENLAFAAKLWDGPLLIAGGLTPETAKHLVDREFPEKDVVATFGRHFISTPDLPFRIKEGIELNPYDRDTFYKAKSPDGYIDQPFSKEFEKVYGAQA

SEQ ID NO: 10432 - protein, 407 aa, Candida albicans
MTIESTNSFVVPSDTKLIDVTPLGSTKLFQPIKVGNNVLPQRIAYVPTTRFRASKDHIPSDLQLNYYNARSQYPGTLIITEATFASERGGIDLHVPGIYNDAQAKSWKKINEAIHGNGSFSSVQLWYLGRVANAKDLKDSGLPLIAPSAVYWDENSEKLAKEAGNELRALTEEEIDHIVEVEYPNAAKHALEAGFDYVEIHGAHGYLLDQFLNLASNKRTDKYGCGSIENRARLLLRVVDKLIEVVGANRLALRLSPWASFQGMEIEGEEIHSYILQQLQQRADNGQQLAYISLVEPRVTGIYDVSLKDQQGRSNEFAYKIWKGNFIRAGNYTYDAPEFKTLINDLKNDRSIIGFSRFFTSNPDLVEKLKLGKPLNYYNREEFYKYYNYGYNSYDESEKQVIGKPLA

SEQ ID NO: 10433 - protein, 365 aa, Enterobacter cloacae
MSAEKLFTPLKVGAVTAPNRVFMAPLTRLRSIEPGDIPTPLMGEYYRQRASAGLIISEATQISAQAKGYAGAPGLHSPEQIAAWKKITAGVHAEDGRIAVQLWHTGRISHSSIQPGGQAPVSASALNANTRTSLRDENGNAIRVDTTTPRALELDEIPGIVNDFRQAVANAREAGFDLVELHSAHGYLLHQFLSPSSNQRTDQYGGSVENRARLVLEVVDAVCNEWSADRIGIRVSPIGTFQNVDNGPNEEADALYLIEELAKRGIAYLHMSETDLAGGKPYSEAFRQKVRERFHGVIIGAGAYTAEKAEDLIGKGLIDAVAFGRDYIANPDLVARLQKKAELNPQRPESFYGGGAEGYTDYPSL

SEQ ID NO: 10434 - protein, 364 aa, Enterobacter cloacae
SAEKLFTPLKVGAVTAPNRVFMAPLTRLRSIEPGDIPTPLMGEYYRQRASAGLIISEATQISAQAKGYAGAPGLHSPEQIAAWKKITAGVHAEDGRIAVQLWHTGRISHSSIQPGGQAPVSASALNANTRTSLRDENGNAIRVDTTTPRALELDEIPGIVNDFRQAVANAREAGFDLVELHSAHGYLLHQFLSPSSNQRTDQYGGSVENRARLVLEVVDAVCNEWSADRIGIRVSPIGTFQNVDNGPNEEADALYLIEELAKRGIAYLHMSETDLAGGKPYSEAFRQKVRERFHGVIIGAGAYTAEKAEDLIGKGLIDAVAFGRDYIANPDLVARLQKKAELNPQRPESFYGGGAEGYTDYPSL

SEQ ID NO: 10435 - protein, 379 aa, Trypanosoma cruzi
MATFPELLRPLKLGRYTLRNRIIMAPLTRCQATEDDHVPRTESMLKYYEDRASAGLIIAEATMVQPNYTGFLTEPGIYSDAQIEEWRKIVDAVHKKGGLIFLQLIHAGRAGIPEKILQQSKSDQDPLAGRLLAASAIPIKDHRIPAYFAASGEKETYGVPEELTDDEVRDGIIPLFVEGAKNAIFKAGFDGVEIHGANGYLLDAFFRESSNKRQSGPYAGTTIDTRCQLIYDVTKSVCDAVGSDRVGLRISPLNGVHGMIDSNPEALTKHLCKKIEPLSLAYLHYLRGDMVNQQIGDVVAWVRGSYSGVKISNLRYDFEEADQQIREGKVDAVAFGAKFIANPDLVERAQQNWPLNEPRPETYYTRTAVGYNDYPTYNK

SEQ ID NO: 10436 - protein, 379 aa, Trypanosoma cruzi
MATFPELLRPLKLGRYTLRNRIIMAPLTRCQATEDCHVPRTESMLKYYEDRASAGLIIAEATMVQPNYTGFLTEPGIYSDAQIEEWRKIVDAVHKKGGLIFLQLIHAGRAGIPEKILQQSKSDQDPLAGRLLAPSAIPIKDHRIPAYFAASGEKETYGVPEELTDDEVRDGIIPLFVEGAKNAIFKAGFDGVEIHGANGYLLDAFFRESSNKRQSGPYAGTTIDTRCQLIYDVTKSVCDAVGSDRVGLRISPLNGVHGMIDSNPEALTKHLCKKIEPLSLAYLHYLRGDMVNQQIGDVVAWVRGSYSGVKISNLRYDFEEADQQIREGKVDAVAFGAKFIANPDLVERAQHNWPLNEPRPETYYTRTAVGYNDYPTYNK

SEQ ID NO: 10437 - protein, 453 aa, Caenorhabditis elegans
MVRRFPTAAPESSILGEHLKFPSGKIAQNRFLKAALTEMLSIFDPSTPGANGVPTQEIINVYDKWGNGQFGVILTGNVQVSPVHLEAPGNAMIFKEGETPARREAYKKWANVTKQDGALAVVQLSHGGRQTPITVNKTPFSASDVQLDKEVRFIGFGKPVPLTPEQIKTEVIERFVYAAKYAYETGFDGVQLHGAHGYLLAQFTSPTTNKRTDHYGGSVSNRQRIVLEIFDAIRKEIPASTGFLIGLKTNSVEFQSEGTTVDDAIEMCRAYENIGFDFVELSGGTYEQLAFQHLKESTKRREAFFLEFAEKIRPVFKNTVVYLTGGFRTVNAMVEAIKSGATQGIGLGRPITAEPDLPKKILQKLAPSAVFDAIDQSEFVLSLLASNTQIEQMGRNSLKEANNDVTYGLSDFSDEDTVKRFGKAVEEFAELLKIQASRGVAIPNVITFEGVKA

SEQ ID NO: 10438 - protein, 451 aa, Caenorhabditis elegans
MSLRRFPHAEIVSPDVLGEHLKFRNGRETNNRFLKSALTEIQSNYYPNEPKRHGLPTDTILNIYDKWGNGNFGMILTSNVLVDPTNLEAAGNAIIFKEGDCHERRALFTYWAKLMKQDGALAVIQLSHAGRQTPEFVNPTPWSASDVQLVSATRMTTYGKPKPLSIEQIKTEVVDRFVYAAKFAYECGFDGIEIHGANGYLLSQFTSPTTNKRTDKYGGSLENRQRIVIEVYDAIRAEIPASTGFLVGIKTNSVEFQSEGLTLEDAKIMCQVYEDKGVDFVELTGGTFEKLNWTWDRESTKKREAFFAEFAEQIRPVFNKTVVYLTGGFRTVSAMINAISCNATQGIGLGRPITAEPDLPKKILEGKAISAVQDSFNPNDIATTVMASGTQMDQMGRTNMEKAGGNIMHLITDFSDEHTVQRFSEALGLHVKQAALDISEGKIPKAIIAFN

SEQ ID NO: 10439 - protein, 457 aa, Caenorhabditis elegans
MAASRFCDNLTVSSKILGEQLNFRNGKTAQNRFLKAALTERVSTYDPENPKKHGLPTNFILNLYDKWGHGKFGTILTGNVLVDPTNLESAGNAIIFKEGDGEERRALFTQWAKNMKQDGALAVVQLSHGGRQTPITVEPNPWSASDVKLSGERRFTAFGQPVPLSTEQIKTQIIDRFVYAAKFAYETGFDGVELHGAHGYLLAQFTSPTTNKRTDQYGGSIENRQRIILEIYDAIRAEIPESTGFMVGIKTNSVEFQEQGTTVDDAKVMCQVYEDKGFDFVELSGGTYEKLAFHHMRDSTRNREAFFLEFAEKIRPVFKKTVVYLTGGFRTVKAMVEAIENGATQGIGLGRPITAEPDLPKKIIEGLVASSIKNALDENDFGITNLASNTQMQQMGRTTYQQTNQTPTYGISDFSNEETVNRYKEALKDYTVFMKSMASQNKPIHGVLVFEGIKQEA

SEQ ID NO: 10440 - protein, 451 aa, Caenorhabditis elegans
MSLRRFPHAEIVSPDVLGEHLKFRNGRETNNRFLKAALTEIQSSYYPDEPKRHGLPTDAILNIYDKWGNGSFGMILTSNVLVDPTNLEAAGNAIIFKEGDCHERRALFTYWAKLMKQDGALAVMQISHAGRQTPVFVNPTPWSASDVQLVSAARFTTYGKPKPLSTEQVETEVVDRFVYAAKFAYECGFDGIQLHGAHGYLLSQFTSPTTNKRVDKYGGSLENRQRIVIEIYDAIRAEIPASTGFLIGIKTNSVEFQSEGLTLEDAKTMCQVYESKGFDFVELSGGTYEQLNWTWERESTKKREAFFVEFAEQIRPVFNKTVVYLTGGFRTVSAMINAISCNATQGIGLGRPITAEPDLPKKILKGRVISAVQDSFNPNDIATTALASGTQMDQMGRTSLEKASGNIMHLITDFSDGLTVQKFCEALGHHVEQAALDISEGKIPKAIIAFN

SEQ ID NO: 10441 - protein, 449 aa, Caenorhabditis elegans
MKRFPHAATVSSKVLGGKLNFPNGITAQNRFMKAAMTERLATYSLDDFKNHGLPTEQILNIYDKWGHGQFGMIITGNVCVDPINLEAAGNAIIFKEGESSKRRNLFSQWAQKIKQDGSLAIMQLSHAGRQASVFVNPTPYGVSDIELKTDPPGSMYGKPIALTTDQIKTEVVDRFVYAAKFAYECGFDGVQLHGAHGYLLTQFTSPTTNNRNDKYGGSIENRNRVIIEIYDEIRKEIPETSGFLIGIKTNSKEFQDKGTTVEDAKQMCIEYEKRGFDFVELTGGTAEKFVFAHQRESTVIREAFFVEFAETIRPVFKNTVVYLTGGFRTTGAMVDAITRNTTQGIGLGRPATAEPDLPKKLLNGDVPSAVKDEFNPNDMIKQIMASGSQIEQMARNSVEGAGGNVMDQITDYSDEKMVALFTEKAAQLFVDAAKDALAGKIPKNIVIMN

SEQ ID NO: 10442 - protein, 472 aa, Caenorhabditis elegans
MSPQRFPTSTTSASSTILGDRLKFRNGPEAQNRFLKAALTEIQSTYAPNEPKKHGLPTDTILNIYDKWGNGKYGVILTSNVLVDPTNLESAGNAIIFKEGESHERRALYTYWAQLMKQDGALAVMQLSHAGRQTPELVNPSPWSASDVQLVSSARFITYGKPIPLPTELVKTEVVDRFVYAAKYAYECGFDGIQLHGAHGYLFSQFTSPTTNKRTDKYGGSLENRQRIVLEIYDAIRAEIPASTGFLVGIKTNSVEFQNEGLTLEDAKLMCKVYEERGFDFVELSGGTFEKIAFVHERESTRRREAFFVEFAEQKILNFSKLSKLFLSFNMFLELFKVLQIRPVFNKTVVYLTGGFRTAPAMIDAIKSNATQGIGLGRPITAEPDLPKKILEGDVTSAIQDHLPDLQAALRWSRWAEQAWRKLVGSKLLGLIYYFSQDETVARFGETVVQHLQKAALDTSKGRRPNQVVTFN

SEQ ID NO: 10443 - protein, 369 aa, Yersinia pestis
MDKLFTPFKVGDTELVNRVVMAPMTRSRATVGDTADELTAKYYQQRASAGLIITEGSQISVQGQGYLFTPGIYNDAQVKGWERVTNAVHNAGGKIYIQLWHVGRISHTGLQNDGQAPVSSVAVKAKNSTCYARDENGQPGLVPVSEPRALSVSEIKDVVQDYVQAAENAIRAGFDGVEIHAANGYLLEQFINGGLNTRQDEYGGADPENRLRFVLEVTDAISQAIGAGKTGIRLAPFGRLFDMHPFEGEEETWLLLAKELSTRSLSYVHLSDQQTLGEQAIPAGFIEKFRAAYDGPLIIAGGFDKQRAEQYLQQGKADLIGFGRPYIANPDLVERMVNDWPLNQVDRATMYGGDEKGYTDYPVWSDTQA

SEQ ID NO: 10444 - protein, 370 aa, Nostoc punctiforme
MTTEINLFSSYQLGNLELPNRIVMAPLTRNRASKGNVPYELNATYYAQRASAGLIISEATQVTPEGQGYPATPGIHSPEQVEGWKLITDAVHQQGGRIFLQLWHVGRISHPDLQPNGALPVAPSAIAPKGEAATYEGPKPFVTPRALETSEIPQIVEQYRQGAANALAAGFDGVEIHSANGYLIDQFLRDRTNQRTDKYGGSIENRTRFLLEVTEAVTSVWDSNRVGVRLSPSGTFNDIGDSNPLETFGYAAQALNQFNLAYLHIYEATEADIRHGGIIVPTSHIRDRFTGTLIVNGGYTREKGDAVLANKAADLVAFGTLFISNPDLPRRLALNAPLNEANQATFYGGGEQGYTDYPFWSAANEAVAKA

SEQ ID NO: 10445 - protein, 324 aa, Nostoc punctiforme
MVEYYTQRASAGLIITEGTHPSPMGRGYTTCPGLHNQEQVGGWRKVTDAVHAAGGRIFVQLMHAGRVSHSSLLPNHARPIAPSAVPVVSEEVHVWDGKVPFEIPRPLELSEIPEIVEEFRRAAELSIEAGFDGVELHAATGYLPNQFQVSGSNQRTDAYGGTLENRTRFTLEVVNALCKVRGAEQIGVKIAPGFTVNDTFDDNPAETYTYVAKALSPLGLAYLHVGYNQGYARGTAPNFNPIDLLRTVYQGTLLAVGGFDRQQGDEAITSRRADAIVFGRPFISNPDLVERLRLNAPLSKGDIRTFYGGSEHGYTDYPTLPQLH

SEQ ID NO: 10446 - protein, 367 aa, Vibrio cholerae
MSRLFEPTDLKQLTLQNRVVMAPMTRARSSQPGNIPNPMMATYYQQRASAGLIISEATQISDDAQGYSFTPGVYTDEQTSGWKTVTQAVKQQGAAMFCQLWHVGRVSHPVFQKGQLPIAPSALKPVETQVWIADEQGNGQMVDCVEPRAMTQADIDRVVNDFAQAAKCAIEAGFDGVEIHGGNGYLIDQFLRTNSNHRTDSYGGSRENRMRFLLEVVDAVSQAIGASRVGVRLAPFITFKDMDCPDIVPTILEASKQLQARDIAYLHLSEADWDDAPTIPESFRIELRKHFTNAIIVAGRYTLERAEEVLQKGYADLVAFGRPFVANPDLVSRLKHQQPLAQLDGKTLFGGGEQGYTDYPKIPEQPI

SEQ ID NO: 10447 - protein, 347 aa, Vibrio cholerae
MTDILFQPYALNDVITLNNRIAMAPLTRCMADDDLVPTDAMVAYYARRADAGLIISEATIIRPDAQGYPNTPGLFTQAQIAGWKKVTDAVHANGGKIFAQLWHTGRVAHPAFFAGEYVLAPSALGVEGSVPRRRELQYTVPKAASQAEIKQLVADYAQAAENARLAGFDGVEIHGANGYLIDQFLHFDSNQRSDEYGETPANMARFALEVVDAVIARIGAERTALRVSPGAYFNIKADPRDREVFDYLLPELEKRNLAYLHEGMFDDSVTFDFLGGRVSTYLRQHYSKTLMGVGGFSAETGATAIENNEFDLLAIGRPFIANPDYIARVQKGEELKAYQDSMLTELY

SEQ ID NO: 10448 - protein, 736 aa, Hyphomicrobium sp. X
MARDPRFDILFTPLKLGSKTIRNRFYQVPHCNGAGTNSPGMNMAHRGIKAEGGWGAVNTEQCSIHPECDDTLRITARIWDQGDMRNLRAMVDHVHSHGSLAGCELFYGGPHAPAIESRTISRGPSQYNSEFATVPGCPGFTYNHEADIDELERLQQQYVDAALRARDTGFDLVNVYGAHAYGPMQWLNPYYNRRTDKYGGSFDNRARFWIETLEKIRRAVNDDVALVTRCATDTLYGTKGVELTEDGLRFIELASPYLDLWDVNIGDIAEWGEDAGPSRFYPIAHENDWIRHIKQATNKPVVGVGRYYDPEKMLQVIKAGIIDIIGAARPSIADPWLPRKIDEGRVDDIRTCIGCNVCISRWEMGGVPFICTQNATAGEEYRRGWHPEKFEPKKSDHDVLIVGAGPAGSECARVLMERGYTVHLVDTREKTGGYVNDVATLPGLGEWSFHRDYRQTQLEKLLKKNPECQIALKQKPMTADDILQYGASRVVIATGAKWSTTGVNHRTHEPIPGADASLPHVLTPEQVYEGKKAVGKRVMIINYDAYYTAPSLAEKFARAGHDVTVATVCGLGAYMEYTLEGANMQRLIHELGIKVLGETGCSRVEQGRVELFNIWGEGYKRSYKGAGQLPRNENTSHEWHECDTVILVTSRRSEDTLYRELKARKGEWEANGITNVFVIGDAESPRIIADATFDGHRLAREIEDADPQHQKPYKREQRAWGTAYNPDENPDLVWRV

SEQ ID NO: 10449 - protein, 365 aa, Escherichia coli K12
MSSEKLYSPLKVGAITAANRIFMAPLTRLRSIEPGDIPTPLMAEYYRQRASAGLIISEATQISAQAKGYAGAPGIHSPEQIAAWKKITAGVHAENGHMAVQLWHTGRISHASLQPGGQAPVAPSALSAGTRTSLRDENGQAIRVETSMPRALELEEIPGIVNDFRQAIANAREAGFDLVELHSAHGYLLHQFLSPSSNHRTDQYGGSVENRARLVLEVVDAGIEEWGADRIGIRVSPIGTFQNTDNGPNEEADALYLIEQLGKRGIAYLHMSEPDWAGGEPYTDAFREKVRARFHGPIIGAGAYTVEKAETLIGKGLIDAVAFGRDWIANPDLVARLQRKAELNPQRAESFYGGGAEGYTDYPTL

SEQ ID NO: 10450 - protein, 365 aa, Salmonella enterica subsp. enterica serovar Typhi
MSSAKLFTPLKVGAITATNRVFMAPLTRLRSIEPGDIPTPLMAEYYRQRASAGLIISEATQISAQAKGYAGAPGLHSDEQIAAWKKITQGVHAQGGHMAVQLWHTGRISHASLQPGGQAPVAPSAINAGTRTSLRDENGQAIRVETSTPRALDTHEIPGIVNDFRQAIANAREAGFDLVELHSAHGYLLHQFLSPSSNHRTDRYGGSVENRARLVLEVVDAGIKEWGADRIGIRLSPVGTFQNVDNGPNEEADALYLIEALGKRGIAYLHMSEPDWAGGEPYSDAFREKVRARFHGPIIGAGAYTPEKAEDLIEKGLIDAVAFGRDYIANPDLVARLQRKAELNPQRPESFYGGGAEGYTDYPTL

SEQ ID NO: 10451 - protein, 403 aa, Nitrosomonas europaea
MTKGVWCMYGWRQPRNCRKQRLTHLRLLSIGNTVSFTIVFCSPIWGFIHMLFNPLQVGSLTLPNRILLAPLTRARADAGHMPNALMAEYYSQRATGGLLISECTMVAPGTSAFVNEPGIYNDAQIAAWRQVTDAVHAKGGRIFMQIWHAGRAAYPGAADGAPIVSSSATAIEGEIHTPQGKVPHAVPRPLTVDEIPGIVAAFAQGARNAIAAGFDGVEVHGANGYLIDQFLRDTPNQRTDAYGGSLENRARLLFEVLTAVTQAIGSERVGLRLSPLNSFNSMKDSDPLALIGFLADRLNAFKLAYLHVMRADFFGVQKADVMPVAREKYKGVLVGNMGYSADEAEAAIAEGRLDAVAFGTAFLANPDLPARIRAKAPLNAPDSNTFYAGGAKGYTDYPTLQLA

SEQ ID NO: 10452 - protein, 547 aa, Ferroplasma acidarmanus
MNPFEKANIGGAEIKNRFVMAPMISNLCNPDGTTNENHIRYLEERARGGFGLIITEYAYVDDSNGKGSPNEMGIFSRSQLPKLSRLTERIHSAGSKIFVQLVHSGGKANPHYNTGKIFAPSSVDYIGSIPEEMTKDDIKKVEEKFVNAAELAYRAGFDGIELHGAHGYLLQEFISPALNKRTDEYGGSVENRIRILNEISSAIKSKLNMPLGIRLSLYEDDEGGYDADYGIDVASRLENMDYVHFSSGRFAPPGSSASFYYDNVHIGAKLKKKLDKNTMLVGSIRSMEDIEKALTVSDFVVLGRQALADPYTPVKIKMKMPYRVCIRCNQACRNLANAEVRCTINPYTGIEGTVHPGRKYHGEIAIVGSGIKGLEAALYSANKGFKPIIYEESSFGGQFNEIIDKYKKRDFTPLIEYYRSMLEKYGIEIRQESSNTGIFCLPDKVYPDILDVGDVSIDTNIYRYFDDALRIAEKNKVIMSNNSLNSLERSRVTGYRRLAEKAGIEFKDMDHYDFKLYDSSQYDILEAMKSGRRVIENYILENETEFL

SEQ ID NO: 10453 - protein, 362 aa, Cytophaga hutchinsonii
MKTSNLFEPLKIGSISLKNSIVMAPMTRCRAIGNIPNDLMATYYGQRATAGLIITEGASPSPNGLGYARIPGIFNKEQVEGWKKITTAVHDKGGKIVIQLMHTGRISHPANMPEGASILSASSVKPGGQMWTDSLQMQDYPIPKTMTVEEILQTKEEFVTAAKNAIEAGFDGVELHGANGYLLEQFISPHTNMRGDEYGGGIDRRCKFVLDVVEAVAAAIGKDKTGIRLSPYGVASDMPPYPDIEVTYEYLALALNDLGIDYIHVVDHSAIGAPAVPLSIKEKIRAGFSNTIILCGGFDQAAAERAIDTGLTNAVAFGRPFINNPDLVERLKNNQPLSDKLNTDAFYSADEKGYTDYPVFGG

SEQ ID NO: 10454 - protein, 365 aa, Salmonella typhimurium LT2
MSSAKLFTPLKVGAITATNRVFMAPLTRLRSIEPGDIPTPLMAEYYRQRASAGLIISEATQISAQAKGYAGAPGLHSDEQIAAWKKITQGVHAQGGHMAVQLWHTGRISHASLQPGGQAPVAPSAINAGTRTSLRDENGQAIRVETSTPRALDTHEIPGIVNDFRQAIANAREAGFDLVELHSAHGYLLHQFLSPSSNHRTDRYGGGVENRARLVLEVVDAGIKEWGADRIGIRLSPVGTFQNVDNGPNEEADALYLIEALGKRGIAYLHMSEPDWAGGEPYSDAFREKVRARFHGPIIGAGAYTPEKAEDLIEKGLIDAVAFGRDYIANPDLVARLQRKAELNPQRPESFYGGGAEGYTDYPTL

SEQ ID NO: 10455 - protein, 664 aa, Clostridium acetobutylicum
MNKYKKLFEPIKIGKCEIKNRFALAPMGPLGLADSEGGFNQRGIDYYTERAKGGTGLIITGVTFVDNEVEEHGMPNCPCPTHNPVQFVRTGREMTERIHAYNSKVFLQMSGGFGRVTIPTNLGEFPPVAPSPIQHRWLDKTCRELTVDEIKSIVKKFGEGAFNAKRAGFDGVQIHAVHEGYLIDQFAISLFNHRTDEYGGSLENRLRFAREIVEEIKNRCGEDFPVTLRYSPKSFIKDLRDGALPGEEFVEKGRDLDEGVEAAKLLVSYGYDALDTDVGSYDSWWWSHPPMYQEKGLYRKYAKLMKDTVDVPVICAGRMDDPDMALEAVENGTCDVISLGRPLLADPDYVNKLRSNKCKSIRPCISCQEGCMGRVQHYSMLNCAVNPQACKERANSLTPIIKSKKVLIVGGGVAGCEAARVLALRGHEPVLYEKSNRLGGNLIPGGAPSFKEDDIALADWYTNTLKELNVEVNLNSEVTKEQILNSKFDTVIVATGSTPKVFPLGDDEKVFTAAEVLLGQKDPGETTVVVGGGLVGCELALDLAKKGKKVTIVEALNKILALNGPLCSANSEMLQKLIPFNGIDVKANSKVKGYKNGLLKMETENGIEELPCDSVILSVGYKEENSLYKELEFEIPEIYLLGDARKVSNIMYGIWDAFEVANHI

SEQ ID NO: 10456 - protein, 380 aa, Escherichia coli O157:H7 EDL933
MTNKHPSLFSPFMLTEKIKLRNRIVMAPMTTWSANPDGTISEQELEFYKRRSQNVGLVITGCTYVTPSGIGFTHEFAAYDDRFINSLEKLAAAAKSGGAPAILQIFHAGNKAIPELVPNNDVISASASSVKSGDFMKRVVQSREMTENEIQETIRAFGDVTKRAIKAGFDGIELHGAHGFLLQNFFSPLFNQRNDRWGGDLEGRMRFPLAVLQEVKNVVYEYATKPFAIGYRISPEESATGGLRIEDTYKLLDRLISSGISYIHTSLVSINDSYPVESPNGPRTIELILNHIAGRVPVIAAGKIRTPSQAQEAISTGLPLVAIGKGLVINPEWVTLAESGRGHEIQTTLNPQLVPELTIPDKLWDQIQASKGTGWFPLMD

SEQ ID NO: 10457 - protein, 399 aa, Streptococcus pyogenes M1 GAS
MKERFSPLFEPLTLPNGSQLDNRFVLSPMVTNSSTKDGYVTQDDVSYALRRAASAPLQITGAAYVDPYGQLFEYGFSVTKDADISGLKELAQAMKAKGAKAVLQLTHAGRFASHALTKYGFVYGPSYMQLRSPQPHEVKPLTGQQIEELIAAYAQATRRAIQAGFDGVEVSSAQRLLIQTFFSTFSNKRTDSYGCQTLFNRSKLTLAVLQAVQQVIKQEAPDGFIFGFRATPEETRGNDIGYSIDEFLQLMDWVLNVAKLDYLAIASWGRHVFRNTVRSPGPYYGRRVNQVVRDYLRNKLPVMATGGMNTPDKAIEALAHADFIGVSTPFVVDPEFAHKIKEGCEESIHLRIRPADLKSLAIPQASFKDIVPLMDYGESLPKESRTLFRSLTHNYKEIK

SEQ ID NO: 10458 - protein, 399 aa, Streptococcus pyogenes MGAS8232
MKERFSPLFEPLTLPNGSQLDNRFVLSPMVTNSSTKDGYVTQDDVSYALRRAASAPLQITGAAYVDPYGQLFEYGFSVTKDADISGLKELAQAMKAKGAKAVLQLTHAGRFASYALTKYGFVYGPSYMQLRSPQPHEVKPLTGQQIEELIAAYAQATRRAIQAGFDGVEVSSAQRLLIQTFFSTFSNKRTDSYGCQTLFNRSKLTLAVLQAVQQVIKQEAPDGFIFGFRATPEETRGNDIGYSIDEFLQLMDWVLNIAKLDYLAIASWGRHVFRNTVRSPGPYYGRRVNQVVRDYLRNKLPVMATGGMNTPDKAIEALAHADFIGVSTPFVVDPEFAHKIKEGCEESIHLRIRPADLKSLAIPQASFKDIVPLMDYGESLPKESRTLFRSLTHNYKEIK

SEQ ID NO: 10459 - protein, 669 aa, Leptospira interrogans serovar lai str. 56601
MKYSEIFQPIQIGSIVLPNRVIMGSMHLGLEGMPMTADRMIAFYGRRFDGGASFITTGGIAVNHEGRGSNIFFNFQREEDCKELSVVANSLKSKGIFCAQLFHAGRYAYHRELVAPSALRAPINRYVPKALSEEEAWKTVEDFGDSALKAKEVGFGAVEVMGSEGYLVNQFFSPVTNHREDFFGGSSEKRMNFAIEVMKNIRKKVGKDFPVVYRMSGIDLIPGNPTFEEVILLAEKLKEAGADALNIGIGWHESRIPTISMLVPRGAWAKISGKIKAKVKDIPIIASNRVNMPETMSRILKDQEADILSMARPFLADPDILNKIKANQEERINTCIACNQACLDHTFKEQMVSCLVNPSANRELELSKLKKADKKHVVVVGSGPGGLESARISAIRGHKVTVLEATDKIGGQLNLAAQIPGKSEFLETIRYFKNELKNLGVEIHFGYQATLDSILVLKPDAVIFATGVKPREFTLPGIEKKKTASYADYLSGKFQPGNKVVVIGGGGIGCDVAHKLTEEDSSTIDSYFHRYNVTSYTNAQIQKEKPNRKVSIFRRSGKIGSGLGATTAWALLQELESKEVGFYTSLSYKEVTDQGLVIETKKDGAQTIECDSIILCAGQLSEVSLYEEFKSKVPEIPSYLIGGAKDASGIDAKRAMLEGFEAAIEIGVN

SEQ ID NO: 10460 - protein, 329 aa, Escherichia coli CFT073
  unsure (1)..(329): unsure at all Xaa locations
MTNKHPSLFSPFMLTEKIKLRNRIVMAPMTTWSANPDGTISEQELEFYKRRSQNVGLVITGCTYVTPSGIGFTHEFAAYDDRFINSLEKLAAAAKSGGAPAILQIFHAGNKAIPELVPNNDVISASASSVKSGDFMKRVVQSREMTENEIQETIRAFGDVTKRAIKAGFDGVELHGAHGFLLQNFFSPLFNQRNDRWGGDLEGRMRFPLAVLQEVKNVVYEYATKPFAIGYRISPEESVTGGLRIEDTYKLLDRLISSGISYIHTSLVSIXIATLLXLPNGPRTIELILNHIAGRXTGNRRXKIHTPXQAQEAIXRWXATCCDPXKXWR

SEQ ID NO: 10461 - protein, 391 aa, Arabidopsis thaliana
MTAAQGNSNETLFSSYKMGRFDLSHRVVLAPMTRCRALNGVPNAALAEYYAQRTTPGGFLISEGTMVSPGSAGFPHVPGIYSDEQVEAWKQVVEAVHAKGGFIFCQLWHVGRASHAVYQPNGGSPISSTNKPISENRWRVLLPDGSHVKYPKPRALEASEIPRVVEDYCLSALNAIRAGFDGIEIHGAHGYLIDQFLKDGINDRTDQYGGSIANRCRFLKQVVEGVVSAIGASKVGVRVSPAIDHLDATDSNPLSLGLAVVDMLNKLQDVNGLKLAYLHVTQPRYHAYGQTESGRQGSDEEEAKLMKSLRMAYKGTFMSSGGFNKELGMQAVQQGDADLVSYGRLFIANPDLVSRFKIDGELNKYNRKTFYTQDPVVGYTDYPFLAPSSRL

SEQ ID NO: 10462 - protein, 391 aa, Arabidopsis thaliana
MTAAQGNSNETLFSSYKMGRFDLSHRVVLAPMTRCRALNGVPNAALAEYYAQRTTPGGFLISEGTMVSPGSAGFPHVPGIYSDEQVEAWKQVVEAVHAKGGFIFCQLWHVGRASHAVYQPNGGSPISSTNKPISENRWRVLLPDGSHVKYPKPRALEASEIPRVVEDYCLSALNAIRAGFDGIEIHGAHGYLIDQFLKDGINDRTDQYGGSIENRCRFLKQVVEGVVSAIGASKVGVRVSPAIDHLDATDSNPLSLGLAVVDMLNKLQDVNGLKLAYLHVTQPRYHAYGQTESGRQGSDEEEAKLMKSLRMAYKGTFMSSGGFNKELGMQAVQQGDADLVSYGRLFIANPDLVSRFKIDGELNKYNRKTFYTQDPVVGYTDYPFLAPSSRL

SEQ ID NO: 10463 - protein, 391 aa, Arabidopsis thaliana
MTAAQGNSNETLFSSYKMGRFDLSHRVVLAPMTRCRALNGVPNAALAEYYAQRTTPGGFLISEGTMVSPGSAGFPHVPGIYSDEQVEAWKQVVEAVHAKGGFIFCQLWHVGRASHAVYQPNGGSPISSTNKPISENRWRVLLPDGSHVKYPKPRALEASEIPRVVEDYCLSALNAIRAGFDGIEIHGAHGYLIDQFLKDGINDRTDQYGGSIENRCRFLKQVVEGVVSAIGASKVGVRVSPAIDHLDATDSNPLSLGLAVVDMLNKLQDVNGLKLAYLHVTQPRYHAYGQTESGRQGSDEEEAKLMKSLRMAYKGTFMSSGGFNKELGMQAVQQGDADLVSYGRLFIANPDLVSRFKIDGKLNKYNRKTFYTQDPVVGYTDYPFLAPSSRL

SEQ ID NO: 10464 - protein, 391 aa, Arabidopsis thaliana
MTAAQGNSNETLFSSYKMGRFDLSHRVVLAPMTRCRALNGVPNAALAEYYAQRTTPGGFLISEGTMVSPGSAGFPHVPGIYSDEQVEAWKQVVEAVHAKGGFIFCQLWHVGRASHAVYQPNGGSPISSTNKPISENRWRVLLPDGSHVKYPKPRALEASEIPRVVEDYCLSALNAIRAGFDGIEIHGAHGYLIDQFLKDGINDRTDQYGGSIENRCRFLKQVVEGVVSAIGASKVGVRVSPAIDHLDATDSNPLSLGLAVVDMLNKLQDVNGLKLAYLHVTQPRYHAYGQTESGRQGSDEEEAKLMKSLRMAYKGTFMSSGGFNKELGMQAVQQGDADLVSYGRLFIANPDLVSRFKIDGKLNKYNRKTFYTQDPVVGYTDYPFLAPFSRL

SEQ ID NO: 10465 - protein, 391 aa, Arabidopsis thaliana
MTAAQGNSNETLFSSYKMGRFDLSHRVVLAPMTRCRALNGVPNAALAEYYAQRTTPGGFLISEGTMVSPGSAGFPHVPGIYSDEQVEAWKQVVEAVHAKGGFIFCQLWHVGRASHAVYQPNGGSPISSTNKPISENRWRVLLPDGSHVKYPKPRALEASEIPRVVEDYCLSALNAIRAGFDGIEIHGAHGYLIDQFLKDGINDRTDQYGGSIANRCRFLKQVVEGVVSAIGASKVGVRVSPAIDHLDATDSDPLSLGLAVVGMLNKLQGVNGSKLAYLHVTQPRYHAYGQTESGRQGSDEEEAKLMKSLRMAYNGTFMSSGGFNKELGMQAVQQGDADLVSYGRLFIANPDLVSRFKIDGELNKYNRKTFYTQDPVVGYTDYPFLAPFSRL

SEQ ID NO: 10466 - protein, 400 aa, Glycine max
  unsure (1)..(400): unsure at all Xaa locations
MADNATTQGSNTLFSPYKMAKFNLSHRVVLAPMTRCRALNWIPQAALAEYYAQRSTPGGFLISEGTLISPTAPGFPHVPGIYSDEQVEAWRNIVDAVHAKGSIIFCQLWHVGXRASHPVYQPGGAPPISSTSKPISXXRWRILLPDGSYGVYPEPRALSTSEIPEIVQHYRQAAINAIRAGFDGIEIHGAHGYLIDQFLKDGINDRTDEYGGSLANRCRFLMQVVQAVVSAIGAERVAVRISPAIDHLDAIDSDPLGLGLAVVERLNNLQKELGRKLTYLHVTQPRYTAYGQTESGRPGSEKEEAHLMQNLRKAYEGTFMCSGGFTRKLGMEAVAEGHADLVSYGRLFISNPDLVLRLKLNAPLTKYNRKTFYTQDPVIGYTDYPFLSKESETKEPRARL

SEQ ID NO: 10467 - protein, 398 aa, Glycine max
MADNATTQGSNTLFSPYKMAKFNLSHRVVLAPMTRCRALNWIPQAALAEYYAQRSTPGGFLISEGTLISPTAPGFPHVPGIYSDEQVEAWRNIVDAVHAKGSIIFCQLWHVGRASHPVYQPGGAPPISSTSKPISAKWKILMPDGSHGVYPEPRALTTSEISEIVHHYRQAAINAIRAGFDGIEIHGAHGYLIDQFLKDAINDRTDEYGGPLENRCRFLMEVVEAVVSAIGAERVAIRISPAIDFNDAFDSDPLGLGLAVIERLNNLQKQVGTKLAYLHVTQPRFTLLAQTESGRPGSEKEEAHLMQNLRKAYEGTFMCSGGFTRKLGMEAVAEGHADLVSYGRLFISNPDLVLRLKLNAPLTKYNRKTFYTQDPVIGYTDYPFLSKESETKEPRARL

SEQ ID NO: 10468 - protein, 396 aa, Lycopersicon esculentum
MASSAQDGNNPLFSPYKMGKFNLSHRVVLAPMTRCRALNNIPQAALGEYYEQRATAGGFLITEGTMISPTSAGFPHVPGIFTKEQVREWKKIVDVVHAKGAVIFCQLWHVGRASHEVYQPAGAAPISSTEKPISNRWRILMPDGTHGIYPKPRAIGTYEISQVVEDYRRSALNAIEAGFDGIEIHGAHGYLIDQFLKDGINDRTDEYGGSLANRCKFITQVVQAVVSAIGADRVGVRVSPAIDHLDAMDSNPLSLGLAVVERLNKIQLHSGSKLAYLHVTQPRYVAYGQTEAGRLGSEEEEARLMRTLRNAYQGTFICSGGYTRELGIEAVAQGDADLVSYGRLFISNPDLVMRIKLNAPLNKYNRKTFYTQDPVVGYTDYPFLQGNGSNGPLSRL

SEQ ID NO: 10469 - protein, 394 aa, Oryza sativa
MDRPPPDQQRQKQAPLFSPYQMPRFRLNHRVVLAPMTRCRAIGGVPGPALAEYYAQRTTQGGLLISEGTVVSPAGPGFPHVPGIYNQEQTDAWKKVVDAVHAKGGIFFCQLWHVGRASHQVYQPNGAAPISSTDKPISARWRILMPDGSYGKYPKPRRLAASEIPEIVEQYRQAAINAIEAGFDGIEIHGAHGYIIDQFLKDGINDRTDEYGGSLSNRCRFLLEVTRAVVSAIGADRVAVRISPAIDHLDAYDSDPIKLGMAVVERLNALQQQSGRLAYLHVTQPRYTAYGQTESGQHGSAEEESRLMRTLRGTYQGTFMCSGGYTRELGLEAVESGDADLVSYGRLFISNPDLVERFRLNAGLNKYVRKTFYTPDPVVGYTDYPFLGQPKSRM

SEQ ID NO: 10470 - protein, 410 aa, Triticum aestivum
  unsure (1)..(410): unsure at all Xaa locations
MDRPAPDQRPTLFSPYQMRRFSLAHRVVLAPMTRCRAIGGLPGPALAEYYAQRATQGGLLISEGTVVSPAGPGFPHVPGIYNQEQIDGWKKVVDAVHAKGGIFFCQLWHVGRASHQVYQPDGAAPISSTDKPISARWKILLPDGSYGTYPTPRRLATSEIPDIVEQYRQAAINAIKAGFDGIEIHGAHGYIIDQFLKDGINDRTDEYGGSLTNRCKFLLEVTRAVLSAIGAERTAVRVSPAIDHLDAYDSNPMQLGMAVVERLNALQQEAGQLAYLHVTQPRYAAYGQTESGPHGSAEEESRLMRTLRGAYRGTFMCSGGYTRELGLEAVESGDADLVSFGRRFISNPDLVERLRLNAGLNKYVRKTFYTPDPVVGYTDYPFLXQAXIAHVVCTRLVIGVGIYCEVYLEK

SEQ ID NO: 10471 - protein, 363 aa, Novosphingobium aromaticivorans
MTLPSLFRPAALPGLDLPNRLVMAPMTRRMSPGGIPGADVAAYYRRRAEGGVGLIITEGTGIADPAALAERDVPEFHGDALRGWSTVVDEVHAGGAKIFPQLWHVGSARRPDMTNTPEVPAVSPAGLFAPGQPNGEALDEARIGRIITAYGEAAAQALRMGFDGIELHFAHGYLVDQFLWEPTNGRADGWGRTPWLLAREVVAECRRQTNPDFPICMRFSQWKQQDYGARLFADPACLEAFLGPMVDAGVDMFHCSTRRFWEPEFAGSRMNLAGWTRRLSGKPVITVGSVGLDEDFLVTRVGDDPTADGARLELLEDMLATGEVDLVAVGRALIGDPQWSAKVREGRFDQIRTFTRDDLARLD

SEQ ID NO: 10472 - protein, 711 aa, Novosphingobium aromaticivorans
MSVRAYRHLLSPGRINRLELKNRIFFSPMGSNLAEEDGSVGDRLRTYYVARAKGGAALVTMGSVSVGFPEGASNWRQEAISDDRFVPGLKRLADEVHEHGAKLCVQLHHGGLVAMTDMLDGRPVACPNPPPAAKDSGDFVDVMLPEEQAKFFEPYAKMGEVRYNSLDASGVDHIVDLFARAAVRAKTAGIDAVELHAGHGYIFSTFLSPAYNHRTDEFGGSIENRARLLLKTIRAVRAAVGPDYPVWMRFDSQEFLMDYGITLEDAIAVARMAQEAGLDAIHVSAHGDGNYGRTYSTGHATDIRNGFVDNAAAIKAAVSIPVICPGRIEPEEADRFIAQGKLDFVTMGRKLLADPELPNKLAAGKPETVRPCVYCYTCISSIFNSSHIVCAVNPMTGFETDRQPQPASKRKVVLVVGGGPGGMAAARDLSDKGHKVVLCEATDRLGGTAQFASIAYAPNQRIVDWLRREVTARPIEVRLGTRATADLARRIGADEVIVATGARRAMPPIPGSERDFVFSGDDMRNLVLGQNLDSLASKTGLATRLAMKLGRATGLTKRIGLLRAGSKAWMPLGEHVVIIGGELVGLELAEFLAHRGRKVTVLEESARVGKGIPLVRRFRAVDDCHALGVALLTETSGFRIGDGTVTYSNAHGQERTLRADTVIVAQGATGDESLTKEMRSAGFLTHSVGDCTGVGYIEGAMRDAALAIQAI

SEQ ID NO: 10473 - protein, 452 aa, Clostridium kluyveri
FIMTSSEMTERVHAYGSKIFLQLSMGFGRSGAPGGLLTSQPVSASAVPNYWDPTVTCRELTTSEVEWIVEKFAEGAKIAHKAGFDGVEIHAVHEGYLLDQFTLSIFNRRTDKYGGDLRGRLQLPIEIVEPIKTEVGSNFPVGLRYSVKSCIKDWGQGGLAEEDYVEKARDLEEALEAPKILEAAGYDAFNADLGTPDPWYWAHPPLYQKDGLYLPYPKELKKVVKIPVMVAGKMGMPDVAEGALEDEAADMVTLGRPLLCDAYWPKKFLTGQIDRIRPCIGCHTGCMGRGFEGRPLSCTVNPAAGRERYYEVKPAAAPKKVMIVGGVAGMEAARITAMRGHKVSMYEGTKELGGQLFRLQFLISPIDDRRLLDWYRNEMKELKVKLVLDTNVTEEVVEKEKPDVVIIATGAKEIKLNLPGIEKDKVATVIEVLKGSKQVGENVLMVGGGLVA

SEQ ID NO: 10474 - protein, 435 aa, Thermotoga maritima
MKKRFKYRTLEEMRWEAITLGIDLPLSGDFDVFRDLVDLGSKTIPNRFVDQPMEGNDAQLDGTPGPLTLRRYRKLAEGGAGVIWVEAIAVSREARGNDRQLMLTEETVNSFRSFVAEIKSVSLKTKNFEPYIVAQLTHPGRFGKNRKILFHDKFLDEKYGITEDFPLMSDEELDSLKEQYLRAAKFAKTAGFDAVDIKACHRYLLSELLAAHTREGKYGGSYENRTKLLKDIVRLVRKEVEIDITVRLNLSDFIPYPYGWGSTEEGTLDFTEPGRLLKELEELGVKIINVTASTPYLKPHINRPYDEMGKYNPPEHPIVGAMRLLNLAKLAKETLSKTLVVASGFTWFRQFAPYVAAGMLKNGWCDFVGFGRMTFAYPDYPKDILTKGELDPKKVCITCNKCAELKAAGESCGCVVRDGEVYLPIYRKMEESKKS

SEQ ID NO: 10475 - protein, 380 aa, Oryza sativa
MVHAPAKVAAAAAIPLLTPYKMGQLELSHRVVLAPLTRCRSYGNVPQPHAAVYYSQRATRGGLLIAEATDISPTAQGYPETPGIYTQQQIEAWKPIVDAVHRKGALFFLQIWHVGRVSTTDFQPNGQAPISSTDKQITPDDSGMVYSKPRRLRTDEIPQIIDDFRRAARNAIEAGFDGVEIHGAHGYLLEQFMKDSANDRTDEYGGSLENRCRFAVEVIDAVVAEVGAHRVGIRLSPFVDFMDCFDSDPVALGSYMVQQLNKHPGFLYCHMVEPRMAIIEGRRKIAHGLLPFRKQFNGTFIAAGGYDREEGNKVVADGYADLVAYGRLFLANPDLPRRFELDAPLNRYDRSTFYTQDPVVGYTDYPFLEEIDEESRTTYA

SEQ ID NO: 10476 - protein, 374 aa, Oryza sativa
  unsure (1)..(374): unsure at all Xaa locations
PAKEAIPLLTPYKQAGGKIDLSHRVLLSPMTRCRSYGNVPQPHAALYYTQRATSGGLLITEATGVSDTAQGYPETPGVWTREHVEAWKPIVDAVHRKGALFICQLWHVGRVSTNDYQPNGQAPISSSDIQITPDGSGIXXYSKPRRLRVDEIPQIVDDFRLAARNAIEAGFDGVEIHGANGYLLEQFMKDSSNDRTDEYGGSLENRCRFAVEVIDAVVGEIGAHRVGIRLSPFLDFMDCVDSDPEALGSYMVEQLNKHEGFLYCHMVEPRMAIVDGRRQIQHGLLPFRKAFKGTFIAAGGYDREEGNKVIENGYTDLVSFGRLFLANPDLPKRFELDAPLNKYDRNTFYTQDPIVGYTDYPFLDEDQNNSVADA

SEQ ID NO: 10477 - protein, 379 aa, Oryza sativa
  unsure (1)..(379): unsure at all Xaa locations
MVHAPAKVAAAAAIPLLTPYKMGQLELSHRVVLAPLTRCRSYGNVPQPHAAVYYSQRATRGGLLIAEATDISPTAQGYPETPGIYTQQQIEAWKPIVDAVHRKGALFFXCQLWHVGRVSTTDFQPNGQAPISSTDKQITPDDSGMVYXXKPRRLRTDEIPQIIDDFRRAARNAIEAGFDGVEIHGAHGYLLEQFMKDSANDRTDEYGGSLENRCRFAVEVIDAVVAEVGAHRVGIRLSPFVDFMDCFDSDPVALGSYMVQQLNKHPVLYCHMVEPRMAIIEGRRKSLLPFRKQFNGTFIAAGGYDREEGNKVVADGYADLVAYGRLFLANPDLPRRFELDAPLNRYDRSTFYTQDPXXVGYTDYPFLEEIDEESTTTYA

SEQ ID NO: 10478 - protein, 775 aa, Oryza sativa
  unsure (1)..(775): unsure at all Xaa locations
MVHAPAKVAAAAAIPLLTPYKMGQLELSHRVVLAPLTRCRSYGNVPQPHAAVYYSQRATRGGLLIAEATDISPTAQGYPETPGIYTQQQIEAWKPIVDAVHRKGALFFLQIWHVGRVSTTDFQPNGQAPISSTDKQITPDDSGMVYSKPRRLRTDEIPQIIDDFRRAARNAIEAGFDGVEIHGAHGYLLEQFMKDSANDRTDEYGGSLENRCRFAVEVIDAVVAEVGAHRVGIRLSPFVDFMDCFDSDPVALGSYMVQQLNKHPGFLYCHMVEPRMAIIEGRRKIAHGLLPFRKQFNGTFIAAGGYDREEGNKVVADGYADLVAYGRLFLANPDLPRRFELDAPLNSCTTSWMHNELTTFNTSMCPYLRCDKGINTAFVTFVRLCLVHAKIESLVEIETAKMVHAPAKEAIPLLTPYKMGQLELSHRVVLAPLTRCRSYGHVPQPHAAVYYSQRATNGGLLIAEATVISPTAQGYPDTPGIYTQQQIEAWKPIVDAVHRKGALFFLQIWHVGRVSTTDFQPNGQAPISSTDKQITPDDSGMVYXXKPRRLRTDEIPQIVDDFRRAARNAIESGFDGVEIHGAHGYLLDQFMKDSANDRTDEYGGNLENRCRFAVEVIDAVVAEVGAHRVGIRLSPFDNYMDCFDSNPVALGSYMVQQLNKHPVLYCHMVEPGMAIVEGRRKSLLPFRKQFNGTFIAAGGYDREEGNKVVADGYADLVAYGRLFLANPDLPRRFELDAPLNRYDRSTFYTQDPXXVGYTDYPFLEEIDEESTTTYA

SEQ ID NO: 10479 - protein, 400 aa, Oryza sativa
  unsure (1)..(400): unsure at all Xaa locations
XANDDHQAIPLLTPYKQAGRPGSKLDLSHRVLLAPMTRCRSYGNVPQPHAALYYTQRATRGGLLITEATGVSATAQGYPETPGVRTREHVEAWKPIVDAVHRKGALFICQLWHVGRVSNNGFQPDGLAPISSTDKAITPDGYGXXVYSKPRRLRTDEIPQIVDDFRLAARNAVEAGFDGVEIHGANGYLLEQFMKDSSNDRTDEYGGSLENRCRFAVEVIDAVVGEIGAHSVGIRLSPFLDYMDCVDSDPEALGSYMVEQLNKHEVLYCHMVEPRMAIVDGRRQIQHGLLPFRKQFNGTFIAAGGYDREEGNKAVADGYADLVAYGRLFLANPDLPKRFELDAPMNNYDRNTFYTQDPVVGYTDYPFLDEHHHDDQCLTICFIQFFCENMKMFMLCLENI

SEQ ID NO: 10480 - protein, 388 aa, Oryza sativa
  unsure (1)..(388): unsure at all Xaa locations
ASSRGHTSVEMAREAEKDAAAAAEIPLLTPYKMGRFELSHRVVLAPLTRNRSYGNVPRPHAVLYYTQRATSGGLLVTEATGVSDTAQGYPDTPGIWTQQQVEAWKPIVDAVHRKGALFICQLWHVGRVSTNEYQPDGQAPISSTDRQITPDDSGIVYSKPRRLRTEEIPQIIDDFRRAARNAIEAGFDGVEIHGAHGYLLEQFMKDSANDRSDEYGGSLENRCXRFVVEVIDAIVAEVGAHRVGIRLSPFIDYMDCVDSDPVALGSYMVQQLNKHPVLYCHMVEPRMAIVEGPPMASCPFRKLFNGTFIAAGGYDREEGNKVIADGYADLVAYGRHFLANPDLPKRFAINAPLNKYNRSTFYIQDPXXVGYTDYPFLDEKDEGAATYA

SEQ ID NO: 10481 - protein, 404 aa, Triticum aestivum
  unsure (1)..(404): unsure at all Xaa locations
EPPAHRNRAQRKVYRSFCNLRSIQFTARKMVAKEAIPLLTPHRMGRFELSHRVVLAPLTRCRSYANVPQPHAALYYSQRATEGGLLIAEATGVSATAQGYPETPGIWTQQHVDAWKPIVDAVHRKGALFFCQIWHVGRVSTNDFQPDGQAPISSTDQQITPDAESGMVYSKPRQLQTDEIPLIVDDFRRAARNAIEAGFDGVEIHGAHGYLLEQFMKDSSNDRTDEYGGSLENRCRFAVEVIDAIVHEIGADRVGIRLSPFVDYMDCFDSDPHALGMYMVQQLNKHQGFVYCHMVEPRMAIVDGRRQIPHGLLPFRKAFNGTFIAAGGYDREEGNKVVADGYADLVAYGRIFLANPDLPKRFELDSPLNKYDRNTFYTQDPVIGYTDYPFLEGGSNAEXFTHST

SEQ ID NO: 10482 - protein, 414 aa, Triticum aestivum
  unsure (1)..(414): unsure at all Xaa locations
QPQTYRNRAQKQETEQDFYRFLCNLRSIQFTASKMVAKEAIPLLTPHRMGRFELSHRVVLAPLTRCRSYANVPQPHAAAYYSQRATKGGLLIAEATGVSATAQGYPETPGIWTQQQVDAWKPIVDAVHRKGALFFCQIWHVGRVSTNDFQPDGQAXPISSTDKQITPDAESGMVYSKPRQLQTDEIPLIVDDFXRRAARNAVEAGXFDGVEIHGAHGYLWXEQFMKDSSYDRTDEXTGGSLENRCRFAVEVIDAIVHEIGADRVGIRLSPFVDYMDCFDSDPHALGMYMVQQLNKHQGFVYCHMVEPRMAIVDGRRQIPHGLLPFRKAFNGTFIAAGGYDREEGNKVVADGYADLVAYGRIFLANPDLPKRFELDSPLNKYDRNTFYTQDPVIGYTDYPFLEGGSNAEXFTHST

SEQ ID NO: 10483 - protein, 365 aa, Novosphingobium aromaticivorans
MSLSSSPSSSLFEPLTFAHGPAWRNRLMLAPLTNQQSHPDGRLSDEELRWLEMRGQGGFGMVMTAAAHVQAIGQGFPGQLGVFSDDHVPALSRLADALRRSGAVSAIQLHHAGSRSPAALVGTPVSPSASDNGARALTLQEVERLRDDFIAAAHRADRAGFDGVEVHGAHGYVLAEFLSPTINRREDRYGGSAENRARIVFEVIEGIRATCRPDFQIGLRLSPERFGQDLGEILAVAARAMGEARIDYLDMSLWDVFKHPEDETRRERTLLEWFADLPRGKVRLGVAGKIMGGRDAAHVLEQGCDFAVIGRAAILRHDFPERVRQDGDYVSPALPVTARHLADEGLSKPFLDYMRTWKGFVTEDA

SEQ ID NO: 10484 - protein, 488 aa, Psidium guajava
MARVVMSNMSPAMSSTYPPSLSPPSSPRPTTLPVRTIPGSYGWPLLGPISDRLDYFWFQGPETFFRKRIEKYKSTVFRANVPPCFPFFSNVNPNVVVVLDCESFAHLFDMEIVEKSNVLVGDFMPSVKYTGNIRVCAYLDTSEPQHAQVKNFAMDILKRSSKVWESEVISNLDTMWDTIESSLAKDGNASVIFPLQKFLFNFLSKSIIGADPAASPQVAKSGYAMLDRWLALQLLPTINIGVLQPLVEIFLHSWAYPFALVSGDYNKLYQFIEKEGREAVERAKAEFGLTHQEAIHNLLFILGFNAFGGFSIFLPTLLSNILSDTTGLQDRLRKEVRAKGGPALSFASVKEMELVKSVVYETLRLNPPVPFQYARARKDFQLKSHDSVFDVKKGELLCGYQKVVMTDPKVFDEPESFNSDRFVQNSELLDYLYWSNGPQTGTPTESNKQCAAKDYVTLTACLFVAYMFRRYNSVTGSSSSITAVEKAN

SEQ ID NO: 10485 - protein, 499 aa, Citrus sinensis
MNASMMMINSMSVSPDMPSSSPFQSQSLSTPTSSPPSTSLPLRTIPGSYGWPLLGPISDRLDYFWFQGPETFFRKRIEKHKSTVFRTNIPPTWPLFLNVNPNVIAVLDCKSFAHLFDMEIVEKKNILVGDFMPSVKFTGGLRVSAYLDTSEPKHAQLKGFAMDTLKRSSKLWVSEVVSSLDTLFDTVEKELSEKNSISYMVPLQKCVFNFLSKSIVGADPKADAEIAENGFSMLDKWLALQILPTVSINILQPLEEIFLHSFAYPFALVSGDYNKLHNFVEKEGKEVVQRGQDEFGLTKEEAIHNLLFILGFNAFGGFSILLPKLINAIASDTTGLQAKLRSEVKEKCGTSALTFESVKSLELVQSVVYETLRLNPPVPLQFARARKDFQLSSYDSVYDIKKGELLCGYQPLVMRDSKVFDDAESFKAERFMGEKGSELLSYLYWSNGPQTGTPNDMNKQCAGKDYVTLVACLTVAYVFQRYESITGNSSSITAVEKAK

SEQ ID NO: 10486 - protein, 492 aa, Arabidopsis thaliana
MLLRTMAATSPRPPPSTSLTSQQPPSPPSQLPLRTMPGSYGWPLVGPLSDRLDYFWFQGPDKFFRTRAEKYKSTVFRTNIPPTFPFFGNVNPNIVAVLDVKSFSHLFDMDLVDKRDVLIGDFRPSLGFYGGVCVGVNLDTTEPKHAKIKGFAMETLKRSSKVWLQELRSNLNIFWGTIESEISKNGAASYIFPLQRCIFSFLCASLAGVDASVSPDIAENGWKTINTWLALQVIPTAKLGVVPQPLEEILLHTWPYPSLLIAGNYKKLYNFIDENAGDCLRLGQEEFRLTRDEAIQNLLFVLGFNAYGGFSVFLPSLIGRITGDNSGLQERIRTEVRRVCGSGSDLNFKTVNEMELVKSVVYETLRFNPPVPLQFARARKDFQISSHDAVFEVKKGELLCGYQPLVMRDANVFDEPEEFKPDRYVGETGSELLNYLYWSNGPQTGTPSASNKQCAAKDIVTLTASLLVADLFLRYDTITGDSGSIKAVVKAK

SEQ ID NO: 10487 - protein, 478 aa, Arabidopsis thaliana
NISAATITPLTASPPYNAGIVRLAVGWTIIGPFRFQGPDKFFRTRAEKYKSTVFRTNIPPTFPFFGNVNPNIVAVLDVKSFSHLFDMDLVDKRDVLIGDFRPSLGFYGGVRVGVYLDTTEPKHAKVRTYVALLLLRFAMETLKRSSKVWLQELRSNLNIFWGTIESEISKNGAASYIFPLQRCIFSFLCASLAGVDASVSPDIAENGWKTINTWLALQVIPTAKLGVVPQPLEEILLHTWPYPSLLIAGNYKKLYNFIDENAGDCLRLGQEEFGLTRDEAIQNLLFVLGFNAYGGFSVFLPSLIGRITGDNSGLQERIRTEVRRVCGSGSDLNFKTVNEMELVKSVVYETLRFSPPVPLQFARARKDFQISSHDAVFEVKKGELLCGYQPLVMRDANVFDEPEEFKPDRYVGETGSELLNYLYWSNGPQTGTPSASNKQCAAKDIVTLTASLLVADLFLRYDTITGDSGSIKAVVKAK

SEQ ID NO: 10488 - protein, 384 aa, Arabidopsis thaliana
MDLVDKRDVLIGDFRPSLGFYGGVRVGVYLDTTEPKHAKIKGFAMETLKRSSKVWLQELRSNLNIFWGTIESEISKNGAASYIFPLQRCIFSFLCASLAGVDASVSPDIAENGWKTINTWLALQVIPTAKLGVVPQPLEEILLHTWPYPSLLIAGNYKKLYNFIDENAGDCLRLGQEEFGLTRDEAIQNLLFVLGFNAYGGFSVFLPSLIGRITGDNSGLQERIRTEVRRVCGSGSDLNFKTVNEMELVKSVVYETLRFSPPVPLQFARARKDFQISSHDAVFEVKKGELLCGYQPLVMRDANVFDEPEEFKPDRYVGETGSELLNYLYWSNGPQTGTPSASNKQCAAKDIVTLTASLLVADLFLRYDTITGDSGSIKAVVKAK

SEQ ID NO: 10489 - protein, 492 aa, Glycine max
  unsure (1)..(492): unsure at all Xaa locations
FGSRSNHHTTQHFPSPPPPCXLPPPSLVTAATPTELPIRQIPGSYGFPLLGPISDRLDYFWFQKPESFFRKRVEKYKSTVFRTNVPPSFPFFVNVNPNVIAVLDVKSFSHLFDMDLVDKKDVLVGDFVPSVAFTGNMRVGVYQDTTEPQHSKVKNYIMDILKRSSGIWVSELESNLDTLWDNIEASLSKSSSVSYLFPLQQFLFTFLCKVLAGADPARDPKIAESGYSMLNSWLALQLLPTVSVGILQPLEEIFLHSFAYPFFLVGGNYNNLYNFIKQQGKDTINRGARFGLTEEEAIHNLLFVLGFNSYGGFSIFLPSLIDAIASNSALQEKLKKEAREKGGSTLTFDSVKEMDLIQSVVYETLRMNPPVPLQYGRARKDFRLSSHDSVFHVKKGELLCGFQKLVMRDSVIFDEPDRFKPDRFTQEKGAQLLNYLYWSNGPQTGSPSVSNKQCAGKDVVTLTAALIVAYLFRRYDSIQGDGSSITALQKTK

SEQ ID NO: 10490 - protein, 480 aa, Medicago sativa
MSLPPPIPPPSLTTPPKARPTELPIRQIPGSYGWPLLGPLSDRLDYFWFQKPENFFRTRMDKYKSTVFRTNIPPTFPFFTNVNPNIIAVLDCKSFSHLFDMDLVDKRDVLVGDFVPSVEFTGNIRVGVYQDVSEPQHAKAKNFSMNILKQSSSIWVPELISNLDIFLDQIEATLSKSSSASYFSPLQQFLFTFLSKVLARADPSLDSKIAESGSSMLNKWLAVQLLPTVSVGTIQPLEEIFLHSFSYPYALVSGDYNNLYNFIKQHGKEVIKSGTEFGLSEDEAIHNLLFVLGFNSYGGFSIFLPKLIESIANGPTGLQEKLRKEAREKGGSTLGFDSLKELELINSVVYETLRMNPPVPLQFGRARKDFQLSSYDSAFNVKKGELLCGFQKLIMRDPVVFDEPEQFKPERFTKEKGAELLNYLYWSNGPQTGSPTVSNKQCAGKDIVTFTAALIVAHLLRRYDLIKGDGSSITALRKAK

SEQ ID NO: 10491 - protein, 480 aa, Medicago sativa
MSLPPPIPPPSLATPPKARPTELPIRQIPGSHGWPLLGPLSDRLDYFWFQKPENFFRTRMEKYKSTVFRTNVPPTFPFFTNVNPNIIAVLDCKSFSHLFDMDLVDKRDVLVGDFVPSVEFTGNIRVGVYQDVSEPQHAKAKNFSMNILKQSSSIWVPELISNLDIFLDQIEATLSNSSSASYFSPLQKFLFTFLSKVLARADPSLDPKIAESGSSMLNKWLAVQLLPTVSVGTIQPLEEIFLHSFSYPYALVSGDYKNLYNFIKQHGKEVIKNGTEFGLSEDEAIHNLLFVLGFNSYGGFSIFLPKLIESITNGPTGLQEKLRKEAREKGGSTLGFDSLKELELINSVVYETLRMNPPVPLQFGRARKDFQLSSYDSAFNVKKGELLCGFQKLVMRDPVVFDEPEQFKPERFTKEKGAELLNYLYWSNGPQTGSPTVSNKQCAGKDIVTFTAALIVAHLLRRYDLIKGDGSSITALQKAK

SEQ ID NO: 10492 - protein, 480 aa, Medicago sativa
MSLPPPIPPPSLATPPKARPTELPIRQIPGSHGWPLLGPLSDRLDYFWFQKPENFFRTRMDKYKSTVFRTNVPPTFPFFTNVNPNIIAVLDCKSFSHLFDMDLVDKRDVLVGDFVPSVEFTGNIRVGVYQDVSEPQHAKAKNFSMNILKQSSSIWVPELISNLDIFLDQIEATLSNSSSASYFSPLQKFLFTFLSKVLARADPSLDPKIAESGSSMLNKWLAVQLLPTVSVGTIQPLEEIFLHSFSYPYALVSGDYKNLYNFIKQHGKEVIKSGTEFGLSEDEAIHNLLFVLGFNSYGGFSIFLPKLIESIANGPTGLQEKLRKEAREKGGSTLGFDSLKELELINSVVYETLRMNPPVPLQFGRARKDFQLSSYDFAFNVKKGELLCGFQKLVMRDPVVFDEPEQFKPERFTKEKGAELLNYLYWSNGPQTGSPTVSNKQCAGKDIVTFTAALIVAHLLRRYDLIKGDGSSITALRKAK

SEQ ID NO: 10493 - protein, 480 aa, Capsicum annuum
MIPIMSSAPLSTATPISLPVRKIPGSYGFPLLGPLWDRLDYNWFQKLPDFFSKRVEKYNSTVFRTNVPPCFPFFLGVNPNVVAVLDVKSFAHLFDMEIVEKANVLVGDFMPSVVYTGDMRVCAYLDTSEPKHTQIKNFSLDILKRSSKTWVPTLVKELDTLFGTFESDLSKSKSASLLPALQKFLFNFFSLTFLGADPSASPEIANSGFAYLDAWLAIQLAPTVSIGVLQPLEEIFVHSFSYPYFLVRGGYEKLIKFVKSEAKEVLTRAQTDFQLTEQEAIHNLLFILGFNAFGGFTIFLPTLLGNLGDEKNAEMQEKLRKEVREKVGTNQENLSFESVKEMELVQSFVYESLRLSPPVPSQYARARKDFMLSSHDSVYEIKKGELLCGYQPLVMKDPKVFDEPEKFMLERFTKEKGKELLNYLFWSNGPQTGRPTESNKQCAAKDAVTLTASLIVAYIFQKYDSVSFSSGSLTSVKKAC

SEQ ID NO: 10494 - protein, 480 aa, Capsicum annuum [sequence omitted]

SEQ ID NO: 10495 - protein, 476 aa, Lycopersicon esculentum
MNSAPLSTPAPVTLPVRSIPGSYGLPLVGPIADRLDYFWFQKPENFFTKRMEKHKSTVFRTNVPPCFPFFGSVNPNVVAVLDVKSFSHLFDMEIVEKANVLVGDFMPSVVYTGDMRVCAYLDTSEPKHAQIKNFSQDILKRGSKTWVPTLLKELDTMFTTFEADLSKSNTASLLPALQKFLFNFFSLTILGADPSVSPEIANSGYIFLDSWLAIQLAPTVSIGVLQPLEEILVHSFAYPFFLVKGNYEKLVQFVKNEAKEVLSRAQTEFQLTEQEAIHNLLFILGFNAFGGFSIFLPTLLGNLGDEKNADMQEKLRKEVRDKVGVNPENLSFESVKEMELVQSFVYETLRLSPPVPSQYARARKDFKLSSHDSVYEIKKGELLCGYQPLVMKDPKVFDEPEKFVLERFTKEKGKELLNYLFWSNGPQTGRPTESNKQCAAKDMVTLTASLIVAYIFQKYDSVSFSSGSLTSVKKAS

SEQ ID NO: 10496 - protein, 476 aa, Lycopersicon esculentum
MNSAPLSTPAPVTLPVRSIPGSYGLPLVGPIADRLDYFWFQKPENFFTKRMEKHKSTVFRTNVPPCFPFFGSVNPNVVAVLDVKSFSHLFDMEIVEKANVLVGDFMPSVVYTGDMRVCAYLDTSEPKHAQIKNFSQDILKRGSKTWVPTLLKELDTMFTTFEADLSKSNTASLLPALQKFLFNFFSLTILGADPSVSPEIANSGYIFLDSWLAIQLAPTVSIGVLQPLEEILVHSFAYPFFLVKGNYEKLVQFVKNEAKEVLSRAQTGFQLTEQEAIHNLLFILGFNAFGGFSIFLPTLLGNLGDEKNADMQEKLRKEVRDKVGVNPENLSFESVKEMELVQSFVYETLRLSPPVPSQYARARKDFKLSSHDSVYEIKKGELLCGYQPLVMKDPKVFDEPEKFVLERFTKEKGKELLNYLFWSNGPQTGRPTESNKQCAAKDMVTLTASLIVAYIFQKYDSVSFSSGSLTSVKKAS

SEQ ID NO: 10497 - protein, 476 aa, Lycopersicon esculentum
MNSAPLSTPAPVTLPVRSIPGSYGLPLVGPIADRLDYFWFQKPENFFTKRMEKHKSTVFRTNVPPCFPFFGSVNPNVVAVLDVKSFSHLFDMEIVEKANVLVGDFMPSVVYTGDMRVCAYLDTSEPKHAQIKNFSQDILKRGSKTWVPTLLKELDTMFTTFEADLSKSNTASLLPALQKFLFNFFSLTILGADSSVSPEIANSGYIFLDSWLAIQLAPTVSIGVLQPLEEILVHSFAYPFFLVKGNYEKLVQFVKNEAKEVLSRAQTEFQLTEQEAIHNLLFILGFNAFGGFSIFLPTLLGNLGDEKNADMQEKLRKEVRDKVGVNPENLSFESVKEMELVQSFVYETLRLSPPVPSQYARARKDFKLSSHDSVYEIKKGELLCGYQPLVMKDPKVFDEPEKFVLERFTKEKGKELLNYLFWSNGPQTGRPTESNKQCAAKDMVTLTASLIVAYIFQKYDSVSFSSGSLTSVKKAS

SEQ ID NO: 10498 - protein, 479 aa, Lycopersicon esculentum
IPIMNPAPLSTPAPVTLPVRSIPGSYGLPLVGPIADRLDYFWFQKPENFFTKRMEKHKSTVFRTNVPPCFPFFGSVNPNVVAVLDVKSFSHLFDMEIVEKANVLVGDFMPSVVYTGDMRVCAYLDTSEPKHAQIKNFSQDILKRGSKTWVPTLLKELDTMFTTFEADLSKSNTASLLPALQKFLFNFFSLTILGADPSVSPEIANSGYIFLDSWLAIQLAPTVSIGVLQPLEEILVHSFAYPFFLVKGNYEKLVQFVKNEAKEVLSRAQTEFQLTEQEAIHNLWFILGFNAFGGFSIFLPTLLGNLGDEKNADMQEKLRKEVRDKVGVNPENLSFESVKEMELVQSFVYETLRLSPPVPSQYARARKDFKLSSHDSVYEIKKGELLRGYQPLVMKDPKVFDEPEKFVLERFTKEKGKELLNYLFWSNGPQTGRPTESNKQCAAKDMVTLTASLIVAYIFQKYDSVSFSSGSLTSVKKAS

SEQ ID NO: 10499 - protein, 480 aa, Solanum tuberosum
MIPIMSSAPLSTPAPVTLPVRTIPGSYGLPLLGPIADRLDYFWFQKPENFFTKRMEKHKSTVFRTNVPPCFPFVGSVNPNVVAVLDVKSFSHLFDMEIVEKANVLVGDFMPSEVYTGDMRVCAYLDTSEPKHAQIKNFSLDILKRSSKTWVPTLLKELDTMFTTFEADLSKSKEASLLPALQKFLFNFFSLTLLGADPSVSPEIANSGYIFLDSWLAIQLAPTVSIGVLQPLEEILVHSFAYPFFLVKGNYEKLVQFVKNEAKEVLNRAQTEFQLTEQEAIHNLLFILGFNAFGGFTIFLPTLLGNLGDEKNAEMQEKLRKEVRDKVGVNPENLSFESVKEMELVQSFVYETLRLTPPVPSQYARARKDFKLSSHDSVYEIKKGELLCGYRPLVMKDPKVLDEPEKFVLERFTKEKGKELLNYLFWSNGPQTGRPTESNKQCSAKEIVTLTASLIVAYIFQKYDSVSFSSGSLTSVKKAS

SEQ ID NO: 10500 - protein, 477 aa, Oryza sativa
FPQPASAAAATRPIPGSYGPPLLGPLRDRLDYFWFQGPDDFFRRRAADHKSTVFRANIPPTFPFFLGVDPRVVAVVDAAAFTALFDPALVDKRDVLIGPYVPSLAFTRGTRVGVYLDTQDPDHARTKAFSIDLLRRAARNWAAELRAAVDDMLAAVEEDLNRAPAASYLIPLQKCIFRFLCKALVGADPAADGLVDRFGVYILDVWLALQLVPTQKVGVIPQPLEELLLHSFPLPSFVVKPGYDLLYRFVEKHGAAAVSIAEKEHGISKEEAINNILFVLGFNAFGGFSVFLPFLVMEVGNGRDDLRRRLREEVRRVLGGGDGGEAGFAAVREMALVRSTVYEVLRMQPPVPLQFGRARRDFVLRSHGGAAYEVGKGELLCGYQPLAMRDPAVFDRPEEFVPERFLGDDGEALLQYVYWSNGPETGEPSPGNKQCAAKEVVVATACMLVAELFRRYDDFECDGTSFTKLDKRELTPS

SEQ ID NO: 10501 - protein, 210 aa, Triticum aestivum
  unsure (1)..(210): unsure at all Xaa locations
RVGGRVGGXAWAVFLPFLILQVGKDAALRARLRDEVRAALERHAGEVGFASVRGMPLVRSTVYEVLRMNPPVPLQFGRARRDFVLRSHGGEGFSVAAGEMLCGYQPLAMRDPAVFDRPDEFVADRFVGAEGEALLRYVYWSNGPETGEPAAGNKQCAAKEVVVATACMLVAELFRRYDDFECDGTAFTRLHKRPQPSXKSNLVLYVRLGN

SEQ ID NO: 10502 - protein, 496 aa, Nicotiana attenuata
MSTLMAKMMSGSTPTNPGSTGTSSPSLTPPPASLPVRTIPGGYGWPLLGPISDRLDYNWFQGPNTFFTKRIEKHKSTVFRTNVPPCFPFFLGVNPNVVAVLDVKSFSHLFDMEIVEKANVLVGDFMPSVKYTGDMRVCAYLDTSEPKHTQIKNFSLDILKRSSKTWVPTLVNELNSMFETFESDISKSNSASLLPTMQKFLFNFFSLSLLGANPSASPEIANSGYVMLDTWLAIQLAPTVSIGLLQPLEEIFVHSFNYPFFLVKGSYEKLIQFVKNEAKEVLNRGKSEFGLTEQEAIHNLLFILGFNAFGGFSIFLPTLLGNLGDEKNAELQEKLRNEVREKVGLKTENLSFESVKEMELVQSFVYETLRLSPPVPSQYARARKDFKLSSHDSVYEIKKGELLCGYQPLVMRDPKVFDDPEKFVLERFTKEKGKELLNYLFWSNGPQTGRPTESNKQCAAKDVVTLTASLIVAYIFQRYDSVSFSSGSLTSVKKAS

SEQ ID NO: 10503 - protein, 385 aa, Coffea arabica
MELQEVLHMNGGEGDASYAKNSSFNQLVLAKVKPVLEQCVGELLRANLPNINKCIKVADLGCASGPNTLLTVRDIVQSIDKVRQEMKNELERPTIQVFLTDLFQNDFNSVFMLLPSFYRKLEKENGRKIGSCLIAAMPGSFHGRLFPEESMHFLHSSYSLQFLSQVPSGLVTELGITANKRSIYSSKASPPPVQKAYLDQFTKDFTTFLRIRSEELLSRGRMLLTCICKGDEFDGPNTMDLLEMAINDLVVEGHLEEEKLDSFNVPIYAASVEELKCIVEEEGSFEILYLETFKLRYDAGFSIDDDCQVRSHSPEYSDEHARAAHVASLLRSVYEPILANHFGEAIIPDIFHRFATNAAKVIRLGKGFYNNLIISLAKKPEKSDI

SEQ ID NO: 10504 - protein, 385 aa, Coffea arabica
MELQEVLHMNGGEGEASYAKNSSFNQLVLAKVKPVLEQCVRELLRANLPNINKCIKVADLGCASGPNTLLTVWDTVQSIDKVKQEMKNELERPTIQVFLTDLFQNDFNSVFMLLPSFYRKLEKENGRKIGSCLIAAMPGSFHGRLFPEESMHFLHSSYSLQFLSQVPSGLVTELGITANKRSIYSSKASPPPVQKAYLDQFTKDFTTFLRMRSEELLSRGRMLLTCICKGDECDGPNTMDLLEMAINDLVAEGRLGEEKLDSFNVPIYTASVEEVKCMVEEEGSFEILYLQTFKLRYDAGFSIDDDCQVRSHSPVYSDEHARAAHVASLIRSVYEPILASHFGEAIIPDIFHRFATNAAKVIRLGKGFYNNLIISLAKKPEKSDI

SEQ ID NO: 10505 - protein, 385 aa, Coffea arabica
MELQEVLHMNGGEGEASYAKNSSFNQLVLAKVKPVLEQCVRELLRANLPNINKCIKVADLGCASGPNTLLTVWDTVQSIDKVRQEMKNELERPTIQVFLTDLFQNDFNSVFMLLPSFYRKLEKENGRKIGSCLIAAMPGSFHGRLFPEESMHFLHSSYSLQFLSQVPSGLVTELGITANKRSIYSSKASPPPVQKAYLDQFTKDFTTFLRMRSEELLSRGRMLLTCICKGDECDGPNTMDLLEMAINDLVAEGRLGEEKLDSFNVPIYTASVEEVKCMVEEEGSFEILYLQTFKLRYDAGFSIDDDCQVRSHSPVYSDEHARAAHVASLIRSVYEPILASHFGEAIIPDIFHRFATNAAKVIRLGKGFYNNLIISLAKKPEKSDI

SEQ ID NO: 10506 - protein, 385 aa, Coffea arabica
MELQEVLHMNGGEGDASYAKNSSFNQLVLAKVKPVLEQCVGELLRANLPNINKCIKVADLGCASGPNTLLTVRDIVQSIDKVRQEMKNELERPTIQVFLTDLFQNDFNSVFMLLPSFYRKLEKENGRKIGSCLIAAMPGSFHGRLFPEESMHFLHSSYSLQFLSQVPSGLVTELGITANKRSIYSSKASPPPVQKANLDQFTKDFTTFLRIRSEELLSRGRMLLTCICKGDEFDGPNTMDLLEMAINDLVVEGHLEEEKLDSFNVPIYAASVEELKCIVEEEGSFEILYLETFKLRYDAGFSIDDDCQVRSHSPEYSDEHARAAHVASLLRSVYEPILANHFGEAIIPDIFHRFATNAAKVIRLGKGFYNNLIISLAKKPEKSDI

SEQ ID NO: 10507 - protein, 384 aa, Coffea arabica
MELQEVLHMNGGEGDTSYAKNSFYNLFLIRVKPILEQCIQELLRANLPNINKCIKVADLGCASGPNTLLTVRDIVQSIDKVGQEKKNELERPTIQIFLNDLFQNDFNSVFKSLPSFYRKLEKENGCKIGSCLIGAMPGSFYGRLFPEESMHFLHSCYCLHWLSQVPSGLVTELGISANKGCIYSSKASRPPIQKAYLDQFTKDFTTFLRIHSEELISRGRMLLTWICKEDEFENPNSIDLLEMSINDLVIEGHLEEEKLDSFNVPIYAPSTEEVKCIVEEEGSFEILYLETFKVPYDAGFSIDDDYQGRSHSPVSCDEHARAAHVASVVRSIFEPIVASHFGEAILPDLSHRIAKNAAKVLRSGKGFYDSVIISLAKKPEKADM

SEQ ID NO: 10508 - protein, 384 aa, Coffea arabica
MELQEVLHMNGGEGDTSYAKNSFYNLFLIRVKPILEQCIQELLRANLPNINKCIKVADLGCASGPNTLLTVRDIVQSIDKVGQEKKNELERPTIQIFLNDLFQNDFNSVFKSLPSFYRKLEKENGRKIGSCLIGAMPGSFYGRLFPEESMHFLHSCYCLHWLSQVPSGLVTELGISANKGCIYSSKASRPPIQKAYLDQFTKDFTTFLRIHSEELISRGRMLLTWICKEDEFENPNSIDLLEMSINDLVIEGHLEEEKLDSFNVPIYAPSTEEVKCIVEEEGSFEILYLETFKVPYDAGFSIDDDYQGRSHSPVSCDEHARAAHVASVVRSIFEPIVASHFGEAIMPDLSHRIAKNAAKVLRSGKGFYDSLIISLAKKPEKSDV

SEQ ID NO: 10509 - protein, 372 aa, Coffea arabica
MELQEVLRMNGGEGDTSYAKNSAYNQLVLAKVKPVLEQCVRELLRANLPNINKCIKVADLGCASGPNTLLTVRDIVQSIDKVGQEKKNELERPTIQIFLNDLFPNDFNSVFKLLPSFYRKLEKENGRKIGSCLIGAMPGSFYSRLFPEESMHFLHSCYCLQWLSQVPSGLVTELGISTNKGSIYSSKASRLPVQKAYLDQFTKDFTTFLRIHSEELFSHGRMLLTCICKGVELDARNAIDLLEMAINDLVVEGHLEEEKLDSFNLPVYIPSAEEVKCIVEEEGSFEILYLETFKVLYDAGFSIDDEHIKAEYVASSVRAVYEPILASHFGEAIIPDIFHRFAKHAAKVLPLGKGFYNNLIISLAKKPEKSDV

SEQ ID NO: 10510 - protein, 385 aa, Coffea arabica
MELQEVLRMNGGEGDTSYAKNSAYNQLVLAKVKPVLEQCVRELLRANLPNINKCIKVADLGCASGPNTLLTVRDIVQSIDKVGQEKKNELERPTIQIFLNDLFPNDFNSVFKLLPSFYRKLEKENGRKIGSCLIGAMPGSFYSRLFPEESMHFLHSCYCLQWLSQVPSGLVTELGISTNKGSIYSSKASRLPVQKAYLDQFTKDFTTFLRIHSEELFSHGRMLLTCICKGVELDARNAIDLLEMAINDLVVEGHLEEEKLDSFNLPVYIPSAEEVKCIVEEEGSFEILYLETFKVLYDAGFSIDDDYPVRSHFQVYGDEHIKAEYVASLIRSVYEPILASHFGEAIMPDLFHRLAKHAAKVLHLGKGFYNNLIISLAKKPEKSDV

SEQ ID NO: 10511 - protein, 378 aa, Coffea arabica
MELQEVLHMNGGEGDTSYAKNSSYNLALAKVKPVLEQCIRELLRANLPNINNCIKVADLGCASGPNTLLTVRDIVQSIDKVGQEEKNELERPTIQIFLNDLFQNDFNSVFKLLPSFYRKLEKENGRKIGSCLISAMPGSFYGRLFPEESMHFIHSCYSFHWLSQVPSGLVIELGISANKGSIYSSKGCRPPVQKAYLDQFTKDFTTFLRIHSKELFSRGRMLLTCICKVDEFDEPNPLDLLDMAINDLIVEGLLEEEKLDSFNIPFFTPSAEEVKCIVEEEGSCEILYLETFKAHYDAAFSIDDDYPVRSHEQIKAEYVASLIRSVYEPILASHFGEAIMPDLFHRLAKHAAKVLHMGKGCYNNLIISLAKKPEKSDV

SEQ ID NO: 10512 - protein, 384 aa, Coffea arabica
MELQAVLHMNGGEGDTSYAKNSSYNLALAKVKPVLEQCIRELLRANLPNINNCIKVADLGCASGPNTLLTVRDIVQSIDKVGQEEKNELERPTIQIFLNDLFQNDFNSVFKLLPSFYRKLEKENGRKIGSCLISAMPGSFYGRLFPEESMHFIHSCYSFHWLSQVPSGLVIELGISANKGSIYSSKASRPPVQKAYLDQFTKDFTTFLRIHSKELFSRGRMLLTCICKVDEYDEPNPLDLLDMAINDLIVEGHLEEEKLASFNLPFFTPSAEEVKCIVEEEGSFEILYLETFKAHYDAGFSIDDDYPVRSHFQVYGDEHIKAEYVASLIRSVYEPILASHFGEAIMPDLFHRLAKHAAKVLHLGKGCYNNLIISLAKKPEKSDM

SEQ ID NO: 10513 - protein, 378 aa, Coffea arabica
MELQEVLHMNEGEGDTSYAKNASYNLALAKVKPFLEQCIRELLRANLPNINKCIKVADLGCASGPNTLLTVRDIVQSIDKVGQEEKNELERPTIQIFLNDLFQNDFNSVFKLLPSFYRKLEKENGRKIGSCLISAMPGSFYGRLFPEESMHFLHSCYSVHWLSQVPSGLVIELGIGANKGSIYSSKGCRPPVQKAYLDQFTKDFTTFLRIHSKELFSRGRMLLTCICKVDEFDEPNPLDLLDMAINDLIVEGLLEEEKLDSFNIPFFTPSAEEVKCIVEEEGSCEILYLETFKAHYDAAFSIDDDYPVRSHEQIKAEYVASLIRSVYEPILASHFGEAIMPDLFHRLAKHAAKVLHMGKGCYNNLIISLAKKPEKSDV

SEQ ID NO: 10514 - protein, 378 aa, Coffea arabica
MELQEVLHMNEGEGDTSYAKNASYNLALAKVKPFLEQCIRELLRANLPNINKCIKVADLGCASGPNTLLTVRDIVQSIDKVGQEEKNELERPTIQIFLNDLFQNDFNSVFKLLPSFYRKLEKENGRKIGSCLISAMPGSFYGRLFPEESMHFLHSCYSVHWLSQVPSGLVIELGIGANKGSIYSSKGCRPPVQKAYLDQFTKDFTTFLRIHSKELFSRGRMLLTCICKVDVFDEPNPLDLLDMAINDLIVEGLLEEEKLDSFNIPFFTPSAEEVKCIVEEEGSCEILYLETFKAHYDAAFSIDDDYPVRSHEQIKAEYVASLIRSVYEPILASHFGEAIMPDLFHRLAKHAAKVLHMGKGCYNNLIISLAKKPEKSDV

SEQ ID NO: 10515 - protein, 384 aa, Coffea arabica
MELQEVLHMNEGEGDTSYAKNASYNLALAKVKPFLEQCIRELLRANLPNINKCIKVADLGCASGPNTLLTVRDIVQSIDKVGQEEKNELERPTIQIFLNDLFQNDFNSVFKLLPSFYRKLEKENGRKIGSCLISAMPGSFYGRLFPEESMHFLHSCYSVHWLSQVPSGLVIELGIGANKGSIYSSKASRPPVQKAYLDQFTKDFTTFLRIHSKELFSRGRMLLTCICKVDEYDEPNPLDLLDMAINDLIVEGHLEEEKLASFNLPFFTPSAEEVKCIVEEEGSFEILYLETFKAHYDAGFSIDDDYPVRSHFQVYGDEHIKAEYVASLIRSVYEPILASHFGEAIMPDLFHRLAKHAAKVLHLGKGCYNNLIISLAKKPEKSDV

SEQ ID NO: 10516 - protein, 384 aa, Coffea arabica
MELQEVLHMNGGEGDTSYAKNSSYNLFLIRVKPVLEQCIQELLRANLPNINKCFKVGDLGCASGPNTFSTVRDIVQSIDKVGQEKKNELERPTIQIFLNDLFQNDFNSVFKLLPSFYRNLEKENGRKIGSCLIGAMPGSFYSRLFPEESMHFLHSCYCLHWLSQVPSGLVTELGISANKGCIYSSKASGPPIKKAYLDQFTKDFTTFLRIHSEELISRGRMLLTFICKEDEFDHPNSMDLLEMSINDLVIEGHLEEEKLDSFNVPIYAPSTEEVKRIVEEEGSFEILYLETFYAPYDAGFSIDDDYQGRSHSPVSCDEHARAAHVASVVRSIYEPILASHFGEAILPDLSHRIAKNAAKVLRSGKGFYDSVIISLAKKPEKADM

SEQ ID NO: 10517 - protein, 353 aa, Brassica napus var. napus
MATTPQWIMIGGDGPESYNQHSSYQRALLETSKEKMNEAISAKLSLDLISDRFCVADFGCASGPNTFVAVQNIIDAVEDKYRKETGQNRAENIEFQVLFNDSTTNDFNTLFQALPPGRRYYSAGVPGSFFGRVLPKHSFHIGVISYAFHFTSKIPKGITDRDSPLWNRDVHCTGFNEAVKKAYLDQYSADTKNLLDARAEELFHGGLMLLLGSGLRNGVKMSETAKGIMMDLIGASLNDLAQQGVIDQDKVDSFSTPLYIAEEGELRQIIKENGKFTIEAFEDIIHPNGEFPLDPKILAVSFRASYGAFLSAYFGVDTTRKVFELVEVKARKEFSKIQNAKPGMQYLIVLRKN

SEQ ID NO: 10518 - protein, 318 aa, Brassica napus var. napus
MNEAISAKLSLDLISDRFCVADFGCASGPNTFVAVQNIIDAVEDKYRKETGQNRAENIEFQVLFNDSTTNDFNTLFQALPPGRRYYSAGVPGSFFGRVLPKHSFHIGVISYAFHFTSKIPKGITDRDSPLWNRDVHCTGFNEAVKKAYLDQYSADTKNLLDARAEELFHGGLMLLLGSGLRNGVKMSETAKGIMMDLIGASLNDLAQQGVIDQDKVDSFSTPLYIAEEGELRQIIKENGKFTIEAFEDIIHPNGEFPLDPKILAVSFRASYGAFLSAYFGVDTTRKVFELVEVKAREEFSRIQNAKPGMQYLIVLRKN

SEQ ID NO: 10519 - protein, 357 aa, Atropa belladonna
MKVVEVLHMNGGNGDISYANNSLVQRKVILMTKPITEQAISDLYCSFFPETLCIADLGCSSGANTFLVVSELVKIVEKERKIHNLQSAGNLFHFNDLPGNDFNTIFQSLGKFQQDLRKQIGEEFGPCFFSGVPGSFYTRLFPSESLHFVHSSYSLMWLSQVPDLIEKNKENIYIASTSPPSVIKAYYKQYEKDFSNFLKYRSEELMKGGKMVLTFLGRESEDPSSKECCYIWELLSMALNELVLEGLIEEEKVDSFNIPQYTPSPEEVKYIVEKEGSFIINRLEATRVHWNVSNEGINGGYNVAKCMRAVAEPLLVSQFDQKLMNLVFQKYEEIISDCISKEKTEFINVIVSLTKKR

SEQ ID NO: 10520 - protein, 370 aa, Cucumis sativus
MLHVNGGMGNTSYANNSRLQREIISMTCSIAKEALTNFYNQHIPTSITIADLGCSSGQNTLMLVSYLIKQVEEIRQKLHQRLPLEYQIFLNDLHGNDFNAVFTSLPRFLEDLGTQIGGDFGPCFFNGVPGSFYARLFPTKSVHFFHSSSSLHWLSRVPVGIENNKGNIYIGSTSPKSVGEAYYKQFQKDFSMFLKCRAEELVMGGGMVLTLVGRTSEDPSKSGGYYIWELLGLALNTMVAEGIVEEKKADSFNIPYYIPSPKEVEAEVVKEGSFILNQLKASSINLNHTVHKTEEESSTPLINNSLADATDYDFAKCIQSVSEPLLIRHFGEAIMDELFIRHRNIVAGCMAKHRIMECINLTISLTKKIS

SEQ ID NO: 10521 - protein, 359 aa, Clarkia breweri
MDVRQVLHMKGGAGENSYAMNSFIQRQVISITKPITEAAITALYSGDTVTTRLAIADLGCSSGPNALFAVTELIKTVEELRKKMGRENSPEYQIFLNDLPGNDFNAIFRSLPIENDVDGVCFINGVPGSFYGRLFPRNTLHFIHSSYSLMWLSQVPIGIESNKGNIYMANTCPQSVLNAYYKQFQEDHALFLRCRAQEVVPGGRMVLTILGRRSEDRASTECCLIWQLLAMALNQMVSEGLIEEEKMDKFNIPQYTPSPTEVEAEILKEGSFLIDHIEASEIYWSSCTKDGDGGGSVEEEGYNVARCMRAVAEPLLLDHFGEAIIEDVFHRYKLLIIERMSKEKTKFINVIVSLIRKSD

SEQ ID NO: 10522 - protein, 389 aa, Arabidopsis thaliana
MEVMRVLHMNKGNGETSYAKNSTAQSNIISLGRRVMDEALKKLMMSNSEISSIGIADLGCSSGPNSLLSISNIVDTIHNLCPDLDRPVPELRVSLNDLPSNDFNYICASLPEFYDRVNNNKEGLGFGRGGGESCFVSAVPGSFYGRLFPRRSLHFVHSSSSLHWLSQVPCREAEKEDRTITADLENMGKIYISKTSPKSAHKAYALQFQTDFLVFLRSRSEELVPGGRMVLSFLGRRSLDPTTEESCYQWELLAQALMSMAKEGIIEEEKIDAFNAPYYAASSEELKMVIEKEGSFSIDRLEISPIDWEGGSISEESYDLAIRSKPEALASGRRVSNTIRAVVEPMLEPTFGENVMDELFERYAKIVGEYFYVSSPRYAIVILSLVRTG

SEQ ID NO: 10523 - protein, 389 aa, Arabidopsis thaliana
MEVMRVLHMNKGNGETSYAKNSTAQSNIISLGRRVMDEALKKLMMSNSEISSIGIADLGCSSGPNSLLSISNIVDTIHNLCPDLDRPVPELRVSLNDLPSNDFNYICASLPEFYDRVNNNKEGLGFGRGGGESCFVSAVPGSFYGRLFPRRSLHFVHSSSSLHWLSQVPCREAEKEDRTITADLENMGKIYISKTSPKSAHKAYALQFQTDFWVFLRSRSEELVPGGRMVLSFLGRRSLDPTTEESCYQWELLAQALMSMAKEGIIEEEKIDAFNAPYYAASSEELKMVIEKEGSFSIDRLEISPIDWEGGSISEESYDLVIRSKPEALASGRRVSNTIRAVVEPMLEPTFGENVMDELFERYAKIVGEYFYVSSPRYAIVILSLVRAG

SEQ ID NO: 10524 - protein, 379 aa, Arabidopsis thaliana
MDPRFINTIPSLRYDDDKCDDEYAFVKALCMSGGDGANSYSANSRLQKKVLSMAKPVLVRNTEEMMMNLDFPTYIKVAELGCSSGQNSFLAIFEIINTINVLCQHVNKNSPEIDCCLNDLPENDFNTTFKFVPFFNKELMITNKSSCFVYGAPGSFYSRLFSRNSLHLIHSSYALHWLSKVPEKLENNKGNLYITSSSPQSAYKAYLNQFQKDFTMFLRLRSEEIVSNGRMVLTFIGRNTLNDPLYRDCCHFWTLLSNSLRDLVFEGLVSESKLDAFNMPFYDPNVQELKEVIQKEGSFEINELESHGFDLGHYYEEDDFEAGRNEANGIRAVSEPMLIAHFGEEIIDTLFDKYAYHVTQHANCRNKTTVSLVVSLTKK

SEQ ID NO: 10525 - protein, 396 aa, Arabidopsis thaliana
MDSRFTDSTTTLRCNGKSENERKNGDEERISKYSFVSPLCMRGGDGYNSYSSNSLLQRRVLSKAKPVLVKNTKDLMINLNFPTYIKVADLGCSSGQNTFLAMSEIINTINVFCQQRNQNPPEIDCCLNDLPSNDFNTTFKFIQFFNGMNITSKESYFVYGVPGSFYSRLFPRRSLHFVHSSYGLHWLSKVPEGLEKNKMSVYITNSSPLSTYKAYLNQFQRDFATFLKLRSEEMVSNGRMVLTFIGRNTIDNPLHRDCCHFWTLLSKSLRDLVAEGLVSASKVDSFYLPFYDPNEKEIKEMVQKEGSFEIRDLETHGYDLGHCNQDESKRSKSGQNEANYIRAVSEPLLAAHFGDAIINILFNKFACHVSQHVSCRNKTTVSIVVSLTKKKTFLMS

SEQ ID NO: 10526 - protein, 354 aa, Arabidopsis thaliana
MSGGDGDNSYSTNSLLQKKVLSKAKPVLVKNTKGMMINLNFPNYIKVADLGCATGENTFLTMAEIVNTINVLCQQCNQKPPEIDCCLNDLPDNDFNTTFKFVPFFNKRVKSKRLCFVSGVPGSFYSRLFPRKSLHFVHSSYSLHWLSKVPKGLEKNSSSVYITTSSPPNAYKAYLNQFQSDFKSFLEMRSEEMVSNGRMVLTFIGRKTLDDPLHRDCCHFWTLLSTSLRDLVYEGLVSASKVDSFNIPFYDPSKEEVMEMIRNEGSFEINDLEIHGFELGLSNHDEDYMLHSQISKAGQREANCIRAVSESMLVADFGVDIMDTLFKKFAYHVSQHASCTNKTTVTLVVSLIRK

SEQ ID NO: 10527 - protein, 371 aa, Arabidopsis thaliana
MDKKDMEREFYMTGGDGKTSYARNSSLQKKASDTAKHITLETLQQLYKETRPKSLGIADLGCSSGPNTLSTITDFIKTVQVAHHREIPIQPLPEFSIFLNDLPGNDFNFIFKSLPDFHIELKRDNNNGDCPSVFIAAYPGSFYGRLFPENTIHFVYASHSLHWLSKVPTALYDEQGKSINKGCVSICSLSSEAVSKAYCSQFKEDFSIFLRCRSKEMVSAGRMVLIILGREGPDHVDRGNSFFWELLSRSIADLVAQGETEEEKLDSYDMHFYAPSADEIEGEVDKEGSFELERLEMLEVKKDKGNTEGDISYGKAVAKTVRAVQESMLVQHFGEKILDKLFDTYCRMVDDELAKEDIRPITFVVVLRKKL

SEQ ID NO: 10528 - protein, 385 aa, Arabidopsis thaliana
MSLCLILCRCDCKSEYKVDEERSSKYPFVGALCMNGGDVDNSYTTKSLLQKRVLSITNPILVKNTEEMLTNLDFPKCIKVADLGCSSGQNTFLAMSEIVNTINVLCQKWNQSRPEIDCCLNDLPTNDFNTTFKFITFFNKKLTSNGSCFVSGVPGSFYSRLFPRKSLHFIYSIYSIHFLSKVPDGLEKNKMSVYITSSSPLSEYKAYLNQFKRDFTTFLRMRSEEMVHNGRMVLTLIGRNTLDNPLYRDCCHCWTLLSNSLRDLVFEGLLSASKVYSFKMPFYDPNEEEVKEIIRNEGSFQINDLEMHEFDLGHSKEKCSLQSHKAKAGQKEASCIRAVTETMLVAHFGDDIIDALFHKYAHHVSQHASCRVKTSVTLIVSLVRK

SEQ ID NO: 10529 - protein, 368 aa, Arabidopsis thaliana
MGVLSMKGGDGEHSYANNSEGQKRLASDAKPVVVETVKEMIVKTDFPGCIKVADLGCSSGENTLLVMSEIVNTIITSYQQKGKNLPEINCCLNDLPDNDFNTTFKLVPAFHKLLKMDVKGKCFISGVPGSFYSRLFPSKSLHFVHSSLCLHWLSKVPDGLEDNKKNVYLRSPCPPNVYKSYLTQFKNDFSLFLRLRADETVPNGRMALTFVGRKSLDPLSKDCFQNWSSISDSLLDLVSEGIVKESDVDSFNLPFYNPDESEVREVIESEGSFKISNFETIFGLLFSYKTGRTEVKDDDDNLDQSCRFEVIRKRASIIRSITEPMLGAHFGDAIMDRLFERYTYHLAERYDTLRNKPTVQFFVSLTRK

SEQ ID NO: 10530 - protein, 363 aa, Arabidopsis thaliana
MKGGDGEHSYANNSEGQKRLASDAKPVVVETVKEMIVKTDFPGCIKVADLGCSSGENTLLVMSEIVNTIITSYQQKGKNLPEINCCLNDLPDNDFNTTFKLVPAFHKLLKMDVKGKCFISGVPGSFYSRLFPSKSLHFVHSSLCLHWLSKVPDGLEDNKKNVYLRSPCPPNVYKSYLTQFKNDFSLFLRLRADETVPNGRMALTFVGRKSLDPLSKDCFQNWSSISDSLLDLVSEGIVKESDVDSFNLPFYNPDESEVREVIESEGSFKISNFETIFGLLFSYKTGRTEVKDDDDNLDQSCRFEVIRKRASIIRSITEPMLGAHFGDAIMDRLFERYTYHLAERYDTLRNKPTVQFFVSLTRK

SEQ ID NO: 10531 - protein, 368 aa, Arabidopsis thaliana
MGVVSMKGGDGEHSYANNSEAQKSITSDAKPEVMKSVNEMIVKMDFPGCIKVADLGCSSGENTFLVMSEIVNTIITTYQQNGQNLPEIDCCLNDLPENDFNTTFKLIPSFHEKLKMNVKGNCYVSGCPGSFYTRLFPSKSLHFVHSSFCLHWLSKVPDGLEENKKNVYLRSPCPPNLYESYWNQFKKDFSMFLRMRAEETMPSGRMALTLVGRKTLDPLSKECFKDWSLVSDSLLDLVSEGVVKESDLESFNLPYYSPDESEVKEVIENEGSFEIKNFETIFGLLFSYKTGHSEVKDDDDDVDHSRRFEVVKTRANMTRSIIEPMLVAHFGEAIIDRLFDKYIYHACQRYDTLRNKPTVNFFVSLTRK

SEQ ID NO: 10532 - protein, 327 aa, Arabidopsis thaliana
MAKPVLVRNTEEMMMNLDFPTYIKVAELGCSSGQNSFLAIFEIINTINVLCQHVNKNSPEIDCCLNDLPENDFNTTFKFVPFFNKELMITNKSSCFVYGAPGSFYSRLFSRNSLHLIHSSYALHWLSKVPEKLENNKGNLYITSSSPQSAYKAYLNQFQKDFTMFLRLRSEEIVSNGRMVLTFIGRNTLNDPLYRDCCHFWTLLSNSLRDLVFEGLVSESKLDAFNMPFYDPNVQELKEVIQKEGSFEINELESHGFDLGHYYEEDDFEAGRNEANGIRAVSEPMLIAHFGEEIIDTLFDKYAYHVTQHANCRNKTTVSLVVSLTKK

SEQ ID NO: 10533 - protein, 359 aa, Arabidopsis thaliana
MKGGTGDHSYATNSHYQRSVFYEIQPLVIENVREMLLKNGFPGCIKVADLGCSTGQNTVLAMSAIAYTIMESYQQMSKNPPEIDCYLNDLPENDFNTTFKLFHSFQEKLKPEVKGKWFVSGVPGSFYSRLFPRKSLHFVHSAFSIHWLSRIPDGLESNTKSIHIKYPYPSNVYKSYLNQFKIDFSLFLKMRSEEVVHNGHMVLTFVGRKVSDTLSKDCFQVWSLLSDCLLDLASEGFVNDSMVKSFNMPFYNPNEEEVREFILKEGSFEITKIEKFDHVVPYKIDREEEDEEQSLQLEAGIKHASWARCITEPLLVAHFGDAIIEPVFNKYAHYMAKYLSVSNHRRNMTLVIVVSLTRK

SEQ ID NO: 10534 - protein, 335 aa, Arabidopsis thaliana
MKSVNEMIVKMDFPGCIKVADLGCSSGENTFLVMSEIVNTIITTYQQNGQNLPEIDCCLNDLPENDFNTTFKLIPSFHEKLKMNVKGNCYVSGCPGSFYTRLFPSKSLHFVHSSFCLHWLSKVPDGLEENKKNVYLRSPCPPNLYESYWNQFKKDFSMFLRMRAEETMPSGRMALTLVGRKTLDPLSKECFKDWSLVSDSLLDLVSEGVVKESDLESFNLPYYSPDESEVKEVIENEGSFEIKNFETIFGLLFSYKTGHSEVKDDDDDVDHSRRFEVVKTRANMTRSIIEPMLVAHFGEAIIDRLFDKYIYHACQRYDTLRNKPTVNFFVSLTRK

SEQ ID NO: 10535 - protein, 353 aa, Brassica napus
MATTPQWIMIGGDGPESYNQHSSYQRALLETSKEKMNEAISAKLSLDLISDRFCVADFGCACGPNTFVAVQNIIDAVEDKYRKETGQNRAENIEFQVLFNDSTTNDFNTLFQALPPGRRYYSAGVPGSFFGRVLPKHSFHIGVISYAFHFTSKIPKGITDRDSPLWNRDVHCTGFNEAVKKAYLDQYSADTKNLLDARAEELFHGGLMLLLGSGLRNGVKMSETAKGIMMDLIGASLNDLAQQGVIDQDKVDSFSTPLYIAEEGELRQIIKENGKFTIEAFEDIIHPNGEFPLDPKILAVSFRASYGAFLSAYFGVDTTRKVFELVEVKARKEFSKIQNAKPGMQYLIVLRKN

SEQ ID NO: 10536 - protein, 375 aa, Oryza sativa (japonica cultivar-group)
MASSLLHCSDKLPFMNVETVLHMKEGLGETSYAQNSRGMDTLKSLITNSAADVYLSQMPERFAVADLGCSSGPNALCLAEDIIGSIGRICCRSSRPPPEFSVLLNDLPTNDFNTIFFSLPEFTDRLKAAAKSDEWGRPMVFLSGVPGSFYGRLFPAKSVHFVCSCSSLHWLSQVPSGLLDEMNRPINKGKMYISSTSPLAVPVAYLRQFQRDFSLFLKSRAAEVFSGGRMVLAMLGRQADGYIDRRTTFLWELLSESFASLVAQGLVEEDKVDAYNVPFYAPSIGEIEEEVRREGSFRMDYVQTYEINLSSSGDARRDGRTVSMAIRAIQESMLSHHFGPEIVDALFAKYTELVTASMEREEVKSVQIGVVLTRL

SEQ ID NO: 10537 - protein, 378 aa, Oryza sativa (japonica cultivar-group)
MSSSLQCPDDPAPSMNVEAVLHMKEGVGETSYAKNSTLQKKSMDTVKSLVTESARDVYASLKPERFTLADLGCSSGTNALGMVEEIVRSVAEVCRGSSPPPEFSVLLNDLPTNDFNTIFSRLPEFTGKLKADADADAGDDPMVFLSGVPGSFYGRLFPSKNVHFVCSFSSLHWLSQVPPGLLDETNGPVNKGKMFISSTSPPAVAAAYSRQFRRDFSLFLRSRAAEVVAGGRMVVSMLGREGERHADRNTTLLWDLLSESFAALVSQGVVEQGKVDAYDAPFYAPSIGEIEEEVRRQGSFRMEVARAYEASLSGSGDARKDGRTVSMAVRAIQESMLGHHFGTEIVDALFAKYTELVTATMEREEVRSVQIGVVLTRL

SEQ ID NO: 10538 - protein, 137 aa, Oryza sativa (japonica cultivar-group)
MKPLIEAAVVDMFEAGLPARFGVADLDCASGPNALALISTAINAVHHHLLGPAPAAASRCDELTVLLNDLPTNDFTSAMTGLPLLRQKHSVVGSGVDYWPGVFVSVVPGTFYGRLFPERTMHLVCSSFSLHWLSKVC

SEQ ID NO: 10539 - protein, 238 aa, Oryza sativa (japonica cultivar-group)
MKPLIEAAVVDMFEAGLPARFGVADLDCASGPNALALISTAINAVHHHLLGPAPAAASRCDELTVLLNDLPTNDFTSAMTGLPLLRQKHSVVGSGVDYWPGVFVSVVPGTFYGRLFPERTMHLVCSSFSLHWLSKSRLVTPTGTKDLSLVPVGIVAESTRHLRDRGGGDGQPYLFTSSSTNIISSSHLFLFLLLSSNSSPSLPHHPFLFLLSNFSSNSSPSLPIIPPLTPLLPSPSSH

SEQ ID NO: 10540 - protein, 357 aa, Petunia x hybrida
MEVVEVLHMNGGNGDSSYANNSLVQQKVILMTKPITEQAMIDLYSSLFPETLCIADLGCSLGANTFLVVSQLVKIVEKERKKHGFKSPEFYFHFNDLPGNDFNTLFQSLGAFQEDLRKHIGESFGPCFFSGVPGSFYTRLFPSKSLHFVYSSYSLMWLSQVPNGIENNKGNIYMARTSPLSVIKAYYKQYEIDFSNFLKYRSEELMKGGKMVLTLLGRESEDPTSKECCYIWELLAMALNKLVEEGLIKEEKVDAFNIPQYTPSPAEVKYIVEKEGSFTINRLETSRVHWNASNNEKNGGYNVSRCMRAVAEPLLVSHFDKELMDLVFHKYEEIISDCMSKEKTEFINVIVSLTKIN

SEQ ID NO: 10541 - protein, 357 aa, Petunia x hybrida
MEVVEVLHMNGGNGDSSYANNSLVQQKVILMTKPITEQAMIDLYSSLFPETLCIADLGCSLGANTFLVVSQLVKIVEKERKKHGFKSPEFYFHFNDLPGNDFNTLFQSLGAFQEDLRKHIGESFGPCFFSGVPGSFYTRLFPSKSLHFVYSSYSLMWLSQVPNGIENNKGNIYMARTSPLSVIKAYYKQYEIDFSNFLKYRSEELMKGGKMVLTLLGRESEDPTSKECCYIWELLAMALNKLVEEGLIKEEKVDAFNIPQYTPSPAEVKYIVEKEGSFTINRLETSRVHWNASNNEKNGGYNVSRCMRAVAEPLLVSHFDKELMDLVFHKYEEIVSDCMSKENTEFINVIISLTKIN

SEQ ID NO: 10542 - protein, 383 aa, Antirrhinum majus
MTKQTQKQNKRMKLAQVLHMNGGLGKSSYASNSLVQRKVISITKPIIEEAMTEFYTRMLPSPHTISIADLGCSCGPNTLLVAAELVKIIVKLRQKLDREPPPEFQIHLNDLPGNDFNSIFRYLLPMFREELREEIGGGEEAGRRCFVSGVPGSFYGRLFPTKSLHFVHSSYSLMWLSKVPEGVKMNKENIYIASTSPQNVINAYYEQFQRDFSSFLICRSEEVIGGGRMVLTFLGRKSASARSKECCYIWELLSLALKQLVLEGVIEKEKLHSFHIPQYTPSPTEVKAEVEKEGSFTVNRLEVSEITWASCGNDFHLPELVASGNEYNVAKCMRSVAEPLLIEHFGESVIDRLFEKYREIIFDRMSREETKFFNVTISMTRRE

SEQ ID NO: 10543 - protein, 364 aa, Antirrhinum majus
MKVMKKLLCMNIAGDGETSYANNSGLQKVMMSKSLHVLDETLKDIIGDHVGFPKCFKMMDMGCSSGPNALLVMSGIINTIEDLYTEKNINELPEFEVFLNDLPDNDFNNLFKLLSHENGNCFVYGLPGSFYGRLLPKKSLHFAYSSYSIHWLSQVPEGLEDNNRQNIYMATESPPEVYKAYAKQYERDFSTFLKLRGEEIVPGGRMVLTFNGRSVEDPSSKDDLAIFTLLAKTLVDMVAEGLVKMDDLYSFNIPIYSPCTREVEAAILSEGSFTLDRLEVFRVCWDASDYTDDDDQQDPSIFGKQRSGKFVADCVRAITEPMLASHFGSTIMDLLFGKYAKKIVEHLSVENSSYFSIVVSLSRR

SEQ ID NO: 10544 - protein, 369 aa, Camellia sinensis
MELATAGKVNEVLFMNRGEGESSYAQNSSFTQQVASMAQPALENAVETLFSRDFHLQALNAADLGCAAGPNTFAVISTIKRMMEKKCRELNCQTLELQVYLNDLFGNDFNTLFKGLSSEVIGNKCEEVPCYVMGVPGSFHGRLFPRNSLHLVHSSYSVHWLTQAPKGLTSREGLALNKGKIYISKTSPPVVREAYLSQFHEDFTMFLNARSQEVVPNGCMVLILRGRQCSDPSDMQSCFTWELLAMAIAELVSQGLIDEDKLDTFNIPSYFASLEEVKDIVERDGSFTIDHIEGFDLDSVEMQENDKWVRGEKFTKVVRAFTEPIISNQFGPEIMDKLYDKFTHIVVSDLEAKLPKTTSIILVLSKIDG

SEQ ID NO: 10545 - protein, 359 aa, Oryza sativa
MKVEQDLHMSRGDGETSYAANSRLQEKAILKTRPLLHKAVEEAHASLFPRALVVADLGCSSGPNTLLVVSEVLSAVANRSSCDHKSSLVADVQFFLNDLPGNDFNLVFQSLELFKKLAEMEFGKALPPYYIAGLPGSFYTRLFPDRSVHLFHSSYCLMWRSKVPDKLARNAGNMYIWETTPPSVVKLYQRQFQEDFSQFLALRHDELVSGGQMVLTFLGRKNRDVLRGEVSYMYGLLAQALQSLVQEGRVEEEKLDSFNLPFYSPSVDEVKAVIRQSGLFDISHIQLFESNWDPQDDSVRSGVNVARCIRAVLEPLIARHFGRCIVDDLFDMYARNVAQHLEQVKTKYPVIVLSLKARR

SEQ ID NO: 10546 - protein, 308 aa, Triticum aestivum
  unsure (1)..(308): unsure at all Xaa locations
MASEQTVHMNGGQGDTSYARNSSLQNAEQNKMRPLIEEAIADLLSTGASLPRSMVVADLGCSSGPNALTLVSICVDAIRSQCLRSRQPPVEVCVFLNDLPDNDFNMVVKSLVAFQQXXHRSVVTGVMPGSFYGRLFTSGSLHLACSANSLHWLSEAPEELRRNKIPAYDIDEHVRRERRRVVIGAYARQFRKDFTLFXLELRAIELAAGGRLVASLAGRRSEEPAAEFTHAWESVALVLSEMASKGMINRAKFDTFYIPIYGPSDEELREIIQAEGSFSIREMQVRHLDPQICSGSNGXFEIQIKVXS

SEQ ID NO: 10547 - protein, 370 aa, Zea mays
MPMTIERDLHMATGNGETSYTKNSRIQEKVMFQIKPVLEEATRAAYSALLPRTMVVADLGCSSGPNTLRFVSEVIGIIARHCKEHDRRHAHNLFFLNDLPGNDFNNLFRSISRWQETTRVRQPEALPPCYISGLSGSFYTRIFPSESVHLFHSLFSVHWHSQASEQLKDTKNNIYITKNMPPSMVKLFQQQFEKDFSLFLKLRYEELVSGGQMVLTFIGRKHEDVFTREPNHLYGLLAQSLKSLVDEGLVEKEKLESFYLPIYSPSVGEVEAIVKQVGLFNMNHVKVFEINWDPYGDSEGDDVHDSIRSGENVAKCLRAVMEPLVASQFGEHILDKLFKEYARRVAKHLENEKTKHAILVLSIEKAIIHV

SEQ ID NO: 10548 - protein, 367 aa, Zea mays
MRIERDLHMATGDGETSYTKNSRIQEKTMFQIKPVLEEATRAVYTALHPQTMVVADLGCSSGPNTLRFVSEVIGIIARHCKEYGRQHDHTQLHLNDLPGNDFNNLFQLIQQFNKSTAINHKSEAAPCYISGLPGSYYTRIFPSESVHLFHSLFCLQWRSEAPEGNKKTCLDIYITKTMSPSMVKLFQQQFQKDFSLFLRLRYEELVSGGQMVLTFIGRKHENVFTGESNHLYGLLAQSLKSLVDEGLVEKEKLESFYLPMYSPSVGEVEAILKQVGLFNMNHVKVFQTNWDPYDDLESDVVHNSIRSGENVAKCLRAVMQPLVASQFGEPILDKLFKEYARRVAKHLENEKTKHAIIVLSIEKAIHL

SEQ ID NO: 10549 - protein, 372 aa, Zea mays
MRIERDLHMATGDGETSYTKNSRIQEKTMFQIKPVLEEATRAVYTALHPQTMVVADLGCSSGPNTLRFVSEVIGIIARHCKEHGRQHAQLQFFLNDLPGNDFNNLFQLIQQFNKPTAINHKSEAAEALPPPCYISGLPGSYYTRIFPSESVHLFHSLFCLQWRSEAPEGNKKTCLDIYITKTMSPSMVKLFQQQFQKDFSLFLRLRYEELVSGGQMVLTFIGRKHEDVFTGESNHLYGLLAQSLKSLVDEGLVEKEKLESFYLPMYSPSVGEVEAILKQVGLFNMNHVKVFQTNWDPYDDLESDVVHNSIRSGENVAKCLRAVMQPLVASQFGEPILDKLFKDYARRVAKHLENEKTKHAIIVLSIEKAIHL

SEQ ID NO: 10550 - protein, 372 aa, Zea mays
MRIERDLHMATGDGETSYTKNSRIQEKTMFQIKPVLEEATRAVYTALHPQTMVVADLGCSSGPNTLRFVSEVIGIIARHCKEYGRQHDHTQLHLNDLPGNDFNNLFQLIQQFNKSTAINHKSEAAEALPPPCYISGLPGSYYTRIFPSESVHLFHSLFCLQWRSEAPEGNKKTCLDIYITKTMSPSMVKLFQQQFQKDFSLFLRLRYEELVSGGQMVLTFIGRKHENVFTGESNHLYGLLAQSLKSLVDEGLVEKEKLESFYLPMYSPSVGEVEAILKQVGLFNMNHVKVFQTNWDPYDDLESDVVHNSIRSGENVAKCLRAVMQPLVASQFGEPILDKLFKEYARRVAKHLENEKTKHAIIVLSIEKAIHL

SEQ ID NO: 10551 - protein, 377 aa, Zea mays
  unsure (1)..(377): unsure at all Xaa locations
MKVERDLHMSRGDGEDSYASNSRLQEKSILKTRPVLHKAVAAAHALSLSSGVVVADLGCSSGPNTLLVVSEVLAAVAMVAGGSAXXPQHVQFFLNDLPGNDFNLVFRSLDLLKNKKLAAKDSGRSRCYLAGLPGSFYTRLFPDHCVHLFHSSYCLMWRSKVPDELAVNEGHMYIWETTPQAVVALYRRQFQEDMSLFLRLRHRELVPGGHMVLAFLGRKKSKDVLRGEVSYTWGLLAQALQSLVKQGRVKKDKLDSFNLPFYAPSMDEVRDVITRSQAFDITHIQLFESNWDPHDDDDVVEEDVAAVQSGVNVARSIRAVIGPLIARHFGEHILDDLFELHAKNVAVHLQKVKTKYPVIVVSLQAKXAARQIKDQAS

SEQ ID NO: 10552 - protein, 378 aa, Zea mays
MSMRIERDLHMATGNGETSYTKNSRIQEKAMFQMKSVLEEATRAVCTALLPQTMVVADLGCSSGPNTLRFVTEVTRIIAHHCKLEHNRRHDHPLHLNDLPGNDFNNLFQLIEQFNKSSTTHKGDAATEALQPPCYISGLPGSYYTRIFPSESVHLFHSLFCLQWRSQAPEQLKGTQKSCLDIYITKTMSPSMVKLFQQQFQKDFSLFLRLRYEELVSGGQMVLTFIGRKHEDVFTGESNHLYGLLAQSLKSLVDEGLVEKEKLESFYLPIYSPSVGEVEAIVKQLGLFNMNHVKVFEINWDPYDDSEGDDVHNNIESGENVAKCLRAVMEPLVASQFGERILDKLFKEYARRVAKHLENEKTKHAVLVLSIKKAIIHV

SEQ ID NO: 10553 - protein, 380 aa, Zea mays
MASSLLHCPDKLPFLDVEAILHLKEGLGETSYAQNSSLQKRGMDTLRSLITSTATDVYVSQMPERFTVADLGCSSGPNALCLAEDIVGSIGRACGRSSRPPPEFSVLLNDLPTNDFNTIFFSLPEFADRLEAAARTDEWGRPMVFLSGVPGSFYGRLFPRTSVHFICSCSSLHWLSQVPPGLFDETDNRPVNKGKMYISSTSPAAVPLAYLRQFRRDFGVFLRSRAAEVVPGGRMVLAMLGRQTEGYVDRRTTFLWELLSESFAALVSQGLVEQEKVDAYNVPFYAPSVREVEEEVRREGSFRLDHVQTYEINLSSSGDAKEDGRTVSMAIRAIQESMLSHHFGTDIVDALFHRYTELVTESMEREDVKSVQIGVVLTRL

SEQ ID NO: 10554 - protein, 406 aa, Zea mays
  unsure (1)..(406): unsure at all Xaa locations
YIXSQAPLSXGYMDIRRVSHMAEGEGEGEWSYSKNCRRQQVAVRETRPTVETAVKQVYAALLPRTMVVADLGCSAGPNTLLFISSVLSSIAAAAGAERCKPPSELQFVLNDLPGNDFNHLFRSVEEEFRRAAGCERGPPPPPYYVMGLPESYYNRLFPRQSVHLFHSSYCLHWRSQEPEGLEAWRKPCLNEDNIYIARSRTTTPSVAKLFQEQFQKDFSLFLKLRHEELVHGGRMVLVFLGRKNEDAYSGDLNQLFALVATALQSLVLKGLVEKEKLESFNLPIYGPSVGEVEDLVTQSGLFSMDLIKQFEMNWDPLDDSEGDDVVEDSGSSMNVAKYIRSVLKSLIVRHFGEAIIDAWFAEFRRLVAEHLEKEKTKFTTFAMCLKKEXYRCIDLHIRMCIVFRTV

SEQ ID NO: 10555 - protein, 399 aa, Zea mays
  unsure (1)..(399): unsure at all Xaa locations
YIXSQAPLSXGYMDIRRDFHMAEGEGEWSYSXKNCRRQQVAVRETRPMVETAVKQVYAALXXPRTMVVADLGCSAGPNTLLFISSVLSSIAAAAGAERCKPPSELQFVLNDLPGNDFNHLFRSVEEEFRRAAGCERGPPPPPYYVMGLPESYYNRLFPRQSVHLFHSSYCLQWRSQEPEGLEAWRKPCLNEDNIYIARTTTPSVAKLFQEQFQKDFSLFLNLRHEELVHGGRMVLIFLGRKNEDVYSGDLNQLFALVATALQSLVLKGLVEKEKLESFNLPVYGPSVGEVEELVTRSGLQFSMDLIKQFEMNWDPFDDSEGDNDVVVVGSSVNVAKLIRSVLKALVVRHFGEAVLDACFAEFRRLVAEHLGKEKTKFTTIAMCLKKEXYIYVCVLYFVR

SEQ ID NO: 10556 - protein, 381 aa, Zea mays
  unsure (1)..(381): unsure at all Xaa locations
MKVERDLHMSGGDGEDSYASNSRLQEKSILKTRPVLHKAVAAAHRLVALXQEDPAGGAMVVADLGCSSGPNTLLVVSEVLAAVAMVAGGSAQPQHVQFFLNDLPGNDFNLVFRSLDLEESLLPPYYVAGLPGSFYTRLFPDHCVHLFHSSYCLMWRSKVPDELAXVAAVLNEGHMYIWETTPQAGXCALYRRQFQEDMSLFLRLRHRELVPGGHMVLAFLGRKKSKDVLRGEVSYTWGLLAQALQSLVKQGRVKKDKLDSFNLPFYAPSMDEVRDVITRSQAFDITHIQLFESNWDPHDDDDXGDEDGSAVQSGVNVARSIRAVIGPLIARHFGEHILDDLFELHAKNVAVHLQKVKTKYPVIVVSLQAKXAARQIKDQAS

SEQ ID NO: 10557 - protein, 311 aa, Zea mays
  unsure (1)..(311): unsure at all Xaa locations
NFPYYLSYFTKFEKKNSLYFFCYLSYVQGGQQSNLKPMIEEAVVSLLNDDDGATGLAIADLGCSSGPNTLVLVSTAVAAVRRRCSELRRQPPELCVHLNDLPNNDFNLVXPRAWPRTRKPKKAXGPPVLTSIVPGSFHGRLFSKRSLHLVCSNASLQWLSKAXXRAGAERDPVXTTGTSRRGVLGVLQSSXAYARQFRSDFTQILRLRAQEMVPGGKMVFSLLGQRPDDKPENALQLFEFINAVLHEMASKGLIDEERLHSFYIPVYGPSEKELREIVEAEGSFSIDKMERSMNLLLLGMPISLPRQGRAG

SEQ ID NO: 10558 - protein, 244 aa, Zea mays
  unsure (1)..(244): unsure at all Xaa locations
XLLYHRDXYGYKXRDFHMAEGEGEWSYSKNCRRQQVAVRETRPMVETAVKQVYAALFPRTMVVADLGCSAGPNTLLFISSVLSSIAAAXCCXXNGASRLXKGPPPPPYYVMGLPESYYNRLFPRQTVHLFHSSYCLHWRSQEPEGLEAWRKPCLNEDNIYIARSRTTTPSVAKLFQEQFQKDFSLFLKLRHEELVHGGRMVLVFLGRKNEDAYSGDLNQLFALVATALQSLVLKEIKSKKKKKK

SEQ ID NO: 10559 - protein, 200 aa, Zea mays
DHKNIYITKTMSPSMVKLFQQQFQKDFSLFLRLRYEELVSGGQMVLTFIGRKHENVFTGESNHLYGLLAQSLKSLVDEGLVEKEKLESFYLPMYSPSVGEVEAILKQVGLFNMNHVKVFQTNWDPYDDLESDVVHNSIRSGENVAKCLRAVMQPLVASQFGEPILDKLFKEYARRVAKHLENEKTKHAIIVLSIEKAIHL

SEQ ID NO: 10560 - protein, 200 aa, Zea mays
DHKNIYITKTMSPSMVKLFQQQFQKDFSLFLRLRYEELVSGGQMVLTFIGRKHENVFTGESNHLYGLLAQSLKSLVDEGLVEKEKLESFYLPMYSPSVGEVEAILKQVGLFNMNHVKVFQTNWDPYDDLESDVVHNSIRSGENVAKCLRAVMQPLVASQFGEPILDKLFKDYARRVAKHLENEKTKHAIIVLSIEKAIHL

SEQ ID NO: 10561 - protein, 213 aa, Zea mays
  unsure (1)..(213): unsure at all Xaa locations
SLHFLSMVGSDGAXPNRGRVYVSESGPAAVLDAYRSQFHADFLAFLSCRADEMRPRGLLILTFVARRTARPTAHDCYLWDFLADALMDMAADGLVDEEQVHAFNVPFYGPCLDDLAKVIAREGSFTVRTMQLFDISRRCLLLQSASDDELAMETTSTVRAVVEPMLRAHFGLEAMDGLFCRYSLRLEEYYRSNTSRNKDDLTNVFLVLEKKLH

SEQ ID NO: 10562 - protein, 220 aa, Zea mays
  unsure (1)..(220): unsure at all Xaa locations
STRCTRLVQIDHVYTRTTSTSLRTTAHFDVENATGAHPGRTSPLLLKIACSMKNSCMSERMVLIFLGRQDEDVYSGXDINQLFALVATALQSLVSKGLVEKEKLESFNLPIYGPSVGEVKDLVTXSGLFSMDLIKQFETNWDPLDDSEGGDVVEDSGMNVAKFIRPALKSSIVYHFGEAIIDAWFAEFRRLVAEHLEKEKTKFTTFAMCLXRKNNMVKYI

SEQ ID NO: 10563 - protein, 166 aa, Zea mays
  unsure (1)..(166): unsure at all Xaa locations
LKLRRKELVHGGRMVLVFLSRKNEDVYSGDLNQLFAFVATALQSLVSKGLVEKEKLESFNLPIYGLSVGEVEDLVTGLFSMDLIKQFEMNWDPFDDSXSARRSMNVAKYIRSALKSLIVCHFGEAIIDAWFAEFRRLVAEHLEKEKTKFTTFAMCLXRKNNMVLYI

SEQ ID NO: 10564 - protein, 386 aa, Coffea liberica
MELQEVLRMNGGEGDTSYAKNSSYNLALAKVKPVLEQCIRELLRANLPNINNCIKVADLGCASGPNTLLTVRDIVQSIDKLGLEEKNELERPTIQIFLNDLFQNDFNSVFKLLPSFYRKLEKENGRKIGSCLISAMPGSFYGRLFPEESMHFLHSCYCLHWLSQVPSGLVTELGISANKGSIYSSKASRLPVRKAYLDQFTKDFTTFLRIHSEELFSHGRMLLTCICKGVEFDARNAIDLLEMAINDLVVEGHLEEEKLDSFNLPVYIPSTEEVKCIVEEEGSFEILYLETFKVLYDAGFSIDDDYPLRSHVQVYSDEHIKAEYVASSVRAVYEPILASHFGEAIIPDIFHRFAKHAAKVLPLGKGFYNNLIISLAKKPEKSDVNH

SEQ ID NO: 10565 - protein, 384 aa, Coffea liberica
MELQEVLRMNGGEGDTSYAKNSSYNLFLIRVKPVLEQCIQGLLRANLPNINKCIKVADLGCASGSNTLSTVRDIVQSIDKVGQEKKNELERPTIQVFLNDLFQNDFNSVFKLLPSFYRKLEKENGRKIGSCLIGAIPGSFYGRLFPEESMHFLHSCYCLHWLSQVPSGLVTELGISANKGCIYSSKASRPPIKKAYLDQFTKDFTTFLRVHSEELISRGRMLLTWICKEDEFENPNSIDLLEMSLNDLVIEGHLEEEKLDSFNLPIYAPSAEEVKCIVEEEGSFEILYLETFKAPYDAGFSIDDDYQGRSHSPVSCDEHAIAEHVASVVRSIYEPILASHFGEAIMPDLSHRIAKNAAKVLRSGKGFYDSIIISLAKKQEKSDM

SEQ ID NO: 10566 - protein, 385 aa, Coffea liberica
MELQEVLRMNGGEGDTSYAKNSSYNLFLIRVKPVLEQCIQGLLRANLPNINKCIKVADLGCASGSNTLSTVRDIVQSIDKVGQEKKNELERPTIQVFLNDLFQNDFNSVFKLLPSFYRKLEKENGRKIGSCLIGAMPGSFYGRLFPEESMHFLHSCYCLHWLSQVPSGLVTELGISANKGCIYSSKASRPPIKKAYLDQFTKDFTTFLRVHSEELISRGRMLLTWICKEDEFENPNSIDLLEMSLNDLVIEGHLEEEKLDSFNVPIFAPSTEEVKCIVEEEGSFEILYLETFKAPYDAGFSIDDDYQGRSHSPVSCDEHAIAEHVAAVVRSIYEPILASHFGEAIMPDLSHRIAKNAAKVLRSGKGFYDSIIISLAKKPEKSDVN

SEQ ID NO: 10567 - protein, 386 aa, Coffea liberica
MELQEVLRMNGGEGDTSYAKNSSYNLFLIRVKPVLEQCIQGLLRANLPNINKCIKVADLGCASGSNTLSTVRDIVQSIDKVGQEKKNELERPTIQVFLNDLFQNDFNSVFKLLPSFYRKLEKENGRKIGSCLIGAMPGSFYGRLFPEESMHFLHSCYCLHWLSQVPSGLVTELGISANKGCIYSSKASRPPIKKAYLDQFTKDFTTFLRVHSEELISRGRMLLTWICKEDEFENPNSIDLLEMSLNDLVIEGHLEEEKLDSFNVPIFAPSTEEVKCIVEEEGSFEILYLETFKTPYDAGFSIDDDYQGRSHSPVSCDEHAIAEHVAAVVRSIYEPILASHFGEAIMPDLSHRIAKNAAKVLRSGKGFYDSIIISLAKKPEKSDVNH

SEQ ID NO: 10568 - protein, 372 aa, Coffea canephora
MELQEVLRMNGGEGDTSYAKNSAYNQLVLAKVKPVLEQCVRELLRANLPNINKCIKVADLGCASGPNTLLTVRDIVQSIDKVGQEKKNELERPTIQIFLNDLFPNDFNSVFKLLPSFYRKLEKENGRKIGSCLIGAMPGSFYSRLFPEESMHFLHSCYCLQWLSQVPSGLVTESGISTNKGSIYSSKASRLPVQKAYLDQFTKDFTTFLRIHSEELFSHGRMLLTCICKGVELDARNAIDLLEMAINDLVVEGHLEEEKLDSFNLPVYIPSAEEVKCIVEEEGSFEILYLETFKVLYDAGFSIDDEHIKAEYVASSVRAVYEPILASHFGEAIIPDIFHRFAKHAAKVLPLGKGFYNNLIISLAKKPEKSDV

SEQ ID NO: 10569 - protein, 371 aa, Coffea canephora
MELQEVLHMNEGEGDTSYAKNASYNLALAKVKPFLEQCIRELLRANLPNINKYIKVADLGCASGPNTLLTVRDIVQSIDKVGQEEKNELERPTIQIFLNDLFQNDFNSVFKLLPSFYRKLEKENGRKIGSCLISAMPGSFYGRLFPEESMHFLHSCYSVHWLSQVPSGLVIELGIGANKGSIYSSKGCRPPVQKAYLDQFTKDFTTFLRIHSEELFSHGRMLLTCICKGVELDARNAIDLLEMAINDLVVEGHLEEEKLDSFNLPVYIPSAEEVKCIVEEEGSFEILYLETFKVLYDAGFSIDDEHIKAEYVASSVRAVYEPILASHFGEAIIPDIFHRFAKHAAKVLPLGKGFYNNLIISLAKKPEKSDV

SEQ ID NO: 10570 - protein, 392 aa, Brassica rapa subsp. pekinensis
MEVMRILHMNKGNGETSYAKNSIVQSNIISLGRRVMDEALKKLMIRNSEILSFGIADLGCSSGPNSLLSISNIVETIQNLCHDLDRPVPELSLSLNDLPSNDFNYIFASLPEFYDRVKKRDNNYESLGFEHGSGGPCFVSAVPGSFYGRLFPRRSLHFVHSSSSLHWLSQVPCGEVNKKDGVVITADLDNRGKIYLSKTSPKSAHKVYALQFQTDFSVFLRSRSEELVPGGRMVLSFLGRSSPDPTTEESCYQWELLAQALMSLAKEGIIEEENIDAFNAPYYAASPEELKMAIEKEGSFSIDRLEISPVDWEGGSISDDSYDIVRFKPEALASGRRVAKTIRAVVEPMLEPTFGQKVMDELFERYAKLVGEYVYVSSPRYTIVIVSLLRMG

SEQ ID NO: 10571 - protein, 351 aa, Brassica carinata
MAPTYTMAGGKGPNSYSQHSTYQKALLEVAKEKISEAISTKLEINSASNRFNIADFGCSTGPNTFLAVQNIIDAVGQRYRKETQINPDDNIEFQVLFNDHSNNDFNTLFQTLPPTKRYFVAGVPGSFFGRVLPRDSLHVGHCSYSLHWLSQVPKGIADRSSPAWNRDIHCTGFSEEVAEAYLDQFKIDMGSFLKARGEELVSGGLLFLLGSCVPDGVKMSETMKGMLLDHLGNCLNDVAKEGLINQEELNSFNFPIYPAHVAEFKSVIEDNGCFTIEAFEKISHANEEFPLDPEFLATSNRVTFGGVIESRFGKEAMERTNELYEKKCPEILPELAKAKSGMQFFIMLRRN

SEQ ID NO: 10572 - protein, 366 aa, Stephanotis floribunda
MEVVEVLHMNGGTGDASYASNSLLQKKVILLTKPITEEAITELYTRLFPKSICIADMGCSSGPNTFLAVSELIKNVEKKRTSLGHESPEYQIHLNDLPSNDFNTIFRSLPSFQKSFSKQMGSGFGHCFFTGVPGSFYGRLFPNKSLHFVHSSYSLMWLSRVPDLEEVNKGNIYLSSTSPLSVIRAYLKQFQRDFTTFLQCRAEELVPGGVMVLTLMGRKGEDHSGKESGYALELLARALNELVSEGQIEEEQLDCFNVPQYTPSPAEVKYFVEEEGSFSITRLEATTIHWTAYDHDHVTGHHHAFKDGGYSLSNCVRAVVEPLLVRHFGEAIMDEVFHRYREILTNCMTKEKIEFINVTVSMKRRV

SEQ ID NO: 10573 - protein, 366 aa, Glycine max
MKVAHVLHMNGGVGHASYANNSLVQEKVICLTKPIREEAITSLYCNTVPRSLAVADLGCSSGPNTLLVVSEFIKIVEKLCRELNHKSPEYKVFLNDLPGNDFNNIFKSLDSFKEKLRDEMESRIGPCYFYGVPGSFYGRVFPNQSLHFVHSSYSLQWLSKVPEGVDNNRGNVYIGSTSPTNVARAYYEQFQRDFSLFLKCRAEELVKGGCMVLTFLGRRSDDPSSKDGGYIWELMATALNDMVLQGIIKEEQLDTFNIPQYTPSPSEVKLEVLKEGSFAINRLEVSEVNWDAFDDWNALEFESALSDGGYNVAQCMRAVAEPMLVSHFGEAIIEEVFSRYQQILADRMSKEKTKFTNVTILLTKKA

SEQ ID NO: 10574 - protein, 366 aa, Glycine max
MKVAQVLHMNGGVGHASYANNSLLQQKVICLTKPIREEAITSLYCNTVPRSLAVADLGCSSGPNTLLVVSEFIKIVEKLCRELNHKSPEYKVFLNDLPGNDFNNIFKSLDSFKKKLCDEMESGIGPCYFSGVPGSFYGRVFPNQSLHFVHSSYSLHWLSKVPEGVDNNRGNVYIGSTSPTNVARAYYEQFQRDFSLFLKCRAEELVKGGRMVLTFLGRRSDDPSSKDGGYVWELMATALNDMVLQGIIKEEQLDTFNIPLYTPSPSEVKLEVLKEGSFASNRLEVSEVNWNAFDDWNALEFESALSDGGYNVAQCMRAVAEPMLVSHFGEAIIEEVFSRYQQILTDRMSKEQTKCINVTVLLTRKA

SEQ ID NO: 10575 - protein, 612 aa, Oryza sativa
MKVEQDLHMSRGDGETSYAANSRLQEKAILKTRPLLHKAVEEAHASLFPRALVVADLGCSSGPNTLLVVSEVLSAVANRSSCDHKSSPDVQFFLNDLPGNDFNLVFQSLELFKKLAEMEFGKALPPYYIAGLPGSFYTRLFPDRSVHLFHSSYCLMWRSKVPDKLASGEVLNAGNMYIWETTPPSVVKLYQRQFQEDFSQFLALRHDELVSGGQMVLTFLGRKNRDVLRGEGRVEEEKLDSFNLPFYSPSVDEVKAVIRQSGLFDISHIQLFESNWDPHDSDDDDVATLDSVRSGVNVARCIRAVLEPLIARHFGRCIVDDLFDMYARNVAQHLEQVKTNKQKLPVVARVNNNAARTKHLSAPETSAMVVRRSADASSPLRSIQIPDSTIGKAQVWGAMGSYHYTSTSHFFFAGGGEGEYSSYKGTGSTDTHRPTTVRIPVTTPGPERPPDDAAAARIQAAFRGHLVRRHAAAVRGADDEATRLERLLRRQETVDAVRGDERERARFSEALMAVLLRLDAVPGYYPAVREARRAVTRRVVGLQEVFDAVLAAPDAADTCGVPASLDQVLEGIWGESPAAPPPPPPPPPPAAVEVEEEVLAGRDNYPIGQFNG

SEQ ID NO: 10576 - protein, 227 aa, Triticum aestivum
  unsure (1)..(227): unsure at all Xaa locations
GITEKHHRGSTSMKVEDVLHMATGDGENSYAANSRIPMKAMLKNRPLLQRTVEEVYTSLSSASTMVVADLGCSSGPNALFIVAEVTGMISDYNQNTNEEQHGVELQFLLNDLPKNDFNLIFQSLDQFHTVTRKGEGDEAATPPYYVVGLPGSFYNRLCPSQSVHLFHSSYSLHWLSKVPEELSSGEYVNEGNIHIGKTTPHSIVNLFREQFQIDFELFLTLRSKELX

SEQ ID NO: 10577 - protein, 398 aa, Streptomyces coelicolor A3(2)
MLSEQSVPVVRATLPAVGAAIGDIAALFYRKLFDAHPELLRDLFNRGNQANGEQQRALAGSVAAFAGLLLENPDERADVLLSRISHKHASLGITPDQYTIVHRHLMAAVVDVLGDAVTPEVARAWDEVYWLMANALIALEARLYTEKGVAEGDVWRTMEIVDRVEESADAVSLVLGSADGRPVVPFRPGQYVSVQVELADGARQIRQYSLSAAPGRSDWRITVKRVRGDGQPDGEVSSWLYANARKGDALNVSLPAGDLALAEHDGPLLLVSAGIGVTPMLSMLDHLAAAGATRPVTVVHADRTPDHHAHRQEQLDLIRTLPGARLHLWYEEPGDRAPEASTGRADLTGLDLPADLTVYLCGPVPFMRAVRGDLLRRGVPAEAIHYEVFGPDLWLGQQ

SEQ ID NO: 10578 - protein, 403 aa, Streptomyces coelicolor A3(2)
MLSSQSAQIVRDTLPTVGASLGTITDLFYRRMFEERPELLRDLFNRANQASGVQREALAGAVAAFATALVKHPDERPDAVLGRIANKHASLGITSDQYTLVGRHLLAAVAEVLGDAVTPAVAAAWDEVYWLMANALIAMEARLYARSDVEDGSVWQSMEIVERHEETPDTASFVLRPADGSPTRPFVPGQYVSVRAELPDGAHQIRQYSLSSAPGGGTWRFTVKRERSLDGQVPDGEVSTWLHTHARPGDVLRVSLPFGDLLLPEGDGPLLLASAGIGVTPMLAMLEHLATAAPDRPVTVVHADRSPALHAHRLELTALVERLPHASLHLWYEDTADHPDASADHVNEGWADLTGLSPVPGTTAFLCGPLSFMKAVRTDLLAHGLSPRAIHYEVFGPDLWLSK

SEQ ID NO: 10579 - protein, 435 aa, Streptomyces coelicolor A3(2)
MTGRFEFMHQSSHPDRPTTPADDWSGANAAHLAAPARIAAAPASVTDEDVALVRASLTVVTPHVSELAAHFYSILFSRYPQVRDLFPAELDVQRERLVRALLRIVELVDDPDNLVAFCSRLGRGHRKFGTQSGHYPAVGECLLQALSHFAGPAWHPALATAWQRAYTAAADVMVRAAEEDARSRPAVWDAHIVGHVHRGHGIAEITVRPHQPYPFVAGQYVSIETPWAPRQWRQYSPANAPRPNSELTFHVRAVREGKVSNALVHHARPGDPVRLGPPEGDMVLRPTRQRDLLFVAGGTGLAPIRALIEEVAQGSISDAREVSLFIGARTANELYGLDDMLRMSQRYHWLRVRAAVSDERIPGLEGTLPEVLAEFGPWYRHEAYLCGPPQMLSGAVHALRRHGVPPRHIHYDPWDTPVLTAPLGPPPPDEEDDQL

SEQ ID NO: 10580 - protein, 393 aa, Burkholderia sp. TH2
MLSAEHRAIVKATVPLLESGGEALTTHFYKTMLAEYPSVRPLFNQAHQQSGDQPRALANAVLMYARHIDQLEQLGGLVSQIVNKHVALNILPEHYPIVGACLLRAIREVLGAEIATDAVIEAWGAAYQQLADLLIGLEENVYVEKETATGGWRGTRAFVVARKVKESDEITSFYLRPADGGELLEFHPGQYIGLKLIVDGEEIRRNYSLSAAANGREYRISVKREPNGKASNYLHDSVNEGATLDLLTPSGDFTLEHNDKPLVLISGGVGITPTLAMLNAALQTSRPIHFIHATRHGGVHAFRDHIDELAARHPQLKRFYVYEKPRHDDEAHHAEGYIDEARLIEWLPATRDVDVYFLGPKSFMQAVKRHLKTIGVPEKQSRYEFFGPASALD

SEQ ID NO: 10581 - protein, 429 aa, Ralstonia metallidurans
MSSAGFIVCKNMHFTCMIQGVLLMLSAASRPYIDASVPVLREHGLAITTHFYREMFAARPELKRIFNMGNQANGSQQQSLASAVFAYAANIDRADVLAPVVERIVHKHVAVGLTPAHYPIVGKYLLEAIAAVLGDAATPPLLAAWDEAYWLLAGELIAAEARLYERHGVAAGELLRVRVVNREQEGDQVVALTLAAEDGSPLRDFAPGQYISVEASFADGRRQLRQYSLSGERGLPTWRISVKREDGASDAPAGTVSNWLHENAQVGTTLHVSTPWGDFAPELDSRQPIVLMSAGIGVTPMVSVLRTLAHENPHRPVLFAHAARHGRQHAHRRDLAWARERMPNLRTHVSYETPQSVDASGRDYDHAGTMPVEALLKSGDNAAFNDARFYLCGPLGFMQEQRRALIASGVPVGHIHREVFGPDLLDDIL

SEQ ID NO: 10582 - protein, 403 aa, Deinococcus radiodurans
MLTPEQKAIVKATVPALEAHGETITRTFYASMFAAHPELLNIFNPANQQTGKQARSLAASVLAYAAHIDHPEALGGMVGRIAHKHVSLEVLPEHYPIVGQYLLGAIAGVLGDAAKPEILDAWAAAYGELADLMIGIEKGMYDAGAGQPGGWRDFRPFRVARKVAESRVITSFVLEPVGGGALPAYQPGQYLSLKVKVPGQERWQIRQYSLSDAPSPDHYRISVKREGGGLVSEYLHGAVQEGDELLVHVPAGDFVLQQSERPVVLISAGVGITPMLAMVQTLAQAGSQRPVTFIHAAQNGSVHAFRDDVARLTHEYPHFRKVVFYDEAGPDDQLGTHHDVAGRLSLDAVRGALPAGEAEFYYCGPAGFAGAVEAILDDLQVPAERRFTETFGPSQSFAPVILG

SEQ ID NO: 10583 - protein, 414 aa, Burkholderia fungorum
MDRKGATVDARLTIHSPPGLPMLSAEHRAIVKATVPLLESGGEALTTHFYRILIGEHPEVRPMFNLANQASGAQPRALANSVLMYARHIDQLEQLGGLVSQIINKHVALNILPEHYPIVGQCLLRAIREVLGAEIATDAVIAAWAAAYRQLADLLIGLEEKIYAEREAAPGGWRGTRLFRVARKVRESDEITSFYLRPDDNGELLAFHPGQYIGVRLYIDGEEVRRNYSLSAMSNGCEYRISVKREANGKVSSHLHTHLNENDTIELFAPAGDFTLEPGDKPLVLISGGVGITPTLAMLQAALHTNRVVHFIHSARHGGVHAFRDTIEQLAARHPQLKRFYCYEQRRADDADADGIGYLDETRLDAWLPETRDVDVYFLGPIAFMKAVKKHLKAIGVPESQSRYEFFGPAAALE

SEQ ID NO: 10584 - protein, 733 aa, Burkholderia fungorum
MMTSGLRPGDPGAILRLIRAPPDARQPFPDSPLMPHPDRSAVVSANSTDNAVSPWHAGELKLQRAVGVAERMQEVGRRVIRRLMPDQHRAFFPQLPFVALGAVDHEGDVWATLVAGKPGFLHAPTARTLRVDLVRDPHDPASAGLDDGEAVGLLGIELHTRRRNRLNGTVSHSAGAGFNVDVTQSFGNCPQYIQMRDAEFVRDPASPPPVEAVQLEHLSERARTMIDTADTFFVASYVDDPAGRQVDVSHRGGKAGFVRLSEDGVLTIPDFAGNLFFATLGNFVINPRAGLVFADFESGDLLQLTGEAQVDLDSPEIAAFQGAERLWRFKPRRIVYRAGALPLRWKLQANGWSPNSLMTGSWDEVASRVKAQALADAWRPFKVTQVVDESSVIRSFYLEPLDGAGLIPHAAAQHLPIRVTLPGCTKPVIRTYTLSTAPADGSYRISVKRQGLVSAHLHDTLRVGSVIEARAPAGQFTIDAAARRSAVLLAAGVGVTPMLAMLRHIVYEGLRTRRVRPTWFFHSARTLAERAFTKEIDQLAASAGGAVRVVRTLTDTEGAQMGKDFDASGRLDVELLRATLPFNDYDFYLCGPAGFMQSLYDGLRELNVADNRIHAEAFGPAGLHRRADAGADAGLAHLPADKPVPVAFVKSGKEARWNPDSGSLLDLAESRGLSPEFGCRGGSCGTCRTRVLEGAVAYPVAPEFKVASDEALICCAVPAQAGTSGAERLLLDL

SEQ ID NO: 10585 - protein, 320 aa, Burkholderia fungorum
MNPLIAVRVARKRIEAADIASLILESADGAPLPPAGPGAHIDVHTPSGCVRQYSLCNLADEHGHYRIAVLRDSASRGGSISMHDDVLEGGKLSISAPKNHFPLREDARHSILIAGGIGITPVIAMASALHARGASFALHYRTRSAARTAFLRELTHGALAPHCALYHDDAPALRKLELMPLLEAAPPDTHVYVCGPKGFMDAVISTARAQHWSEDRIHFEYFAGVATPGANANSFEVVLAKSGQVVQVAPSQTIVEVCSAHGVAIPTSCLHGICGTCITRVLEGEVEHKDFYLTPQERASHTQMLPCCSRAKSHRLVLDL

SEQ ID NO: 10586 - protein, 396 aa, Escherichia coli O157:H7 EDL933
MLDAQTIATVKATIPLLVETGPKLTAHFYDRMFTHNPELKEIFNMSNQRNGDQREALFNAIAAYASNIENLPALLPAVEKIAQKHTSFQIKPEQYNIVGEHLLATLDEMFSPGQEVLDAWGKAYGVLANVFINREAEIYNENASKAGGWEGTRDFRIVAKTPRSALITSFELEPVDGGAVAEYRPGQYLGVWLKPEGFPHQEIRQYSLTRKPDGKGYRIAVKREEGGQVSNWLHNHANVGDVVKLVAPAGDFFMAVADDTPVTLISAGVGQTPMLAMLDTLAKAGHTAQVNWFHAAENGDVHAFADEVKELGQSLPRFTAHTWYRQPSEADRAKGQFDSEGLMDLSKLEGAFSDPTMQFYLCGPVGFMQFAAKQLVDLGVKQENIHYECFGPHKVL

SEQ ID NO: 10587 - protein, 397 aa, Xylella fastidiosa Dixon
MSASFSPHTITLIKSTVPLLAEHGTTIIEAMYHRLFEDPQIEALFNQANQKNGTQIHALAGAILAYARNIDNPGVLASAIERISQKHVGYAIHPEHYPHVATALLGAIKQVLGDVATSEVLEAWGEAYWFIANLLKDREAVIREGIMTKNGGWIHWRRFVISKRIPESETITSFMLHPEDGGPVVPHQAGQYLTFRFDAAGMPGMKRNYSISCGPNSDYYRITVKREHGTGASAFLHDQAKVGTIIECTPPVGDFFLPSVIERPIVLLSGGVGLTPMVSMMEQIAEAHPDAQVWYVHGTQNRETHAMDAHIRALVSRHKHMKATTFYTQRSEADDAEAGFITIDWLRANTPFQKADFYLCGPRPFLRTFVRDLIGAGVPAAQVHYEFFGPMDEEMAA

SEQ ID NO: 10588 - protein, 397 aa, Xylella fastidiosa Ann-1
MSASFSPHTITLIKSTVPLLAEHGTTIIEAMYHQLFEDPQIEALFNQANQKNGTQIHALAGAILAYARNIDNPGVLASAIERISQKHVGYAIHPEHYPHVATALLGAIKQVLGDVATSEVLQAWGEAYWFIANLLKDREAVIREGIMTKNGGWIHWRRFVISKRIPESETITSFMLHPDDGGPVVPHQAGQYLTFRFDAAGMPGMKRNYSISCGPNSDHYRITVKREHGTGASAFLHDQAKVGTIIECTPPVGDFFLPSVIERPIVLLSGGVGLTPMVSMMEQIAEAYPDAQVWYVHGTQNRETHAMDAHIRALVSRHKHMKATTFYTQRSEADDAEAGFITIDWLRANTPFQKADFYLCGPRPFLRTFVRDLIGAGVPAAQVHYEFFGPMDEEMAA

SEQ ID NO: 10589 - protein, 381 aa, Staphylococcus aureus subsp. aureus Mu50
MLTEQEKDIIKQTVPLLKEKGTEITSIFYPKMFKAHPELLNMFNQTNQKRGMQSSALAQAVMAAAVNIDNLSVIKPVIMPVAYKHCALQVYAEHYPIVGENLLKAIQDVTGLEEHDPVIQAWAKAYGVIADVFIQIEKEIYDQMMWIGFKPFKITNIKQESEDIKSFTVETEEYDFSEFTPGQYITVDVSSDKLPYRAKRHYSIVSGEKNHLTFGVKRDVTTEHEGEVSTILHDEIKEGDMINLAAPVGGFVLENTTEPQLFLGSGIGVTPLVAMYEAASAKGLDTQMVQVAENEQHLPFKDNFNSIASHYDNAKLYTHLKDKQGYIGTEELQAFLANKPEIYICGGTKFLQSMIEALKSLNYDMDRVHYETFIPRLSVAV

SEQ ID NO: 10590 - protein, 392 aa, Pseudomonas putida KT2440
MLNAEQRAIIKATVPLLESGGEALTTHFYKMMLSEYPEVRPLFNQAHQASGDQPRALANGVLMYARHIDQLEQLGGLVGQIINKHVALQILPEHYPIVGSCLLRAIEEVLGKDIATPAVIDAWGAAYGQLADILIGAEENLYKEKEEAEGGWRGTREFRLVRREQESSEIVSFYFAPVDGMPVLKAEPGQYIGLKLDIDGAEQRRNYSLSALCDGKEYRISVKREAGGKVSNYLHDELKVGDTLQLFPPAGDFTLAASDKPLVLISGGVGITPTLAMLQAALQTRREVHFIHCARNGAVHAFRDWIDGLAARHPQLKRFYCYAEPEGGAAADAVGLLSEDLLAEWLPQERDVDAYFLGPKGFMAAVKRQLKGLGVPEQQSRYEFFGPAAALE

SEQ ID NO: 10591 - protein, 678 aa, Pseudomonas putida KT2440
MQQSPDHRPSPWHAGEKTLQEKVGVAERMEAFGQKVIRDHMPDQHRTFYHQLPFMVAASVDAQGRPWATLLEGPEGFVSSPDPRMLTIHTTLPADDPATPGLAAGQAVGLLGIELHTRRRNRINGQIRHAAQGQLQVAVEQAFGNCPQYIQLRDYTRVTEPALGRIDATTLDTSTVSMIQAADTFFVASYVEHAYGQRSVDVSHRGGRPGFIKVEGNRLTIPDYAGNLHFNTLGNLVVNPRAGLLFIDFKNGNVLQLYGRAEVLLDSPAIQAFEGAERLWTLQVEKVVWRPAAVALRWAFKEYAPTSLMTGTWAEADARLEQRQQQRQWLAWRVLRVEQESRDIRSFYLEPPAGCRVAFAPGQHLPVQVPRDGESALIRTYSLSSAPDDGFLRISVKAQGPASRYLHERVVAGDVLNVRPPMGSFTLDQQSTRPLVLIGAGVGITPLLAMLRQQLRTGQARRIHLFHGARSLADLPFQQELAALRQQAGDLLQVHRALSQPEGHAQVGRDYEFAGRLGIEQVKATLALDDYDFYLCGPGSFTQQLYEGLRGVHVPDARIHAEAFGPSTLRRHTDADQPVLQQPPAADEPVPVYFAASAKEARWVPGSGTLLELAEARGLAPEFSCRGGSCGTCKTRLVSGQVHYPNPPAELPEAGSVLICCAVPAKVEEGMQALVLDV

SEQ ID NO: 10592 - protein, 397 aa, Xylella fastidiosa 9a5c
MSASFSPHTITLIKSTVPLLAEHGTTIIEAMYHRLFEDPQIEALFNQANQKNGTQIHALAGAILAYARNIDNPGVLASAIERIAQKHVGYAIHPEHYPHVATALLGAIKKVLGDVATSEVLEAWGEAYWFIANLLKDREAVIREGIMTKNGGWIHWRRFVISKRIPESETITSFMLHPEDGGPVVPHQAGQYLTFRFDAAGMPGMKRNYSISCGPNSDHYRITVKREHGTGASAFLHDQAKVGTIIECTPPVGDFFLPSVIERPIVLLSGGVGLTPMVSMMEQIAEAHPDAQVWYVHGTQNRETHAMDAHIRALVSRHKHMKATTFYTQRREADDAEAGFITIDWLRANTPFQKADFYLCGPRPFLRTFVRDLIGAGVPAVQVHYEFFGPMDEEMAA

SEQ ID NO: 10593 - protein, 381 aa, Staphylococcus epidermidis ATCC 12228
MLTEKEQDIIKQTVPLLQDKGTEITSIFYPKMFEANPELLNMFNQTNQKKGMQSAALAQAVLAAAMNINNLGAIKPAIMPVAHKHCALQVYPEHYPIVGENLLAAIQDVTGLESDDPVIQTWAKAYGEIADVFIKLEQEIYNHMLWKGFKPFKITNITQETSDIKSFTVESEEYDLSQFEPGQYITVDVSSEKLPYRAKRHYSIIDGDENHLVFGVKRDVTTEHEGEVSTILHDEISEGDMINLSAPVGGFSIENTERPQLFIGSGVGMTPLVSMFKKAASLNVPTQMIQAVVTEDERPFAQKLDSITDNYEQAQLHLHVKDKEGYLEAKELEQYLSEQPEIYICGGTKFLHSIINSLKELNYDMNHVHFETFIPRLSVQV

SEQ ID NO: 10594 - protein, 397 aa, Xylella fastidiosa Temecula1
MSASFSPHTITLIKSTVPLLAEHGTTIIEAMYHRLFEDPQIEALFNQANQKNGTQIHALAGAILAYARNIDNPGVLASAIERISQKHVGYAIHPEHYPHVATALLGAIKQVLGDVATSEVLEAWGEAYWFIANLLKDREAVIREGIMTKNGGWIHWRRFVISKRIPESETITSFMLHPEDGGPVVPHQAGQYLTFRFDAAGMPGMKRNYSISCGPNSDHYRITVKREHGTGASAFLHDQAKVGTIIECTPPVGDFFLPSVIERPIVLLSGGVGLTPMVSMMEQIAEAYPDAQVWYVHGTQNRETHAMDAHIRALVSRHKHMKATTFYTQRSEADDAEAGFITIDWLRANTPFQKADFYLCGPRPFLRTFVRDLIGAGVPAAQVHYEFFGPMDEEMAA

SEQ ID NO: 10595 - protein, 413 aa, Magnetospirillum magnetotacticum
MPTPLSARTIAVVKATIPALETHGLTITRRMYERLFQNTDIRDLFNQSHHGETGSQPKALALAVLAYARNIDNLGVLTGAVERIAQKHVALNILPEHYSFVADALIGAIQDVLGEAATPEIVEAWGEAYWFLAELLIGREATIYRDLASKSGGWNGWRDFVVESVTPESEIIRSFVLVPADGGPVLRHEPGQYLGFLLDLPGRGVLKRNYSISCAPNDRAYRITVKREAKTEHPAGLVSNWLHDAAIAGTVLKVAAPAGDFFLDRSSNAPVVLVSGGVGLTPMVSMLESITETTPERPTWFVHSALNGRVHALREHVRNLAANRDNLRVRIFYTAPEAQDRVGEAYDIPGPVTAEWLVANTPSEQATYYLCGPKSFLASLANGLVRAGIPAERVRFEFFGPADALLEEPKQAA

SEQ ID NO: 10596 - protein, 402 aa, Bacillus anthracis str. A2012
MLSEKTIEIVKSTVPLLQEKGVEITTRFYEILFSEHPELLNIFNHTNQKKGRQQQALANAVYAAATYIDNLEAIIPVVKQIGHKHRSLGIKAEHYPIVGTCLLRAIKEVAGAPDEVLNAWGEAYGVIADAFISIEAEMYEEAAHKEGGWKDFRNFVVVKKVKESDVITSLYLKPEDGGKVSSFIPGQYVTVQINIEGETYTHNRQYSLSDAPGKEYYRISVKKEKGVDTPDGKVSNYLHDHVKEGDMLPVSAPAGDFVLNMDSTLPVVLISGGVGITPMMSMLNTLIEQDSKRNVCFVHAAINSNTHAMKEHVEAVDNEYEQVKAYTCYSAPTEKDLEMKNFDKEGFVEREWLQTIIPTTEAEFYFCGPVPFMKHINAVLTDLGVKQEHIHYEFFGPAASLQ

SEQ ID NO: 10597 - protein, 140 aa, Campylobacter jejuni subsp. jejuni NCTC 11168
MTKEQIQIIKDCVPILQKNGEDLTNEFYKIMFNDYPEVKPMFNMEKQISGEQPKALAMAILMAAKNIENLENMRSFVDKVAITHVNLGVKEEHYPIVGACLLKAIKNLLNPDEATLKAWEVAYGKIAKFYIDIEKKLYDK

SEQ ID NO: 10598 - protein, 144 aa, Clostridium perfringens str. 13
MLDQKTIDIIKSTVPVLKSNGLEITKTFYKNMFEQNPEVKPLFNMNKQESEEQPKALAMAILAVAQNIDNLEAIKPVVNRIGVIHCNAKVQPEHYPIVGKHLLGAIKEVLGDGATEDIINAWAKTYGVIAEVFINNEKEMYASR

SEQ ID NO: 10599 - protein, 248 aa, Clostridium perfringens str. 13
MENVWNGFRQLEIFKIEEEAKDIKSFYLRATDGKPLKEYKCGQFLPLKIETDDEVIKKEMRRYSLSGDPKKNYYRLTIKRVPNGKVSGYFHESINVGDTILAMPPFGNFTLTEDSNKPLVLLSGGIGITPILSMLYGAKEQSRDIYFVEAVLNSDNLALNSDVQGIKKVKNFKEIKIFSEPLESDIKGKDFDEEGFITKEWIKNNLPLNGEFFFCGPTLFMKSIRNSLKDLGVKEDNINFEFFGKEEF

SEQ ID NO: 10600 - protein, 404 aa, Corynebacterium efficiens YS-314
MIGVSRPTPQNSYPGGSTVIVSTKPLTDRSRLSEAHAEMIKATLPLVGSKINDITPVFYNRMFTAHPELLRSTFNRANQKQGDQQKALAASIATFATMLVDPEAPDPVDMLARIGHKHVSLGITADQYNIVHEHLFGAIVEVLGADVVTPPVAEAWDAVYWLMANVLIDLESDLYASNDLAPGDVFRHVTVTGKKQLSDKVWEYTFEGDLVTPAPGQYTSIGVKLPDGARQLRQYSLLSGTDSQYRIAVEDNGEVSTFLRDNVEVGDTIEASVAAGDLVMNDDVNPVVLISQGIGSTPMVGMLNQVAADRHVTVLHADQSEKDHAQREEMVALVGGLANGALYTFYRDADQWLNVAGHIPSDASVYLCGGNEFLQNVRGQLENLEEQPREIRFELFSPNDWLIS

SEQ ID NO: 10601 - protein, 381 aa, Staphylococcus aureus subsp. aureus MW2
MLTEQEKDIIKQTVPLLKEKGTEITSIFYPKMFKAHPELLNMFNQTNQKRGMQSSALAQAVMAAAVNIDNLSVIKPVIMPVAYKHCALQVYAEHYPIVGENLLKAIQDVTGLEENDPVIQAWAKAYGVIADVFIQIEKEIYDQMMWIGFKPFKITNIKQESEDIKSFTVETEEYDFSEFTPGQYITVDVSSEKLPYRAKRHYSIVSGEKNHLTFGVKRDVTTEHEGEVSTILHDEIKEGDMINLAAPVGGFVLENTTEPQLFLGSGIGVTPLVAMYEAASAKGLDTQMVQVAENEQHLPFKDNFNSIASHHDNAKLYTHLKDKQGYIGAEELQAFLANKPEIYICGGTKFLQSMIEALKSLNYDMDRVHYETFIPRLSVAV

SEQ ID NO: 10602 - protein, 386 aa, Corynebacterium glutamicum ATCC 13032
MIVSTQPITDRSALSAEHAEVIKATLPLVGGKINEITPVFYNKMFAAHPELIANTFNRGNQKQGDQQKALAASIATFATMLVTPDAPDPVQLLSRIGHKHVSLGITADQYDIVHEHLFAAIVEVLGAETVTAPVAEAWDAVYWIMANVLIGFENNLYASNDLEPGDVFREVTVTAKKQLSATVWEYTLAGELVAPEPGQYTSIGVVLDDGARQLRQYSLLGGSDTEYRIAVEDNGEVSGFLRDRVSVGDKIEATIAAGDLVLNKDTNPVVLISQGIGSTPMVGMLAGMNPERDVVVLHADQAESTYAQVEEVQGLVEKLPKAAFEIFYRDNDQWLEVAGRIPSGASVYLCGGVEFLKNVREQIEALDEQPRDVNFELFAPNDWLIS

SEQ ID NO: 10603 - protein, 396 aa, Shigella flexneri 2a str. 301
MLDAQTIATVKATIPLLVETGPKLTAHFYDRMFTHNPELKEIFNMSNQRNGDQREALFNAIAAYASNIENLPALLPAVEKIAQKHTSFQIKPEQYNIVGEHLLATLDEMFSPGQEVLDAWGKAYGVLANVFINREAEIYNENASKAGGWEGTRDFRIVAKTPRSALITSFELEPVDGGAVAEYRPGQYLGVWLKPEGFPHQEIRQYSLTRKPDGKGYRIAVKREEGGQVSNWLHNHANVGDVVKLVAPAGDFFMAVADDTPVTLISTGVGQTPMLAMLDTLAKAGHTAQVNWFHAAENGEVHAFADEVKELGQSLPRFTAHTWYRQPSEADRAKGQFDSEGLMDLSKLEGAFSDPTMQFYLCGPVGFMQFTAKQLVDLGVKQENIHYECFGPHKVL

SEQ ID NO: 10604 - protein, 396 aa, Escherichia coli CFT073
MLDAQTIATVKATIPLLVETGPKLTAHFYDRMFTHNPELKEIFNMSNQRNGDQREALFNAIAAYASNIENLPALLPAVEKIAQKHTSFQIKPEQYNIVGEHLLATLDEMFSPGQEVLDAWGKAYGVLANVFINREAEIYNENASKAGGWEGTRDFRIVAKTPRSALITSFELEPVDGGAVAEYRPGQYLGVWLKPEGFPHQEIRQYSLTRKPDGKGYRIAVKREEGGQVSNWLHNHANVGDVVKLVAPAGDFFMAVADDTPVTLISAGVGQTPMLAMLDTLAKAGHTAQVNWFHAAENGDVHAFADEVKELGLSLPRFTAHTWYRQPNEADRAKGQFDSEGLMDLSKLEGAFSDPTMQFYLCGPVGFMQFAAKQLVDLGVKQENIHYECFGPHKVL

SEQ ID NO: 10605 - protein, 426 aa, Thermobifida fusca
MGGQWGSRIPLFNMHPGCKLTGVSAPQPFGGCMLSTQSADIVRATLPVVGAHLDEITSRFYSTMFSERPELLDGLFNRGNQANGEQRRALAGSIAGFASALLANPDERPDALLARIAHKHAAVAVTDDQYVIVHKYLFGAIADVLGDAATPEVIAAWDEVYWLMGGALIALEARLYAEKNADNGRTWREWTIVDRREETPDVFSLVLRPSDGGPLPEARPGQYVSVLHRMPDGIRQIRQYSISGGDEHTRRITIKRVRGTEHTPEGEMSALLYATAKAGDTLTVSAPFGDVVLTDSDRPLVFATAGIGCTPIVGMLNYLAATGATRRILALHADRSRAEHALWQETSTLIARLPHAQYVVWYEEGDGGLPGQMDLTGLEIPADAEVYLCGPLPFMREIRTQFLAAGVPAKDIHYEVFGPDLWLPAD

SEQ ID NO: 10606 - protein, 695 aa, Microbulbifer degradans 2-40
MPLCPPSNSEFTTSHFNKDSTMKRLQPSQFHQAEKAVQKRLGVADMVAQHSEGYIRSTMPGQHRDFFTNLPMVIVSITDFDGFPWPIPLHGKPGFIKSPNANTLEIETYPTLKDVLKLNFKKSQKIGILGIELHTRRRNRMNGTIKEINNNSFLVICEQSFGNCPQYIQKRELHWVDTPQKCLQTEDIFLTNTLTSTCAEWIESSDTFFISSRTKRLSTDKRDGLDVSHRGGKPGFVKVENDTLYFPDFSGNQFFNTLGNIQSDSRVGLYFPDYESGKIILISGTAKIIWDKELTRIFEGAERIISVKVRNCLILDSFLPMRGVLTELSPSLIRTGTWENPQEKSAARVYKQFKIIKKIKESRDVTSFYIRPLDGSALSSYLPGQFLPISIKQPHTSSTCLRTYTLSQAPLSNAYRFSVKREKFGLASRILHDTINTGDSLYVSQPEGKFTLQTNKKTNVLLSAGIGITPMIAMLQGLIREVEKGEKPQDVYFIHSTQNSETHTFANELKHLNKRHKWLQLYTIYSQPKLNDKLGQHYDVSGRISLDLLRKILPTDNFDVYLCGSESFMRSSYTNLKAMGIAESRIFYEFFDDGSFESHQLNKFQTAQRAEIYFAKSNITATWTPNDGTLLQFAEKMGLKPMYSCRTGNCGTCSCTLSTGEVTYANKPGYTPANGSALICCARPALNTTKLTFHI

SEQ ID NO: 10607 - protein, 393 aa, Pseudomonas fluorescens PfO-1
MLSVQDRAIVKSTVPLLESGGEALITHFYRMMLSEYPEVRPLFNQAHQASGDQPRALANGVLMYARHIDQLDQLGDLVAKIINKHVALQILPEHYPIVGTCLLRAISEVLGEEIATPEVMSAWGAAYGQLAEILIGAETAIYDQKEQAVGGWRGAREFIVAAKVEESAEIISFYFEPADKGPILAAEPGQYIGMKLVLDGEEIRRNYSLSALANKGQYRISVKREPGGRASNYLHDQLHVGASIQLFPPSGEFTLTASDKPLVLISGGVGITPTLAMLEAALETERPVYFIHSARNGSVHAFRDWIDGLAARHPQLKRFYCYAEDDGVSPAADKVGLLSEEQLGEWLPAERDVDAYFLGPKGFMGAIKRHLKALGVPEKQSRYEFFGPAAALE

SEQ ID NO: 10608 - protein, 677 aa, Pseudomonas fluorescens PfO-1
MMERSPWHAGEQQLQAHVGVAERMEEFGRKVIRTWMPDQHRQFYQQLPFMLYGAVDAEGRPWASVLEGEPGFAHSPEPTQLQFASLPAADDPAQLQAGAAIGLLGIELHTRRRNRLNGHIDNLDANGFGLTVDQSFGNCPQYIQLRQFQRVPLTDPQTRKAEHRDSLDAAAIALIESADTFFVASYVDVDGERSVDVSHRGGQPGFVRIEGNRLTIPDFAGNLHFNTLGNLLLNPLAGLLFIDFSTGDVLQLSGRTEIILDAPQIEAFQGAERLWTFEVEKLVRRPAALALRWRFDGMSPTSLLTGNWAQADARLQAKALGDSWRPLRVAKVEMESRHIRSIYLEPNDGAGLPVFLAGQHLPLRFTLDGEVHIRTYSLSGAPSDDFFRISVKREGRVSTHLHEQIRVGDVLEARLPQGHFTVAALERKPLVLLAAGVGITPLLSMLREVVYQGLRTRRIRPTLFVQSSRSLADQPFRAEVDRLLEDAGDAVKVLRVLSQPEDDLVEGKDFDLRGRIDGDLLRNLLTDEDFDQVDFVLCGPGGFTQGIYDILRELNVRDGQIHAETFGPSTLKRQADPDAIVMEQPPAATTSVPVLFERSAKEARWQPDGGSLLELAESRGLRPEFSCRGGSCGTCKTRLISGAVNYPQPPAEVPEEGQVLICCAVPAQSAQPLVLDL

SEQ ID NO: 10609 - protein, 393 aa, Pseudomonas aeruginosa PAO1
MLSNAQRALIKATVPLLETGGEALITHFYRTMLGEYPEVRPLFNQAHQASGDQPRALANGVLMYARHIDQLQELGPLVAKVVNKHVSLQVLPEHYPIVGTCLLRAIREVLGEQIATDEVLEAWGAAYQQLADLLIEAEESVYAASAQADGGWRGVRRFRVARKQAESEEITSFYLEPVDGQPLLAFQPGQYIGLRLDIDGEEVRRNYSLSAASNGREYRISVKREAGGRVSNYLHDRVAEGDELDLFPPAGDFVLRDSDKPLVLITAGVGITPALAMLQEALPQARPIRFIHCARHGGVHAFRDWIEDVSAQHEQVEHFFCYSEPRAGDSADAEGLLSREKLADWLPQERDLDAYFLGPRPFMAQVKRHLADLGVPSQQCHYEFFGPAAALDA

SEQ ID NO: 10610 - protein, 396 aa, Yersinia pestis CO92
MLDTQTIAIVKSTIPLLAATGPKLTAHFYERMFKHHPELKNIFNMSNQSSGDQREALFNAICAYATNIENLAALLPTVERIAQKHTSLNIQPEHYPIVGEHLIATLDELFSPGQAVLDAWAKAYGVLADVFIQRESQIYQQSETETGGWRTLRRFRIIKKEQQSEVICSFVLAPEDGGQVLHYKPGQYLGIYIEHESLEFQEIRQYSLTTAPNGKTYRIAVKREEQGTVSNLLHRELNEGDIVRIAPPRGDFFLDVSPDTPVALISAGVGQTPMLSMLNTLYSQQHAAPVHWLHAAENGRVHAFADEVSAIAAKMPNLSRHVWYREPDLQDKHGEDYHSQGLMDLSSYQWLADDPKRHYYFCGPLPFMQFIGRQLLAQGIAPEQIHYECFGPHKVI

SEQ ID NO: 10611 - protein, 394 aa, Vibrio vulnificus CMCP6
MLSENTINIVKSTAPLLAETGPKLTAHFYQRMFEHNPELKDIFNMSNQRNGDQREALFNAICAYASNIDNLPALLGAVEKIAHKHSSFLITADQYQIVGGHLLATIDELFSPGQAVLDAWAEAYGVLANVFIQREEQIYQDNQSQTGGWRGLREFELVEKQYESAHICSFVFKPVDGGSVVSFKPGQYLGIYINDEQFENQEIRQYSLSSSVRPDCYRISVKREEGGRVSNYLHDHLDVGSKVKLAAPAGDFFLDAAPTAPVVLISAGVGLTPTLSMLESLTEHQAPVTWIHATENGQQHAFKQHVKQLVETHPHFNSLVWYNQPNSDDKIGDDFQFSGWVNLHEIETVLKQADVQVYFCGPVGFMQFIAKQLLEMGVPEQQFHYECFGPHKVV

SEQ ID NO: 10612 - protein, 406 aa, Oceanobacillus iheyensis HTE831
MSNTTVLLDKKTTEIIKATVPVLKEHGEAITKHFYKILLENNPELKNVFNQTNQRKGAQSKALANTVYAAAANIEKLEEILPHVKQIAHKHVSLNIKPEQYPIVGKYLLIAIKEVLGDAATDEIIEAWEKAYFVIADIFISVEKEMYNEKKNQIGGWTGFRDFKVIKKVKESKEITSFYLKPDDNLPITTFIPGQYITIKAQIESEAYVHLRQYSLSTAPGKDYYRISVKREASNQPIGVVSNYLHTSVEVGSVLPISAPAGDFILDERDHRPLVLISGGVGLTPIMSMLESVVEHQPNRNVVFIHAAKSIDHQAMRKRVSEIAKSKEQVKQYVVYSNPTNRTDGDKQGYIDYEWLKEVIPTKDAAFYLCGPKPFMSAINNDLQNMNIAQNDIHMELFGPLEPIAK

SEQ ID NO: 10613 - protein, 394 aa, Vibrio parahaemolyticus RIMD 2210633
MLSNQTIEIVKATAPLIAETGPKLTAHFYDRMFTHNPELKDIFNMSNQRNGDQREALFNAICAYAANIENLPALLGAVEKIAHKHTSFLITKDQYQIVGKHLIATIDELFNPGQEVLDAWAEAYGVLANVFIQREEQIYQANASQEGGWRGLREFELVGKQLESEHICSFVFKPTDGSKVTKYKPGQYLGIYINSDKFENQEIRQYSLSSSVQENTYRISVKREQGGKVSNYLHDELNIGDKVKLAAPAGDFFMDVDTNTPVVLISAGVGLTPTLSMLESLTEHHAPVTWVHATENSKHHAFKEHVNQLVTAKENMNALIWYNQPTAEDKIGEDFHFTGFVNLHEIEAALKQDNVQVYFCGPVGFMQHVAKQLQELGVPQEQFHYECFGPHKVV

SEQ ID NO: 10614 - protein, 399 aa, Bacillus subtilis subsp. subtilis str. 168
MLDNKTIEIIKSTVPVLQQHGETITGRFYDRMFQDHPELLNIFNQTNQKKKTQRTALANAVIAAAANIDQLGNIIPVVKQIGHKHRSIGIKPEHYPIVGKYLLIAIKDVLGDAATPDIMQAWEKAYGVIADAFIGIEKDMYEQAEEQAGGWKEYKPFVIAKKERESKEITSFYLKPEDSKPLPEFQAGQYISIKVRIPDSEYTHIRQYSLSDMPGKDYYRISVKKDGVVSSYLHDGLQEGDSIEISAPAGDFVLDHASQKDLVLISAGVGITPMISMLKTSVSKQPERQILFIHAAKNSEYHALRHEVEEAAKHSAVKTAFVYREPTEEDRAGDLHFHEGQIDQQFLKELIANTDADYYICGSPSFITAMHKLVSELGSAPESIHYELFGPQLSLAQSV

SEQ ID NO: 10615 - protein, 139 aa, Aquifex aeolicus VF5
MLSEETIRVIKSTVPLLKEHGTEITARMYELLFSKYPKTKELFAGASEEQPKKLANAIIAYATYIDRLEELDNAISTIARSHVRRNVKPEHYPLVKECLLQAIEEVLNPGEEVLKAWEEAYDFLAKTLITLEKKLYSQP

SEQ ID NO: 10616 - protein, 587 aa, Bradyrhizobium japonicum USDA 110
MMARLLSVNVGLPRDVAWQGKTVHTGIWKAPVEGPRRVRRLNIDGDGQGDTAGHGGEQRAVFVYQDESYRYWQEHLGRPDLVHGQFGENFTVEGLADTNVCIGDRYRIGSALFEVTQPRVTCYRLGIRMDEPDMPALLVRHGRPGFYFRVIEEGDVEAGDEITLLANGPESMSVFEINALLYLPPHPRDRLERALRIPALSRGWNRSFASLLEQQRTSKIAAGNAGLGPAASPPPAWRGFRPFRVSRKIAESGTVTSLILEPTDGHRAAPALPGQFVVVRLGPSEAQAMTRSYSLSSRSDAPPYRISIKREAHGAASLYIADSLRVGDVVEVGAPRGSFTLRQDARPVVLLSAGIGVTPVLAMLHALVAEGSTRDVWWLHGARNGREHAFAAETRGLLAGLAHYHSHVCFSAPDPADRPGADFDSAGHLDQHLIERLNMPRDGDFYLCGPAAFMSDLTAGLAALGVAPDRIHTELFGARPSLTPGIAASPRTPAHAPVGAPGPGPMVSFARSGLNVRWGPSYASLLELAEACDVPVRWSCRTGVCHNCESGLVAGEVSYAPDPLDPPADGNVLICCSQPKADVVIDL

SEQ ID NO: 10617 - protein, 402 aa, Bacillus cereus ATCC 14579
MLSAKTIEIVKSTVPLLQEKGVEITTRFYQILFSEHPELLNIFNHTNQKKGRQQQALANAVYAAATYIDNLEAIIPVVKQIGHKHRSLGIKAEHYPIVGTCLLRAIKEVAGAPDEVLNAWGEAYGVIADAFISIEAEMYEEAAHKEGGWKDFRNFVIVKKVKESDVITSFYLKPEDGGKVSSFIPGQYVTIQINIEGETYTHNRQYSLSDAPGKEYYRISVKKEKGVDTPDGKVSNYLHGHVKEGDVLPVSAPAGDFVLNMDSTLPVVLISGGVGITPMMSMLNTLIEQDSKRNVYFVHAAINSNTHAMKEHVKAVENEYEQVKAYTCYSAPTEKDLEMKNFDKEGFIESEWLKTIIPTTEAEFYFCGPVAFMKHINAALTDLSVKQEHIHYEFFGPATSLQ

SEQ ID NO: 10618 - protein, 400 aa, Streptomyces avermitilis MA-4680
MLSEQSAATVRATLPAVGAAVGEITARFYDRLFAARPELLRDLFNRGNQAAGTQRQALAGSIAAFATYLVEHPDERPDAMLDRIAHKHASLGIAPGQYAVVHEHLFAAIAEVLGDAVTPEVAAAWDEVYWLMANALIAIERRLYAQHENTGDTGGRRPWRVVERVDETADVAAFRLRPADGRPLPDFRPGQYVSVRVELPDGARQTRQYSLVGAPGSPELRIAVKRVHGGTTPDGEVSNHLHARVREGSVLELSAPYGDLALEATDVPLLLASAGIGVTPMIAMLEHLALTGHRAPVTVVHADRSPAEHALRADHEAYAAKLADAAVHFWYEHPEPGHPADRTGLVDLTGVPVSAGTRAYLCGPLPFMRAVRTQLIEKGVAPADIHYEVFGPDLWLARES

SEQ ID NO: 10619 - protein, 565 aa, Streptomyces avermitilis MA-4680
MFEARHTMDAPTTTSADNGTSGGTGGAGWFTPRKQPETPQGGGQEAPEGSRLAAMRPVGRPSAGEGTEQQRIPPTEEAVVAPTQPMSGEPLRSLPDPAAPAPARHLGATLTEETRPAPAPIAASQPESAHEALRPLAGQPQFGQPQSGPVQPQPAAALPERGIPQREPGPPEPGSPRPGPDPQVPTPGPAPGPEASPDAVLIRRTMAEVGPVAGKVTSYFYALLFVRHPDLRSLFPAAMDTQRDRLLKALLTAAEHIDNTEVLVAYLQNLGRGHRKYGTRPEHYPAVGECLIGALSRYASGIWDEETEAAWVRAYTTISQVMIDAAAADELRAPAWWYAEVVSHDLRTPDIAVITVRPDQPYPFLAGQYTSLETPWWPRIWRHYSFASAPRSDGLLSFHVKAVPAGWVSNALVHRARPGDIIRLGPPAGSMTVDHTTESGLLCLGGGTGIAPIKALVEDVAEHGERRPVEVFYGARRDHDLYDIDTMLRLQQSHPWLSVRPVVDQRAHLQLPDVIREYGPWNEYDAYLSGPPGMIRSGVDALRGIGIPPDRIRHDSVEELVAAGD

SEQ ID NO: 10620 - protein, 401 aa, Ralstonia solanacearum
MLSEQSKPLIDASVPVLREHGLTITQTFYRNMFASHPELTNLFNMGNQANGSQQQSLASAVFAYAANHGNNAALAPVVGRIVHKHAAVGIRPSHYPIVGRHLLGAIAEVLGDAATPELLAAWDEAYWLLAAELIAAEARLYAHTQSGPDHRQPVRIIERHAQAEDVVSFTLEAVGGAKLADFLPGQYISVQVELAPGVLQQRQYSLSDAPNGRTWRISVKRDAGGSGRPAGTVSNWLHDNARPGEVLLVSQPYGDFVPQLATDSPIVLMSAGVGITPMIATLNALARRNTARKVVFSHAGQAASHVAHADDLERAAQVLPDFAAHVFLESGEAADFAARPARPGRMTVETFLDDGVADADFYLCGPLPFMQAQRAALLAGGVPAGRIHREVFGPDLLDDIL

SEQ ID NO: 10621 - protein, 393 aa, Azotobacter vinelandii
MLTEQQRAIVKATVPLLETGGEALTSHFYRIMLAEHPEVRPLFNQAHQASGEQPRALANAVLMYARHIDRLEALGPLVAQIVNKHVSLQVLPEHYPIVGACLLRAIREVLGAETATDAVLDAWGAAYGMLAELLIGAEEAAYAAGAAVPGGWRGARAFRVARRVVESEEIVSLHLRPEDGGALPAFRPGQYIGLRLVLDGEEVRRNYSLSAAPNGEEYRISVKRHATGRVSRHLHEQVREGDRLELFPPAGEFVLNDSDKPLVLIGAGVGVTPLLAMLEAALPGGRPIRFIHCARHAGVQAFRQQVEALAGRHPQLEAFFCYSAPRAGDRADANGRLDAQRLAAWLPAERDLDAYFLGPKSFMAQVKRQLRELGVPQEQCHYEFFGPAQALEA

SEQ ID NO: 10622 - protein, 403 aa, Sinorhizobium meliloti
MLTQKTKDIVKATAPVLAQHGYAIIQHFYKRMFQAHPELKNIFNMAHQERGEQQQALARAVYAYAANIENPESLSAVLKDIAHKHASLGVRPEQYPIVGEHLLASIKEVLGDAATDEIISAWAQAYGNLADILAGMESELYERSEERAGGWAGWRRFIVREKNPESDVITSFVLEPADGGPVADFEPGQYTSVAVQVPKLGYQQIRQYSLSDSPNGRSYRISVKREDGGLGTPGYVSSLLHDEINVGDELKLAAPYGNFYIDVSATTPIVLISGGVGLTPMVSMLKKALQTPPRKVVFVHGARNSAVHAMRDRLKEASRTYPDFKLFIFYDEPLPTDIEGRDYDFAGLVDVEKVKDSILLDDADYYICGPVPFMRMQHDKLLGLGITEARIHYEVFGPDLFAE

SEQ ID NO: 10623 - protein, 397 aa, Dictyostelium discoideum
MSLSQQSISIIKATVPVLQVHGVNITTTFYRNMFKANPQLLNIFNHSNQREGKQQNALANTVLQAAIHIDKLNELNLAPIVHKHVALGVLPEHYPIVGTNLLGAIKEVLQDAATDEILGAWGEAYGVIAQAFIDAEAALYKVTEEQIGGWRDTREFIVDRKVEESSNIISFYFKPADGKPIATYIPGQYITIKVPLTLENGEQRTHIRHYSLSDTPSEQYYRISVKKEDALKKSDPNGVVSNHLHANVKVGDKVLLSPPAGDYVVDQLSSNPILLVSGGVGITPLLSMAKATLAKQPEREVTFVHSSKNKQYQPFANELSQLEKSNKVKVSTVHSETDGQITKDKLEKFINPSQIKDTKVFICGPVSFMSAINKQLIELGYPKENISYEIFGPLTNV

SEQ ID NO: 10624 - protein, 423 aa, Dictyostelium discoideum
MLSQKSIQIIKSTVPLLEKYGVEITSLFYKNMFEAQPQFLNIFNHSNQRNQKQPVALANTILQSAIHIEKLNEINLMPIVHKHVALGITPEMYPIVGAHLLGAMKTVMQDEATPEIMAAWTEAYRAVAQAFMDAEEDLYFETEEQIGGWKDTREFVVDRIEEETPLIKSFYFKAYDGKEIATYIPGQYITVKITLPGDGVDVPTDKMRTYVRHYSLSDKPNDEYYRISIKKELGKNTPNGIVSNHFHNNIKVGDVVPMSVPAGDFVVNNDSETPILLICGGVGINPLFSMLKETLVQQPDRKINFIFSTHCESSQPFKEELKQLEDDYKETGNLKINLVYSENQGHINKEIIEKYSTQHVDQAEIDETDVYICGPVPFMMQVNKDLLQLGFHKENVHYELFGPLTPVLEENQMLRGVKNIIEN

SEQ ID NO: 10625 - protein, 149 aa, Novosphingobium aromaticivorans
MMRIASEHAKTIVKATAPAIEKHGVDITTAMYKRLFQNDEVKAMFDQAAQDSGEQPRRLAGAILAYAKNIDKLENLGSAVQRMVQRHVDTGVKAEHYPYVAEALLPAIRDVLGAEVATDEVLAAWGEAYWMLADILIAAEKQAYLEAVA

SEQ ID NO: 10626 - protein, 694 aa, Novosphingobium aromaticivorans
MVRASPPPADHRPLVVEEAMDDTQRVANSPIWHEGERALQAHVGVVDRMGEVGARVIRPFMPDQHRTFYAQLPFVILGSVDAEGAAWATVVEGEPGFLSSPDPKSLVLGALPHADDPALGGIHDEAALGLLGIELHNRRRNRVNGTLRFPSAGAPLLEVGQSFGNCPQYIQLRDATLSRAPAAPPPHLAEELPALDAAARAMIGSADTLFVASYADRLDSGRQVDVSHRGGKAGFVRVDAEGKLTIPDFAGNLFFATLGNVLLNGQAGLVFIDFESGDLLQMSGKAEVVLDSPEIASFAGAERLWTFVPQRIVRRKGALALRWSFRDNGWSPNSLATGQWPAALHWQQLRVERIVAESASIRSFHLRPVSPDLGWQHEAGQHLPIRVRLPGEDSPAVRTYTLSSAPSDPLYRISVKREGKVSAWLHEQVREGDIIEARAPAGSFVIEPGAPRLAVLIGAGIGITPMISMLRELVSLGANGAPARPAVLIQSARSLAERAFANELASLADRVRVVRVLGDAKGAQAGADYDLEGRIDLQLLSAVLPFGDHDFYLCGPKGFMQAIYDALRGANVPDHRIHAEAFGPSSLVRRRDTTRETAPAAQPSAVPVPVLFTASLKEARWKPGEGTLLELAEARGLKPEFGCRSGSCASCKVKLVSGAVAYPRTPSAEVASGEVLLCCAVPAEGNDKPLQVEA

SEQ ID NO: 10627 - protein, 427 aa, Schizosaccharomyces pombe
MSSVEVNRENADVANTNRQANLAEGYEIKELNESQKQYIRSSIPILESSGVNLTKAFYQKMLGNYPEVLPYFNKAHQISLSQPRILAFALLNYAKNIDDLTSLSAFMDQIVVKHVGLQIKAEHYPIVGHCLLSTMQELLPSDVATPAFLEAWTTAYGNLAKILIDSEKKVYQSQPWNGFVEFKVTELINESSDVKSVYLGPKDPAFRISHAHPGQYVSVLWEIPGLSHKTLREYSLSNRVDTCRNQFRISVRRVAGGVVSNFVHDNLKVGDIVGVSPPAGNFVYKRSEENVNRPLLCFAGGIGITPLIPIIETALLDGRKVNFCYSSRNYVSRPFKQWLEQLKLKYKENLKLKEFFSEESSVTKEQIVDEVMTRIINEEDLEKLDLSECDIYMLGPNNYMRFVKQELVKLGVEPNKVQSEFFGPYIP

SEQ ID NO: 10628 - protein, 388 aa, Pichia norvegensis
MSAAKQLFKIVPLTPTEINFLQSLAPVVKEHGVTVTSTMYKYMFQTYPEVRSYFNMTNQKTGRQPKVLAFSLYQYILHLNDLTPISGFVNQIVLKHCGLGIKPDQYPVVGESLVQAFKMVLGEAADEHFVEVFKKAYGNLAQTLIDAEASVYKTLAWEEFKDFRVTKLVKEAEDVTSVYLTPVDGFKLKPIIPGEYISFRWDIHNPDITDIQPREYSISQDVKENEYRISVRDIGIVSDYINKKLQVGDIVPVHAPVGTMKYDSISKKGKVAVLAGGIGITPMIPIIEHALKDGKDVELYYSNRSYQSEPFREFFSNLEKENNGKFKLNNYISAENQKLQVKDLEHINPDEYDVYLLGPVAYMHEFKTYLVGKGVSDLKMEFFGPTDP

SEQ ID NO: 10629 - protein, 267 aa, Desulfitobacterium hafniense
MAPLQRTHIAAGAGRRGAGARRPHRRTPAAPAGAGLSPARNDSLPTQGFHRMTTALNEAAAAVVRATVPALAAHGHAVTTAMYRRLFRDERIAALFNHANQGGDNAQAHALAGAILAYAQHIDDLPALSGALERIAQKHVGYHILPEHYPFVAGALLGAIEETLGEAATPQVLAAWGEAYWFLADLLQRREAELRGELAQVVGGWSGWREFVVAAKRAENASSDAAIVSFELRPADGGAVIAHRPGQYLTLRYPVPGQARQAQYSIS

SEQ ID NO: 10630 - protein, 403 aa, Ralstonia eutropha [sequence omitted]

SEQ ID NO: 10631 - protein, 418 aa, Neurospora crassa
MTLTDAQISIVKSTAPVLKQHGEAITTVFYNDLITENPSLKNIFSLTSQATGAQPRALAHAVLAYATYIDNLSALSEAVARIAHKHVSLQVEPAQYAIVGQYLIQAIGKVLGDAATPEIVDAWTAAYGVLANVFIGVEGGMYEENEKKDHWKGWRKFRIARKVEESSSISSFYLRPVDGATLPKYLPGQYVSVQVLVSQLGYLQSRQYSLSEAPKEGGMEEYRISVKREEGETGAPGLVSNLLHGMQEGAEVEVSHPQGEFFLDPADASKEGVPAVLISVGVGATPMMAILKSLLQENVKRRPVSWIHASKSSSTQPFGEEVRRIVKENPEQVSAHVFLKTVAGTDQAGVHYDFADTRMDLTKLDGERDLHLADKRTEYYICGPETFMVETRKVLVGLGVDKSKVHLELFATGFVADE

SEQ ID NO: 10632 - protein, 537 aa, Neurospora crassa
MALTYQQSKLVRDTIPALKEHGERITSIFYKTMLTDHPELNNYFNSVNQKNGRQPRALTAVILGFASNINHLSELVPKFERMCNKHCSLGIQPEHYEVVGKYLIQAFGEVLGPAMTPEVQTAWTKAYWMLAKMLIGREAQLYRDFESWPSWRPFKIDRIVNECDDLYTFYLVPQDGKRLPKFLPGQYVSVQIQVPGGNLQSRQYSLSEAWREDYYRITIRRDEGTVYSNSVSKSFFNPGIVSNYLIDQTTVGSILQVSHPAGEFFLDVHNTSTVPLVLISAGVGVTPMVSIANTVMESQPSRQIAWIHGCRKHIPFEDHIKTLRKKNSNFQTKIFKTVINSTDRPGETYDYNERMDLAKLKPEELHLQHGGTEYFICGPEQFMVNQKLYLMQQGVSASRIKCEIFTTGDLKLGLIIETIDQEEEAGDEKRVTHISREGGGGWENVAPDPRKARRSPSLSTKLPKRRNHAAVSGLSTGSGTQKLAPTLLNPSSTRTRRDMTIPPPTTTTAMPGMEEEEEEERREEERRYRWREASALG

SEQ ID NO: 10633 - protein, 343 aa, Methylocystis sp. M
MYQIVIETEDGETCSFECGPSEDVISAGLRQSVILLASCRAGACATCKADCTDGDYELIDVKVQALPPDEEEDGKVLLCRTFPRSDLHVVVPYTYDRISFQAIQTNWLAEITECDRVSSNVVRLVLQPLTADGAAPISLNFLPGQFVDIEIPGTHTRRSYSMASVAEDGRLEFFIRLLPDGAFSNYLRTQARVGQRVALRGPAGSFSLHKSERPRFFVAGGTGLSPVLSMIRQLHKESDPQPATLFFGVTNYEELFYVDELKALQHAMPSLDVQIAVVNVSEGNGVAKGTVIDLLQDELGRRAEKPDIYLCGPPGMIDAAFAAASSAGVPKEQVYLEKFLASG

SEQ ID NO: 10634 - protein, 415 aa, Fusarium oxysporum
MALTAAQVAIVKSTAPILKEHGKTITTTFYRNMLGAHPELKNYFSLRNQQTGAQQAALANSVLAYATYIDDLGKLSHAVERIAHKHVSLFIKPEHYPIVGTHLIGAIGEVLGSALTTEIKDAWVAAYGQLADIFIQREGQMYEAAGEWNSWRKFKIVKKEAENDSVTSFYLEPTDGKPLPKFLPGQYVSVQIPIPELDGLLQSRQFSLSEAPGTNHYRISVKLQGPTEEPAVEDLAAGKIAGLLSTRLHNRYNVGDEVELSPPAGEFSLDPADTSAAKKPLVLLSAGVGATPLVSILDSVLQSPTASRPITWIHGARYSGSTCFVPHVLDSAKKHENITAKIFLEDVKEGDQYDFKGEIDLAKLQKEQLLQLDNADAEYYICGPEDWMVNVRAFLEENGVPRERQHLELFKTGDI

SEQ ID NO: 10635 - protein, 395 aa, Erwinia chrysanthemi
MLDQQTIATIKSTIPLLAETGPALTAHFYQRMFHHNPELKDIFNMSNQRNGDQREALFNAICAYATHIENLPALLPAVERIAQKHASFNIQPEQYQIVGTHLLATLEEMFQPGQAVLDAWGKRYGVLANVFIQRESDIYQQSAGQNGGWHGIRPFRIVAKQPQSSLITSFTLEPVDGGPIAAFRPGQYLAVYIRDKRFEYQEIRQYSLTNEPNGRYYRIAVKRETMGSVSGYLHDVAREGDVIELAAPHGDFYLEVTPETPVALISAGVGQTPMLSMLHSLKNQQHQADIFWLHAAENTEVHAFADEIADVAATLPQLQSYVWYREASSEAARSAHAFHGLMALKDLPTPLPMTNLHCYLCGPVAFMQFAARQLLELGITESQIHYECFGPHKVI

SEQ ID NO: 10636 - protein, 458 aa, Giardia intestinalis
MTLSEDTLRAVEATAGLIAAQGIEFTRAFYERMLTKNEELKNIFNLAHQRTLRQPKALLDSLVAYALNIRRINELYELKGKGLPVPPEHWAELQGFFSAAERVANKHTSFGIQPAQYQIVGAHLLATIEDRITKDKDILAEWAKAYQFLADLFIKREEEIYAATEGCKGGWRQTRTFRVEEKTRVNEIICKFRLVPAEEGAGVVEHRPGQYLAIFVRSPEHFQHQQIRQYSIISAPNSAYYEIAVHRDEKGTVSRYLHDYVSTGDLLEVAPPYGDFFLRYLEADEQAPADTQASQEFQMLQSGAINFAAEKTMPIVLISGGIGQTPLLSMLRFLAQKEGKETARPIFWIHAAHNSRVRAFKEEVDAIRETALPSLRVVTFLSEVRATDREGEDYDFAGRINLDRISELTKLEADNANPHYFFVGPTGFMTAVEEQLKTKSVPNSRIHFEMFGPFKASH

SEQ ID NO: 10637 - protein, 396 aa, Salmonella typhimurium
MLDAQTIATVKATIPLLVETGPKLTAHFYDRMFTHNPELKEIFNMSNQRNGDQREALFNAIAAYASNIENLPALLPAVEKIAQKHTSFQIKPEQYNIVGTHLLATLDEMFNPGQEVLDAWGKAYGVLANVFIHREAEIYHENASKDGGWEGTRPFRIVAKTPRSALITSFEFEPVDGGTVAEYRPGQYLGVWLKPEGFAHQVFRQYSLTRKPDGKGYRIAVKREDGGQVSNWLHHHASVGDVVHLAAPAGDFFMNVAADTPVSLISAGVGQTPMLAMLDTLAKEQHTAQVNWFHAAENGDVHAFADEVSELGRTLPRFTAHTWYREPTEADRAQRLFDSEGLMDLSKLEAAISDPAMQFYLCGPVGFMQFAAKQLVSLGVNNENIHYECFGPHKVL

SEQ ID NO: 10638 - protein, 146 aa, Vitreoscilla stercoraria
MLDQQTINIIKATVPVLKEHGVTITTTFYKNLFAKHPEVRPLFDMGRQESLEQPKALAMTVLAAAQNIENLPAILPAVKKIAVKHCQAGVAAAHYPIVGQELLGAIKEVLGDAATDDILDAWGKAYGVIADVFIQVEADLYAQAVE

SEQ ID NO: 10639 - protein, 439 aa, Nostoc punctiforme
MLESLGRIKNPLVRSIAAAATVSSVITLSAAVVIGVSNAKAKSAYQFGVYSSLFGTASGAVFGLVYTNKASGNKSTPDLKTLDSHVWQDWRNFVVVRKVKESEEITSFYLQPEDKGEITNFQPGQFLTIKLDIPGQDKPVIRTYSLSDYPENCEYYRLSIKREPAPNGLDVMPGIASNFMHDRIQEGSVILAKPPNGKFVLDVQKSIPAVLISNGVGITPMISMAKACSLLNPTRPIWFVHGARDGKFHAFRDEVREISRQNHNLNVHFRYSRPTPEDRGKYHSVGYVDAALIQELVRQEAEYFLCGSPSFMQSIMQGLKESGVPDSRVFFESFGKPMKSVSEKQTQTVTGDDKFAEIVFAKSGKTLTWQPSDGTILEFAEANDINPPFSCRVGVCGTCMCKIREGVVAYQEEPTATTDQGSVLICISQPGTSKLVLDI

SEQ ID NO: 10640 - protein, 126 aa, Nostoc punctiforme
MYEIMFQNHPEVKEQFSMAAQADGSQPARLATAVYSYANQIDNLPALKSMVEKIAHRHVQTHVTPEQYPIVGESLLQAMKDVLGEAATEEVMAAWTEAYQALSEVFIHREHDIYVGEDKKAQLLHS

SEQ ID NO: 10641 - protein, 394 aa, Vibrio cholerae
MLTQEHINIIKSTIPLLESAGPALTQHFYQRMFSHNPELKHIFNMTHQKTGRQSVALFEAIAAYAKHIDNLAALTSAVERIAHKHTSFNIQPEHYQIVGHHLLETLRELAPDAFTQPVEEAWTAAYFFLAQVFIDREGALYLERKQALGGWRDGRTFVVREKQVESAYVTSFVLVPADGGAVLDYQPGQYIGIEVTPEGSDYREIRQYSLSHASNGREYRISVKREGVGSDNPGLVSHYLHNNVKVGDSVKLYAPAGDFFYVERERPVVLISAGVGATPMQAILHTLAKQNKSGVTYLYACNSAKEHTFAQETAQLIAQQGWMQQVWYRDESADDVLQGEMQLAELILPIEDGDFYLCGPIGFMQYVVKQLLALGVDKARIHYEVFGPHAQLAA

SEQ ID NO: 10642 - protein, 394 aa, Vibrio parahaemolyticus
MLSNQTIEIVKATAPLIAETGPKLTAHFYDRMFTHNPELKDIFNMSNQRNGDQREALFNAICAYAANIENLPALLGAVEKIAHKHTSFLITKDQYQIVGKHLIATIDELFNPGQEVLGAWAEAYGVLANVFIQREEQIYQANASQEGGWRGLREFELVGKQLESEHICSFVFKPTDGSKVTKYKPGQYLGIYINSDKFENQEIRQYSLSSSVQENTYRISVKREQGGKVSNYLHDELNIGDKVKLAAPAGDFFMDVDTNTPVVLISAGVGLTPTLSMLESLTEHHAPVTWVHATENSKHHAFKEHVNQLVTAKENMNALIWYNQPTAEDKIGEDFHFTGFVNLHEIEAALKQDNVQVYFCGPVGFMQHVAKQLQELGVPQEQFHYECFGPHKVV

SEQ ID NO: 10643 - protein, 396 aa, Escherichia coli K12 [sequence omitted]

SEQ ID NO: 10644 - protein, 411 aa, Bacillus halodurans
MSTATLSQETKQIVKATVPILAEHGEAITKHFYKRMFSHHPELLNIFNQTHQKQGRQPQALANSIYAAAEHIDNLEAILPVVSRIAHKHRSLNIKPEQYPIVGENLLAAMREVLGDAASDDVLEAWREAYELIADVFIQVEKKMYEEASQAPGGWREFRSFVVEKKQRESATITSFYLKPEDGKALASYKPGQYITVKVTIPGHEHTHMRQYSLSDAPEKGYYRITVKREEGDGDLPPGIVSNYLHQHIHEGDVLEITAPAGDFTLQEEGERPIVFISGGVGITPLMSMFNTLMQRGVKREVIFIHAAINGFYHAMHDHLAQTASQQENVHYAVCYERPTPGDRMNPFMKKEGFIDESFLRSILHDREADFYFCGPVPFMKTIAQILKDWDVPEQQVHYEFFGPAGTLASS

SEQ ID NO: 10645 - protein, 396 aa, Salmonella enterica subsp. enterica serovar Typhi
MLDAQTIATVKATIPLLVETGPKLTAHFYDRMFTHNPELKEIFNMSNQRNGDQREALFNAIAAYASNIENLPALLPAVEKIAQKHTSFQIKPEQYNIVGTHLLATLDEMFNPGQEVLDAWGKAYGVLANVFIHREAEIYHENASKDGGWEGTRPFRIVAKTPRSALITSFEFEPVDGGTVAEYRPGQYLGVWLKPEGFAHQEIRQYSLTRKPDGKGYRIAVKREDGGQVSNWLHHHANVGDVVHLAAPAGDFFMNVAADTPVSLISAGVGQTPMLAMLDTLAKEQHTAQVNWFHAAENGDVHAFADEVSELGRTLPRFTAHTWYREPTEADRAQRVFDSEGLMDLSKLEAAISDPAMQFYLCGPVGFMQFAAKQLVSLGVNNENIHYECFGPHKVL

SEQ ID NO: 10646 - protein, 333 aa, Methylocystis sp. WI14
  unsure (1)..(333): unsure at all Xaa locations
MYQIVIETEDGETCSFECGPSEDVISAGLRQSVILLASCRAGGCATCKADCTDGDYELIDVKVQALPPDEEEDGKVLLCRTFPRSDLHIVVPYTYDRISFQAIQTNWLAEITECDRVSSNVVRLVLQPLTADGAAPISLNFMPGQFVDIEIPGTHTRRSYSMASVAEDGSLEFFIRLLPDGAFSNYLRSQARVGQRVALRGPAGSFSLHKSERPRFFVAGGTGLSPVLSMXRQLKKESDPLPATLFFGVTNYDELFYVEELKALQHAMPSLDVQIAVVNVSEGNGVAKGTVIDLLQDELGRRAEKPDIYLCGPPGMIDAAFAAASSAGVPKEQ

SEQ ID NO: 10647 - protein, 396 aa, Salmonella typhimurium LT2
MLDAQTIATVKATIPLLVETGPKLTAHFYDRMFTHNPELKEIFNMSNQRNGDQREALFNAIAAYASNIENLPALLPAVEKIAQKHTSFQIKPEQYNIVGTHLLATLDEMFNPGQEVLDAWGKAYGVLANVFIHREAEIYHENASKDGGWEGTRPFRIVAKTPRSALITSFEFEPVDGGTVAEYRPGQYLGVWLKPEGFAHQEIRQYSLTRKPDGKGYRIAVKREDGGQVSNWLHHHASVGDGVHLAAPAGDFFMNVAADTPVSLISAGVGQTPMLAMLDTLAKEQHTAQVNWFHAAENGDVHAFADEVSELGRTLPRFTAHTWYREPTESDRAQRLFDSEGLMDLSKLEAAISDPAMQFYLCGPVGFMQFAAKQLVSLGVNNENIHYECFGPHKVL

SEQ ID NO: 10648 - protein, 351 aa, Cricetulus griseus
MGNAAAAKKGSEQESVKEFLAKAKEEFLKKWESPSQNTAQLDHFDRIKTLGTGSFGRVMLVKHKETGNHYAMKILDKQKVVKLKQIEHTLNEKRILQAVNFPFLVKLEFSFKDNSNLYMVMEYVPGGEMFSHLRRIGRFSEPHARFYAAQIVLTFEYLHSLDLIYRDLKPENLLIDQQGYIQVTDFGFAKRVKGRTWTLCGTPEYLAPEIILSKGYNKAVDWWALGVLIYEMAAGYPPFFADQPIQIYEKIVSGKVRFPSHFSSDLKDLLRNLLQVDLTKRFGNLKNGVNDIKNHKWFATTDWIAIYQRKVEAPFIPKFKGPGDTSNFDDYEEEEIRVSINEKCGKEFTEF

SEQ ID NO: 10649 - protein, 763 aa, AKT8 murine leukemia virus
MGQTVTTPLSLTLEHWGDVQRIASNQSVDVKKRRWVTFCSAEWPTFGVGWPQDGTFNLDIILQVKSKVFSPGPHGHPDQVPYIVTWEAIAYEPPPWVKPFVSPKLSLSPTAPILPSGPSTQPPPRSALYPALTPSIKPRPSKPQVLSDNGGPLIDLLTEDPPPYGEQGPSSSDGDGDREEATSTPEIPAPSPMVSRLRGKRDPPAAVSTTSRAFPLRLGGNGQLQYWPFSSSDLYNWKNNNPSFSEDPGKLTALIESVLTTHAREETLIIIPGLPLSLGATDTMNDVAIVKEGWLHKRGEYIKTWRPRYFLLKNDGTFIGYKERPQDVDQRESPLNNFSVAQCQLMKTERPRPNTFIIRCLQWTTVIERTFHVETPEEREEWATAIQTVADGLKRQEEETMDFRSGSPSDNSGAEEMEVSLAKPKHRVTMNEFEYLKLLGKGTFGKVILVKEKATGRYYAMKILKKEVIVAKDEVAHTLTENRVLQNSRHPFLTALKYSFQTHDRLCFVMEYANGGELFFHLSRERVFSEDRARFYGAEIVSALDYLHSEKNVVYRDLKLENLMLDKDGHIKITDFGLCKEGIKDGATMKTFCGTPEYLAPEVLEDNDYGRAVDWWGLGVVMYEMMCGRLPFYNQDHEKLFELILMEEIRFPRTLGPEAKSLLSGLLKKDPTQRLGGGSEDAKEIMQHRFFANIVWQDVYEKKLSPPFKPQVTSETDTRYFDEEFTAQMITITPPDQDDSMECVDSERRPHFPQFSYSASGTA

SEQ ID NO: 10650 - protein, 501 aa, AKT8 murine leukemia virus
AREETLIIIPGLPLSLGATDTMNDVAIVKEGWLHKRGEYIKTWRPRYFLLKNDGTFIGYKERPQDVDQRESPLNNFSVAQCQLMKTERPRPNTFIIRCLQWTTVIERTFHVETPEEREEWATAIQTVADGLKRQEEETMDFRSGSPSDNSGAEEMEVSLAKPKHRVTMNEFEYLKLLGKGTFGKVILVKEKATGRYYAMKILKKEVIVAKDEVAHTLTENRVLQNSRHPFLTALKYSFQTHDRLCFVMEYANGGELFFHLSRERVFSEDRARFYGAEIVSALDYLHSEKNVVYRDLKLENLMLDKDGHIKITDFGLCKEGIKDGATMKTFCGTPEYLAPEVLEDNDYGRAVDWWGLGVVMYEMMCGRLPFYNQDHEKLFELILMEEIRFPRTLGPEAKSLLSGLLKKDPTQRLGGGSEDAKEIMQHRFFANIVWQDVYEKKLSPPFKPQVTSETDTRYFDEEFTAQMITITPPDQDDSMECVDSERRPHFPQFSYSASGTA

SEQ ID NO: 10651 - protein, 1092 aa, Adiantum capillus-veneris
MSTSSSMNDQRRDAYSLRAPPNEGKLHPLARDSRGSLEVFNPGNPSSLTAASIGAGMQYTPSWQQQQPPEDENYDLPLNQREKEENIYNQTHGGPERERGPDKGTSPSDHKRGMSTGTSPPTRSKYSEIFTSHDTIDKEGKFQAYQTNEESTHDWLSSTPAGQGPMLGGGFGGGEGARGSYLLGTREHPKARCDSLAERAAGWGLVLKTDGDSGRVDGVRTRTSEEEREFRRLSEERRSLNSSTVRTSDDSGFTSDTSNASRIPRVSKDVLQALEGFQQTFVIADGTKPDLPIMYASAGFFKMTGYTSSEVIGRNCRFLQGKETDPEEIDRIRECISKGSGYCGRLLNYKKDGSAFWNLLTISPIKDVDGSVLKYIGMQVEVSQFTEGTKENAMRPNGLSESLIKYDARQKERASFQVTELVEAIKDPKQVGDDKKTSISLGVVRPVAPSGPRKGPDLRELLTAQQYTPRSATSVQPKGSNLTEPGSHRESISKRNRSSGFFSFLGLDKLAGKGPGNQHDAAEFIEPEILMTKDEDSSEASFELDKARLKEIRRGIDLATTLERIEKNFVITDPRLPDNPIIFASDNFLELTEYSREEILGRNCRFLQGPDTNRETVKLIRDAIDNEKEVTVQLLNYTKTGRTFWNLFHLQPMRDHKGELQYFTGVQLDGTEYLEPLTKRLSQQIASEGAKIIRETAANVNEALRELPDANLKVEDLWRIHSRLVLPKPHKLNHDSWGVIRKIHASGEKVKLKHFRPLRPLGYGDTGSVHLVELRGTGKLFAMKAMEKNVMVKRNKVHRVCAEREILGMMDHPFLPTLYASFETQTHVCLITDFCAGGELFLLLERQPTKIFREETARFYTSEVVVALEYLHCQGVIYRDLKPENILLQQDGHVMLSDFDLSYLSSSNPRLVVPPRLHKKRSKRKNFPPPIFRAEPIGACNSFVGTEEYIAPEVITGSGHNSSVDWWALGILMYEMLYGRTPFRGKTRQKTFGNILHKDLVFPRRIPTSLAARQLINGLLQKDPENRLGSQGGANEIKGHPFFQGVNWTLIRCMRPPTFDAPVCFAGSELDVEGDEALDWDDVEASNPIEYF

SEQ ID NO: 10652 - protein, 1465 aa, Adiantum capillus-veneris
MATPGGPKTKHSVSVAQTRADARLHAAFEGSGDAGAGGSRAPFDYSKSGMDASSVTSVAPEAITAYLQRMQRGGLTQAFGCMLVVAGQKIVAFSENAPEMLEVAAGLGTDLRMLFTQGSTAALDQAVKEEDLSSVNPLVLQSCGGSAKQFYAMLHRIEDVAGVVIDLEPIENGVVEKKSSAEMAVKPIARVQSLPGGEIGRLCQVVVEEVQEMTGYDRVMAYKFHEDGHGEVVAEVRRPDLEPYLGLHYPSTDVPQASRMMFMKNGVRMIGDCTLPPVRVVQAKELAQPISLAGSTLRAPHGCHAQYMSNMGSAASLTMAVAIDDYDDDSSLSCGSRKLWGLVVCHHPSPRTVSYPLRCACEKLMVAFGVQLNIELDLAAQLRENHILTTQALLCDMLRRIRGAPIGIVSRSPSIMDLVKCDGAALYYGGRFWPLGTTPSEFQIRDLAEWLLGASEEIASTGVTCTDSLAEMGYPGAALLGDAVCGMAAAMITPNSDFLFWFRSHTAKEVYWGGAEHDPQSRDDDSWMQLPRSSFKAFLEIVKRRSLPWEEVEVDAIRSLQLILREDLEQFCAAVGAVKASDGDDEDSLVPSAKKLSLKETEENGGADNSKKLERMHSAAAGGGGGGGRWEKMRLPSSLAQEWMEAIRGTGDGGASGGGGGGPFDWDLISAFQHNSFIVVDALKPDFPIIYASTGFFNLTGYTSREVIGGNCRFLQGPDTNPADVASIREALAQGTGTFCGRLLNYRKDGSSFWNLLTIAPIKDDLGSIVKLIGVQLEVSKYTEGIRANNRRPNGMPQSLIRYDVRHQDKVSAFIAQLVAALTKPDKVETPRLSSAMRFSLTGQTIESLPQPTAIPREGGGRTRRPRSSSFLSLLGMEKEKDIPEEDELQELEVIMLEDASVGRPGSLDDPERTRRGIDLATTLERIGKSFVITDPRLPDNPIIFASDRFLELTEYTREEVLGNNCRFLQGRGTDRKAVQLIRDAVKEQRDVTVQVLNYTKGGRAFWNLFHLQVMRDENGDVQYFIGVQQEMVAPRPVHQPPELPDILPDRVEQEKAEVVRATAQRVDAAARELPDANLVPDHLFAPHSKVVTPLPHSKTNSSSWFAIRRVQRRLRRGERLGLKHFRPIKPLGSGDTGSVHLVELRGTGQVFALKAMDKSMMLQRNKVHRARAEREILAIMDHPFLPTLYASFQTKTHVCLITDYCPGGDLFLLQDKQPTQTLSERTASFYAAEVVVALEYLHCMGVIYRDLKPENVLLQKNGHILLTDFDLSFLTSCRPQLILQGGKGRSRRSKRRRRVTFCAEPRVSSNSFVGTEEYIAPEIISGEPHSSAVDWWALGILLYEMLYGRTPFVGRNRQKTFYNVLNKELIFPTSIPVSLAGRQLIAGLLQRDPTIRLGTLRGASELKKHPFFREINWPLIRWRKFSANQAHNANNVSSLDEGESDSGNAWEANGGSTQSFQDTF

SEQ ID NO: 10653 - protein, 1465 aa, Adiantum capillus-veneris
MATPGGPKTKHSVSVAQTRADARLHAAFEGSGDAGAGGSRAPFDYSKSGMDASSVTSVAPEAITAYLQRMQRGGLTQAFGCMLVVAGQKIVAFSENAPEMLEVAAGLGTDLRMLFTQGSTAALDQAVKEEDLSSVNPLVLQSCGGSAKQFYAMLHRIEDVAGVVIDLEPIENGVVEKKSSAEMAVKPIARVQSLPGGEIGRLCQVVVEEVQEMTGYDRVMAYKFHEDGHGEVVAEVRRPDLEPYLGLHYPSTDVPQASRMMFMKNGVRMIGDCTLPPVRVVQAKELAQPISLAGSTLRAPHGCHAQYMSNMGSAASLTMAVAIDDYDDDSSLSCGSRKLWGLVVCHHPSPRTVSYPLRCACEKLMVAFGVQLNIELDLAAQLRENHILTTQALLCDMLRRIRGAPIGIVSRSPSIMDLVKCDGAALYYGGRFWPLGTTPSEFQIRDLAEWLLGASEEIASTGVTCTDSLAEMGYPGAALLGDAVCGMAAAMITPNSDFLFWFRSHTAKEVYWGGAEHDPQSRDDDSWMQLPRSSFKAFLEIVKRRSLPWEEVEVDAIRSLQLILREDLEQFCAAVGAVKASDGDDEDSLVPSAKKLSLKETEENGGADNSKKLERMHSAAAGGGGGGGRWEKMRLPSSLAQEWMEAIRGTGDGGASGGGGGGPFDWDLISAFQHNSFIVVDALKPDFPIIYASTGFFNLTGYTSREVIGGNCRFLQGPDTNPADVASIREALAQGTGTFCGRLLNYRKDGSSFWNLLTIAPIKDDLGSIVKLIGVQLEVSKYTEGIRANNRRPNGMPQSLIRYDVRHQDKVSAFIAQLVAALTKPDKVETPRLSSAMRFSLTGQTIESLPQPTAIPREGGGRTRRPRSSSFLSLLGMEKEKDIPEEDELQELEVIMLEDASVGRPGSLDDPERTRRGIDLATTLERIGKSFVITDPRLPDNPIIFASDRFLELTEYTREEVLGNNCRFLQGRGTDRKAVQLIRDAVKEQRDVTVQVLNYTKGGRAFWNLFHLQVMRDENGDVQYFIGVQQEMVAPRPVHQPPELPDILPDRVEQEKAEVVRATAQRVDAAARELPDANLVPDHLFAPHSKVVTPLPHSKTNSSSWFAIRRVQRRLSRGERLGLKHFRPIKPLGSGDTGSVHLVELRGTGQVFALKAMDKSMMLQRNKVHRARAEREILAIMDLPFLPTLYASFQTKTHVCLITDYCPGGDLFLLQDKQPTQTLSERTASFYAAEVVVALEYLHCMGVIYRDLKPENVLLQKNGHILLTDFDLSFLTSCRPQLILQGGKGRSRRSKRRRRVTFCAEPRVSSNSFVGTEEYIAPEIISGEPHSSAVDWWALGILLYEMLYGRTPFVGRNRQKTFYNVLNKELIFPTSIPVSLAGRQLIAGLLQRDPTIRLGTLRGASELKKHPFFREINWPLIRWRKFSANQAHNANNVSSLDEGESDSGNAWEANGGSTQSFQDTF

SEQ ID NO: 10654 - protein, 539 aa, Magnaporthe grisea
MPSLGFLKKKRTRDGNNDNSSQPASPVTPTAAQSFEQAQVLGAPSAINNSHAHTQQQSYLVPQPGYSVGTEVQAQQPQMNSISQQQQQAFAPPAHTPSPGTIDPQQSLPSISNLMNPAVQQQNSQPSANFQPQSQSQSQSQSQFPLPPSHGNGDQSQQQNFQVQQQIQSQQDAMDIQPSQVQDQSHSQQAQPQHQPQHHVQHHVNHAHQGSQDQQTRVTKGKYSLTDFEILRTLGTGSFGRVHLVQSRHNQRFYAVKVLKKAQVVKMKQVEHTNDERKMLGEVKNPFLITLWGTFQDCRNLYMVMDFVEGGELFSLLRKSGRFPNPVAKFYAAEVTLALEYLHAKNIIYRDLKPENLLLDRHGHLKITDFGFAKRVPDKTWTLCGTPDYLAPEVVSNKGYNKSVDWWSLGILIYEMLCGYPPFWDSGSPMKIYENILKGKVRYPAYINPDAQDLLQRLITADLTKRLGNLYGGSQDVRNHPWFAEVTWDRLARKDIDAPYTPPVKAGAGDASQFDRYPEETERYGQTGHDEYGNLFPGF

SEQ ID NO: 10655 - protein, 919 aa, Aspergillus nidulans
MAAAQSGSENTELSKQPSPQNDGCQDDDNHDQIGSSTPSPSGIATPQPNPADRRLPSIMHNYFQVGSSSAVMLRSLKTRFSLSDPSPSSADTMQSGSLANGTRDAQSSGHTSSSSGSFVIMERDEARLESPTTPPDNEAETQEISQESRPPAALPTPPCSSACSLLQKESEEPEAGPDKGMGSIFNTLKNYLSPSRSVSCSDSQARRHTSHPVSSISDDPVLASHFFNPSLSQTPESLCLVEAPLLDHEKPHVSASSENAAKLTANVSNPSHLKNTPPHTPRAMSDEDLQSNGKAPASPPRSSNPTHSPRDEPSDSADEITGKLNEVFPSSMDTSSSPSSGPPVASLKGKLHVKISEGKGLQPGFDPYVVCVFEWNEVISKSVQDEEQESLKRQQKELEQSALDSGRPMAIPMNRQSSHNNTLESTDHRGHAPITDPHWNHEAVFDVFGDQSEIDVSVYDRNDSEAFLGHVRLCVNLKEDNSRLDGWFPLKGRAAGDSRVSGEIHMEMRFEKTEKKQVGPNDFQILKLIGKGTFGQVYQVKKKDTRRIYAMKVLSKKVIIQKKEVAHTVGERNILVRTAMAASPFIVGLKFSFQTPTDLYLVTDYMSGGELFWHLQKEGRFQEPRAKFYIAELIMALQHLHDHDIVYRDLKPENILLDANGHIALCDFGLSKANLTQNDTTNTFCGTTEYLAPEVLLDEQGYTKMVDFWSLGVLVFEMCCGWSPFYAEDTQQMYKNIAFGKVRFPRDALSTEGRNFVKGLLNRNPKHRLGAQNDAKELMAHPFFHDIDWEALGRKEVIPPFKPKLKSDTDTSNFDPEFTNALENSNSLNDRAAALANGFMAASTPLSPGMQANFQGFTFVNESSIDHHFKNEVGDRMDEDYEPMHRSHRSGNSIDHRMAGVQKTGDAGEIFNVDDNFDM

SEQ ID NO: 10656 - protein, 472 aa, Aspergillus nidulans
MPTLGGLLKKRRTRDSQDLSKELQAGSTTTGHTTTSPIAAEDSQSQQHHGHHGGHHFFHHNHHNHQPSNNSANSANSQNSHAAKHHQFDQSSATSNQPSDGQTASMQSPAQQPSSTSAHSNSGHHSNAASIHNIIHPSQQNTPQVSRAERTTKGKYTLDDFAIQRTLGTGSFGRVHLVQSKHNHRYYAIKVLKKAQVVKMKQIEHTNDERRMLNRVRHPFLVTLWGTWQDARNLYMVMDFVEGGELFSLLRKSQRFPNPVAKFYAAEVTLALEYLHSLNIIYRDLKPENLLLDRHGHLKITDFGFAKEVPDITWTLCGTPDYLAPEVVASKGYNKSVDWWSLGILIFEMLCGFTPFWDQGSPVKIYQNILAGRIKFPPYLHPDAVDLLSRLITSDLTKRLGNLHGGPDDIKNHPWFAEVTWDRLLRKEIDAPYVPPIRGGQGDASQYENYQEESEPYGQAGEDPHGHLFPDF

SEQ ID NO: 10657 - protein, 515 aa, Cryptococcus neoformans var. grubii
MFQKVSDKFHRKQQSSTSPGKTQQVPNSPSSVLAKANSQAQQAYSSQDHSPMEGIQSDSTHIQQPMATQKAPIVGPSTSTSLSTVPVQDGTLPLTPGAQGMLAGTTDGHRQVQSPVSRSSSAGEDKMREKARDAQEQAAQAQANLHRVTQQARVAAINAAATQAALETATQLPATARVPTSGTGAEPGQARRKTAGRYALSDFLIERTLGTGSFGRVHLVRSRHNGRFYAVKVLNKEKVIKMKQVEHTNSEREMLVRVRHPFLVNLWGTFQDVNNLYMVMDFVAGGELFSLLRKSQRFPNSVAKFYAAEVALALDYLHSLDIIYRDLKPENLLLGADGHVKVTDFGFAKYVPDITWTLCGTPDYLAPEVVQSKGYNKSVDWYALGVLIFEMLAGYPPFFTEDGNPMKLYEKIIAGKVRYPTYFDVLAKELLKNLLIGDLTKRYGNLRAGSSDIFAHGWFAEVDWDKLYRREIPAPYVPKIDGEGDASQFDRYQEADVSAYGKVGNGPYDHFFVEF

SEQ ID NO: 10658 - protein, 589 aa, Giardia lamblia ATCC 50803
MSRPILETGTLPNAKVGSYPASQTISMMEAFTGGSRLADVHNFHYTKRIGNMAHYRASDFQILCLLGIGDAGRVYLVKRSSEKVLIPTGRNETVFALKVCSQHDLTKRNKVNRFFTELHILMTSRHPFIMTLHASFADERNFYLLMEFCNGGEFAEVLKRQPNRCFPESTVQHYAAEILTAFEYLHYHGIIYRDLKTENVLLHHDGHIRLTDFDLAKRLTLGATVDHYKPVQLSVGKKTTTIFPTGFQETTASLVGTPECLPPEVLQGEHSQAADWWTLGIFIYECLYGVTPFMSKGASLDTISKKILRGVFTFPDGPYKVSKKCKDLIKRLLDINPKTRLGSKMGASELKNHPFFKNINFAIINDPPTIPNINLSKDLGSEEWDIELLKRNFEVFPREHQQIAQDFAGTGAILPKECDQFIKGVLSAYQRAKLPTHPKQVIFDANGDIVNLQSHHETLVTGLGDRRCGTGSSVTVSGVSDLSKLVGVKTGSFHEGSIAKLTSLFCPANQQAKKAKSNPNSIDNDEAVAEIKAPSEPAKSISAPYLEIPVLDGQSSGTAGVSAQLSLDELRKVALSLPTQNIVDECDWS

SEQ ID NO: 10659 - protein, 449 aa, Caulobacter crescentus CB15
MGAGRRPRSRTSTMAPCSTVSISPSNPILEGTRSGKSESAFVPRGGSLISAAAVSLPRHNLCWELDRIRYVERPRGGGSLALEDYSESRRAGERLAAGHGVDDPFAAAISATRMAMIVADATQPDIPIIFANDAFLRLTGYARDEVIGRNCRFLQGPDTDPKAIQAVRDALAAGEDVAVDLLNYRKDGSPFWNALNMSPVRNDAGQLVYFFGSQVDVTDKKVVELRARDHSDGLQQMVEERTRELTEALKQKTALLHEVDHRVKNNLQLISSLLLLQNRRVPDPAVKASLRGMLGRVNAIATVHRRLFQSEDVERFDVSAFIRDMVADLMGSAMRDDIRVELDLERVEIPAAKAAPLALVVNELLTNALRHGFPEGRGGRIFVGLSRLNGDFRIEITDDGVGQDRETRASGFGLTIVQLLCQQLKAKWETTDAEPGTRVVVLLPINGTQ

SEQ ID NO: 10660 - protein, 553 aa, Saccharomyces castellii
MFPRSDKDVDQLVGNLNQLGLNKPNARFVSVTPTRANKENRSSLSPSPSPNKTKRFTADETELKNSPKKLPHDFYKKALSNDTKRIVNVCQMYFLDYYCDMFDYVISRRQRTKSVLNYLERNQNSLSTEELNNEWTAYLQQEHDVLRKRRLKPKNKDFEMITQVGQGGYGQVYLARKRDTKEVCALKILNKKLLFKLNETNHVLTERDILTTTRSDWLVKLLYAFQDTESLYLAMEFVPGGDFRTLLINTRFLRNTHARFYISEMFCAVNALHELGYTHRDLKPENFLIDSEGHIKLTDFGLAAGTISTERIQSMKIRLEEVKNLEFPAFTEKSIEDRRKMYTHLRQTEVNYANSMVGSPDYMALEVLEGKKYDFTVDYWSLGCMLFESLVGYTPFSGSSTNETYENLRHWKKTLRRPVLDNGRPAFSDRTWDIITRLIADPINRLRSFEHIKRMPYFAEVNFNTLRQSAPPFTPQLDSETDAGYFDDFTNEADMAKYADVFKRQNKLSSMVDDSAVDSKLVGFTFRHRNGQKGLSGILYNGSEHSDPFATFY

SEQ ID NO: 10661 - protein, 573 aa, Saccharomyces castellii
MSERKMENLTGTMHQLNFNLPNQPNRGSTSQFASLDNFSTPTKYKNDKLNGSPIPPGARRYEIDDSDSKMDIDGSSYNDIDITNSPKKLPQGFQTMASNNKTQRLVSVCKMYFLDYYCDMFDYVISRRQRTKKVLEYLEQKKNENVDLNSLNNEWNGYIQREHQVLRKRRLKPKHKDFEMITQVGQGGYGQVYLPGKKDTNEVCALKILNKKLLFKLNETNHVLTERDILTTTRSQWLVKLLYAFQDTQNLYLAMEFVPGGDFRTLLINTRFLKSTHARFYISEMFLAVNALHDLGYTHRDLKPENFLIDAKGHIKLTDFGLAAGTISNDRIQSMKVRLEEVKNLEFPEFSDKSIEDRRQMYQKYRETEVNYANSMVGSPDYMALEVLEGKKYDFTVDYWSLSCMLFESLVGYTPFSGSSTNETYENLRHWKKTLRRPMLDNGRPAFSDRTWDFITRLIADPINRLRSFEHVKRMTYFESVDFNTLRDLSPPFIPQLDNETDAGYFDDFTNEADMAKYADVFKRQNKLSTMVNDADIDSKLVGFTFRHRYGKNGSSGVLYNGLEQSDPFSTFY

SEQ ID NO: 10662 - protein, 579 aa, Saccharomyces servazzii
MFSRTDKNVDTLAGDISQLSFDSPSSKLAYNANNNMTPLRQRDNNRFGVGAGMNMGTPTPSPTKSTVYDQENDSSAMMVDDEDNDDITNSPKKLPMDFYKKSSSNKTQRLVSVCKMYFLDYYCDMFDYVISRRQRTKKVMEYIEQQKVLNNVPVERLNTEWFGYLQQEHDVLRKRRLKPKHKDFEMITQVGQGGYGQVYLARKKDTKEVCALKILNKKLLFKLNETNHVLTERDILTTTRSEWLVKLLYAFQDPESLFLAMEFVPGGDFRTLLINTKYLKSAHARFYISEMFCAVNALHELGYTHRDLKPENFLIDAKGHIKLTDFGLAAGTVSNERIESMKIRLEEVKNLEFPGFKEKSIEDRRKIYHHMRETDVNYANSMVGSPDYMALEVLEGKKYDFTVDYWSLGCMLFESLVSYTPFSGSSSNETYENLRHWKQTLRRPRLDNGRPAFSDRTWDLITRLIADPISRLRSFEHVKRMPYFSDIDFDNLRNMSPPFIPQLDSETDAGYFDDFTNEADMAKYADVFKRQNKLSAMVDNSAVSSKLVGFTFRHRSGKQGSSGILYNGSEHSDPFATFY

SEQ ID NO: 10663 - protein, 520 aa, Kluyveromyces lactis
MFTRDANGRHKEVDALVDDMVNFSFDTDAKVMLDPPSTPTRIRGSPSPTRSIVKNPENSLMDIDDDTQGDLTADITKSPKKLPKDFYKKSSKTKSKRLVSVCQMYFLDYYCDMFDYVISRRERTRQVINYLEEQRRSNLMGTEQITNEWQGYLTKETNILRKRRLKPKHKDFEMITQVGQGGYGQVYLARKKDTKEICALKILNKKLLMKLEGTDHVLTERDILTTTRSEWLVKLLYAFQDPQSLYLAMEFVPGGDFRTLLLNTKFLQAPHARFYISEMFCAVNALHQLGYTHRDLKPENFLIDSKGHIKLTDFGLASGTVSMERIESMKIRLQEVKNLEFPEFRERSMDDRRRMYNKLREEEVRYAHSTVGSPDYMALEVLEAKNYDFTVDYWSLGCILFESLVGYTPFSGNSTNETYENLRNWKHVLQRPKCDNGRYAFSDRTWELITRLIADPINRLKSFEHVKRMRYFSEIDFNTLRTIHPPFIPQLDNEEDVGYFDDFTNEEHMARYVDVFKRQD

SEQ ID NO: 10664 - protein, 332 aa, Gonyaulax polyedra
MAGPQLDDFTLVKVLGKGSYGKVMLVRGAQDNRLYAMKMLRKENVIKRNQVEHTKTERSVLETVSHPFIVTLHYAFQTPKKLYMVMEYCPGGELFFHLSRAGRFSEGRTRFYVAETSSAVAYLHQLNVIYRDLKPENLLIDGEGHAKITDFGLRKEGIQDNHSAMTMCGTPEYLAPEILDKKGHGKAVDWYSVGALTYEMLTGLPPFYTKDLQKLFDRIRRGELTYPDYVSVLAKEFLRALLQRNPDARLAGGVPGGDEVKGHEFFGGLDWVALEKRAIPPPFKPTFGGQKEDDVVKYFEKDFVGQPVVNSEVGEGGRDLGHLEASTLTGKR

SEQ ID NO: 10665 - protein, 360 aa, Ancylostoma caninum
MLKFLKNKTSDEGPSSKESKSSSGFKEFLEKAREDFKQRWENPAQNTATLDDFDRIKTLGTGSFGRVMLVKHKQTGNYFAMKILDKQKVVKLKQVEHTLNEKRILQAIDFPFLVNMQYSFKDNSNLYMVLEFISGGEMFSHLRRIGRFSEPHSRFYAAQIVLAFEYLHSLDLIYRDLKPENLLIDSTGYLKITDFGFAKRVKGRTWTLCGTPEYLAPEIILSKGYNKAVDWSALGVLIYEMAAGYAPFFADQPIQIYEKIVSGKVKFPSHFSNELKDLLKNLLQVDLTKRFGNLKNGVADIKNHKWFGSTDWIAIYQRKVEAPFLPKCRGPGDASNFDDYEEEPLRISGTEKCSKEFAEF

SEQ ID NO: 10666 - protein, 336 aa, Euglena gracilis
MAQTIPDQTALPDTTNWQLSDLTLKETLGTGTFGRVRLCLHKSSGNYYAIKCLKKSEVLRMKQVEHILAEASILGSIRHPFIVNMLKTFQDDKRLYIVLEYVVGGELFSHLRKAGKFPNDVAKFYAAEVILAFEYIHSMDILYRDLKPENLLLDVGGHIKITDFGFAKKVPERTFTLCGTPEYLAPEIIQSKGHGKAVDWWALGILTYEMLVGYPPFFDESPFRIYEKILEGKVQFPKWVDGRAKDLIKGLLTTDHTKRLGTLKRGVTDIKKHKWFYGVDWDMLLARKIPAPIPVKVTTPGDSRYFDRYPESKEDKSQPLTPAQQELFKGFGPYST

SEQ ID NO: 10667 - protein, 749 aa, Chlamydomonas reinhardtii
MAGVPAPASQLTKVLAGLRHTFVVADATLPDCPLVYASEGFYAMTGYGPDEVLGHNCRFLQGEGTDPKEVQKIRDAIKKGEACSVRLLNYRKDGTPFWNLLTVTPIKTPDGRVSKFVGVQVDVTSKTEGKALADNSGVPLLVKYDHRLRDNVARTIVDDVTIAVEKAEGVEPGQASAVAAAAPLGAKGPRGTAPKSFPRVALDLATTVERIQQNFCISDPTLPDCPIVFASDAFLELTGYSREEVLGRNCRFLQGAGTDRGTVDQIRAAIKEGSELTVRILNYTKAGKAFWNMFTLAPMRDQDGHARFFVGVQVDVTAQSTSPDKAPVWNKTPEEEVAKAKMGAEAASLISSALQGMAAPTTANPWAAISGVIMRRKPHKADDKAYQALLQLQERDGKMKLMHFRRVKQLGAGDVGLVDLVQLQGSELKFAMKTLDKFEMQERNKVARVLTESAILAAVDHPFLATLYCTIQTDTHLHFVMEYCDGGELYGLLNSQPKKRLKEEHVRFYASEVLTALQYLHLLGYVYRDLKPENILLHHTGHVLLTDFDLSYSKGSTTPRIEKIGGAGAAGGSAPKSPKKSSSKSGGSSSGSALQLENYLLLAEPSARANSFVGTEEYLAPEVINAAGHGPAVDWWSLGILIFELLYGTTPFRGARRDETFENIIKSPLKFPSKPAVSEECRDLIEKLLVKDVGARLGSRTGANEIKSHPWFKGINWALLRHQQPPYVPRRASKAAGGSSTGGAAFDNY

SEQ ID NO: 10668 - protein, 750 aa, Chlamydomonas reinhardtii
MAGVPAPASQLTKVLAGLRHTFVVADATLPDCPLVYASEGFYAMTGYGPDEVLGHNCRFLQGEGTDPKEVQKIRDAIKKGEACSVRLLNYRKDGTPFWNLLTVTPIKTPDGRVSKFVGVQVDVTSKTEGKALADNSGVPLLVKYDHRLRDNVARTIVDDVTIAVEKAEGVEPGQASAVAAAAPLGAKGPRGTAPKSFPRVALDLATTVERIQQNFCISDPTLPDCPIVFASDAFLELTGYSREEVLGRNCRFLQGAGTDRGTVDQIRAAIKEGSELTVRILNYTKAGKAFWNMFTLAPMRDQDGHARFFVGVQVDVTAQSTSPDKAPVWNKTPEEEVAKAKMGAEAASLISSALQGMAAPTTANPWAAISGVIMRRKPHKADDKAYQALLQLQERDGKMKLMHFRRVKQLGAGDVGLVDLVQLQGSELKFAMKTLDKFEMQERNKVARVLTESAILAAVDHPFLATLYCTIQTDTHLHFVMEYCEGGELYGLLNSQPKKRLKEEHVRFYASEVLTALQYLHLLGYVYRDLKPENILLHHTGHVLLTDFDLSYSKGSTTPRIEKIGGAGAAGGSAPKSPKKSSSKSGGSSSGSALQLENYLLLAEPSARANSFVGTEEYLAPEVINAAGHGPAAVDWWSLGILIFELLYGTTPFRGARRDETFENIIKSPLKFPSKPAVSEECRDLIEKLLVKDVGARLGSRTGANEIKSHPWFKGINWALLRHQQPPYVPRRASKAAGGSSTGGAAFDNY

SEQ ID NO: 10669 - protein, 657 aa, Hypolepis punctata
TPLEFQIQELAEWLLGSSEEIASTGVTCTDSLAEAGYPGAAALGDAVCGLAAARITPNSDFLFWFRSHTAKEVFWGGAEHDPEARDDDSRMLPRSSFKAFLEIVKKRSLPWEEVEVDAIRSLQLILREELEKFCAAAAAAATASASDRDDVDSLVPSSKKLSLKENEEMGTGGGWGKMSLPPSLVQEWMEAIRGGAGDGRASGGGGGDFNWDPTCMFQQTSFVVVDALKPDLPIIFASTGFFNLTGYTSTEVIGANCRLLQGPDTNPEDVASIREALAQDTGTFCRKLLNYRKDGSSFWNLLTIAPIKDDRGSIVKLIGVQLEVSKYTEGSRANRLRPNGLPQSLIKYDVRHRDKVSVFVAELVAALTKPDKVELTKPSSTMQFSLTGQTIKPLSKTAAMPREGGGRRRHGSNTFLSLLGVEKKDPVEDQFPEPRLIMVDDNSVGRPESLDDPERTRRGIDLATTLERIGQSFVITDPRLPNNPIIFASDQFLELTEYSREEVLGNNCSFLQGRDTDANTVQLIRDAVAEQRDVTVQLLNYTRGGRPFWNLFHLHAMRDEKGELQYFIGVQQETVAPRVPEDMPDRVKQVHTTAQNVDVAARELPDANLSPDHLWVRHSKVITPLPHSKMNNSSWYAIRRVQRRVRLGLKHFRPIKP

SEQ ID NO: 10670 - protein, 692 aa, Onoclea sensibilis
TPSEFQIQDLVEWLLGSSEDIASSGVTCTDSLAEVGYPGAAALGDAVCGMAAARITPNSDFLFWFRSHTAKEVFWGGAEHDPQARDDDSRLLPRSSFKAFLEIVKRRSLPWEEVEVDAIRSLQLILREDLEEFCAAAAAGADGEDVDSLVPSSKKLSLKEREGSGAENSKKLERATSAAVGAAGGTGGRWEKMLLPSSLAQEWMEAIRGTGDGGASGGGGGVPFDWDAISVFQQTSFVVVDALKLDLPIIYASTGFFNLTGYTSREVIGGNCRFLQGPETNPAVIDSIREALVPQGTGTFCGRLLNYRKDGSSFWNLLTIAPIKDDSGTIVNLIGVQLEVSKYTEGSRENRLRPNGLPQSLIKYDVRHQDKVSALIAQLVAALTKPHKVEPPRPSYTMRFSLTGQTIEPLSPGQAAAAARPCSTSDVPQTTSIPREGRGRRRHRSSTFLSLLGMEEKDSEEDQFPEPELIMVADASVGRLRSSDDPERTRRGIDLATTLERIGHSFVITDPRLPGNPIIFASDQFLELTEYSREEVLGENCRFLQGRDTDRKAVQLIRDAVEEGRDVTVQLLNYTKGGRPFWNLFHLQAMRDKKGNLQYFIGVQQETDTPDRVEHEKAKVVRATAQNVDVAARELPDANLTLDHLWERHSKEVTPLPHSKINSPCWYAIRRVQRRLRRGERLGLKHFRPIKP

SEQ ID NO: 10671 - protein, 686 aa, Dryopteris filix-mas
TPSEFQVQDLAEWLLGSSEEIASSGVTCTDSLAEAGYPGATALGDAVCGMAAARITPNSDFLFWFRSHTAKEVFWGGAEHDPQARDDDSRLLPRSSFKAFLEIVKRRSLPWEEVEVDAIRSLQLILREDLEEFCAAAAGADVEDVDSLVPLSIKLSLKESEEMGGAEDSKKLERATSAAAGGTGGGGWEKMSLPSSLAQEWMEAIRGTGDGGASGGVPFDWDAISVFQQTSFVVVDALKPDLPIIFASTGFFNLTGYTSREVIGGNCRFLQGPDTNPEDVASIRDAVVPRGTGTFCGRLLNYRKDGSNFWNLLTIAPIKDDTGTIVKLVGVQLEVSKYTEGSRANRLRPNGLPQSLIKYDVRHQDKVSALVAQIVAALTKPYKVEPPRPSYAMRASLTGQTIQPLSPGRAAAARPYSASDVPQTAAIPREGGGRRRHRSSTFLSLLGMEEKDSEEDQFPEPELIMMDNASVGRPGSLDDRERTRRGIDLATTLERIGHSFVITDPRLPDNPIIFASDQFLELTEYSREEVLGENCRFLQGRDTDLKAVQLIRDAVKEGRDITVQLLNYTRGGRPFWNLFHLQAMRDKKGNLQYFIGVQQETDTLDRVEQEKAEVVRATAQNVDVAARELPDANLTPDHLWERHSKVVTPLPHSKINSPCWYAIRKVQRRLRRGERLGLKHFRPIKP

SEQ ID NO: 10672 - protein, 471 aa, Blumeria graminis
MPTFGFLKKRKKVSLGHRDLDSPASTLSQPASPITPSTSRGLGEPIDTTSSKITSPGQKLGSNITKDHRGTRTTVEDLPSMTDVSHLQQAYRNLSQGSTASKSNLLTIHNLINPPQHDGAGQSKVMPEKHMNNKTERPVQGKAAVAQVRQTKGKYSLSDFEILRTLGTGSFGRVHLVQSKHNQRFYAVKVLKKQQVVKMKQVEHTNDERSMLQEVKHPFLITLWGTFQDSKNLYMVMDFVEGGELFSLLRKSQRFPNPVAKFYAAEVTLALEYLHKKDIIYRDLKPENLLLDRHGHLKITDFGFAKKVTDITWTLCGTPDYLAPEVVSSKGYNKSVDWWSLGILIFEMLCGYTPFWDNGSPMKIYENILKGRVKYPPYIHPDAQDLIQRLITADLTKRLGNLHGGAEGIKSHQWFAEVTWERLAKKDIDAPYVPPVKAGSGDASQFDKYPEETERYGQTGPDEHGSLFENF

SEQ ID NO: 10673 - protein, 367 aa, Blumeria graminis
MGNSHVKPCFSDEVNLSHFRLLRVVGRGAFGKVRIVERRDTGLTFALKYIRKGDVIRTESVRNILRERRMLEQLNYQFICNLRYSFQDIEYMYLVVDLMNGGDLRFHISRKVFTEEAVRFWISELGLAIRYIHSQGIIHRDIKPDNVLLDAEGHVHLADFNVASDFTPGKLLTSKSGTLAYLAPEVYKGKGYSSSVDWWSLGVLFYECIYNKRPFEKISSSDLQEQILKADPKFPVTDPPVSIVCMHAISSALEQDPNKRMGCTKDEGFSSFTDNPFFRAIDFYALERKEIEPVFVPSSGKTNFDATYDLEEMLLEEAPLEARARRQKPREQLREDATEKQIREEEMYQMIEEHFTPFDYTTIAYER

SEQ ID NO: 10674 - protein, 572 aa, Mesembryanthemum crystallinum
SFDGNGNTDDEDDFYDDDDDDGRPDSVDDKVRKKEMRKGIDLATTLERIEKNFVITDPRLPDNPIIFASDSFLELTEFSRAEILARNRRFLQGPETDPATVAKIRDAIDNETDVTVQLINYTKTGKKFWNVFHLQPMRDQKGEVQYFIGVQLDGSEHVEPVQNSIPVASVMDSEKQVKETATNVDVAVRELPDANKKPEDLWANHSKVVQPKPHRKECSSWKAIEKIKESGEQIGLKHFRPVKPLGAGDTGSVHLVELCGTGEYFAMKAMDKNVMLNRNKVHRACAEREILDMLDHPFLPALYASFQTNTHICLITEYCPGGELFLLLDRQPTKVLKEDAVRFYAAEVIIALEYLHCQGIIYRDLKPENILLQSNGHVSLTDFDLSCLTSCKPQLLIPEIRDKKKQQKAQHQQTPIFMAEPMRASNSFVGTEEYIAPEIIAGAGIQGAVDWWALGILLYEMLYGFTPFRGKTRQKTFSNVLRKDLKFPATKQVSLDASQLIYQLLQKDPKDRLGACEGANEIKRHPFFRGANWALVRCMKPPVLDAPPLLGDPEKEANIVDPDMLDLQTNVF

SEQ ID NO: 10675 - protein, 724 aa, Spinacia oleracea
LTVTPIRDDKGCVIKFIGMQVEVSKFTEGINDKALRPNGLPKSLIRYDPRQKEAALGSIIEVVQTVKHPRSLSQPLSNNDADRREVAGKFNLDYMLPKLAEIDNVGTPGRLSSPSRLSTPGRQTPKIDASSRDSDKSSRKSARISLLGFKGRSSAKHERPPSPEPEFLIPKDIDRDDSWERAERERDVRQGIDLATTLERIEKNFVISDPRLPDNPIIFASDSFLELTEYTREEILGRNCRFLQGPETDQTTVQKIRDAIKEQRDITVQLINYTKSGRKFWNLFHLQPMRDQKGELQYFIGVQLDGSDHVEPLRNRLSERTEIQSAKVVKATAENVDEAVRELPDANSRPEDLWAIHSEPVYPRPHKRGSSSWAAIQKITAAGEKVGLEHFNPIKPLGCGDTGSVHLVELKVPENWFAMKAMDKSVMLNRNKVHRACVEREIISTLDHPFLPTLYASFQTSTHVCLITDFCPGGELFALLDKQPLKIFKEESARFYAAEVVIGLEYLHCLGIIYRDLKPENILLQKDGHLVLTDFDLSFLTSCNPHIINHPQPKKRRSRSQPPPTFIAEPVTQSNSFVGTEEYIAPEVITGASHTSAIDWWALGVLLYEMLYGRTPFRGKNRQKTFANIMHKDLTFPSSIPVSLSARQLIYALLNRDPATRLGTQGGASEIKEHPYFRGINWPLIRCMDPPTLEAPFKLIGRDPNAKEVKWDDDGVLASPMDFF

SEQ ID NO: 10676 - protein, 471 aa, Cucumis sativus
MEDDYSIFPPDSDLDFSFTSTTTDRTFTTSSSARTSLARSSLTLSFNESRLSAAAAALNLRPYHRSDSHWSAIRAATTLSSDGHLHLRHLKLIRHLGTGNLGRVFLCHLRDNDHASFALKVVDKEALSNKKLLQVQTEAEILASLDHPFLPTLYARLDVSHYTCLLIDYCPAGDLHSLLRKQPGSRFSVAAARFFAAEVLVALEYLHALGIVYRDLKPENVLLREDGHVMLSDFDLCFKSDVVPTFHTWTRPGPQATGSCFGWRTSPEFEEEIVGEFVAEPTSAFSKSCVGTHEYLAPELVTGGGHGNGVDWWAFGVFVYELLHGTTPFKGVNKEGTLRNIASSEGVKFRGGGEEEGGMGEARDLIERLLVKDPGRRLGWEKGATEIKRHPFFEGIKWPLIRTYRVPEVYGMMRKGRAQVSHVREVTERIRRRGWWNWRKVMRKRLIKNGSCSKSHSNTNYYSYSSKKKTG

SEQ ID NO: 10677 - protein, 996 aa, Arabidopsis thaliana
MEPTEKPSTKPSSRTLPRDTRGSLEVFNPSTQLTRPDNPVFRPEPPAWQNLSDPRGTSPQPRPQQEPAPSNPVRSDQEIAVTTSWMALKDPSPETISKKTITAEKPQKSAVAAEQRAAEWGLVLKTDTKTGKPQGVGVRNSGGTENDPNGKKTTSQRNSQNSCRSSGEMSDGDVPGGRSGIPRVSEDLKDALSTFQQTFVVSDATKPDYPIMYASAGFFNMTGYTSKEVVGRNCRFLQGSGTDADELAKIRETLAAGNNYCGRILNYKKDGTSFWNLLTIAPIKDESGKVLKFIGMQVEVSKHTEGAKEKALRPNGLPESLIRYDARQKDMATNSVTELVEAVKRPRALSESTNLHPFMTKSESDELPKKPARRMSENVVPSGRRNSGGGRRNSMQRINEIPEKKSRKSSLSFMGIKKKSESLDESIDDGFIEYGEEDDEISDRDERPESVDDKVRQKEMRKGIDLATTLERIEKNFVITDPRLPDNPIIFASDSFLELTEYSREEILGRNCRFLQGPETDLTTVKKIRNAIDNQTEVTVQLINYTKSGKKFWNIFHLQPMRDQKGEVQYFIGVQLDGSKHVEPVRNVIEETAVKEGEDLVKKTAVNIDEAVRELPDANMTPEDLWANHSKVVHCKPHRKDSPPWIAIQKVLESGEPIGLKHFKPVKPLGSGDTGSVHLVELVGTDQLFAMKAMDKAVMLNRNKVHRARAEREILDLLDHPFLPALYASFQTKTHICLITDYYPGGELFMLLDRQPRKVLKEDAVRFYAAQVVVALEYLHCQGIIYRDLKPENVLIQGNGDISLSDFDLSCLTSCKPQLLIPSIDEKKKKKQQKSQQTPIFMAEPMRASNSFVGTEEYIAPEIISGAGHTSAVDWWALGILMYEMLYGYTPFRGKTRQKTFTNVLQKDLKFPASIPASLQVKQLIFRLLQRDPKKRLGCFEGANEVKQHSFFKGINWALIRCTNPPELETPIFSGEAENGEKVVDPELEDLQTNVF

SEQ ID NO: 10678 - protein, 441 aa, Brassica napus
MVGAKPIENGSDGGASTGLLHGRYELGRLLGHGTFAKVYHARNVTTGKSVAMKVVGKEKVVKVGMVDQIKREISVMRMVKHPNIVELHEVMASKTKIYFAMELVRGGELFAKVAKGRLREDVARVYFQQLISAVDFCHSRGVYHRDLKPENLLLDEEGNLKVTDFGLSAFTEHLKQDGLLHTTCGTPAYVAPEVILKKGYDGAKADLWSCGVILFVLLAGYLPFQDDNLVNMYRKIYRGDFKCPGWLSSDARRLVTKLLDPNPNTRITIDKVMDSHWFKKSSTRSRNEPVAATPEAEEDVDVSVHKSKEETETLNAFHIIALSEGFDLSPLFEEKKKEEKMEMRFATSRPASSVISSLEEAAKVGNKFDVRKSECRVRIEGKQNGRKGKLAVEAEIFAVAPSFVVVEVKKDHGDTLEYNNFCSTALRPALKDIFWTSTTPA

SEQ ID NO: 10679 - protein, 439 aa, Brassica rapa
MLLESDGEMSLETTNSPISSGTESCSSFSRLSFDAPPSTTAIIPEEESCLSLKPHRSSDFAYAEILRRRKHSLTFRDFRLMRRIGAGDIGTVYLCRLAGDQEESRSSYFAMKVVDNEALAMKKKMHRAEMEKKILKMLDHPFLPSLYAEFEASHFSCIVMEYCSGGDLHSLRHRQPQHRFSLSSARFYAAEVLVALEYLHMLGIIYRDLKPENILVRSDGHIMLSDFDLSLCSDSIAAVESSSSTPENYPHSSPRRLTRLAKLFNRVLRSKKVQTLEPNRLFVAEPVTARSGSFVGTHEYVAPEVASGGSHGNAVDWWAFGVFLYEIIYGRTPFAAPTNDVILRNIVKRPLSFPTDSPATMFELHARSLISGLLNKDPSTRLGSRRGAAEVKVHPFFKGLNFALIRTMTPPEVPSDVRRPKKSATFGGRSSKPAAFDFF

SEQ ID NO: 10680 - protein, 905 aa, Glycine max
  unsure (1)..(905): unsure at all Xaa locations
ETHYRRSYNRRQLLEESSKREAVFWSKFCNXEATIAERTAEWGLVVIEEFQSIRGREYKCSFDGDRSRNLSDRFSNYGSESSSGVFPRVSQELKEALATLQQTFVVSDATKPDCPIMYASSGFFTMTGYSSKEIIGRNCRFLQGPETDKNEVAKIRDATRNGRSYCGRLLNYKKDGTPFWNLLTVTPIKDDHGNTIKFIGMQVEVSKYTEGMNEKALRPNGLPKSLIRYDARQKEKALGSITEVVQTVKDPKSIINDXXNGDTATMPEEQEKFNFDFVLPKSADIGNTNTPGRQASPLYIQRMSSSHSAEEKSIVEPEVLMTKEIEWSNNLEHSLRERDIRQGIDLATTLERIEKNFVISDPRLPDNPGSSASDSFLELTEYTREEILGRNCRFLQGPETDQATVSRIRDAIREQREITVQLINYTKSGKKFWNLFHLQPMRDQKGELQYFIGVQLDGSDHVEPLKNRLSETTEQQSAKLVKATAENVDEAVRELPDANLVXRPEDLWAIHSQPVFPRPHKKENPSWIAIQKVAARGEKIGLQHFVPIRPLGCGDTGSVHLVELKGTGELYAMKAMEKSVMLNRNKVHRSCIEREIISLLDHPFLPTLYTSFQTPTHVCLITDFFPGGELFALLDKQPMKIFKEESARFYAAEVVIGLEYLHCLGIIYRDLKPENILLQKDGHVVLADFDLSYMTSCKPQVVKQAIPGKRRSRSEPPPTFVAEPVTQSNSFVGTEEYIAPEIITGAGHTSGIDWWTLGILLYEMLYGRTPFRGKNRQKTFSNILHKDLTFPSSIPASLAARQLINALLQRDPTSRIGSTTGANEIKQHPFFRGINWPLIRNMTPPPLDVPLKLIGNDPVAKDIKWEDDGVLVSSIDMDIFXRFALFTQDLWSASYLISCCNDHGV

SEQ ID NO: 10681 - protein, 609 aa, Phaseolus vulgaris
MESSVNGVDSLSEVQNSVSGVHHHDPLPSGTPQPSRPPLRASRNYDGGHQTKAIHHHNSHVINQKHSHQEGKTLKQEGLPTKLSSKQPPLDDSKGCEPNGVLESEKKRVVDNHGKNYSQPDATFCASPQNSFYSATVYSEAKESFTNTEVSECASVDKSCESEVANSSDFNESRKTSICRASTGSDASDESSTSSLSSVLYKPHKANDIRWEAIQAVRTRDGMLEMRHFRLLKKLGCGDIGSVYLAELSGTRTSFAMKVMNKTELANRKKLLRAQTEREILQSLDHPFLPTLYTHFETEIFSCLVMEFCPGGDLHALRQRQPGKYFSEHAVRFYVAEVLLSLEYLHMLGIIYRDLKPENVLVREDGHIMLSDFDLSLRCSVSPTLVKSSNNLQTKSSGYCVQPSCIEPTCVMQPDCIKPSCFTPRFLSGKSKKDKKSKPKNDMHNQVTPLPELIAEPTNARSMSFVGTHEYLAPEIIKGEGHGSAVDWWTFGIFLYELLFGRTPFKGSANRATLFNVIGQPLRFPESPTVSFAARDLIRGLLVKEPQHRLAYRRGATEIKQHPFFQNVNWALIRCATPPEVPRQVINLPQTEKDLGVKPSGNYLDIDFF

SEQ ID NO: 10682 - protein, 976 aa, Pisum sativum
MEHLKKSPSSSSSSSMRPSFPRDPRGSLEVFNPTSNSSSPVRSPSNLKNWTEIEEPRNELSEQHNEFSDEVTNTSWMAIKEGETGAAVQRAAEWGLMLTTDAETGKPQGVAVRNSGGDEPSVKLETKRNSNNTVRTSGESSDGDDPRGFPRVSEDLKDALSAFQQTFVVSDATKPDYPILYASAGFFKMTGYTSKEVIGRNCRFLQGADTDPDDVARIREALEGGKSFCGRLLNYKKDGTPFWNLLTISPIKDDDGNVLKLIGMLVEVNKHTEGSKEKKLRPNGLPESLIRYDARQKEKATSSVSELLEAMKRPRALSESGQRPFIRKSGGGGGSEEDEEAVENKSRRKSDSVASFRPKPQGKIRHSMERISELPENKQKNSRRGSFMGFMRKSDSIDESIDNEVIVDVSSGSEDDERDDSFEFDDKEKLREKRKGLDLATTLERIEKNFVITDPRLPDNPIIFASDSFLELTEYSREEILGKNCRFLQGPETDPATVRKIREAIDNQTEVTVQLINYTKSGKKFWNLFHLQPMRDHKGEVQYFIGVQLDGSQHVEPLHNCIAEDTAKEGELLVKETAENVGEAVKELPDANQKPDDLWMNHSKVVRPKPHRKDDDAWRAIQKVLENGEQVGLKHFRPIKPLGSGDTGSVHLVELEGTGQYFAMKAMDKGVMLNRNKVHRACTEREILDMLDHPFLPALYASFQTKTHVCLITDYYSGGELFLLLDQQPTKVLKEDSVRFYAAEVVIALEYLHCLGIIYRDLKPENVLIQSNGHVSLTDFDLSCLTSCKPQLILPAIEEKKKRKKKKNKGQQKNQQVPMFMAEPMRASNSFVGTEEYIAPEIITGSGHTSAVDWWALGILLYEMLYGYTPFRGKTRQKTFANILHKDLKFPKSKPVSPHGKQLIYWLLHRDPKNRLGSLEGANEIKNHPFFKNINWALVRCTKPPELDGPILLDNDEKKEAKEIDPGLDDLQKNIF

SEQ ID NO: 10683 - protein, 976 aa, Pisum sativum
MEHLKKSPSSSSSSSMRPSFPRDPRGSLEVFNPTSNSSSPVRSPSNLKNWTEIEEPRNELSEQHNEFSDEVTNTSWMAIKEGETGAAVQRAAEWGLMLTTDAETGKPQGVAVRNSGGDEPSVKLETKRNSNNTVRTSGESSDGDDPRGFPRVSEDLKDALSAFQQTFVVSDATKPDYPILYASAGFFKMTGYTSKEVIGRNCRFLQGADTDPDDVARIREALEGGKSFCGRLLNYKKDGTPFWNLLTISPIKDDDGNVLKLIGMLVEVNKHTEGSKEKKLRPNGLPESLIRYDARQKEKATSSVSELLEAMKRPRALSESGQRPFIRKSGGGGGSEEDEEAVENKSRRKSDSVASFRPKPQGKIRHSMERISELPENKQKNSRRGSFMGFMRKSDSIDESIDNEVIVDVSSGSEDDERDDSFEFDDKEKLREKRKGLDLATTLERIEKNFVITDPRLPDNPIIFASDSFLELTEYSREEILGKNCRFLQGPETDPATVRKIREAIDNQTEVTVQLINYTKSGKKFWNLFHLQPMRDHKGEVQYFIGVQLDGSQHVEPLHNCIAEDTAKEGELLVKETAENVGEAVKELPDANQKPDDLWMNHSKVVRPKPHRKDDDAWRAIQKVLENGEQVGLKHFRPIKPLGSGDTGSVHLVELEGTGQYFAMKAMDKGVMLNRNKVHRACTEREILDMLDHPFLPALYASFQTKTHVCLITDYYPGGELFLLLDQQPTKVLKEDSVRFYAAEVVIALEYLHCLGIIYRDLKPENVLIQSNGHVSLTDFDLSCLTSCKPQLILPAIEEKKKRKKKKNKGQQKNQQVPMFMAEPMRASNSFVGTEEYIAPEIITGSGHTSAVDWWALGILLYEMLYGYTPFRGKTRQKTFANILHKDLKFPKSKPVSPHGKQLIYWLLHRDPKNRLGSLEGANEIKNHPFFKNINWALVRCTKPPELDGPILLDNDEKKEAKEIDPGLDDLQKNIF

SEQ ID NO: 10684 - protein, 428 aa, Pisum sativum
MRDQKGEVQYFIGVQLDGSQHVEPLHNRIAEDTAKEGENLVKKTAENVDDALRELPDANMKPEDLWMNHSKMVHPKPHRREDAAWRAIQKIMESGEQIGLKHFKPIKPLGSGDTGSVHLVELCGTDHQFAMKAMDKGVILNRNKEHRACTEREILDMLDHPFLPALYASFQTKTHICLITDYCPGGELFMLLDRQPAKVLKEDAVRFYATEVVVALEYLHCQGIIYRDLKPENVLLQSTGHVSLTDFDLSCLTSCKPQLLVPSTNDKKKGQHGPIFMAEPMRASNSFVGTEEYIAPEIITGSGHTSAVDWWALGILLYEMFYGYTPFRGKNRQRTFANILHKDLKFPKSKQVSLGAKQLIYYLLQRDPTSRLGSKGGANDIKNHSFFKGINWALVRCTKPPELDAPLFDTNKEEKEKEDKYVDNGQRI

SEQ ID NO: 10685 - protein, 443 aa, Pisum sativum
MRDHKGEVQYFIGVQLDGSQHVEPLHNCIAEDTRKEGELLVKETAENVGEAVKELPDANQKPDDLWMNHSKVVRPKPHRKDDDAWRAIQKVLENGEQVGLKHFRPIKPLGSGDTGSVHLVELEGTGQYFAMKAMDKGVMRNRNKVHRACTEREILDMLDHPFLPALYASFQTKTHVCLITDYYPGGELFLLLDQQPTKVLKEDSVRFYAAEVVIALEYLHCLGIIYRDLKPENVLIQSNGHVSLTDFDLSCLTSSKPQLILPAIEEKKKRKKKKNKGQQKNQQVPMFMAEPMRASNSFVGTEEYIAPEIITGSGHTSAVDWWALGILLYEMLYGYTPFRGKTRQKTFANILHKDLKFPKSKPVSPHGKQLIYWLLHRDPKNRLGSLEGANEIKNHPFFKNINWALVRCTKPPELDGPILLDNDEKKEAKEIDPGLDDLQKNIF

SEQ ID NO: 10686 - protein, 963 aa, Vicia faba
MEPFTRDHRGSLEVFNPSSSETNGTPNPNPNPNPSNSWNTGTSSRGTEAPPLRDSIISDEVPTATSWMALKETTPSPKSGESGSVAEQRAAEWGLVLKTDSETGKPQGVGVRGSGGGGGSRRDSNNSVRSSGESSDDGREGGRGIPRVSEDLRDALSAFQQTFVVSDATKPDYPIMYASAGFFSMTGYTSKEVIGRNCRFMQGADTDPNDVAKIREALAAGTSYCGRLLNYKKDGTTFWNLLTIAPIKDEHGKILKLIGMQVEVSKHTEGTKEKMLRPNGLPESLIRYDARQKEKANSSVTELVEAVSKRPRSLSESANRLPFNKKPTNGSNDHATPPNSESSSRKSGSTLRSFRRKSHSGAGNSNSMHPITELPENNNKSRRRSFMGFMRKSLSNNERFNHEQVIDRNSSEDEDRLDSFDEQNIAQKREKRKGFDLATTLERIEKNFVITDPRLPDNPIIFASDSFLELTEYSREEILGRNCRFLQGPETDPATVKKIRYAIDNQTEVTVQLINYTKTGKKFWNLFHLQPMRDQKGEVQYFIGVQLDGSQHVEPLHNGIAEDTAKEGENLVKKTAENVDDALRELPDANMKPEDLWMNHSKVVHPKPHRREDSAWRAIQKIMESGEQIGLKHFKPIKPLGSGDTGSVHLVELCGTDHHFAMKAMDKGVMPNRNKVHRACTEREILDMLDHPFLPALYASFQTKTHICLITDYCPGGELFMLLDRQPAKVLKEDAVRFYATEVVVALEYLHCQGIIYRDLKPENVLLQSTGHVSLTDFDLSCLTSCKPELIVPSTNDKKKGQHGPIFMAEPMRASNSFVGTEEYIAPEIITGSGHTCAVDWWALGILLYEMFYGYTPFRGKNRQRTFANILHKDLKLPKSKQVSLSAKQLIYHLLQRDPTSRLGSKGGANDIKHHSFFKGINWALVRCTKPPELDAPLFDTNKEEKEKDDKYVDNGQEDMSVF

SEQ ID NO: 10687 - protein, 970 aa, Vicia faba
MEKHLKKSPSSSSSSSMRPSFPRDPRGSLEVFNPTSNTSSPVRSPSNLKNWTETEEPRNEFPDKVTNTSWMAIKEGETGAAVQRAAEWGLVLTTDAETGKPQGVAVRHSGGDEPNAVELESKRNSNNTVRTSGESSDGGDPRGFPRVSDDLKDALSAFQQTFVVSDATKPDYPILYASAGFFKMTGYTSKEVIGRNCRFLQGADTDPNDVARIREALEGGKSFCGRLLNYKKDGTPFWNLLTISPIKDDDGNVLKLIGMLVEVNKHTEGSKEKKLRPNGLPESLIRYDARQKEKATSSVSELLEAMKRPRAMSESGHRPFIRKSGGGGSSEEDERLENKSRRKSDSVASFRPKPQGKIRHSMERISELPENKQKNSRRGSFMGFMRKSHSIDESIDNEVIVDVSSGSEDDERDDSFEFDDKEKLKEKRKGLDLATTLERIEKNFVITDPRLPDNPIIFASDSFLELTEYSREEILGKNCRFLQGQETDPATVRKIREAIDNQTEVTVQLINYTKSGKKFWNLFHLQPMRDHKGEVQYFIGVQLDGSQHVEPLHNCIAEESAKEGELLVKETAENVGEAVKELPDANQKPDDLWKNHSKVVRPKPHRKDDDAWRAIQNVVGNGEQVGLKHFRPIKPLGSGDTGSVHLVELEGTGHYFAMKAMDKGVMLNRNKVHRACTEREILDMLDHPFLPALYASFQTKTHVCLITDYYPGGELFLLLDQQPTKVLKEDSVRFYAAEVVIALEYLHCLGIIYRDLKPENVLIQRNGHVSLTDFDLSCLTSCKPQLILPATEEKKKRKNKKKKGQPKNQEVPMFMAEPMRASNSFVGTEEYIAPEIITGSGHTSAVDWWALGILLYEMLYGYTPFRGKTRQKTFGNILHKDLKFPKSKPVSPHGKQLIYWLLHRDPKNRLGSLEGANEIKNHPFFKNVNWALVRCMKPPELDAPILLDNDEKKEAKDIDPGLDDLQKNIF

SEQ ID NO: 10688 - protein, 921 aa, Oryza sativa (indica cultivar-group)
MASKGTGGGHGGVERKEQQQQRGYQLPRDSRGSLEVFNPSSASSFRTAAAAAKSASPFLAIPDREEDNVVAQQRAAEWGLVLQTDYHTGLPQGVSTRPSSCSARTSSEDTPQQQQSAAAIPRVSEELRAALSAFQQTFVVSDATRPNHPIMYASAGFFNMTGYTSKEVVGRNCRFLQGSGTDPHEIDKIRQALANGSNYCGRILNYKKDGTPFWNLLTIAPIKDEDGRLLKFIGMQVEVSKYTEGKKETVVRPNGLSESLIKYDARQKDHARSSVSELLLALKNPRSLSESSNNTLKRKSQESLSMSMSEVPSKRSSESGSRRNSRSGTRSSLQKINEVPDQVNRTRKSGLRAFMGFLGMGHGSVEKNMLKPRDEDPLIDSDDERPESFEDEFRRKEMRRGIDLATTLERIEKNFVITDPRLPDNPIIFASDSFLQLTEYNREEILGRNCRFLQGPETDRAIVRKIRDAIDNQAEVTVQLINYTKSGKKFWNLFHLQPMRDQKGDVQYFIGVQLDGTEHVQDDAAEEGVVLVKKTADNIDEAAKELPDANLRPEDLWANHSKVVLPNPHMKDTASWRAIQKVLESGESIGLKHFRPIKPLGSGDTGSVHLVELLNTGEYFAMKAMDKSIMLNRNKVHRATAERQILDLLDHPFLPTLYASFQTKTHICLITDYCPGGELFVLLDNQPLKVLHEDAVRFYVAEVVIALEYLHCQGIIYRDLKPENILLHRDGHISLTDFDLSCLTSCRPQVFLPEDADEKKGRKNRSYPIFFAEPMRASNSFVGTEEYIAPEIITGAGHTSAVDWWALGILLYEMLYGYTPFRGKTRQRTFANILHKDIRFPASILVSLAARQLMYRLLHRDPANRLGSYEGANEIKGHPFFRGINWPLIRATAPPKLEIPLFSKDDMEKKGLVTDNRTDIF

SEQ ID NO: 10689 - protein, 921 aa, Oryza sativa (japonica cultivar-group)
MASKGTEGGHGGVERKEQQQQRGYQLPRDSRGSLEVFNPSSASSFRTAAAAPKSASPFLAIPDREEDNVVAQQRAAEWGLVLQTDHHTGLPQGVSARPSSGSARTSSEDNPQQQQSAAAIPRVSEELRAALSVFQQTFVVSDATHPNHPIMYASAGFFNMTGYTSKEVVGRNCRFLQGSGTDPHEIDKIRQSLANGSNYCGRILNYKKDGTPFWNLLTIAPIKDEDGRLLKFIGMQVEVSKYTEGKKDTVVRPNGLSESLIKYDARQKDHARSSVSELLLALKNPRSLSESSNNTLKRKSQESLSMSMTEVPSKRSSESGSRRNSRSGTRSSLQKINEVPDQGNRTRKSGLRAFMGFLGMGHGSVEKNMLKPRDEDPLIDSDDERPESFEDEFRRKEMRRGIDLATTLERIEKNFVITDPRLPDNPIIFASDSFLQLTEYNREEILGRNCRFLQGPETDRATVRKIRDAIDNQAEVTVQLINYTKSGKKFWNLFHLQPMRDQKGDVQYFIGVQLDGTEHVQDDAAKEGVVLVKKTADNIDEAAKELPDANLRPEDLWANHSKVVLPNPHMKDTASWRAIQKVLESGESIGLKHFRPVKPLGSGDTGSVHLVELLNTGEYFAMKAMDKSIMLNRNKVHRATAERQILDLLDHPFLPTLYASFQTKTHICLITDYCPGGELFVLLDNQPLKVLHEDAVRFYAAEVVVALEYLHCQGIIYRDLKPENILLHRDGHISLTDFDLSCLTSCRPQVFLPEDADEKKGRKNGSYPIFFAEPMRASNSFVGTEEYIAPEIITGAGHTSAVDWWALGILLYEMLYGYTPFRGKTRQRTFANILHKDIRFPASISVSLAARQLMYRLLHRDPANRLGSYEGANEIKGHPFFRGINWPLIRATAPPKLEIPLFSKDDMEKKGLVTNTRTDMF

SEQ ID NO: 10690 - protein, 516 aa, Cryptococcus neoformans var. neoformans
MFQKVSDKFHRKQQSTTLPGKTQQVPNPTSPVLAKANSQAQQAYSLPQDHSPMEGIQRDSPPIQQPMATEKAPIVGSSASTSLPTLSVQDGTLPLTPGAQGMQTGTIDGHRQLQSPVSRSSSAGEDKMREKARDAQEQAAQSQANLHHATQQARVAAINAAATQAALETAAQLPATARVPVSGGGVEQGQARRKTAGRYALSDFLIERTLGTGSFGRVHLVRSRHNGRFYAVKVLNKEKVIKMKQVEHTNSEREMLVRVRHPFLVNLWGTFQDVNNLYMVMDFVAGGELFSLLRKSQRFPNSVAKFYAAEVALALDYLHSLDIIYRDLKPENLLLGADGHVKVTNFGFAKYVPDITWTLCGTPDYLAPEVVQSKGYNKSVDWYALGVLIFEMLAGYPPFFTEDGNPMKLYEKIIAGKVRYPTYFDALAKELLKNLLIGDLTKRYGNLRAGSSDIFAHGWFAEVDWDKLYRREIPAPYVPKIDGEGDASQFDRYQEADVSAYGKVGNGPYDHFFTEF

SEQ ID NO: 10691 - protein, 917 aa, Botryotinia fuckeliana
MPSLHGLWSHINVTLANLTNNRDEDGDHIDSDTPRSGVATPQPDPSDKRTPGILHSFYGQVGLGSSSSQNSAKHISRTSQNPNTSALEGHYTSPRQRFEAEGALLKATPSSLDERRIDGGVEKENSLLPPHELLGSSQISKQQYPYPTPPVSHPSSLHKVKLSDASFEDIGNNVQKTAAPTDRDCISESIPSHARRASSMTPLSNIVTPSNVHAAHFSNPSDTPSEHKLSTPPLSRLNSEFHKSPSYDRLKKLTCDGLKSIPSTPTRALSNQTSKSDQSVMSTNSEHVAQNGKSGASERPAVTPRTDSSMGGTVVPPKGKLTVKINEARGLRRSVDPYVVAVFQRNELVSKGPQSEEDDEDDGNSHSPGGIPIGGIPIGGIPITRSGSDSGRSMAIPMKSRQSSNTSLSEYRDFKNKGRKMFTHPKWDAEAVFDVVGSDTRVNITIYDRAQQAEEFLGHVDLQANLVENVDAPVSGWFQLRGKDMTSNAGNVGEVHVEISFQRTEKRHYGPDDFQILKLIGKGTFGQVYQVRKKDTKRIYAMKVLQKKVIVQKKEVAHTVGERNILVRTATADSPFIVGLKFSFQTPTDLYLVTDYMSGGELFWHLQKEGRFDEQRAKFYIAELILALEHLHKHDIVYRDLKPENILLDANGHIALCDFGLSKANLTKNATTNTFCGTTEYLAPEVLLDEAGYTKMVDFWSLGVLVFEMCCGWSPFYAEDTQQMYKNIAFGKVRFPRDTLTTEGRNFVKGLLNRNPKHRLGATDDAEELKRHPFFQDIDWHALTQKLITPPFKPKLKSETDTSNFDPEFTNALNGASSLNARAAALAAGMATSTPLSPGMQANFKGFTFVDESSIEENMKDRIKDEYEDRMDQDNNDPERDWEDTFDIPDKSRMDRMSGVVRNHNEDERMFNGDDFH

SEQ ID NO: 10692 - protein, 1170 aa, Botryotinia fuckeliana
MNSNDEEALNSVYKKIQRERALLNAANQMRQQTQNEQVRASIDIQMRDGRRNISYLEERMRELQLRTEGRTGSAGSSAGRPPSSGLRDDRAAPPPTPPPKDARGNPIETGDQAGYGDQEYSQIGGHGDMMPPRNPFAPPAPGSGMPRSRPNYTKLDLIKYDTPYLGPRIQLMLSQLEFKLNVEKQYLKGIEKMVQLYQMEGDRKSKADAAARRVESNQKIQILKQALKGYEDLHIDMESSADAPDDDSINTPNMRKPLTGQLVLRIQAVKDVDHATTSRFTRGPETLIAVKVEDNVVARTKNSRTDKWENEIHNIYVDKANEIELTVYDKAGDQALPIGLLWVRISDIVEEMRRKRIEAEINNSGWVSADRMASGGAPPAQFPMSGTSQFGPPPGSAGAGAQPAGANEFGGPGNTVVAPQPIDAWFALEPSGAVKLNISFTKQTKDRRPFDLALGRKGAIRQRKEEVHEMYGHKFISQQFYNIMRCALCGDFLTYTAGMQCEDCKYTCHTKCFSQVVTKCISKSNAETDPDEEKINHRIPHRFEKFNNMSANWCCHCGYVLPFGKKNCRKCTECFLTCHAHCVHLVPDFCGMSMAVANAILDGIRTQKRRQTTPVPLSAKTLREKKPETEGAQIDRNSYGSPEHTRPPRAESYGAPSSSEATQAAQAMYQQSTTSPQQRPAGPDRTSTSSSATAAAAAATAAMGGRQPIPPKDQYSRASTDYTNQVGAQRGSAGHAQPLDKHSEDSPYGATPSAQMPTQPTYNPALYANVDSGYSQPVPQLQNSPLPPPPPTATMYAPPSQGPPPEVPLPAQPGSQQVVPQGQQRKQVPAANDAGTGRRIGLDHFNFLAVLGKGNFGKVMLAETKQTKKLYAIKVLKKEFIIENDEVESTRSEKRVFLIANKERHPFLLTLHACFQTETRVYFVMEYISGGDLMLHIQRGQFGTKRAQFYAAEVCLALKYFHENGVIYRDLKLDNILLTLDGHIKIADYGLCKEDMWYGSTTGTFCGTPEFMAPEILLDKKYGRAVDWWAFGVLIYQMLLQQSPFRGEDEDEIYDAILADEPLYPIHMPRDSVSILQKLLTREPEQRLGSGPTDAQEIMSQPFFRSINWDDVYHKRIAPPFQPSITNATDTSNFDSEFTSVTPVLTPVQSVLSQAMQEEFRGFSYSADFV

SEQ ID NO: 10693 - protein, 526 aa, Nicotiana tabacum
MDSARGWFQKLSSTKKDPMASGREDGKPVSAEEASNITKQRVAAAKQYIEKHYREQMKNLQERRERRILLEKKLADADVSEEDQNNLLKFLEKKETEYMRLQRHKMGADDFELLTMIGKGAFGEPICMIGFSVITGQNCREKTTGQVYAMKKLKKSEMLRRGQVEHVKAERNLLAEVDSDCIVKLYYSFQDDDYLYLVMEYLPGGDMMTLLMRKDILTEDEARFYVAETVLAIESIHKHNYIHRDIKPDNLLLDRYGHLKLSDFGLCKPLDCSTLEEKDFSVGDNANGGSRSDSPPAPKRTQQEQLEHWQKNRRMLAYSTVGTPDYIAPEVLLKKGYGMECDWWSLGAIMYEMLVGYPPFYSDDPMSTCRKIVNWKNHLKFPEEAKLSPEAKDIISRLLCNVTERLGSNGADEIKVHSWFKGIDWDRIYQMEAAFIPEVNDELDTQNFEKFEESESHSQSGSRSGPWRKMLSSKDINFVGYTYKNFKVVNDYQVPGMVELKKTNTKPKKPTIKSLFGDESEASEDN

SEQ ID NO: 10694 - protein, 1136 aa, Tuber borchii
MADKLLQDVYRKIEREKVLINGARAMRQSTDNAAVQQKLDNQIRESQRNLSYLEGRYGELQNMVITSGVGDMHVNDGGGYGGGYQNPQMLPPNKPFAQGSGGSAQPKTRPNYSKLDLIKYDTPHLGPRIQLMLSQLEFKLSVEKQYKEGIEKMIKLYQMEGDRKSRQDAESKHTDIGQKIQLLKQALKRYEDLHVDMDFGDEDSINSPNIRRPLTGRLAIRVLAVKDVDHATTSRFARGPETFVIIKVEDVARVRTKFTRNDKWLDEAHDIDVDKANEIEMTVYDKPGDNHMPIGLLWIRISDIAEELRRKKIEQEISSSGWVSADKMANSGAGRPGEGAYNYSQGFGGPAAAGGGNTGMYVNNSGQAQAQGGSAGIDAWFALEPVGQIHLNLNFVKYNRNKRPLDLGLGRKGAVRARKEEVHEMYGHKFVQQQFYNIMRCALCSDFLKYSAGMQCSDCKYTCHKKCYPKVVTKCISKSNAETDPEEEKLNHRIPHRFEPMTNMGANWCCHCGYMLPVGKKNARKCTECGLTCHSQCAHLVPDFCGMSMEVANQILGEIKKTKKRGPSMTDRNLRTNVPPVPSSPLSGRPTSDPYVSALDPRNSVQGEPAQLSQRTHSYTPSSPTAVNAANVAYGTASSPARPQQPAPYSPEQRPNRVPEPTAVAAAAHAGQRPPSTVQSQTGYPPRQSADFYQGAPTSPTQPNHPTELPSSPSPYQQGQGYDNPYQQHHAPTPQQPPAAPPKASPAPSGYGQPQATQYDQRQSYGQPPPAPAKVAPPAHTPAAEKQPPPPPVLEPQHVVSRPTKIGLDHFNFLAVLGKGNFGKVMLAETKASKKLYAIKVLKKEFIIENDEVESTRSEKRVFLIANKERHPFLLNLHACFQTETRVYFVMEYISGGDLMLHIQRGPFGSRRAQFYAAEVCLALKYFHENGVIYRDLKLDNILLTLDGHIKIADYGLCKEEMWYGSTTSTFCGTPEFMAPEILMDKRYGRAVDWWAFGVLIYQMLLQQSPFRGEDEDEIYDAILADEALYPIHMPRDSVSILQKLLTKEPELRLGSGPTDAQEIMSHPFFANINWEDIYHKRIPPPFKPSIQSATDTSNFDQEFTSVTPVLTPVQSVLTQAMQEEFRGFSYVQDFS

SEQ ID NO: 10695 - protein, 923 aa, Avena sativa
MASKGAGGGGGGHEEPQRPKQQLPRDSRGSLEVFNPSSSSAAVEPPSAFRPAARSASPFIEEATGGIEDVGKATQRAAEWGLVLQTNEQTGRPQGVSARSSGGGGSARSSSDDKAVAGAIPRVSEELRAALSAFQQTFVVSDASRPGHPIMYASAGFFNMTGYTSKEVVGRNCRFLQGSGTDPAEIAKIRQALANGSNYCGRVLNYKKDGTAFWNLLTIAPIKDEEGRVLKFIGMQVEVSKYTEGNKDTVVRPNGLPESLIKYDARQKDQARSSVSELLLAIKNPRSLSESTNSTFKRKSQESVGALTGDRPGKRSSESGSRRNSKSGARTSLQKISEVPERGSKSRKSGLYSLMSLLGMGPGNIEKDMLKPRDEDPLLDSDDERPESFDDELRRKEMRRGIDLATTLERIEKNFVITDPRLPDNPIIFASDSFLQLTEYSREEILGRNCRFLQGPETDRATVRKIRDAIDNQTEVTVQLINYTKSGKKFWNLFHLQPMRDQKGDVQYFIGVQLDGTEHVRDAAEREGVMLIKKTAENIDEAAKELPDANLRPEDLWANHSKVVLPKPHMKDSASWRAIQKVLEGGENIDLKHFRPVKPLGSGDTGSVHLVELLNTGEYFAMKAMDKNVMLNRNKVHRANAEREILDMLDHPFLPTLYASFQTKTHICLITDYYPGGELFLLLDRQPLKVLREDAVRFYAAEVVIALEYLHCQGIIYRDLKPENILLHRDGHISLTDFDLSCLTSCRPQVFLPEEANKKSRRKSRSSPIFFAEPMRASNSFVGTEEYIAPEIITGAGHTSAVDWWALGILLYEMLYGYTPFRGKTRQRTFANILHKDIRFPASISVSLPARQLIYRLLHRDPSNRLGSYEGSNEIKEHPFFRGINWALVRGTAPPKLDAPLFPDDTDKGMGDAAAADTHTDMF

SEQ ID NO: 10696 - protein, 927 aa, Avena sativa
MASKGAGAGGGGGGGDGYDEPQRPKQQLPRDSRGSLEVFNPSSSAVEPPSAFRPAARSASPFIEEVAGGIEDVGKATQRAAEWGLVLQTNEQTGRPQGVSARSSGGGGSARSSSDDKAVAGAIPRVSEELRAALSAFQQTFVVSDASRPGHPIMYASAGFFNMTGYTSKEVVGRNCRFLQGSGTDPAEIAKIRQALADGSNYCGRVLNYKKDGTAFWNLLTIAPIKDEEGRVLKFIGMQVEVSKYTEGNKDTAVRPNGLPESLIKYDARQKDQARSSVSELLLAIKNPRSLSESTNSTFKRKSQESVGPLTGDRPGKRSSESGSRRNSKSGARTSLQKISEVPERGNKSRKSGLYSLMSLLGMGPGNIEKDMLKPRDEDPLLDSDDERPESFDDELRRKEMRRGIDLATTLERIEKNFVITDPRLPDNPIIFASDSFLQLTEYSREEILGRNCRFLQGPETDRATVRKIRDAIDNQTEVTVQLINYTKSGKKFWNLFHLQPMRDQKGDVQYFIGVQLDGTEHVRDAAEREGVMLIKKTAENIDEAAKELPDANLRPEDLWANHSKVVLPKPHMKDSASWRAIQKVLEGGENIDLKHFRPVKPLGSGDTGSVHLVELLNTGEYFAMKAMDKNVMLNRNKVHRANAEREILDMLDHPFLPTLYASFQTKTHICLITDYYPGGELFLLLDRQPLKVLREDAVRFYAAEVVIALEYLHCQGIIYRDLKPENILLHRDGHISLTDFDLSCLTSCRPQVFLPEEANKKSRRKSRSSPVFFAEPMRASNSFVGTEEYIAPEIITGAGHTSAVDWWALGILLYEMLYGYTPFRGKTRQRTFANILHKDIRFPASISVSLPARQLIYRLLHRDPSNRLGSYEGSNEIKEHPFFRGINWALVRGTAPPKLDAPLFPDGTDKGLGDATAAADNHTDMF

SEQ ID NO: 10697 - protein, 921 aa, Oryza sativa; identical to SEQ ID NO: 10689

SEQ ID NO: 10698 - protein, 924 aa, Oryza sativa
  unsure (1)..(924): unsure at all Xaa locations
MASKGTEGGHGGVERKEQQQQRGYQLPRDSRGSLEVFNPSSXASSFRTACXAAPKSASPFLAIPDREVDNVVAQQAEAAEWGLNLXTHEYIVMTQMMFLNKREGHILLLALRAXAKIKIMSCKYVMYRTDLVVFEPSMRSIILIRCNAAQCVPVNSNELDLSLXXSSIVSRGKKEYIVLTVRKLVKWVLFSIRQSLANGSNYCGRILNYKKDGTPFWNLLTIAPIKDEDGRLLKFIGMQVEVSKYTEGKKDTVVRPNGLSESLIKYDARQKDHARSSVSELLLALKNPRSLSESSNNTLKRKSQESLSMSMTEVPSKRSSESGSRRNSRSGTRSSLQKINEVPDQGNRTRKSGLRAFMGFLGMGHGSVEKNMLKPRDEDPLIDSDDERPESFEDEFRRKEMRRGIDLATTLERIEKNFVITDPRLPDNPIIFASDSFLQLTEYNREEILGRNCRFLQGPETDRATVRKIRDAIDNQAEVTVQLINYTKSGKKFWNLFHLQPMRDQKGDVQYFIGVQLDGTEHVQDDAAKEGVVLVKKTADNIDEAAKELPDANLRPEDLWANHSKVVLPNPHMKDTASWRAIQKVLESGESIGLKHFRPVKPLGSGDTGSVHLVELLNTGEYFAMKAMDKSIMLNRNKVHRATAERQILDLLDHPFLPTLYASFQTKTHICLITDYCPGGELFVLLDNQPLKVLHEDAVRFYAAEVVVALEYLHCQGIIYRDLKPENILLHRDGHISLTDFDLSCLTSCRPQVFLPEDADEKKGRKNGSYPIFFAEPMRASNSFVGTEEYIAPEIITGAGHTSAVDWWALGILLYEMLYGYTPFRGKTRQRTFANILHKDIRFPASISVSLAARQLMYRLLHRDPANRLGSYEGANEIKGHPFFRGINWPLIRATAPPKLEIPLFSKDDMEKKGLVTNNRTDMF

SEQ ID NO: 10699 - protein, 410 aa, Triticum aestivum
  unsure (1)..(410): unsure at all Xaa locations
XTRPTHASEKEGVMLIKKTAENIDEAAKELPDANLRPEDLWANHSKVVLPKPHMKDSASWRAVQKVREGGENIDLKHFRPVKPLGSGDTGSVHLVELLNTGEYFAMKAMDKNVMLNRNKVHRATAERQILDMLDHPFLPTLYASFQTKTHICLITDYYPGGELFLLLDRQPLKVLREDAVRFYAAEVVIALEYLHCQGIIYRDLKPENILLHRDGHISLTDFDLSCLTSCRPQVFLPEEGNKKSRRKSRSSPIFFAEPMRASNSFVGTEEYIAPEIITGAGHTSAVDWWALGILLYEMLYGYTPFRGKTRQRTFANILHKDIRFPASISVSLPARQLIYRLLHRDPANRMGSYEGSNEIKQHPFFRGINWALVRGTAPPKMDAPLLSDDVXDKGLGDAAAAAADNHTDMF

SEQ ID NO: 10700 - protein, 322 aa, Triticum aestivum
  unsure (1)..(322): unsure at all Xaa locations
XNYCGRVLNYKKDGTAFWNLLTIAPIKDEDGRVLKFIGMQVEVSKYTEGNKDTVVRPNGLPESLIKYDARQKDQARSSVSELLLALKNPRSLSESSNSTFKRKSQESVGVLTGDGTGHASAESGSRRTSRTGARSSLQKISEVPEGGNKTRKSGLFSLMGLLGMGHGNVEKNMLKPRDEDPLLDSDDERPESFDDELRRKEIRRGIDLATTLERIEKNFVITDPRLPDNPIIFASDSFLQLTEYSREEILGRNCRFLQGPETDRATVRKIRDAIDNQTEVTVQLINYTKSGKKFWNLFHLQPMRDQKGDVQYFIGVQLDGTX

SEQ ID NO: 10701 - protein, 454 aa, Asparagus officinalis
MGPPDVVPSEHVEFDFSDVFGPSPTPTSTGVNVFASDGSTPAASDDIVYTEPAVILARSHSLVGPTALVCQSPRLRKHILHEADLELVECPSGVEGEQDKPFSCVAEEHEVPSSENVERVGLEDFDFLKVVGQGAFGKVFQVMKKGTSEIYAMKVVRKDTILEKNHSEYMKAERDILTKIDHPFIVQLRYSFQTKYRLYLVLDFVNGGHLFYQLYHQGLFREDLARIYTAEIVSAVSHLHANGIMHRDLKPENILLDADGHVMLTDFGLAKEFEENTRSNSLCGTIEYMAPEIIQGKGHDKVADWWSVGILLFEMLTGKPPFIGGNRDKIQQKIVKDKLKLPAYLTSEAHSLLKGLLQKEASKRLGGGPAGSNEIKNHKWFKLINWRKLEAREIQPSFKPNVAGKICVANFEERWTSMPLTVSPVASPVAGSGNFSGFTYVKPSVFLQKPSPLG

SEQ ID NO: 10702 - protein, 424 aa, Blastocladiella emersonii
TLIDKLMEKTKKVVGSSDKDAPAPASPSSPSTAAGAGSASSTASSTTTAAASGNLSIPSPLVAGSTTSSSISHAQKMATAAHTNSDYSPSPAATPSAPLDAVAERRRRKTTLADLELRQTLGTGSFGRVHLVRLRSTGKYYAMKVLKKAEVVKHKQVEHTLNEKGILEQIDHPFLVALHSSFQDSANLYMVMEYVTGGELFTYLRRSQRFSNNVAKFYAAEVVLAFEYLHSKDIIYRDLKPENLLLDAQGHVKITDFGFAKHVPDITWTLCGTPDYLAPEIIQSRGYGRAVDWYALGVLIFEMLAGYPPFYDEDHVRMYEKILQGKVKWPSHFDPAAKDLLKRLLTTDLTKRYGNLKGGSKDIKMHKWFAGLDWTKLFNKQIPPPYTPPNRGDGDTSNFDAYPEETEPYGKVQPDPYAQLFKDF

SEQ ID NO: 10703 - protein, 425 aa, Blastocladiella emersonii
MTLIDKLMEKTKKVVGSSDKDAPAPASPSSPSTAAGAGSASSTASSTTTAAASGNLSIPSPLVAGSTTSSSISHAQKMATAAHTNSDYSPSPAATPSAPLDAVAERRRRKTTLADLELRQTLGTGSFGRVHLVRLRSTGKYYAMKVLKKAEVVKHKQVEHTLNEKGILEQIDHPFLVALHSSFQDSANLYMVMEYVTGGELFTYLRRSQRFSNNVAKFYAAEVVLAFEYLHSKDIIYRDLKPENLLLDAQGHVKITDFGFAKHVPDITWTLCGTPDYLAPEIIQSRGYGRAVDWYALGVLIFEMLAGYPPFYDEDHVRMYEKILQGKVKWPSHFDPAAKDLLKRLLTTDLTKRYGNLKGGSKDIKMHKWFAGLDWTKLFNKQIPPPYTPPNRGDGDTSNFDAYPEETEPYGKVQPDPYAQLFKDF

SEQ ID NO: 10704 - protein, 404 aa, Blastocladiella emersonii
APAPASPSSPSTAAGAGSASSTASSTTTAAASGNLSIPSPLVAGSTTSSSISHAQKMATAAHTNSDYSPSPAATPSAPLDAVAERRRRKTTLADLELRQTLGTGSFGRVHLVRLRSTGKYYAMKVLKKAEVVKHKQVEHTLNEKGILEQIDHPFLVALHSSFQDSANLYMVMEYVTGGELFTYLRRSQRFSNNVAKFYAAEVVLAFEYLHSKDIIYRDLKPENLLLDAQGHVKITDFGFAKHVPDITWTLCGTPDYLAPEIIQSRGYGRAVDWYALGVLIFEMLAGYPPFYDEDHVRMYEKILQGKVKWPSHFDPAAKDLLKRLLTTDLTKRYGNLKGGSKDIKMHKWFAGLDWTKLFNKQIPPPYTPPNRGDGDTSNFDAYPEETEPYGKVQPDPYAQLFKDF

SEQ ID NO: 10705 - protein, 605 aa, Mucor racemosus
MADFTDSLIKNIGVHSSSPVMTSVNMGQLGEKLRQARTTTLASLSQALSKKPEAAAAAATAPNAVNESTTTPTTMQLPASEKATSQLEINVVEARNLTIADARKADTYCIVHYEGNTTSTLDKVDDGILPSTPLVIKSQVASGAFKAFEIMMSASSPKWMHRVNFDVTAGNKEITVFVYDRGNKLPNGEDRFLGMSSIVPNLVNKKTVELIFPLHGRPDDDQEVTGDVRLQVTFIDPKKANLKPEDFRIVRMIGQGSVGKVYEVIKRDSGRTYAMKVLSKRLLLAENEVDTAFNERNVLVQSLSSPFIANLKYSFQTTNHLFLVMDYFPGGELFDFLERERCLSEKRCQFFAAEIVCAFDNIHARNIVYRNLKPESILLDAHGHIALTDFGLCKQLKNKMDLIQGVPQVITQEYLAPEMVMQKPYGMAADWWSLGVLMFELLTGSPPFHSVEQGELFRQILEAPIKFPAGGCITEEAKDFICQLLERDPAKRLGSHGDVAQVKAHPFFKDLNWDVVYKKQMQLPFVPEVEEQLREEAIAAAAAISIPVTNSKTESTNANVMPVADQSKFKGFSYIREDVMAKKGEHRLGVNPEDEDPEVDFWFRQ

SEQ ID NO: 10706 - protein, 526 aa, Schizosaccharomyces pombe
MARETEFNDKSPSSTDDGMSQSHFSDKLKNLFHFRRNRAATVSTSVRNDQRDNDSDDSTFDINVNQLNELDLNDSSDQLDSRPSLRRVSSAPDSHKGVEAPPPRPLINMSNIRKAQVKILKNPGNYIFGRTEYGKRTYSGNSTKISRVEVTPHSFEKIRLLGQGDVGKVYLVRQKSNHRLFAMKILNKREMIKRHKVNRVLAEQEILTKSKHPFIVTLYHSFQSRDYLYLCMEYCAGGEFFRALHSLPKHILPEKDACFYAAEVTAALEYLHLMGFIYRDLKPENILLHQSGHIMLSDFDLSKPISIVTHPTVVLPKHSTFSQEKPALDTNSYFSNFRTNSFVGTEEYIAPEVIRSCGHTVAVDWWTLGIFIYEILYGTTPFKGKNRHATFSNILYSDVSFPEYHGAPNVSSTCKSLIRRLLVKDESKRCGSVAGASDIKQHPFFRHIQWALLRSMKPPIIPKIEDGMEAVEPSDNDNEEEDFLNSQYLISANLPAVDMHSSTPVNEQSNPFDSFSSVTLHHAGDE

SEQ ID NO: 10707 - protein, 566 aa, Schizosaccharomyces pombe
MNELHDGESSEEGRINVEDHLEEAKKDDTGHWKHSGTAKPSKFRAFIRLHFKDSRKFAFSRKKEKELTSEDSDAANQSPSGAPESQTEEESDRKIDGTGSSAEGGDGSGTDSISVIKKSFFKSGRKKKDVPKSRNVSRSNGADTSVQREKLKDIFSPHGKEKELAHIKKTVATRARTYSSNSIKICDVEVGPSSFEKVFLLGKGDVGRVYLVREKKSGKFYAMKVLSKQEMIKRNKSKRAFAEQHILATSNHPFIVTLYHSFQSDEYLYLCMEYCMGGEFFRALQRRPGRCLSENEAKFYIAEVTAALEYLHLMGFIYRDLKPENILLHESGHIMLSDFDLSKQSNSAGAPTVIQARNAPSAQNAYALDTKSCIADFRTNSFVGTEEYIAPEVIKGCGHTSAVDWWTLGILFYEMLYATTPFKGKNRNMTFSNILHKDVIFPEYADAPSISSLCKNLIRKLLVKDENDRLGSQAGAADVKLHPFFKNVQWALLRHTEPPIIPKLAPIDEKGNPNISHLKESKSLDITHSPQNTQTVEVPLSNLSGADHGDDPFESFNSVTVHHEWD

SEQ ID NO: 10708 - protein, 573 aa, Saccharomyces bayanus
MLSKSEKHIDLLAGNMSNLSFDGPGTPSSTGLFNVNQNNTNRRMRPTGFNDSPSPIKSSLFPHEDSSNMDIDEVSQSDMDITNSPKKLPPKFYERATSNKTQRVVSVCKMYFLEYYCDMFDYVISRRQRTKQVLEYLQQQSQLPTADQAKLNEEWSSYLQKEHQVLRKRRLKPKNRDFEVITQVGQGGYGQVYLARKKDTKEVCALKILNKKLLFKLNETKHVLTERDILTTTRSEWLVKLLYAFQDLQSLYLAMEFVPGGDFRTLLINTRCLKSGHARFYISEMFCAVNALHDLGYTHRDLKPENFLIDAKGHIKLTDFGLAAGTISNERIESMKIRLEKIKDLEFPAFTEKSIEDRRKMYNQLREKEVNYANSMVGSPDYMALEVLEGKKYDFTVDYWSLGCMLFESLVGYTPFSGSSTNETYDNLRRWKQTLRRPRQSDGRAAFSDRTWDLITRLIADPINRLRSFEHVKRMSYFADINFSTLRSMIPPFTPQLDSETDAGYFDDFTSEADMAKYADVFKRQDKLTAMVDDSAVSSKLVGFTFRHRNGKQGSSGILFNGSEHSDPFATFY

SEQ ID NO: 10709 - protein, 726 aa, Saccharomyces cerevisiae
MTQQEYRSPSQRLSKGRSMSLPKIFARNLRSLQNNAPPGKNINVNCLNVNSCSLSASPSSQINMACNGNKQDLPIPFPLHVECNDSWSSSKLNKFKSMFNHNRSKSSGTTDASTSEKGTHKREPRSTIHTELLQSSIIGEPNVHSTTSSTLIPNEAICSTPNEISGSSSPDAELFTFDMPTDPSSFHTPSSPSYIAKDSRNLSNGSLNDINENEELQNFHRKISENGSASPLANLSLSNSPIDSPRKNSETRKDQIPMNITPRLRRAASEPFNTAKDGLMREDYIALKQPPSLGDIVEPRRSRRLRTKSFGNKFQDITVEPQSFEKIRLLGQGDVGKVYLVRERDTNQIFALKVLNKHEMIKRKKIKRVLTEQEILATSDHPFIVTLYHSFQTKDYLYLCMEYCMGGEFFRALQTRKSKCIAEEDAKFYASEVVAALEYLHLLGFIYRDLKPENILLHQSGHVMLSDFDLSIQATGSKKPTMKDSTYLDTKICSDGFRTNSFVGTEEYLAPEVIRGNGHTAAVDWWTLGILIYEMLFGCTPFKGDNSNETFSNILTKDVKFPHDKEVSKNCKDLIKKLLNKNEAKRLGSKSGAADIKRHPFFKKVQWSFLRNQDPPLIPALNDNGCELPFILSCNKHPKRNSVSEQETKMFCEKVANDDEIDEADPFHDFNSMSLTKKDHNILTYSENYTTEKFYTKQLVQGQGITAHIEVSLKTSYLNYNMFTER

SEQ ID NO: 10710 - protein, 720 aa, Saccharomyces cerevisiae
MTQQEYRSPSQRLSKGRSMSLPKIFARNLRSLQNNAPPGKNINVNCLNVNSCSLSASPSSQINMACNGNKQDLPIPFPLHVECNDSWSSSKLNKFKSMFNHNRSKSSGTTDASTSEKGTHKREPRSTIHTELLQSSIIGEPNVHSTTSSTLIPNEAICSTPNEISGSSSPDAELFTFDMPTDPSSFHTPSSPSYIAKDSRNLSNGSLNDINENEELQNFHRKISENGSASPLANLSLSNSPIDSPRKNSETRKDQIPMNITPRLRRAASEPFNTAKDGLMREDYIALKQPPSLGDIVEPRRSRRLRTKSFGNKFQDITVEPQSFEKIRLLGQGDVGKVYLMRERDTNQIFALKVLNKHEMIKRKKIKRVLTEQEILATSDHPFIVTLYHSFQTKDYLYLCMEYCMGGEFFRALQTRKSKCIAEEDAKFYASEVVAALEYLHLLGFIYRDLKPENILLHQSGHVMLSDFDLSIQATGSKKPTMKDSTYLDTKICSDGFRTNSFVGTEEYLAPEVIRGNGHTAAVDWWTLGILIYEMLFGCTPFKGDNSNETFSNILTKDVKFPHDKEVSKNCKDLIKKLLNKNEAKRLGSKSGAADIKRHPFFKKVQWSFLRNQDPPLIPALNDNGCELPFILSCNKHPKRNSVSEQETKMFCEKVANDDEIDEADPFHDFNSMSLTKKDHNILTYSENYTYGKILYKATCTRPRHNSSHRSFFKDIIPEL

SEQ ID NO: 10711 - protein, 893 aa, Saccharomyces cerevisiae
MAGHHHEHEQERDHEQEHEHDSLQRPTTGSERTRSISFSKLLTRSWKRNASSSNNMSVSSVNLYSDPENSRESDHNNSGSEGQSSRFSKLKSMFQSGNSSKNASAHNSSQSSLEGDSASSSSKLRYVKPMTSVANASPASPPLSPTIPETDVLQTPKMVHIDQHEHEREHSNCGSPIMLSSSSFSPTVARTGTGRRRSPSTPIMPSQNSNNSSSTSAIRPNNYRHHSGSQGFSSNNPFRERAGTVRSSNPYFAYQGLPTHAMSSHDLDEGFQPYANGSGIHFLSTPTSKTNSLTNTKNLSNLSLNEIKENEEVQEFNNEDFFFHDIPKDLSLKDTLNGSPSRGSSKSPTITQTFPSIIVGFDNEYEEDNNNDKHDEKEEQQTTTDNKTRNLSPTKQNGKATHPRIKIPLRRAASEPNGLQLASATSPTSSSARKTSGSSNINDKIPGQSVPPPNSFFPQEPSPKISDFPEPRRSRRLRTKSFSNKFQDIMVGPQSFEKIRLLGQGDVGKVFLVREKKTNRVYALKVLSKDEMIKRNKIKRVLTEQEILATSNHPFIVTLYHSFQSEDYLYLCMEYCMGGEFFRALQTRKTKCICEDDARFYASEVTAALEYLHLLGFIYRDLKPENILLHQSGHIMLSDFDLSIQAKDSKVPVVKGSAQSTLVDTKICSDGFRTNSFVGTEEYIAPEVIRGNGHTAAVDWWTLGILIYEMLFGFTPFKGDNTNETFTNILKNEVSFPNNNEISRTCKDLIKKLLTKNESKRLGCKMGAADVKKHPFFKKVQWSLLRNQEPPLIPVLSEDGYDFAKLSSNKKRQTSQDSHKHLDEQEKNMFEERVEYDDEVSEDDPFHDFNSMSLMEQDNNSMIYGNTNSYGKIAYTPNSNRSRSNSHRTFFKR

SEQ ID NO: 10712 - protein, 577 aa, Saccharomyces kluyveri
MFTRGVNGANRDIDALADNIGQLSFDASDPNKFIFEPTTPSKYKENGSTTGTPSPTKSTLYDDNAGDVSKLSMMDIDERTQDEIDVTKSPKKLPLNFYAKASSSKTKRLVNVCQMYFLDYYCDMFDYVISRRERTRQVMKYLEQQRGQGIQPQQISNEWQGYLNKETNTLRKRRLKPKNKDFEMITQVGQGGYGQVYLARKKDTKEICALKILNKKLLVKLNETNHVLTERDILTTTRSDWLVKLLYAFQDPQSLYLAMEFVPGGDYRTLLINTRFLQAPHARFYISEMFCAVDALHQLGYTHRDLKPENFLIDSKGHIKLTDFGLAAGTVSMERIESMKLRLEEVKNLEFPEFKERSMDDRRRMYKKLRESDVNYASSTVGSPDYMALEVLEAKSYDFTVDYWSLGCIMFESLVGYTPFSGSSTNETYENLRRWKQVLRRPRCENGRYAFSDRTWDLITRLIADPVNRVRSFEHVKRMKYFAEIHFDSLRSMSPPFIPQLDSETDAGYFDDFSNEADMAKYADVFKRQDRLTAMMDDSSADSKLVGFTYRHRKGKNGSSGVLYGGAEHADPFATFY

SEQ ID NO: 10713 - protein, 1185 aa, Leptosphaeria maculans
MASVDETVANVQRKIDRERALINAANAMRQSTNNPAVLSRLDGQIKDGHRNIEYFESKLRDLDVQRTSTGMENMSLQPGSGGSGARKPVNNPLTPPPKDGWSSYTQPDQGGYGGPQSQYSNLSGGDGLMPPRAPYAPPGPGTTNKRPNYSKLGKSHLIKYDTPHLGPRIQLMLSQLEFKLSVEKQYKDGIEKMVRLYQMEGDRKSKTDAEAKRIESAQKIQLLKHSLKRYEDLHVDIEGEGGDDDSLNIPSQRKPLSGHLSLRIHAVADVDHAATGRFSRGPETFVNIKVEDAIKGRTKPTRNDRWIDEQHEFAIDKANEIEITVYDKTGDHLLPIGMLWVRISDIAEEMRRKKIETELQNSGWVAADKMSGAAAGIQPDLQFQPPPGQNPAGTPGAPAPGGARPQGGPQPQTGPIMIDDWFSLEPVGRIHLTMSFAKNTGNKQPFDLGLGRKGAVRQRKEDVVEQYGHKFVQQQFYNVMRCALCGEFLKYAAGMQCSDCNYTCHKKCYPKVVTKCITQSNAETDPDEAKLNHRIPHRFENFSNMGANWCCHCGYVLPLGRKQTKKCAECNLTCHAHCVHFVPDFCGMSMEVANQILMEIKRTRRGQSASGPGVPPMAQRTLRPQSAKPLPPAQSQYPAQPGQEPSQTDRYSYGKEQMSPPPGPPRQPSYATSAASVDAARVSYSTSNSTPTPTSPTSSTTSRPSSGARTQSSVAAAQAAMSKTTPPAPGYGRSNTDYQPQGNRTSGGNYPADQRTPQQPQAPQQAPYDPSAYANIPSYPPAQAQQGGMQSYPPGKGSYALPQPSPQMQQPHQSPMSQKQPEAIAQIPPSKQLPPANPENKVTPSANTQGSGKRIGLDHFNFLAVLGKGNFGKVMLAETKSTKQLYAIKVLKKEFIIENDEVESTRSEKRVFLIANKERHPFLLSLHACFQTETRVYFVMEYISGGDLMLHIQRGQFGTKRAQFYAAEVCLALKYFHENGVIYRDLKLDNILLTLDGHIKIADYGLCKEEMWYGSTTSTFCGTPEFMAPEILLDKKYGRAVDWWAFGVLIYQMLLQQSPFRGEDEDEIYDAILADEPLYPIHMPRDSVSILQKLLTREPEMRLGSGPTDAQEIMSHAFFRNINWDDIYHKRVAPPFVPQISSPTDTSNFDTEFTSVTPVLTPVQSVLSQAMQEEFRGFSYSADFN

SEQ ID NO: 10714 - protein, 480 aa, Aspergillus niger
MPSLGGLLKKRRTKDSQTLSKELEAGSAQTQTSPNAAEDHHNHNHHQHHHHLFHHHHQPQPATNSGSAANTPPQPQDSVPQQSNRSSGAEKSSDGQVASMQSAVTQASPSAHHTSGLPQPNANAASIQNIINPSQQGAMHSASSGHTQSHHAGRSDARTTKGKYSLDDFSLQRTLGTGSFGRVHLVQSKHNHRFYAVKVLKKAQVVKMKQIEHTNDERRMLNRVRHPFLITLWGTWQDSRNLYMVMDFVEGGELFSLVRKSQRFPNPVAKFYAAEVTLALEYLHTQNIIYRDLKPENLLLDRHGHLKITDFGFAKEVPDITWTLCGTPDYLAPEVVSSKGYNKSVDWWSLGILIFEMLCGFTPFWDSGSPVKIYENILRGRVKYPPYLHPDAVDLLSQLITADLTKRLGNLHGGSDDVKNHPWFAEVTWDRLARKDIDAPYVPPIRGGQGDASQYDRYPEETEQYGMAGEDPHGHLFPDF

SEQ ID NO: 10715 - protein, 490 aa, Aspergillus fumigatus
MPTLGGLLKKRRTKDSHTLSKELESSSSPAAAQTQTSPNSADHDHHYQHYDQTHHHQHSASSNPSNNSATPSAAQPHRSSNDNPNRSSGTDQKSEGQTASMQFAVTQPHPSTHHNPRLHHLQQQQQQPQQQSHTSRLHNILHPSHHASSQASTEGHAHSQQANQTEARTTKGKYSLDDFTIQRTLGTGSFGRVHLVQSKHNHRFYAIKVLKKAQVVKMKQVEHTNDERRMLNRVRHPFLITLWGTWQDARNLYMVMDFVEGGELFSLLRKSQRFPNPVAKFYAAEVTLALEYLHSQQIIYRDLKPENLLLDRHGHLKITDFGFAKEVPDITWTLCGTPDYLAPEVVSSKGYNKSVDWWSLGILIFEMLCGFTPFWDSGSPVKIYENILRGRVKYPPYLHPDAVDLLSQLITADLTKRLGNLHGGSEDVKNHPWFAEVTWDRLARKDIDALYVPPIREGQGDASQYDRYPEETEQYGQQGEDVHGHLFPDF

SEQ ID NO: 10716 - protein, 502 aa, Aspergillus fumigatus
MPTLGGLLKKRRTKDSHTLSKELESSSSPAAAQTQTSPNSADHDHHYQHYDQTHHHQHSASSNPSNNSATPSAAQPHRSSNDNPNRSSGTDQKSEGQTASMQFAVTQPHPSTHHNPRLHHLQQQQQQQQQQQQQQQQQQPQQQSHTSRLHNILHPSHHASSQASTEGHAHSQQANQTEARTTKGKYSLDDFTIQRTLGTGSFGRVHLVQSKHNHRFYAIKVLKKAQVVKMKQVEHTNDERRMLNRVRHPFLITLWGTWQDARNLYMVMDFVEGGELFSLLRKSQRFPNPVAKFYAAEVTLALEYLHSQQIIYRDLKPENLLLDRHGHLKITDFGFAKEVPDITWTLCGTPDYLAPEVVSSKGYNKSVDWWSLGILIFEMLCGFTPFWDSGSPVKIYENILRGRVKYPPYLHPDAVDLLSQLITADLTKRLGNLHGGSEDVKNHPWFAEVTWDRLARKDIDAPYVPPIRGGQGDASQYDRYPEETEQYGQQGEDVHGHLFPDF

SEQ ID NO: 10717 - protein, 640 aa, Cryphonectria parasitica
MHRTVLLTLLSPSPELKKTHLSSPLSSFGRSPSQSTITDKDAKAQPQSGPSGTAPSPTPPDNNIASSEALTQTPVEFAPKPGILVVTLHEGRGFALPEPHKNIFSSHSTSASQGGGASIAGSVRTAPNGHRPNTSGGFGNVPTNHGRVSGKYMPYALLDFDKVQVFVNSVEGNPENPLWAGSNTQYKFDVSRVTDVTVHLYIRNPTAPPSVGRANDIFLGVVQIKPRFEEKHQFVEDPKANKKDREKAATEFAEKEKALGHSGVQWVPVGYGQGELKIGIEYVENRAGKLTIDDFDLLTVVGKGSFGKVIQVRKKDTSRIYALKTIRKAHIISRSEVTHTLAERSVLAQINNPFIVPLKFTFQSPEKLYFVLAFVNGGELFHHLQKEQRFDVNRSRFYTAELLCALECLHGFNVIYRDLKPENILLDYQGHIALCDFGLCKLDMKDEDRTNTFCGTPEYLAPELLMGQGYNKTVDWWTLGVLLYEMLTGLPPFYDENTNEMYRKILGEPLHFPSHDIVPPAAKDLLTKLLNRDPAQRLGANGSAEIKAHPFFHAIDWRKLLQRKYEPTFKPNVAGAMDTDNFDPEFTREAPQDSYVGGVPLSETMQNQFQGFSYNRPIAGLADGGGSVKDPSFIGSVTGR

SEQ ID NO: 10718 - protein, 623 aa, Neurospora crassa
MPSTKNANGEGHFPSRIKQFFRINSGSKDHKDRDAHTTSSSHGGAPRADAKTPSGFRQSRFFSVGRLRSTTVVSEGNPLDESMSPTAHANPYFAHQGQPGLRHHNDGSVPPSPPDTPSLKVDGPEGSQQPTAATKEELARKLRRVASAPNAQGLFSKGQGNGDRPATAELSKEPLEESKDSNTVGFAEQKPNNDSSTSLAAPDADGLGALPPPIRQSPLAFRRTYSSNSIKVRNVEVGPQSFDKIKLIGKGDVGKVYLVKEKKSGRLYAMKVLSKKEMIKRNKIKRALAEQEILATSNHPFIVTLYHSFQSEDYLYLCMEYCSGGEFFRALQTRPGKCIPEDDARFYAAEVTAALEYLHLMGFIYRDLKPENILLHQSGHIMLSDFDLSKQSDPGGKPTMIIGKNGTSTSSLPTIDTKSCIANFRTNSFVGTEEYIAPEVIKGSGHTSAVDWWTLGILIYEMLYGTTPFKGKNRNATFANILREDIPFPDHAGAPQISNLCKSLIRKLLIKDENRRLGARAGASDIKTHPFFRTTQWALIRHMKPPIVPNQGRGIDTLNFRNVKESESVDISGSRQMGLKGEPLESGMVTPGENAVDPFEEFNSVTLHHDGDEEYHSDAYEKR

SEQ ID NO: 10719 - protein, 662 aa, Hypocrea jecorina
MSWKLTKSMSLLFPLSPTFRPPTSPSPSPFDWQNETDWPCAELKDTHLGPLSAFSRSPSTSTITDKDEKGTSPGATTPTSENAIAASEALSQAPVVKKPGILVVTIHEGQGFSLPEQHRSAFASSHQSSRSSGGALAGSVRPDGQRVAGSYTNGARPHSSGGGFGSLPTNHGRISGKYMPYALIDFDKVQVFVNSVEGSPENPLWAGGNTQYKFDVSRVTELVIHLYMRNPAAPPGSGRSQDIFLGVARINPRFEERQPTTDDAKSSKKDREKAADAQRQKGEGHSGVEWVDVQYGTGRIKVGVEFVETRAGKLKIEDFELLKVVGKGSFGKVMQVRKKDTNRIYALKTIRKAHIISRSEVAHTLAERSVLAQINNPFIVPLKFSFQSPEKLYFVLAFVNGGELFHHLQKEHRFDVNRSRFYTAELLCALECSHGFSVIYRDLKPENILLDYQGHIALCDFGLCKLDMKDEDRTNTFCGTPEYLAPELLLGQGYNKTVDWWTLGVLLYEMLTGLPPFYDENTNEMYRKILSEPLHFSDVVPPAAKDLLTKLLNRDPKKRLGANGSAEIKAHPFFHDIDWRNVLQRKYEPTFKPSVTDAMDTANFDPEFTSEAPQDSYVEGPMLSQTMQDQFQGFSYNRPIAGLGDAGGSVRDPSFVGSLQDN

SEQ ID NO: 10720 - protein, 608 aa, Ustilago maydis
MSQAAHLQQQQIAASQQQGLQAPNSGYMQRAPGASPINRSPSPSARPLNAAPRSPQPHGQAQTYSQQQQQQQQQQQQQQFYQQQQQQQQQQQQQQQQQYTQSGGSTSPNPANEKPADYVYFERSTNGMQKSTIEAATGAKLKLENFYKVYVEQAVERIKRAAELEDRLTNPPDGVHLSDERKARQLAQLGRRESNFLRLRRTRLGLDDFRTVKVIGKGAFGEVRLVQKTDTGKIYAMKTLRKSEMFKKDQLAHVRAERDVLAESNSPWVVQLYYSFQDTAYLYLLMEFLPGGDLMTMLIKYDTFSEDVTRFYMAECVLALEGIHKLGFIHRDIKPDNILIDAKGHIKLSDFGLSTGFHKQHDSAYYQRLFEGTAAQNPAQTGRNSVAVNSINLTLSSKDTIATWKANRRKLAYSTVGTPDYIAPEIFLQQGYGNECDWWSLGAIMFECLCGYPPFCSENAHDTYRKILAWRETLQFPDDIHLSPEAEDMIRRLISAPENRLGRNSASEIKGHAFFAGVDWATIRQIDAPFIPQLKSITDTSYFPTEDYQDVPETPAALMSGSEARTSPCSATRIAGTRATRLSSSGTPRAHFNLPFVCHRKCELNPSS

SEQ ID NO: 10721 - protein, 405 aa, Ustilago maydis
MSAIPQQPVDYSATHEAAVAAAAAAAAKAATATAGGGASSSQHPAPAVVGATSVPTHVASANSTGTYSSASLPLAIAAQQRKLSGRYALTDFAVERTLGTGSFGRVHLVRSRHNHRFYAIKVLRKEQVVKMKQVEHTNSERAILSIVRHPFLVNLWGTFKDSTFLYMVMDYVPGGELFTLLRKSQRFPHPVAKFYAAEVALAIDYLHQNNIIYRDLKPENILLSADGHLKITDFGFAKYVPDVTWTLCGTPDYLAPEIVSSKGYNKSVDWWALGVLLYEMLAGHPPFFTEDGNPIKLYEKIIACKVRYPPYFETGVKDLLKNLLTADLSKRYGNLHRGSKDIFGHLWFAEVDWDRLYRREIPAPYLPTVTADGDSSQFERYPENDVTEYSRTDLPDSLGHLFPDF

SEQ ID NO: 10722 - protein, 530 aa, Colletotrichum trifolii
MPTLGFLKKKRTREGNQDPQGSLPTSPVTPTSSKPFDSSISTTLSSLSNNSQATSQPSGPGQKQQEDPASSEAAKNQQMYPVTVHPAPNQQHYNQQGEPQQNLPSISNLINPTQHDASSNGHNYLAHATQTSQPNPSPGTDPTRLQQQQAQSMLHPPTQPQQQQQQQQQQQQQQQQQQQQQQQQQQTQTQQPTAKERHAATGAGPAGRQTKGKYTLQDFDILRTLGTGSFGRVHLVQSKHNQRFYAVKVLKKAQVVKMKQVEHTNDERRMLGEVKHPFLITLWGTFQDSKNLYMVMDFVEGGELFSLLRKSGRFPNPVAKFYAAEVTLALEYLHSRDIIYRDLKPENLLLDRHGHLKITDFGFAKRVPDKTWTLCGTPDYLAPEVVSNKGYNKSVDWWSLGILIYEMLCGYTPFWDSGSPLKIYENILKGKVKYPAYINPDAQDLLSKLITADLTKRLGNLYGGPNDVKTHPWFQEVTWDRLARKDIDAPYTPPVKAGAGDASQFDRYPEDPERYGSSGHDEYGHLFTDF

SEQ ID NO: 10723 - protein, 442 aa, Candida albicans
MVNLLKKLHITKSHQSNHSNSDSNSLNSNTSMDNHQQQQQLQQYQQQFQQPQQQLYPGEQIVHPAAAQTGQNTTNVTAVSSSNITQSATSSLHSQQLQHVDVSKSAAEEAIRRSLLPERSTVSKGKYSLTDFSIMRTLGTGSFGRVHLVRSVHNGRYYAIKVLKKHQVVKMKQVEHTNDERRMLKLVEHPFLIRMWGTFQDSKNLFMVMDYIEGGELFSLLRKSQRFPNPVAKFYAAEVTLALEYLHSHDIIYRDLKPENILLDRNGHIKITDFGFAKEVSTVTWTLCGTPDYIAPEVITTKPYNKSVDWWSLGVLIFEMLAGYTPFYDSTPMKTYEKILAGKIHYPSFFQPDVIDLLTKLITADLTRRLGNLINGPADIRNHPWFSEVVWEKLLAKDIETPYEPPITAGVGDSSLFDHYPEEQLDYGSQGEDPYASYFLDF

SEQ ID NO: 10724 - protein, 411 aa, Candida albicans
  unsure (1)..(411): unsure at all Xaa locations
MDNHQQQQQLQQYQQQFQQPQQQLYPGEQIVHPAAAQTGQNTTNVTAVSSSNITQSATSSLHSQQLQHVDVSKSAAEEAIRRSLLPERSTVSKGKYSLTDFSIMRTLGTGSFGRVHLVRSVHNGRYYAIKVLKKHQVVKMKQVEHTNDERRMLKLVEHPFLIRMWGTFQDSKNLFMVMDYIEGGELFSLLRKSQRFPNPVAKFYAAXVTLALEYLHSHDIIYRDLKPENILLDRNGHIKITDFGFAKEVSTVTWTLCGTPDYIAPEVITTKPYNKSVDWWSLGVLIFEMLAGYTPFYDSTPMKTYEKILAGKIHYPSFFQPDVIDLLTKLITADLTRRLGNLINGPADIRNHPWFSEVVWEKLLAKDIETPYEPPITAGVGDSSLFDHYPEEQLDYGSQGEDPYASYFLDF

SEQ ID NO: 10725 - protein, 1097 aa, Candida albicans
MSTSQPSQQQNPEQVVNDIRQKIEKERKIIQGFNDVKRNTNNPEVIQKWKSKIIESQSMIDYYQETMNKLTRQMQRLNTNSSSRTASRSSVISEYKPSYSNFDLIKYECPSLGNKIQFMLQYLEFKLQVENKYSEANKKLSHLYLMDGDKSSSNAAEGGRAESDQRIQLLEKALKKYQKFSINDHEFDRDYEIMDSTKHSRKLLTGRLTVSITCIRDVDHIATALAKKRETVVVIKVDDLEKARTKPSKNDNWNEEMVIDVDKSHEIELAVMDKQNGIYVPVAVNWFSLFDLAEEIRKKKVAKDQGSSGWLPAANLPQTGGSGAGTGSSMTGGASYGATSPLPAHNDLRPSVSPSSDAKENKVSVSTWLSLEPGGQMLINLNFEKSITNGKQFRGPLGRHGAIRQKKEEVFEKHGHQFVQKQFYNIMSCALCGEFLRYTGYQCQDCKFLCHKKCYQKVVTKCISKSGSDYDAAQLNHRIPHRFEPITNHGTKWCCHCGYILPWGKKNVRKCTECGVMCHAQCTHLVPDFCGMSLQMANEILATIESTKVSPKKAQHQQSHAKPLPPKPPIESKPSMDSEETLHNEPSYKSLRPASVVHQDTNFVSKLPTTVQNKYQEPVELPPQQQNQVVPSTRRRGHGSTDLSFETGYGQQQHQHHRDVPQIVVEDHQHYNSNDNRDVEMEESKDEFDNFDYNNKYTENEILTDVQQDQVRSPFADQIQGVPETSHAKQQNQQVQQVQQQEELGHQRTHSSGKSGKSKRRKRKVGLDDFQFLAVLGKGNFGKVMLAESRHTSKLCAIKVLKKDFIVENDEAESVKSEKRVFLTANKEMHPFLLNLHCCFQTENRIYFVMEYISGGDLMWHIQKNRFTAKRAKFYACEVLLGLKYFHDNGIVYRDLKLDNILLTTKGHIKIGDYGLCKEDMWHKSTTSTFCGTPEFMAPEIVAGKAYDRSVDWWAFGVLLFQMLLCQSPFKGDDEDDIFNAIENDEVKYPINLSRQTVLVLQALLTKDPSQRLGSGPKDAEEIMEHPYFHDVNFDDVLNCRIPAPYIPEVQSEHDYSNFDKEFTSETPRLTPVETVLTSEMQEQFRGFSHISDNATI

SEQ ID NO: 10726 - protein, 1097 aa, Candida albicans
MSTSQPSQQQNPEQVVNDIRQKIEKERKIIQGFNDVKRNTNNPEVIQKWKSKIIESQSMIDYYQETMNKLTRQMQRLNTNSSSRTASRSSVISEYKPSYSNFDLIKYECPSLGNKIQFMLQYLEFKLQVENKYSEANKKLSHLYLMDGDKSSSNAAEGGRAESDQRIQLLEKALKKYQKFSINDHEFDRDYEIMDSTKHSRKLLTGRLTVSITCIRDVDHIATALAKKRETVVVIKVDDLEKARTKPSKNDNWNEEMVIDVDKSHEIELAVMDKQNGIYVPVAVNWFSLFDLAEEIRKKKVAKDQGSSGWLPAANLPQTGGSGAGTGSSMTGGASYGATSPLPAHNDLRPSVSPSSDAKENKVLVSTWLSLEPGGQMLINLNFEKSITNGKQFRGPLGRHGAIRQKKEEVFEKHGHQFVQKQFYNIMSCALCGEFLRYTGYQCQDCKFLCHKKCYQKVVTKCISKSGSDYDAAQLNHRIPHRFEPITNHGTKWCCHCGYILPWGKKNVRKCTECGVMCHAQCTHLVPDFCGMSLQMANEILATIESTKVSPKKAQHQQSHAKPLPPKPPIESKPSMDSEETLHNEPSYKSLRPASVVHQDTNFVSKLPTTVQNKYQEPVELPPQQQNQVVPSTRRRGHGLTDLSFETGYGQQQHQHHRDVPQIVVEDHQHYNSNDNRDVEMEESKDEFDNFDYNNKYTENEILTDVQQDQVRSPFADQIQGVPETSHAKQQNQQVQQVQQQEELGHQRTHSSGKSGKSKRRKRKVGLDDFQFLAVLGKGNFGKVMLAESRHTLKLCAIKVLKKDFIVENDEAESVKSEKRVFLTANKEMHPFLLNLHCCFQTENRIYFVMEYISGGDLMWHIQKNRFTAKRAKFYACEVLLGLKYFHDNGIVYRDLKLDNILLTTKGHIKIGDYGLCKEDMWHKSTTSTFCGTPEFMAPEIVAGKAYDRSVDWWAFGVLLFQMLLCQSPFKGDDEDDIFNAIENDEVKYPINLSRQTVLVLQALLTKDPSQRLGSGPKDAEEIMEHPYFHDVNFDDVLNCRIPAPYIPEVQSEHDYSNFDKEFTSETPRLTPVETVLTSEMQEQFRGFSHISDNATI

SEQ ID NO: 10727 - protein, 522 aa, Metarhizium anisopliae
MPSLGFLKKKRTRDSNPDPSTSTPTSPVAATSPSKPFDSSTLQQRTSGSQAKTAPGTAPAPSQGSAATAAPASQQQQMNPANAQGGTFVTPLPMQTNQADSQSLPSINNLIHQPQNGASTNNYSSFNPAALGAQISHPPSASPGTDPGHMQQQQQQAYPQPAMQPQQQAGHLPDQQQQQYQQQQHEQRVHHQHQGSVTRVTKGKYSLGDFDILRTLGTGSFGRVHLVQSKHNQRFYAIKVLKKAQVVKMKQVEHTNDERRMLSDVKHPFLITLWGTFQDWKNLYMVMDFVEGGELFSLLRKSGRFPNPVAKFYAAEATLALEYLHSKNIIYRDLKPENLLLDRHGHLKITDFGFAKRVPDKTWTLCGTPDYLAPEVVSNKGYNKSVDWWSLGILIYEMLCGYTPFWDSGSPMRIYENILKGKVKYPAYINTDAQNLLERLITSDLTKRLGNLYGGSQDVKNHPWFSEVTWDRLARKDIDAPYTPPVKAGTGDASQFDRYPEDPEKYGGIGGSDEYGHMFTDF

SEQ ID NO: 10728 - protein, 763 aa, Suberites domuncula
MSAFLRVRLSEAIVDHTKPNDPFCAVNIKEAVKGDDGTLSLQQKKKTFYPVWGRCFDSHLKPGRRMQIIVMDRADVPGADVTPVAEVTVETEQLAHECMDEEPGVAVKLALDLRPSGKVIMQVKLYGTAPGSDESSGIDFATRTPEKLSSLPKNATALRGRRGAVNRRQAEAKEFKGHMFIKKFFRRPTYCSLCREFLWGYTRHGYQCQVCQYTSHKRCIDSILGKCTGAAGTSNHSKYLKERFKIDVPHRFKKYTFLGPTFCDMCGQLMHGIFRQQLKCDACGTNCHTKCAQNMPPLCGVNEKLLSEALKNVDEIKRNRRLSAGGDPSQNGKKSTPALPPVSEGGLIEEDEYQEITEAMSQASLLVKLQQEQSASHVPSPQNGNKHRPLSSTSEAAPPVPPRTYSQKSHMNGQSSSFSRHMPVSKPMRRFKLEEFQFLKLLGKGSFGKVLLAQQIGSNKYYAIKALKKDVVLEDDDVEATMVEKRILALGSECPFVTHLHSTFQSSSHLFFVMEYLNGGDLMFHIQLHHKFKLPRARFYAAEILAGLQFLHSKGIIYRDLKLDNILLDSEGHCKIADFGMCRENIFGSSTAGTFCGTPDYISPEIIKGKRYTFSVDFWSYGVLCYEMITGQPPFGGEDEDELFDSICNSQIPFSRYLDAYTIDFLDKLLQREPIQRLGYMGDRQPIRKHPFFRSIDFARLEKREIAAPYKPVVKSAQDASNFDDDFTFQPAQLTPTDTQLVLSIDQTNFNGFSFTSEAFNKP

SEQ ID NO: 10729 - protein, 673 aa, Suberites domuncula
MSDSGQVRRPKRRNAVRQRQVVEIRGHKFVLNYFKQFTFCGHCTRFLWGVTGPQGYKCLLCDLAIHRRCMEYVSFICPGTSLPEGIEPRPHKFRATTYHTPTWCDHCGSLLYGIIRQGVQCSDCGINVHHRCKGLVPKTCGLGQSEKRGRIKVTFSTLQLDDAHIRVNIMIHECRNLPPMDANGLADPYVKLRLYPEPTDTPNIKQKTERKEKTLEPKFEEDFFYDVNMNHLDTFLVIEVWDWDKFTANDYVGGFALRIGEIIELTKMEPHSSWYKLLDEKRSKTHHERILADEEATKLIEEFRKATILDKAKNLVTDVPIMRRGSELVPGAKDMPKMKLEDFNLLVVLGKGSFGKVFLAEQKTTKDVYAIKSLKKDLIVQEDDVECTLNERKVLALQEKPPFLTGLHSCFQTRDHLFFVMEYINGGDLMFHILELGRFPENQTKFYAGEIVLGLRFLHKRGIIYRDLKLDNVMLDADGHIKIADFGLCKEGILGGNKTRTFCGTPDYIAPEIISYQPYDAAVDWWALGVLTYEMLVGRPPFDGDDDDQLFNNIMEKPVHYPRGMSDPAKKIIQGFLTKHPSRRLGCHPETGEQDIKGAPFFKSIDWDRLGRRELKPPYKPKIRGKKSVSNFDPEFTKEPCRLSPVDPTVIGAIEPEVFEGFSFTNPEMYHEP

SEQ ID NO: 10730 - protein, 724 aa, Sycon raphanus
MAEAGDDSFLRIKILQATSLRGNASDPHLAVNIKESIRTPGGKDVQVVQKKDTFHPEWGKCFDSHLNDGRRMQVMVTDIVGDGVMESTQLGEVTVLLASIADQCRSQGSGVSKMSLDMQPCGELTLQAKVYHSQKSGQPESAPPVPGGIESAQCMEENPEELHKNITMLRNRRGAIRHAKLHEINGHGYKARFFRQPTFCGFCKEFLWGFGKQGYQCSYCDQVVHKKCHAKVLGKCPGSKETKDKNVIKKSSQLDLKARFNIDMPHRFKTHNYLHPTFCDHCGTLLYGLFRQGLQCEVCKANCHKRCQGSMPNLCGINEKMMAEMLADVSKEVEAKRSSPATKKKGMGRQASTPVSPLSQAPKFGQANRFEPMAMSLDESMARAAIASSKRYTLSDFHLLKVLGKGSFGKVMLAQVKKSKQYLAIKVLKKDVVLEDDDVECTMIEKRVLSSTSIHPFLVHLHSAFQTEGHLYFVMEYVNGGDLMFHIQQQGRFSEDRTRFYVSEIICGLQHLHSRGIIYRDLKLDNVMLSSRGHIKIADFGMCKENICGENTTSTFCGTPDYIAPEIIQGEQYNHSVDWWALGVLTYEMLLGQSPFSGDDEESLFQSIMNDQVVYPVWLTREAAAFISKLLVREPDKRLGSDPKQSNPRGEAFFKTIDWAKLERAEIAAPFVPNVKSAGDACNFDVDFTMEPAVITPTDEKLLKSMDQEPFNGFSYVNDYFPDQ

SEQ ID NO: 10731 - protein, 756 aa, Sycon raphanus
MSRVSRNSSSSEVNYRDDAPAGAAFARGRRGAVKKKNIVNVRDHEFEPRFFKQPTFCAHCKEFIWGVGRQGYGCRVCQFAVHRRCHEFVSFTCPGAEKPDEGASSPHKFKVTSYGQPTFCDHCGSMLYGLVKQGLKCQACEMNVHKRCERFVPQLCGCDHTEKRGRLFLGLKLTETTPVLKSLEVVVKEAKNLPPMDANGLADPYVKLWLSDDPQKATKKKTETKMKTLNPVWGEKFSFNLTQGDLKRSLIIEVWDWDRTTRNDFIGKMTFTLDEITKMEKDPASGFNDQWFKLLNESEGSAYNVPIMEGPLDSRASTRSGGSSTSPTGDEDLSVGVGALDVSGGPGNGGMPMDALKGRKPKLSDFSFLKVLGKGSFGKVMLAQLKGQEQYYAIKVLKKDVIVQDDDVECTMIEKRVLALSGKPPFLTALHSTFQTKDRLFFVMEFVNGGDLMYHIQQQGRFKENVAVFYSAEIVLGLFFLHRHGVIYRDLKLDNVMLDHEGHIKIADFGMCKEGVLGAKQTRTFCGTPDYIAPEIVAYQPYNGSVDWWALGVLVYEMLSGQPPFDGEDEDELFSSILGDEVRFPKSMTREACSICKSFLAKHPAVRLGCGPNGEADIQGHPFYRTIDWTRLGRRELPPPFKPRIKSKNAANNFDKEFTDEHPKLTPCDRTVIAAIKDDVFGGFSYVNPDPVANGQVGLAGLAPRRLCPHRQAFLDAAMIIATGVHVAGSRPSATTVTRLVQFFAVILTVLSSSYF

SEQ ID NO: 10732 - protein, 332 aa, Leishmania major
MITKAEASQWRLSDLEMRETVGTGTFGRVRLVKHKGTGQYAALKILKKQEILRMKQVDHVMAEASLLQEIDHPFIVSMLRGYMDKNRLYILLEYVVGGELFSHLRKAGKFPNDVSKFYCAEVILAFDYLHNKTIVYRDLKPENILLDQDGNIKITDFGFAKRVTERTFTLCGTPEYLAPEIIQSKGHNKAVDWWALGILLYEMLVGYPPFFDDSPMKIYEKILVGKVLFPRWVDSKARDFIKGLLSLDPTKRLGNLPNGTEDIKNHKYFAEVDWNVVLSKKIPAPIPVRQHKEGDTHYFDKYPDSPLNPLRTLTPAQQDCFANFCNGQYTDE

SEQ ID NO: 10733 - protein, 437 aa, Trypanosoma brucei
MSDVPKSQVGTDAKVAVAKKYTGEYYVKGMVGDKKSFAIEHSRGRQKKHTVNEFCVGDAIGRGAFAEVFQCWRPEEPHIVYAMKKIRKDLIVKRKQSLNVHTERDLLSDAKLRQKRVSCPWITDLVVAFQDQDFLYIVTEYCSGGDLISWLIRYDVFPEETARFYFVELVLALNALHKMGYVRRDVKPDNVLIDREGHVKLADFGLSKRDPDQAESTSVADDSYLTEDVTVDDDVKKRFRDKKERKVMFFSTVGSPAYIAPEVLIGRGYDYSCDWWSAGVILYEMIFGYPPFFNDNNTATAKKIIQFKEHLEFPKDQTTVSKEAIDLISHLIADSKERYGFEEIIRHPFCKGVPLTDSIRNEEAPFSVVLNDPKDLQYFEPAPDNADIQKQPMTAVSREDQSVFVGFTSKLCDRNQSTTCSRALGRFHELQNFSDDD

SEQ ID NO: 10734 - protein, 440 aa, Trypanosoma brucei
MSDVPKSQVGTDAKVAVAKKYTGEYYVKGMVGDKKSFAIEHSRGRQKKHTVNEFCVGDAIGRGAFAEVFQCWRPEEPHIVYAMKKIRKDLIAKRKQSLNVHTERDLLSDAEHRKLRQKRVSCPWITDLVVAFQDQDFLYIVTEYCSGGDLISWLIRYDVFPEETARFYFVELVLALNALHKMGYVHRDVKPDNVLIDREGHVKLADFGLSKRDPDQAESTSVADDSYLTEDVTVDDDVKKRFRIKRKERSWFFSTVASPAYIAPEVLIGRGYDYSCDWWSAGVILYEMIFGYPPFFNDNNTATAKKIIQFKEHLEFPKDQTTVSKEGIDLISHLIADSKERYGFEEIIRHPFCKGVPLTDSIRNEEAPFSVVLNDPKDLQYFEPAPDNADIQKQPMTAVSREDQSVFVGFTSKLCDRNQSTTCSRALGRFHELQNFSDDD

SEQ ID NO: 10735 - protein, 428 aa, Trypanosoma cruzi
MLCYWKRRPSGPHVSPTGTIDLTNARFVENPKDPRSWTIEGDHLSKTFTLTADTEEQREAWVREMSKVKPENREQPSTAVQSSGDVHAVTLYTGGRHKVSLDDFELKATIGAGSFSNVFVAREKSTDKVYAIKEMGKELIQQHNMLSNIAAEKHILQTISHPFIVSLHYAFETKKCLYLVLDFLPGGELFFHLAKEKVFDEYRAKFYCGEIALAIGYLHSLDIIFRDLKPENIVLDEDGHACLTDFGLAKMNVSNASNFTFCGTTEYIAPEFLLGQPHGRAVDWWALGILLYEMTEGIPPFFNENSNEMYEEILKGELKFGDVGGEESGLPVVSENAKALLRRLLDRNPQTRLQDLEEFKKHPFFEDIDWEKLSRREIQPPFRPSSNILCNFDEDFTSKEPRAGFQEEDGGEHGNIACFSFDGQMGPA

SEQ ID NO: 10736 - protein, 309 aa, Trypanosoma cruzi
MSGEANYEKPDTSNWKLADFEMGDTLGTGSFGRVRIAKLKGTNDYYAVKCLKKREILKMKQVQHISQEKQILMELSHPFIVNMMCSFQDDRRVYFVLEFVVGGEMFTHLRSAGRFPNDVAKFYHAEIVLAFEYLHSKDIIYRDLKPENLLLDSKGHVKVTDFGFAKKVPERTFTLCGTPEYLAPEVIQSKGHGKAVDWWTMGVLLYEFIAGYPPFYDDTPFRTYEKILSGRFKFPSWFDARARDLVKGLLQTDHTKRNWEKLYARYYPAPIPVKAKSPGDTSNFERYPESQEDRAVPLTATQQAEFIGF

SEQ ID NO: 10737 - protein, 337 aa, Trypanosoma brucei brucei
  unsure (1)..(337): unsure at all Xaa locations
MKSDGCLTRKDVSSWKLQDLEIRETIGTGTFGRVRLCRHRASGQYVVLKILKKQEILRMKQVDHILAESSILQELSHPFIVTMYKGFMDDDRLYLLLEYVVGGELFSHLRKAGKFPNDVAKFYSAEVVLAFEYIHECGIVYRDLKPENVLLDKQGNIKITDFGFAKRVRDRTYTLCGTPEYLAPEIIQSKGHDRAVDWWTLGILLYEMLVGYPPFFDESPFRTYEKILEGKLQFPKWVEMRAKDLIKSFLTIEPTKRLGSVKRGVQDVKRHKFYSGVNWNVLLQRGVAAPIHVRLNNDGDTRYFDRYPESPRHPLQPLTEAQQELFSGFCDGEYTRX

SEQ ID NO: 10738 - protein, 858 aa, Trypanosoma brucei brucei
MLSKLFRYDTKLQGKQELSTADHRSLLELSMTDNITSVEIPQYRVRGTFVENVIECTKRNMTWQVFRRYQQFKALDQSLKQLCSRGSSRHCDYGVIPVLCGSHWTEVTNQSIDLVEKRRRHLEIYLRQLLVPGNVFYVAKTVIYDFLHDGAVPAQHQRRAIRPLIGFATPDSLADLHLENRNGEGSASRLGAASTLNDKSISMLGPSAVGESDRVDDGVGDEEEEPCKSPPGETVESGEECEDLPSADNSEAEDVRVPPPGSLCRQCNAEFSSVLYPHRCFFCRQQFCRDCLHPVELEEGEVARSCVQCYENFARKTCKPQYPPTPMASTPILQCAPAGGALDPLNLLGSTSHVRTDVTLSDFKLVTTVGRGTFGKVMKVIFREDGKVYAMKVLNKCVIHKRRMIEYIREEKNIMSSLPSHPYIVTCHFAFQTDYHLFFVLDYLPGGDMHSRVYPKLKLTESDVRLYIAELVLALQHLHRHDIAHRDVKLENIVLGEDGHLKLTDFGLARMNFSRQRRRSFVGSPEYLPPETIQGKYQTKAVDWWSAGVMLYEMLSGKTPFYSAYNCEIYNNVLKAELDLTAPCFTPEAASLIEQLLQSHPKARLQDAGAIKAHPYFASIDWAALEGKKISAPIQLDLMGNDMKYIKWKFTAEWAVIYKPPGVTRATIDLLINRFSNFAHVSEGTPPTPHLPIGQQQEEVSDGVTNPPDITGVWNVVKVEMQTEDGKITHPWGSAVCGVLAYFPEGQFSMQLTSYMRPHLRQQFVDRAVREDLVEMCNSYAGSFGKYQIKPGSNIITHRLHGCLCPNLTGSTQKYFFEVRERKENGAKVLKLFTACNALPGEDISAQTVLTWERTGSC

SEQ ID NO: 10739 - protein, 586 aa, Giardia intestinalis
MSDTDVRIKYAVTKTSSRGKKQPRSLVLTSKSVQNVMGNSIQWERPVQEIYGIHRSTKEPKAFVISFLQTYRFDVESADQVSSIVSAFQRLNLGEVFVDDKIGAYGLQTDKGKGYKKGHVNVSSDEDGDIGATGAVSQAADAPASSGQKDRPRTTILEDDLDENIEYVEDTRVLAHQIETLPETEVLETFCNPVAAYKFVRPPIFPQVPPSHAKVMRPQNFELVSVVGKGSFGKVFLVRRVEDNRFFAMKVLKKRNVLDRRQLEHLKAEHNILQSFNHPNMIKLYHSFQTRTRLFLVTTFATGGELFYHLKKIGRFPEPLAVFYLAQIVLVIEYLHKHDIVFRDMKPENLLLDNHGNILLTDFGLSKTGISADNSGGAGVCSGSFCGTPDYLSGEIISGVPHGKMVDIWALGALLFEMLVGSAPFSYASSTSTHGGNARSELYRRILKNIIVFPVFISAECKSFIAKCLSRRPKDRPNFDEIKKHEVFRKNKIDFDKLYRKEIQPPFKPKLEQSCILAVDGKLLKNPLDNIYRYIAPEALVVNFDAKFTSESPILPPSTQTDSVTMQEDKNFKDFAWTAQDAFDKL

SEQ ID NO: 10740 - protein, 347 aa, Entamoeba histolytica
MSTQEYDQLYSQTGKKIGFDDFSLVKVVGRGSFGKVLQVKKKDDGKIFAMKILDKSKVMKTKQQKHTNDEKKILQHVNHPFIVQLYYAFQTPEKLYMVMEFINGGELFHRLDLEECINEEQTKFYTSELCLALIHLHSLGIVYRDLKPENILIDASGNIKLTDFGLSKQLSSEDDQTSTFCGTPDYLAPEILTAKGYGIEVDWWSLGVVVYEMLSGYTPFAADDDGNQNETYQNILNKEPEFLPSISSDAQDFITCCLKKDPTQRIKDDQIKGHQWFAGIDWDLLLQKKVPVPWKPKVSGADDVSNIDEEFTNEDAQKMTPSENVALKGDEFAGFTFQDDAALNGQL

SEQ ID NO: 10741 - protein, 409 aa, Entamoeba histolytica
MGNSNHKPEKKNNKGKKEKGKRKNEKIKDETNEKEAIEEPTPNEEKEPCTDTKPNEDNQIVKGKEGEKEEYIELYNEGKKKVTQDDFELLKVIGRGSFGKVMMVKKKDDGRIFAMKILRKDIVKERKQVDHTKAEKNVLMQLHHPFIVKLYYAFQTTDKLYMVMDFVNGGELFYHLKNENCFSEERAKFYAAEIATVLIHIHSLGIIYRDLKPENILLDNTGNIVITDFGLSKQLAAGEETQTFCGTPDYLAPEILKGVGHGPGVDWWSLGILIYEMIVGIPPFYDDDVSLMYQKILKSQPHFPRNISYDAKSVIMGLLEKDPAERLGGEDVIHMAWFDSIDFEKLKRKELTPPWIPPVKSQTETSQIDEEFVQEAAVDTPPSEEQEQNKDNTFEGFTFVQTNAMEEQQ

SEQ ID NO: 10742 - protein, 648 aa, Dictyostelium
MSNSNNNSSSGNHNSTTINNPKVNVYSNIPNSTTYTYGSGGGGTLSGNNTNNNNTNNNNNNNNNSSGDNKNHSPVTSATDRLTKMDIEEKWDNKNYEKDEREKSPLFHILASNLNSFGNFKVPSTFSLTPPEPNKQQQPQQQPQQQQPQQQQPQQQQPQQQQQQQPQQQQQPQQQLQQNNQQQQQQLQQQQLQQQLQQQQQQQQQQQQQQQQKQQKQQQQQQQHLHQDGIVNTPSTTQTSTTTTTTTTTTNPHTSGLSLQHAHSSYTPSNVLHSPTHFQSSLPTRLDTNPITTPIRQQQQSQQQLQQQQLQQIPPPTVNSFFLPPPVNARERLKEFKQIRVIGTGTFGKVYLIQNTKDGCYYAMKCLNKAYVVQLKQVEHLNSEKSILSSIHHPFIVNLYQAFQDEKKLYLLFEYVAGGEVFTHLRKSMKFSNSTAKFYAAEIVLALEFLHKQNIVYKDLKPENLLIDNQGHIKITDFGFAKRVEDRTFTLCGTPEYLAPEIIQSKGHGKAVDWWALGILIFEMFGRLSPFYDDDTFAIYNKILAGRITFPLGFDVDAKDLIKRLLTADRTRRLGALKDGALDVKNHRWFSDINWERLYQRRDNGPFIPKIQHQGDSSNFEMYDEEEMVEEPPSSNYVDPYAHLFKDF

SEQ ID NO: 10743 - protein, 770 aa, Paramecium tetraurelia
MGVCISNTQQTTTEIAGDQMIPGQLNKPSLSLSSLAVEPRRGDRKRQTKIEVVEEQIHENVMKQQKEKSPFDFQMILNAFGNHFMFAQLDNNDKAKLIEEMYYVTSKDQEFVFKQGDKATLFFIIERGQCQITINEEKKRVLKPSEFFGELALMCHAPRSASVIAIGDCGFWVLERYKFRKAVEDIQQKAYETNREFLAQVKFFDSMTEEQRDSIANVLITLKFKQGESIVNEGDMANSFYIIFQGTVQVTKQGQFLRYMNQGDSFGEQALFGNCVRGATVKAHDSDVNLLSLSREDITTILGEKIQLIIYTNMQKWAFEKHPKLRDLTKMQIQKIVSNFKIKSYESNDCIFKMNQLVDKLIIILDGQLEFEGQLYNNGQLFGDKYLQMEEQKRKINHDIKTNRKTTLSELPFRQFFECIGGELETVVKKNKDRAGSSSLLEKKQKSNYSLLTLEDFIGLKLLGEGTFGNAYLVKDIPQQNMHVMKCVPKVNVIANNTERHIKNEKQVLELLNHPNLVCFRRSFKDQNYIYLLTEYVKGKELFHVIREIGLLNSYETQFYIAQMINILEKLHSQHIIYRDVKPENFIVMENGYIKLIDMGTAKVLKSRASKTYTLVGTPHYMAPEILKGKGYSFSTDLWSLGICFYELMCGEVPFAGDEEDDPFIIEEAILNGKLEYPQILKDFKAIKLMDQLMNRTPELRLGGSFEALKVHPWFDGFQWEELEAFQLKPPYYPKLQQMIFEEMPFLDLIQRDTSPEMICTQFVDWDQDF

SEQ ID NO: 10744 - protein, 819 aa, Paramecium tetraurelia
MGCGSSQPAAEPDKKSKSLKSASTSEIEDLIGKKIPKLLIQAEMKHRFTADEEAIKSDLISLQPPQENDNVVARAQKKMQKKYRGGEDVEGQIIENVKRVEREMQQSDVDLIIKSFKSHFVFFSLPQDSLQKLIENMFYCTIKAGEFVFKQGNQASAYFVIERGQVEIIINENPIRVLKQGDQFGEIALLYNATRSASTKALTNCGFWSLERATFKKTIEEITLKEYDENRKFIDQVQFFSFMTSEQRDMIGNALITTKFNPGQNIVNEGDQADSFYVIKSGQVQILKGDKLIRKMGAKDSFGEQALYEKSVRGATVKAETEVRCVALGRENLTKILGDKIQLIIFNNIMRWSFEKSEILKQLTKIQLEKISQKAKIENFKKGQVIFEAKKPCDKLVVVLEGVLINSKQESVTKGSCFGDQFLQKERYGSPLECAFTMVGDGVLATITFQALFKIFGGDLETALKKNENSHEKKIQQIGKREDASHIVLEDLIYIKKLGEGQFGIVYLVKHKETKKVFALKSVSKASIIEQNLEKHITQEKTVLEQINFPFIMGFVRTFKDDMSIYFLVDFIRGMELFDVIRDIGLLQKPETQFYIGTMILCIEYLHSKSIVYRDLKPENIMVNAQGFMYLIDLGTAKPLLKTKACRTYTIIGTPHYMAPEIIAGKGYTFSVDLWSIGICMYEFMCGGVPFGEELEDPYQIYEEIMNTQIKYPTFLKDRHAKKFMEQLMNRQPETRLGASYSALKAHQWFDDFDFDKLFSRELKPPYLPKPENMVSEQDIQKRFNQNKLVLQEIKNEQDSHKIKYNKHLAKDPNWDKDF

SEQ ID NO: 10745 - protein, 423 aa, Euplotes octocarinatus
MGLVEAIKMDVLNLTPHEKELIKQDVLHKEAELNRKSRKKMYPSDFEPLTIIGKGAFGEVRICRHIETGDIVAVKKVVNKEMLYKNQVAHVRSERDILVKAKNPWIVGLKYSFQDDENLYLVMEYLPGGDLMNLLIKKDILSEEESRFYTAEMILAIESVHSLNYIHRDLKPDNVLLGVDGHIKLTDFGPCKHAEIKASQKVDTDKYELKHSENFNALKNMLNKRLGYKRDRKLAFSTVGTPDYIAPEVFGTKGYDETVDWWSVGVILFEMLVGYPPFFSDDSTVTCQKILHWKRTLVIPPEANLTPEATDLIEKLVCDAEDRLGRNGAIEIKEHPWFEGFDWDSLSSLKAPYIPEVSSPTSAENFDKFKEETPFFPLSQSKLQKQKMKRRKKDLDFVGYTYKADVEEEKQMFVSALQELDHL

SEQ ID NO: 10746 - protein, 414 aa, Euplotes octocarinatus
MEVLNLTPHEKELIKQDVLHKEAELNRKARKKIYPSDFEPLTIIGKGAFGEVRICRHIESGDIVAVKKVVKEMLYKNQVVHVRSERDILVKAKNPWIVALKFSFQDDENLYLVMEYLPGGDLMNLLIKKDILSEEESRFYTAEMILAIESVHNLNYIHRDLKPDNVLLGADGHIKLTDFGLCKHAEIKASQKADTDKYEMKHSENFNALKNILNKRLGYKRDRKLAFSTVGTPDYIAPGVFGTKGYDETVDWWSIGVILFEMLVGYPPFFSDDSTVTCQKILHWKRTLVIPPEANLSAEATDLIEKLICDAEDRLGRNGAQEIKEHPWFEGFDWDNVKEDKAPFIPEVSSPTSAENFDKFKEEAPFFPSSQSKFQKTKMKRKKKDLDFVGYTYKADVEEEKQKFVSALQELDHL

SEQ ID NO: 10747 - protein, 865 aa, Encephalitozoon cuniculi
MERERINIIGDCLEAVYHEISEKRINVPVDRLKEVVEAKTKPSDYEIVKNVAKGGYGEVFLVRREKIYAMKRVSKELVLKQPHTALFMAEKEAMVDCIGSEWLVCAHMTMQDEEYLYYLMDFIPGGDFMGLLSKEDVLEEDWVRFYAAEIVAALDELHKLGWIHRDLKPDNVLIGIDGHVKLADFGSCIKMKDGKARSSITVGTPDYVSPDVLCSVNEECEYGEDVDFWTLGVIIYEMIYGTTPFYSDTLMETYRRITRVEFGFPFKVSPELTSLIEGLIAAKDRRMRIEEIKSHAFFEGVDWSRLKELKPPFVPEVNGDSDTSHFVDTQFDAEKRKLNVKGNYMPFVGFTFDPEFVSRFSSMIEGKAAPTSDRVDSMIKENRQILEDLLVKISENKESIDLQNQELADMNAELESTRVKLEISRDEAQRYQKELKEVLTQLLVEKEELEVAKAELQRYRKWLKNITEEVNSKAFLSEEYSIAERKSAETAGLDMSIEDLGKRGVLFKDLSMPIYEVRKEAEEMADILSDLQESMSRLSTENKGLRSEAEVYKEKYHEILGIKAMIESENKSLTEKLKSGGLDGLKRQLRLKAAEIKEYEQKLNQEILFRKSVEEELNFLKREKSKVHRVAVKQSFSCHLTNGEPTVVKVEEDRLWVGDEAHYISNVYVGELRPNELHHLPQKKISMTLKIVFMNEEVKSVSSSGRRSLKSLEEDLNTEMAIKEGIEKIRALLQGKTLEEANMQLEGSNRKISQLKAEIERCRKSTMVENIPEDPIRIYEFNNHLFAPKTVPQGVLCDFCNEVLYGLVNQGFECKDCKMVVHKSCYVLGDISCELYSALKTGRAYYVTMRTIEEKEKLLSTCKGY

SEQ ID NO: 10748 - protein, 677 aa, Geodia cydonium
MADGGSLDVEPRRPVRRNAVRQARVVEVKGHKFVLTYFKTFTFCGHCGRFLWGVTGPQGYQCKLCDFVMHKRCLDYVSFICPDVHIGNGAPSPRKFKTTSFRHPTWCDHCGSFIYGLMNQGKTCGDCGVNVHHRCHEMVPKTCGQQVKETRGRLEMSVRSEDIDDDHIRLHIGIIQGANLPPMDANGYADPYVKLRLLPEASNAAKQKTERQTKTLSPVWEETFFFDVNKADTSFELSRLVIEVWDWDRYTANDLIGGFSIPVPEIVEWSKGGATVCNWYRLLDSKSLKQKYEHVIDTVKLRTDRGVQEEDEDRQGAGTPEGIPDLRRGSEMVPESHGLPKMSLGEFKLIVVLGKGSFGKVFLAEHKESKEVYAIKSLKKDLIVQEDDVECTLNERKVLALQSKPPFLINLHSCFQTEEHLFFVMEYVSGGDLMFHILELGRFSESQTRFYAAEIVLGLVYLHNLGIIYRDLKLDNVLLDSEGHVKIADFGLCKDGISGTSKARTFCGTPDYIAPEIIQYHPYDAAVDWWALGVLIYEMLVGRPPFDGDDDDQLFMNIVQKQVHYPRGLSEPCRKIISGLLTKNASKRLGSHPEAGVDMIKAQPFFKNMDWEKLARREVKPPYRPKNKGKKNRDNFDPEFTKEPCRLSPVDSNIIAAIDPGAFEGFSFTNPELFIEP

SEQ ID NO: 10749 - protein, 1030 aa, Hydra vulgaris
MADFSDKVLKNVPTKAFRNTSSPLIKSSNKQIPFQRISNTPLKIVVAETNNQKPISTVNCQENKLRLNRIKLNERSSPEVRAKNTKEESIISSSLSKVNHKRNTLPKAPISQQKPLSYSNKLNKVAEANNVRPRSKFQTTSVKKVLCDEIVIEDKEKNNCTIKKTKSSRKPTRHATYVSELNKSIRDKYLNKKESDSLKNISLVEPIINRKPCVNNAKSLNVSDQSSVTSDCDSEKSKIAVHHRTVHCPLHSKFVNKAFIHARCIEECPEFKKVTSVPKTTQRVSSGQSGQKTLDVKRSILTYPKPVVNNFIKSSKPYEQKKSDLNNKSRSSLISSSTNRTGRASVLSQQFQPNSVFLNKNTKCVKPVAYRGGLLPEKKIVTEKPIAIVMPRRKVRQKSFKLQPSRSRSKSFTMKKKLVLLKRNISDESILSDDTNNDFIEDSLNNSSGSEDGSNLPEDDGIEDECESDVYDEKLADYYFELFRNEFPEIVKETHLTKEELVTFFNPMVNRRSKLQRQKQLFPKAKGKHFLRAGEMNTNIATWARLLKIAVPPATSSYSPNAHNTTVTITNNNLSTSEPTLITSSSPNQSNNLLYREVNQLEINDALKYSSDDNLSKSQNAIQKVENLKEEIKPPPPVQGYTTPTFEQRPEQNSNDIRISVVPPNGQLSPRLDSRRTSGRKSAGRSPPIQRKNKHSGLSMENFRCISVLGRGHFGKVLLAEYKTTKELFAIKALKKGDIISRDEVDSLMSEKRIFETANSVRHPFLVNLFSCFQTKDHVCFVMEYAPGGDLMMHIHEEVFSEPRTIFYSGCVILGLQYLHEHDIVYRDLKLDNLLLDAEGYVKIADFGLCKEGMGFGQKTGTFCGTPEFLAPEVLTETSYTRAVDWWGLGVLIFEMLVGESPFPGDDEEEVFDSIVNDEVRYPRFLSNDSIALMRRLLRKNPERRLGSSIKDAEDIKKQPFYKDMKWDSLIQRKLKTPFIPTVKHPEDVSNFDSEFTSEDPVLTPAKEKRGLSQGEQALFSGFEYTADWC

SEQ ID NO: 10750 - protein, 674 aa, Hydra vulgaris
MSSKSKKKSTKKEGGDGGGFHRRGAVREKHVFKVMEHEFIPKFFREPTYCAHCTSFIWGIVGNNGFQCKVCSFGVHKRCHEYVSFKCPGADTGPESDAPQNPHKFKVHTYSSPTFCDHCGTLLYGLFHQGLKCGACDMNVHKRCEKSGCIPKLCGADHTEKRGRIRLKINFSQKGEEGALTIDIFEAKNLIPMDPNGQSDPYVKLKLLPDTTQNKQKTKTIRKCLNPVWNEKFVYKIGPNDKDKRLCIEVWDWDLATSNDFMGSMSFGVSELMKDEVDGWYKLLNAEEGEYYNVPIQDDAAVAALAKKFKFMDPEELDKRQQVLPEQKEIITDEVNSALKEHWKLEDFTFLKVIGKGSFGKVMLAEKKGSDKVYAIKILKKDVVLQNDDLECVLTEKRVLALQGKPTFLTALHSCFTTVDRLYFVMEFVNGGDLMFHIQQVGKFKEPQAVFYAAEIVEGLLFLHKRGIIYRDLKLDNVMLDQSGHIKIADFGMCKENIFPPKTTRTFCGTPDYIAPEIIAYQPYNASVDWWALGVLIYEMLAGQPPFDGEDEDELFNSVLEQTVSFPRSLSKEAISIIKGFLTKNPSRRLGSGDTGEQDIRDHAFFKYIDWIKLFKMEVQPPFKPKVKSKRSHDNFDTEFTDEATRLTPVDRNFIQQIDQRAFENFSFVNTNFS

SEQ ID NO: 10751 - protein, 670 aa, Hydra vulgaris
MTSVKINEETMKGFNRRGAIREKNVFEVKDHKFVPKFFTSPTFCAHCKDFIWGIVGNNGFQCKVCSFGVHKRCHEYVSFKCPGADTGPESDAPQNPHKFKVHTYSSPTFCDHCGTLLYGLFHQGLKCGACDMNVHKRCEKSGCIPKLCGADHTEKRGRIRLKINFSQKGEEGALTIDIFEAKNLIPMDPNGQSDPYVKLKLLPDTTQNKQKTKTIRKCLNPVWNEKFVYKIGPNDKDKRLCIEVWDWDLATSNDFMGSMSFGVSELMKDEVDGWYKLLNAEEGEYYNVPIQDDAAVAALAKKFKFMDPEELDKRQQVLPEQKEIITDEVNSALKEHWKLEDFTFLKVIGKGSFGKVMLAEKKGSDKVYAIKILKKDVVLQNDDLECVLTEKRVLALQGKPTFLTALHSCFTTVDRLYFVMEFVNGGDLMFHIQQVGKFKEPQAVFYAAEIVEGLLFLHKRGIIYRDLKLDNVMLDQSGHIKIADFGMCKENIFPPKTTRTFCGTPDYIAPEIIAYQPYNASVDWWALGVLIYEMLAGQPPFDGEDEDELFNSVLEQTVSFPRSLSKEAISIIKGFLTKNPSRRLGSGDTGEQDIRDHAFFKYIDWIKLFKMEVQPPFKPKVKSKRSHDNFDTEFTDEATRLTPVDRNFIQQIDQRAFENFSFVNTNFSIQ

SEQ ID NO: 10752 - protein, 387 aa, Hydra vulgaris
MPDEITTVKEGWLMKRGEYIKNWRPRYFVLRSNGLFLGYKEKVKGGDGGCEPINTFSIERCQIMRQSKPKPNVFIIRCFQLTTLVERTFAVDSNFDREEWISALEEISRRLAKEEINRRSTSIIDFTDSIHRPKMTLEDFEMLKVLGKGTFGKVMLGKEKKTGNVFAIKLLRKDVILAKDEVEHTLTENRVLQNMKHPFLTELKYSFQTNDRLVFVMEYVNGGELFFHLSRDKVFSEARARFYGAEITLALKYLHENKIVYRDLKLENLLIDSEGHIKITDFGLCKEEISFTDTTKTFCGTPEYLAPEVLEDNDYGHAVDWWGFGVVLYEMLCGRLPFYNRDHEVLFELILSEPVRFPSRLSLSSKSILSGLLEKNPDKRYVMHFFF

SEQ ID NO: 10753 - protein, 661 aa, Hydra vulgaris
MNGIQSGFTGFMKIRILEALDLNKTNVKSQFVTSMKVSSLDPYLQAYVDDQVIAKTSKKTATYCPVWEEDFSIDLHKAKMLSLTVFHSSIVGSDSFVANSSVLIQDIIDEGQSDLWIQLEPAGKLHIFIELKSGEDGEPRATSNQFKQRDSTYLNKRGRRNAVRRRIHQIGGHKFMATYLRQFTFCSHCKEFIWGVIGKQGYQCQVCSIVTHKKCHHLIVSKCPGVKIKEETSSEQRYGLNIPHKFLTHSYRFPTFCQHCGSLLYGIIKQGVQCKNCALNVHRRCQANVANDCGVDRRELAERLKEINNKTANDIMKSPKPTNIIQHTQNGMTCITHDKTKPSIQDITASPVDVCRKVASETKYSLDSFTFLKVIGKGSFGKGYLAERKGSSELFAIKILKKINIIRDDDVDCIQTEKRVLTISGQHPYLTSLHSCFQTPERLFFFMEYVNGGDLMFQIQKARKFDENRSRFYAAEITLALQFLHKNGIIYRDLKLDNILLDSDGHVKLADFGMCKDNLAPSDTTSTFCGTPDYIAPEIVCDLPYGSSVDWWALGVVMYEMMAGQPPFEADNEDELFERIQSSEVLYPVWLSREASSILKGLLTKNYEKRLGCVPDIGEVAINKHPFFASIDWRKLENRQIHPPFQPQIKSPTDVANFDTD

SEQ ID NO: 10754 - protein, 697 aa, Rhabdocalyptus dawsoni
MAVVDPEEEISGRRVDIARRRAIREKKRVVIKDHSFEQHFFKQPTYCSHCRNFIYGVGRQGFECVQCGYVLHRHCVDLVAFNCPKSVKGIAVLKKGEGKVHDFQVHSYGKFTFCDHCGQMLYGLYRQGYQCGDPDCGINVHSYCKPFVANLCGTHSNEKYGRLQMNIRFNEMNERDPVIVIDIKQGKNLLPSDADGMSNPYCQVSMLDKKAKVVITHKTEVAEQSLAPIFNESFVIPFNPSKCERMSVEVMDFSGKFLGGMSFGLSELTNFKKPEDIWFTLYNDNVAKHLNNRTIIESDEAEIKRLIDQVATVRYSSSPTKSLPLTQSLGACVIPGMTSDDVMVLEQYKLLGVLGKGAFGKVFMAESSDLTEEIFALKVMHKELVFDFDAVDCTMMEKLVLALEDKNKPPFLTALKASFQDQENLYMVMEFLSGGDLLFHLLKSIRFTDERSKFYIAEISLAIFFLHSKEIIYRDLKPDNVLLSAEGHIKLADFGLCKEGIKNGKSTTRTYCGTLDYMAPEILQRKDYDNAVDMWSLGVMLYEMLAGRTPFDARTEEMVVTNIKNRAPSFPNNFSKEAIKLITVLLKKVPKERLGFDPVDGQKQFQANKYFSDIDWDMLNKQQVEPPFIPTIKGKKSTANFDKEFTQASNKITKSASRNTIMQHEDFDGFEYTSPDLRQAMRIKREATEQIENEATN

SEQ ID NO: 10755 - protein, 337 aa, Ascaris suum
MENREQEEIEPCVSITIDPNNNKLNVDDFDRICTIGTGSFGRVYLVQHRASEQYFALKKMAIREVVSMRQTEHVHSEKRLLSRLSHPFIVKMYCASWDKYNLYMLFEYLAGGELFSYLRASRTFSNSMARFYAAEIVCALQYLHSKNIAYRDLKPENLMLNKEGHLKMTDFGFAKEVIDRTWTMCGTPEYLAPEVIGNKGHDTAVDWWSLGVLIYEMMIGIPPFRGKTLDEIYEKIILGKLRFTRSFDLFAKDLVKKLLQVDRTQRLGNQKDGAADVMNHKWFTDIDWDDVQNMKLTPPIIPTLYSNGDTGNFDSYDECSDDEIAAPQHELELFEDW

SEQ ID NO: 10756 - protein, 472 aa, Blumeria graminis f. sp. hordei
MPTFGFLKKRKKVSLGHRDLDSPASTLSQPASPITPSTSRGLGEPIDTTSSKITSPGQKLGSNITKDHRGTRTTVEDLPSMTDVSHLQQAYRNLSQGSTASKSNLLTIHNLINPPQHDGAGQSKVMPEKHMNNKTERPVQGKAAVAQVRQTKGKYSLSDFEILRTLGTGSFGRVHLVQSKHNQRFYAVKVLKKQQVVKMKQVEHTNDERSMLQEVKHPFLITLWGTFQDSKNLYMVMDFVEGGELFSLLRKSQRFPNPVAKFYAAEVTLALEYLHKKDIIYRDLKPENLLLDRHGHLKITDFGFAKKVTDITWTLCGTPDYLAPEVVSSKGYNKSVDWRWSLGILIFEMLCGYTPFWDNGSPMKIYENILKGRVKYPPYIHPDAQDLIQRLITADLTKRLGNLHGGAEGIKSHQWFAEVTWERLAKKDIDAPYVPPVKAGSGDASQFDKYPEETERYGQTGPDEHGSLFENF

SEQ ID NO: 10757 - protein, 522 aa, Aplysia californica
MSNMTGAFDLELTEDGGRTEDVSDEEYFEADESSGRQQEYGGDGLPNEEIMETIELSAQTVNPSNVRKIGRERFEIISLLGKGGYGKVLLAEMLDESKSKYDPPRLYAMKVLKKATIARNQKDTAHTRAERNILEAVKHPFIVDLHYAFQTDGKLYLILEYLPGGELFTHLEREGIFMEDMASFYLGEILLAIEHLHTLGVIYRDLKPENVLLDCKGHIKLTDFGLCKESISLGEVTHTFCGTIEYMAPEIVQRSGHGKGVDWWSLGALMYDMLTGQPPFSGENRKKTIDKILRAKLSLPPYLTNEARALLKKLLKKNPSDRLGSGPDDAAPIKSHMFFRHTNWDDLLNKRIEPPIKIGVTSAYDVSLFDTKFTKQTPCDSPVDMTVFSPSINIFDGFTYVAPSVLTEMATQPWISERGPRSPRKSYKNESLLLNNGLEGFYQANAAAAHAIATQRGNHPGHVNQGPTTVVASSRAVNGYDTSAQEDMDTSGGAAAAATASTSGGGVTSSQGGATGGVHHRP

SEQ ID NO: 10758 - protein, 689 aa, Loligo pealei
MADLEAVLADVSYLMAMEKSKSSPAARASKKIVLPDPSIRSVMHKHLLKNGVVTFDHIFDQRIGFVLFKDYCNNGSDVPILEINFYEEIKKFQGMDKDEDRIKQARDIYDQFIMRELLAQCHDFTKTAVNNVQDALTKARKTKKLDVVVFNKYKEELRRKLNKEVFSKFIESDRYTRYLQWKNLELNINLTMNDFSVHRIIGRGGFGEVYGCRKADTGKMYAMKCLDKKRIKMKGGETLALNERIMLSLVSTGECPFIVCMTYAFQTPEKLCFILDLMNGGDLHYHLSQHGVFSEQEVKFYAAEVILGLEHMHVRGVVYRDLKPANILLDESGHVRISDLGLACDFSKKKPHASVGTHGYMAPEVLAKGVAYDSSADWFSFGCMLYKLLKGHSPFRQHKTKDKHEIDRMTMTMNVELPDSMSTEMKSLLEGLLKREVEERLGCKGKGAKELKEHEFFKDMDWNQVYQLRYPPPLIPPRGEVNAADAFDIGSFDEDDTKGIKLLDADQQLYENFTLTVSDRWQQEITETVFETVNNETDKLETKKKPKREEPCEKDVIVEGEILKLGGPFLNSWQKRHLRLYPNRLEFYQKNRDGGIQKNKVELITMYDLKEVCHEFQKLNKADNCIVMILKNETKLVITSQDKVLINQWKEEILGGFRASTKMQSKMNKKASKLYGADVPIEHRNSNGS

SEQ ID NO: 10759 - protein, 689 aa, Octopus dofleini
MADLEAVLADVSYLMAMEKSKSSPAARASKKIVLPDPSIRSVMHKHLLKNGVVTFEHIFDQRIGYLLFKDFCNNGSDVPIAEINFYEEIKKFQTMDTDEDRIKQARDIYDQFIMRELLAQCHEYTKTAINNVQDALTKARKTKQLGNHVFNKYKDEIRKKLNKEEFNKFLESDRYSRYLQWKNLELNINLTMNDFSVHRIIGRGGFGEVYGCRKADTGKMYAMKCLDKKRIKLKTGETLALNERIMLSLVSTGECPFIVCMTYAFQTPEKLCFILDLMNGGDLHYHLSQHGVFSEQEVRFYAAEVILGLEHMHVRGVVYRDLKPANILLDESGHVRISDLGLACDFSKKKPHASVGTHGYMAPEVLAKGVAYDSSADWFSFGCMLYKLLKGHSPFRQHKTKDKHEIDRMTMTMNVELPDSMSVEMKSLLEGLLKREVEERLGCGGKGAEELKENDFFKDLDWNQVYQLHYTPPLIPPRGEVNAADAFDIGSFDEDDTKGIRLSESDQQLYENFTLTVSDRWQQEITETVFDTVNAETDKLELKKKPKREDQIEKDVIVEGEILKLGGPFLNSWQKRHLRLYPNRLEFYQKNRDGGIQKNKVELITMYDIKEVCQEFQKLNKTDNCIVMVLKNETKLVITSPDKVIINQWKEEILGGYRASTKMQSKMNKKASKLYGADVPIEHRNSNGS

SEQ ID NO: 10760 - protein, 690 aa, Homarus americanus
MADLEAVLADVSYLMAMEKSKSTPAARASKKIVLPDPSVRSVMHKHLEKMGEVNFDKIFNQKLGYLLYKDFSENVCEDPVHQLKFYEEIKTYEKIENKEERRKVAREIYDNFIMKELLSNTHAYNKESVAFVQKHLTKNEVPTDLFEPYIEEIFTHLRGDLFNKFVESDKYTRFCQWKNLELNIQLTMNDFSVHRIIGRGGFGEVYGCRKADTGKMYAMKCLDKKRIKMKQGETLALNERIMLSLVSTGVDCPFIVCMTYAFHTPDKLCFILDLMNGGDLHYHLSQHGVFNEQEMRFYAAEVILGLEHMHRRYIVYRDLKPANILLDEHGHVRISDLGLACDFSKKKPHASVGTHGYMAPEVLSKGTAYDSSADWFSFGCMLYKLLKGHSPFRQHKTRDKHEIDRMTLTMNVELPDTFTQELRGLLEGLLHRDVDKRLGCKGKGADEVKEHPFFGGLDWQQVYLQKYQPPLIPPRGEVNAADAFDIGSFDEEDTKGIKLTEADQELYKNFPLVISERWQTEVAETVFDTVNLEADKVEHKRRAKHKFKFKLDADEKGSDCIIHGYIKKLGGPFTSAWQTRYAKLYPNRVELHSESSSGKPELIFMDQLDDVSSDFVQIKGENCIVLKTKDSKIVLTNPDEIGLKEWSMSLRSAHKMSLELLSNMAKKAGKIYGTEGNNKPSLMARNGNGN

SEQ ID NO: 10761 - protein, 754 aa, Limulus polyphemus
MPNFSGTLKLKLCEAIDLKPTEYATRHANVVGKQQLAIDPYVSIDIDEVHVDRSSTKQKTFKPIWNEFFTSEVHNGQNLGLTVFHDAAIPPDDFVANCTISFEEILTSSKEANSNESDIWVDLEPEGKIHVIVELQSQENAAQKPREFKERPGLNRRRGAMRRRVHQVNGHKFMATILRQPTFCSHCREFIWGLGKQGYQCQVCTCVVHKRCHEFVVTKCTGMKDTTNDEIGGSRFNINIPHRFMVHNYKRPTFCDHCGSMLYGLIRQGLQCEACKMNVHKRCQRNVANNCGVNPKQMAEILNAMGFSGDKLTKRKKKTSITESCNKLLHPITERSLTTPLPGTCEEQELSGNATRLEVQAAAEEFKRLCLQLPQGGILPVDRSPIGGSSSSDVIFEQSYRTEEWDSKKFGLSEFTFIKVLGKGSFGKVMLGERKGTDEVYAIKVLRKDVILQDDDVDCTMTEKRILTLAAKHPFLTALCCSFQTEDRLFFVMEYVNGGDLMFQIQKARKFDEARARFYAAEVTLALMFLHRHGVIYRDLKLDNILLDSEGHCKIADFGMCKEGIAGGATTTTFCGTPDYIAPEILQELEYGPSVDWWALGVLMYEMMAGQPPFEADNEDDLFESILHEDVVYPVWLSKEAVSVLKGFMTKNPAKRLGCVPSQGLEQAILNHIFFKEIDWDALESRKVKPPFRPKIKTKRDVNNFDQDFTKEDPVLTQVNPDVIRTINQEEFRGFSVVNEDYCPNRNMVEGPAT

SEQ ID NO: 10762 - protein, 744 aa, Bombyx mori
MRVCFDNLCFGSSQRGAADDEPRALVNTGGGALTVAPTVNGERRALDETYREIELNGIMGTPTAMNAESENCVANATMANDMQPLIERIKELEALLKQRDQEMLELRSQLDKLQSVFPYQQYARGSRGPRKQRAQGISAEPQNSASLQDLTHQTFPIYDKSETSRELIKTAILDNDFMKNLEMTQIREIVDCMYPVEYAAGSIIIKEGDVGSIVYVMEEGRVEVSRENKYLSTMAPGKVFGELAILYNCKRTATIKAATDCRLWAIERQCFQTIMMRTGLIRQAEYTDFLKSVPIFKNFPEDTLIKISDVLEETHYQNGDYIIRQGARGDTFFIISKGQVKVTQKLPNSNDEKFIRTLTKGDFFGEKALQGDDLRTANIVCDSPDGTTCLVIDRETFNQLISTLDEIRTKYKDLGDDRQRLNEEFANLRLSDLRIIATLGIGGFGRVELVQIQGDSSRSFALKQMKKAQIVETRQQQHIMSEKEIMSEMNCEFIVKLYKTFKDRKYLYMLMETCLGGELWTILRDRGQFDDATTRFYTACVVEAFHYLHSRNIIYRDLKPENLLLDSKGYVKLVDFGFSKKLQASRKTWTFCGTPEYVAPEVIMNRGHDISADYWSLGVLMFELLTGSPPFTGSDPMKTYNKILKGIDAVEFPRCITRNAANLIKKLCRDNPAERLGYQRGGITEIQKHKWFDGFNWEGLAQRSLEPPIVPTVNSAIDTHNFDQYPADADEPPPDDLSGWDANF

SEQ ID NO: 10763 - protein, 738 aa, Bombyx mori
MRVCFDNLCFGSSQRGAADDEPRALVNTGGGALTVAPTVNGERRALDETYREIELNGIMGTPTAMNAESENCVANATMANDMQPLIERIKELEALLKQRDQEMLELRSQLDKLQSVFPYQQYARGSRGPRKQRAQGISAEPQNSASLQDLTHQTFPIYDKSETSRELIKTAILDNDFMKNLEMTQIREIVDCMYPVEYAAGSIIIKEGDVGSIVYVMEEGRVEVSRENKYLSTMAPGKVFGELAILYNCKRTATIKAATDCRLWAIERQCFQTIMMRTGLIRQAEYTDFLKSVPIFKNFPEDTLIKISDVLEETHYQNGDYIIRQGARGDTFFIISKGQVKVTQKLPNSNDEKFIRTLTKGDFFGEKALQGDDLRTANIVCDSPDGTTCLVIDRETFNQLISTLDEIRTKYKDLGDDRQRLNEEFANLRLSDLRIIATLGIGGFGRVELVQIQGDSSRSFALKQMKKAQIVETRQQQHIMSEKEIMSEMNCEFIVKLYKTFKDRKYLYMLMETCLGGELWTILRDRGQFDDATTRFYTACVVEAFHYLHSRNIIYRDLKPENLLLDSKGYVKLVDFGFSKKLQASRKTWTFCGTPEYVAPEVIMNRGHDISADYWSLGVLMFELLTGSPPFTGSDPMKTYNKILKGIDAVEFPRCITRNAANLIKKLCRDNPAERLGYQRGGITEIQKHKWFDGFNWEGLAQRSLEPPIVPTVNSAIDTHNFDQYPSEVRSSVSIFDV

SEQ ID NO: 10764 - protein, 486 aa, Asterina pectinifera
  unsure (1)..(486): unsure at all Xaa locations
MLASNLPHIGDAEDSTCTVVKEGWVSKRGEYIKXWRPRYFRLMSNGNFLGYKDKPTTRADLDQKVLNNFSVADCECQVLASEKKDKNIFYVRCLQWTTIVDRTFQVDSATDRDEWMAAIRDVVERVSKTNEEKTAEQNARITDSKSMPKRHTKTLQDFEFLKMLGKGTFGKVLLVREKTGGELYAIKILKKAVIVAKDEVAHTLTESHVLQRTCHPFLTSLKYSFQTTDRLCFVMEYVNGGELFFHLSRERVFSEDRTRFYGAEIISALTYLHECNVIYRDLKLENLLLDQFGHIKITDFGLCKEDLSYGNTTSTFCGTPEYLAPEVLEDSDYGRAVDWWGTGVVMYEMMCGRLPFYSRDHEVLFELILVEEVKFPARLSESARSLLTGLLAKDPTKRLGGGQEDAKEIMEHPFFACINWEDLFNKKIEPPFKPSVKSDTDTRYFDEEFTAEPVELTPPDDNKLSTDSGLPQFEKFSYSGDKGGHL

SEQ ID NO: 10765 - protein, 738 aa, Asterina pectinifera
MPLHQLADPWQKVAVKEQAEGKSSEEMLVDSTNETEDQEMREINITSMAAEGLQKSDPSQFELLKVLGQGSFGKVFLVRKVFGEDSGTLYAMKVLKKATLKVRDRMRTKMERNILVDVNHPFIVKLHYAFQTEGKLYLILDFLRGGDLFTRLSKEVMFTEDDAKLYPAELALALDHLHSLGIIYRDLKPENILLDASGHIKLTDFGLSKESVDNSKTYSFCGTVEYMAPEVVNRRGHTTAADWWSFGVLMFEMLTGALPFQGQHRKETMAMIPKAKLGMPQFLSPEAQSLLRQLFKRNPANRLGAAENGVEDIKKHAFFAHIDFEKLLRKEISPPFKPAVSNADDTFYFDTEFTSRTPKDSPGLPPSASAHQLFRGFSYIAPVLLQEDEMKAATNNTHTQPAKETLPVKHARVTSIAEEYELQDVIGLGSFSKCLRCLHKSSGQQYAVKIIKKGKKEVQEEIEVMLRYGHHPNIITLRDVYDDGQNVYMVMELMKGGELLDKILKKKCLSEREACEIMHVVTKTVDYLHQQRVVHRDLKPSNILYADDSGNPSSLRISDFGFAKQMRADNGMLMTPCYTANFVAPEVLKRQGYDAACDIWSLGVLLYTMLAGYTPFAHGPEDSAEIILARIGEGKFPLNGGNWDHVSPMAEELVRWMLHVDPFKRPSAAKVLQHPWMQHCESLSQNRLTTQDYDLVKGAMKATYLALNNQPKVENLEPVTSSMLAQRRKLKKLSSTTL

SEQ ID NO: 10766 - protein, 963 aa, Pisaster ochraceus
AGFQQNLEYIKEQIKKDIRKELKLKEGAENIRKVTTDKKSIANINNMVKQANIKLHELRQELNELNAHIVVNTDEITAASGDASPMSPVKSDGSTSDDTGAIRTGPTTNSRVFALEKQLAIEMKVKQGAENMIQMYTSGTKDRKLLAEAQQMLQDSKVKIEVIKMEIIKVQQMAGNSFIGDSSNVDGADLGYRRASAADLQLSPLEFRIEELRHHFKIELAVVEGFKNVTKMLSESRSSDKKGLAEAEKGMVESAHKLDILRLALEKRITELPPDHLDKMQQIRDELTSGKSVSYGTLPKPAALTGRLEVRLMGCQDLIESIPNRSKSNSISGGAFSPGESRGLLKGKASFHGRTGSRSSSTRRDELSNDICAILKLDNNPVAQTSFKPISNQCWNQRFSVELDKSRELEISVLYKDWRSLCAVKFLRLEHFLDNQRHGLCLNLEPGGMLFAEITFFNPSIERRTKLQRQRKIFPKYKGKNFLRANQMNINVATWGRLMKRAIPPNCTSPSTLGPAGLGSSLPPPVRERPAIPMQRLSFEGDLPEINQNMETSPKKTNGDPGDKRRVPENELEDVLSAFDFLKSPGSGSAPPTPDLPESESRPIVPSPSTPVPQPSNAVAQHEISSSSFVSMENFRCISVLGRGHFGKVLLAEYKNTGELFAIKALKKGDIIAREEVESLMCESRILETANSMRHPFLVNLFACFQTDAHVCFVMEYAIGGDLMMHIHTDVFSEPRTVFYAACVVLGLQYLHENNIVYRDLKLDNLLLDQEGFLKIADFGLCKEGMGFGDRTSTFCGTPEFLAPEVLTEASYTRAVDWWGLGVLIFEMLVGESPFPGDDEEEVFDSIVNDEVRYPRFLSTEAIAIMRRLLRRNPERRLGSSRRDAEDVKKQAFFRNVQWEELLMRKTTPPFVPNINHPEDVSNFDEEFTQERPVLTPPTRDPRAITDQEQNLFKDFNYTADWC

SEQ ID NO: 10767 - protein, 433 aa, Squalus acanthias
MTIKSSSSGSALTYSKMRGVVAILTAFMKQKRMGLNDLIQKLAASQSYACKHSSEVPAMLHISPAETEMNGTGASPPPSPTTAQINLGPSSNPQAKPSDFNFLKVIGKGSFGKVLLAKHKADDQFYAVKVLQKKAILKKKEEKHIMSERNVLLKNVEHPFLVGLYYSFQTADKLYFVLDYINGGELFYHLQRERCSLEPRARFYAAEIASALGYLHSLKIVYRDLKPENILLDRQGHIVLTDFGLCKENIEPNGTTCTFCGTPEYLAPEVLHKQPYDRTVDWWCLGAVLYEMLYGLPPFYSRNTAEMYDNILNKPLLLKPNISNSARDLLEGLLQKDRTKRLGAKEDFMDIKAHIFFSSINWVDLNAKKLTPPFNPNVSGPADLQHFDPEFTEEPVPNSIGRSPDNALITASVKAASDAFLGFSYAPPMDSFL

SEQ ID NO: 10768 - protein, 594 aa, Squalus acanthias
MKNRTIAGFSVTKCSAFQFLKKRVRRWIRSPKVNVDKHQHTHLNNSDTFVKATPQKDADPQLRCQSTCQECHVCQVMANTQDIEVGVRANGRSCKVKRWKKSDRFNPEKMLAIKTDDPDSCASQMGKVPKLAAQSSIMECHCCQGNITHKTDGSWETRKSAKAKKQCQGELQKHPSAKLFTSNCNPAFMKQKRMGLNDLIQKLAASQSYACKHSSEVPAMLHISPTETEMNGTGASPPPSPTTAQINLGPSSNPQAKPSDFNLLKVIGKGSFGKVLLAKHKADDQFYAVKVLQKKAILKKKEEKHIMSERNVLLKNVKHPFLVGLYYSFQTADKLYFVLDYINGGELFYHLQRERCFLEPRARFYAAEIASALGYLHSLKIVYRDLKPENILLDRQGHIVLTDFGLCKENIEPNGTTCTFCGTPEYLAPEVLHKQPYDRTVDWWCLGAVLYEMLYGLPPFYSRNTAEMYDNILNKPLLLKPNISNSARDLLEGLLQKDRTKRLGAKEDFMDIKAHIFFSSINWVDLNAKKLTPPFNPNVSGPADLQHFDPEFTEEPVPNSIGRSPDNALITASVKAASDAFLGFSYAPPMDSFL

SEQ ID NO: 10769 - protein, 563 aa, Cyprinus carpio
MDIGGLTTVVANSAYISARGSFDGTANPAANRDKKYHAKLKLPHITVCEGLRETLDLQFKSICVEQPIGKRLFQEFLETTNEYKGPCRLWKDIETYDTAEDKDRAQKAAKILQRYMEPSAKHFCPFLPENDITKVKERHEEAADDLFVQIQASVFDFLKEVPFTFYLETMYFKRFLQWKWLEMQPVAEDWFLDFRVLGKGGFGEVSACQMKATGKLYACKKLNKKRLKKRKGYEGAMVEKRILARVHSRFIVSLAYAFQTKTELCLVMTIMNGGDLRYHIYNVDENNPGFSEARACYYAAQIIQGLEHLHQKRIIYRDLKPENVLLDNEGHVRISDLGLAVELADDQLKTKGYAGTPGFMAPELLKGEEYDYSVDYFTLGVTLYEFIAAKGPFRTRGEKVENKEVKKRILNDPVTYPESFSEKAKSVCEGLLAKEVDKRLGFKNGSCDELRTHPFFSEINWRKLDAGILPPPFVPDSKTVYAKNLDDVGAFSTVKGVCLEDDDKTFYDEFASGNISIPWQEEMIETGIYGELNVWGPNGTVPNDLRRESILEQPPKSSTCSIS

SEQ ID NO: 10770 - protein, 563 aa, Oryzias latipes
MDIGGLTTVVANSAYISARGSFDGTANPAANRDKKFHSRLKLPHITVCEGLRETLDLGFQTVCVEQPIGKRLFQEFLDSINEYKGPSRLWKDIEEYNMAEDEDRAKKASKILSRYMEPDAKHYCPFLPENGITKVKEKHKEAGDELFSETMDSVMDFLKEVPYTFFLESMYLKRFLQWKWLEMQPIGEDWFLDFRVLGKGGFGEVSACQMRATGKLYACKKLNKKRLKKRKGYEGAMVEKRILARVHSRFIVSLAYAFQSKTELCLVMTIMNGGDLRYHIYNVDENNPGFDEPRACYYAAQIIQGLEHLHQKRIIYRDLKPENVLLDNEGHVRISDLGLAVELADDQFKIKGYAGTPGFMAPELLNGEEYDYCVDYFTLGVTLYEFLAAKGPFRTRGEKVENKVVKKRILNDPVTYPEKFSENGKSICEGLLCKEADKRLGFKNGSCDELRTHPFFSQINWRKLNAGILPPPFVPDSKTVYAKDLDDVGAFSTVKGVQLEDVDTVFFDEFASGNIAIPWQEEMIETGIYGELTVWGPGGALPNDLRRESILEQPPKSSTCCAS

SEQ ID NO: 10771 - protein, 353 aa, Apis mellifera carnica
MGNNAATANKKVDAAESVKEFLDKAKKEFEDKWKRNPTNTAGLDDFERIKTLGTGSFGRVMIVQHKPTGEYYAMKILDKQKVVKLKQVEHTLNEKRILQAISFPFLVSLRFHFKDNSYLYMVLEYVPGGEMFSHLRKVGRFSEPHSRFYAAQIVLAFEYLHYLDLIYRDLKPENLLIDSQGYLKVTDFGFAKRVQGRTWTLCGTPEYLAPEIILSKGYNKAVDWWALGVLVYEMAAGYPPFFADQPIQIYEKIVSGKPRFPSHFGSDLKDLLRNLLQVDLTKRYGNLKAGVNDIKGHKWFASTDWIAVFQKKIEAPFIPKCKGPGDTSNFDDYEEETLRISLTEKCAKEFAEF

SEQ ID NO: 10772 - protein, 350 aa, Canis familiaris
MGNAAAKKGSEQESVKEFLAKAKEDFLKKWENPAQNTAHLDQFERIKTLGTGSFGRVMLVKHKETGNHFAMKILDKQKVVKLKQIEHTLNEKRILQAVNFPFLVKLEFSFKDNSNLYMVMEYVPGGEMFSHLRRIGRFSEPHARFYAAQIVLTFEYLHSLDLIYRDLKPENLLIDQQGYIQVTDFGFAKRVKGRTWTLCGTPEYLAPEIILSKGYNKAVDWWALGVLIYEMAAGYPPFFADQPIQIYEKIVSGKVRFPSHFSSDLKDLLRNLLQVDLTKRFGNLKNGVNDIKNHKWFATTDWIAIYQRKVEAPFIPKFKGPGDTSNFDDYEEEEIRVSINEKCGKEFCEF

SEQ ID NO: 10773 - protein, 350 aa, Sus scrofa
GNAAAAKKGSEQESVKEFLAKAKEDFLKKWENPAQNTAHLDQFERIKTLGTGSFGRVMLVKHKETGNHFAMKILDKQKVVKLKQIEHTLNEKRILQAVNFPFLVKLEYSFKDNSNLYMVMEYVPGGEMFSHLRRIGRFSEPHARFYAAQIVLTFEYLHSLDLIYRDLKPENLLIDQQGYIQVTDFGFAKRVKGRTWTLCGTPEYLAPEIILSKGYNKAVDWWALGVLIYEMAAGYPPFFADQPIQIYEKIVSGKVRFPSHFSSDLKDLLRNLLQVDLTKRFGNLKDGVNDIKNHKWFATTDWIAIYQRKVEAPFIPKFKGPGDTSNFDDYEEEEIRVSINEKCGKEFSEF

SEQ ID NO: 10774 - protein, 350 aa, Sus scrofa
GNAAAAKKGSEQESVKEFLAKAKEDFLKKWENPAQNTAHLDQFERIKTLGTGSFGRVMLVKHKETGNHFAMKILDKQKVVKLKQIEHTLNEKRILQAVNFPFLVKLEYSFKDNSNLYMVMEYVPGGEMFSHLRRIGRFSEPHARFYAAQIVLTFEYLHSLDLIYRDLKPENLLIDQQGYIQVTDFGFAKRVKGRTWTLCGTPEYLAPEIILSKGYNKAVDWWALGVLIYEMAAGYPPFFADQPIQIYEKIVSGKVRFPSHFSSDLKDLLRNLLQVDLTKRFGNLKNGVNDIKNHKWFATTDWIAIYQRKVEAPFIPKFKGPGDTSNFDDYEEEEIRVSINEKCGKEFSEF

SEQ ID NO: 10775 - protein, 480 aa, Bos taurus
MNDVAIVKEGWLHKRGEYIKTWRPRYFLLKNDGTFIGYKERPQDLEQRESPLNNFSVAQCQLMKTERPRPNTFIIRCLQWTTVIERTFHVETPEEREEWTTAIQTVADGLKRQEEETMDFRSGSPGENSGAEEMEVSLAKPKHRVTMNEFEYVKLLGKGTFGKVILVKEKATAAYYAMKILKKEVIVAKDEVAHTLTENRVLQNSRHPSLTALKYSFQTHDRLCFVMEYANGGELFFHLSRERVFSEDRARFYGAEIVSALDYLHSEKEVVYRDLKLENLMLDKDGHIKITDFGLCKEGIKDGATMKTFCGTPEYLAPEVLEDNDYGRAVDWWGLGVVMYEMMCGRLPFYNQDHEKLFELILMEEIRFPRTLSPEAKSLLSGLLKKDPKQRLGGGSEDAKEIMQHRFFASIVWQDVYEKKLSPPFKPQVTSETDTRYFDEEFTAQMITITPPDQDDSMEGVDSERRPHFPQFSYSASATA

SEQ ID NO: 10776 - protein, 350 aa, Bos taurus
  unsure (1)..(350): unsure at all Xaa locations
GNAAAAKKGSEQESVKEFLAKAKEDFLKKWENPAQNTAHLDQFERIKTLGTGSFGRVMLVKHMETGNHYAMKILDKQKVVKLKQIEHTLNEKRILQAVNFPFLVKLEFSFKDNSNLYMVMEYVAGGEMFSHLRRIGRFSEPHARFYAAQIVLTFEYLHSLDLIYRDLKPENLLIDQQGYIQVTDFGFAKRVKGRTWXLCGTPEYLAPEIILSKGYNKAVDWWALGVLIYEMAAGYPPFFADQPIQIYEKIVSGKVRFPSHFSSDLKDLLRNLLQVDLTKRFGNLKDGVNDIKNHKWFATTDWIAIYQRKVEAPFIPKFKGPGDTSNFDDYEEEEIRVXINEKCGKEFSEF

SEQ ID NO: 10777 - protein, 351 aa, Bos taurus
MGNAAAAKKGSEQESVKEFLAKAKEDFLKKWENPAQNTAHLDQFERIKTLGTGSFGRVMLVKHMETGNHYAMKILDKQKVVKLKQIEHTLNEKRILQAVNFPFLVKLEFSFKDNSNLYMVMEYVPGGEMFSHLRRIGRFSEPHARFYAAQIVLTFEYLHSLDLIYRDLKPENLLIDQQGYIQVTDFGFAKRVKGRTWTLCGTPEYLAPEIILSKGYNKAVDWWALGVLIYEMAAGYPPFFADQPIQIYEKIVSGKVRFPSHFSSDLKDLLRNLLQVDLTKRFGNLKNGVNDIKNHKWFATTDWIAIYQRKVEAPFIPKFKGPGDTSNFDDYEEEEIRVSINEKCGKEFSEF

SEQ ID NO: 10778 - protein, 350 aa, Bos taurus
  unsure (1)..(350): unsure at all Xaa locations
GNAAAAKKGXEQESVKEFLAKAKEDFLKKWENPAQNTAHLDQFERIKTLGTGSFGRVMLVKHMETGNHYAMKILDKQKVVKLKQIEHTLNEKRILQAVNFPFLVKLEFSFKDNSNLYMVMEYVPGGEMFSHLRRIGRFSEPHARFYAAQIVLTFEYLHSLDLIYRDLKPENLLIDQQGYIQVTDFGFAKRVKGRTWXLCGTPEYLAPEIILSKGYNKAVDWWALGVLIYEMAAGYPPFFADQPIQIYEKIVSGKVRFPSHFSSDLKDLLRNLLQVDLTKRFGNLKNGVNDIKNHKWFATTDWIAIYQRKVEAPFIPKFKGPGDTSNFDDYEEEEIRVXINEKCGKEFSEF

SEQ ID NO: 10779 - protein, 682 aa, Bos taurus
RPLFCRKGALRQKVVHEVKSHKFTARFFKQPTFCSHCTDFIWGIGKQGLQCQVCSFVVHRRCHEFVTFECPGAGKGPQTDDPRNKHKFRLHSYSSPTFCDHCGSLLYGLVHQGMKCSCCEMNVHRRCVRSVPSLCGVDHTERRGRLQLEIRAPTSDEIHVTVGEARNLIPMDPNGLSDPYVKLKLIPDPRNLTKQKTRTVKATLNPVWNETFVFNLKPGDVERRLSVEVWDWDRTSRNDFMGAMSFGVSELLKAPVDGWYKLLNQEEGEYYNVPVADADNCNLLQKFEACNYPLELYERVRTGPSSSPIPSPSPSPTDSKRCFFGASPGRLHISDFSFLMVLGKGSFGKVMLAERRGSDELYAIKILKKDVIVQDDDVDCTLVEKRVLALGGRGPGGRPHFLTQLHSTFQTPDRLYFVMEYVTGGDLMYHIQQLGKFKEPHAAFYAAEIAIGLFFLHNQGIIYRDLKLDNVMLDAEGHIKITDFGMCKENVFPGSTTRTFCGTPDYIAPEIIAYQPYGKSVDWWSFGVLLYEMLAGQPPFDGEDEEELFQAIMEQTVTYPKSLSREAVAICKGFLTKHPAKRLGSGPDGEPTIRAHGFFRWIDWDRLERLEIAPPFRPRPCGRSGENFDKFFTRAAPALTPPDRLVLASIDQAEFQGFTYVNPDFVHPDARSPISPTPVPVM

SEQ ID NO: 10780 - protein, 343 aa, Ovis aries
MASNPNDVKEFLAKAKEDFLKKWENPAQNTAHLDQFERIKTLGTGSFGRVMLVKHTETGNHYAMKILDKQKVVKLKQIEHTLNEKRILQAVNFPFLVKLEFSFKDNSNLYMVMEYVPGGEMFSHLRRIGRFSEPHARFYAAQIVLTFEYLHSLDLIYRDLKPENLLIDQQGYIQVTDFGFAKRVKGRTWTLCGTPEYLAPEIILSKGYNKAVDWWALGVLIYEMAAGYPPFFADQPIQIYEKIVSGKVRFPSHFSSDLKDLLRNLLQVDLTKRFGNLKNGVNDIKNHKWFATTDWIAIYQRKVEAPFIPKFKGPGDTSNFDDYEEEEIRVSINEKCGKEFSEF

SEQ ID NO: 10781 - protein, 351 aa, Ovis aries
MGNAAAAKKGSEQESVKEFLAKAKEDFLKKWENPAQNTAHLDQFERIKTLGTGSFGRVMLVKHTETGNHYAMKILDKQKVVKLKQIEHTLNEKRILQAVNFPFLVKLEFSFKDNSNLYMVMEYVPGGEMFSHLRRIGRFSEPHARFYAAQIVLTFEYLHSLDLIYRDLKPENLLIDQQGYIQVTDFGFAKRVKGRTWTLCGTPEYLAPEIILSKGYNKAVDWWALGVLIYEMAAGYPPFFADQPIQIYEKIVSGKVRFPSHFSSDLKDLLRNLLQVDLTKRFGNLKNGVNDIKNHKWFATTDWIAIYQRKVEAPFIPKFKGPGDTSNFDDYEEEEIRVSINEKCGKEFSEF

SEQ ID NO: 10782 - protein, 259 aa, Mus musculus
MAPAEARGALPGWISVLGWGLALCSLCGAGPLWSGSHEWKKLILTQHWPPTVCKEVNSCQDSLDYWTIHGLWPDRAEDCNQSWHFNLDEIKDLLRDMKIYWPDVIHRSSNRSQFWKHEWVKHGTCAAQVDALNSEKKYFGKSLDLYKQIDLNSVLQKFGIKPSINYYQLADFKDALTRIYGVVPKIQCLMPEQGESVQTVGQIELCFTKEDLHLRNCTEPGEQLSSRQEAWLAMEASTHGMMVCEDGPIFYPPPTKTQH

SEQ ID NO: 10783 - protein, 214 aa, Rattus norvegicus
MAEARSTFQGWVSVLGWGLALRCLCGAGPLWSGSHDWKKLILTQHWPPTVCKEVNRCRDSLDYWTIHGLWPDRAEDCNQSWHFNLDEIKDLLRDMKIYWPDVIHPSSNRSQFWKHEWDKHGTCAAQVDALNSERKYFGKSLDLYKQIDLNSVLQKFEIKPSINYYQLADFKDALTRIYGVVPKIQCLMPEQGENVQTIGQIELCFTKEDFHLRN

SEQ ID NO: 10784 - protein, 162 aa, Rattus norvegicus
MKIYWPDVIHPSSNRSQFWKHEWDKHGTCAAQVDALNSERKYFGKSLDLYKQIDLNSVLQKFEIKPSINYYQLADFKDALTRIYGVVPKIQCLMPEQGENVQTIGQIELCFTKEDFHLRNCTEPEEQPSSGQEARLAREASTHGMMVCEDGPIFYPPPKSQH

SEQ ID NO: 10785 - protein, 224 aa, Prunus mume
MAMLKSSLAFLVLAFAFFVCFIMSTGDGSYDYFQFVQQWPPTTCRVRGKCSNPRPIQIFTIHGLWPSNYSNPTTPSNCIGSQFKESMVSPRLRSKLKRSWPNVEGSNDTRFWEGEWNKHGRCSQQTLNQYQYFERSHEMWHFHNITNILKNASIVPHPTQTWTYSDIVSTIKAVTQTTPLVRCKQHKKTQLLHEVVLCFEYKALKQIDCNRTAGCPNQQAISFQ

SEQ ID NO: 10786 - protein, 180 aa, Prunus mume
GFAFFFCYVMSSGSYDYFQFVQQWPPTNCRVRTKCSKPRPLQMFTIHGLWPSNYSNPTMPSNCNGSQFDARKVSPQLRNKLKRSWPDVESGNDTKFWEGEWNKHGTCSEQTLNQFQYFERSQDMWRSYNITEILKNASIVPSATQTWTYSDIVAPIKTATKRTPLLRCKYDKKTQLLHEV

SEQ ID NO: 10787 - protein, 221 aa, Prunus mume
MAILKSTLAFLVLAFAFFFCCVMSTGSYDYFQFVQQWPPTNCKFRKCSKPRPLQRFTIHGLWPSNYSNPTRPSNCTGLQFEARKVYPQLQSDLKISWPDVESGNDTKFWEDEWNKHGKCSEQTLNQRQYFERSHAMWTSFNITEILKNASIVPHPKKTWSYSDIVAPIKTATERTPLLRCKLDKKTQLLHEVVFCYEYKAKKQIDCNRTAGCGHQPAISFQ

SEQ ID NO: 10788 - protein, 183 aa, Prunus mume
GFAFFVCFIMSTGDGSYDYFQFVQQWPPTTCRVRGKCSNPRPIQIFTIHGLWPSNYSNPTTPSNCIGSQFKESMVSPRLRSKLKRSWPNVEGSNDTRFWEGEWNKHGTCSQQTLNQYQYFERSHEMWHFHNITNILKNASIVPHPTQTWTYSDIVSTIKAVTQTTPLLRCKQHKKTQLLHEVV

SEQ ID NO: 10789 - protein, 181 aa, Prunus mume
GFAFFFCYVMSSGSYDYFQFVQQWPPTNCRARRRPCSKPRPLQNFTIHGLWPSNYSNPTMPSNCKGSQFEARKVYPQLQSNLKIAWPDVESGNDTRFWEGEWNKHGRCSEQTLNLMQYFERSYGMWKSYNITEILKNASIVPHPTQTWTYADIVSPIKTATKRTPLLRCRQDKNTQLLHEV

SEQ ID NO: 10790 - protein, 226 aa, Prunus mume
MTTLKSSTALLVLAFAFFFCFIMSTTGSYVYFQFVQQWPPTTCRFSSKPSNQQRRLQIFTIHGLWPSNYSNPRMPSNCTGSQFNFTKVYPQLRSKLKKSWPDVESGNDTRFWESEWNKHGTCSEEKLNQMQYFERSHEMWNFHNITKILENASIVPSATQKWSYSDIVSAIKARTQTTPSLRCKRDKKTQLLHLHEVVLCYEYNALKQIDCNRTATCGNQQAIWFQ

SEQ ID NO: 10791 - protein, 154 aa, Prunus mume
RMPSNCTGSQFNFTKVYPQLRSKLKKSWPDVESGNDTRFWESEWNKHGTCSEEKLNQMQYFERSHEMWNFHNITKILENASIVPSATQKWSYSDIVSAIKARTQTTPSLRCKRDKKTQLLHLHEVVLCYEYNALKQIDCNRTATCGNQQAIWFQ

SEQ ID NO: 10792 - protein, 87 aa, Prunus mume
FVQQWPPTNCRVRTKCSKPRPLQMFTIHGLWPSNYSNPTMPSNCNGSQFDARKVSPQLRNKLKRSWPDVESGNDTKFWEGEWNKHGT

SEQ ID NO: 10793 - protein, 87 aa, Prunus mume
FVQQWPPTTCRVRGKCSNPRPIQIFTIHGLWPSNYSNPTTPSNCIGSQFKESMVSPRLRSKLKRSWPNVEGSNDTRFWEGEWNKHGT

SEQ ID NO: 10794 - protein, 89 aa, Prunus mume
FVQQWPPTNCRVRIKRPCSKPRPLQNFTIHGLWPSNFSNPTKPSNCNGSKYEDRKVYPKLRSKLKRSWPDVESGNDTRFWEDEWNKHGT

SEQ ID NO: 10795 - protein, 142 aa, Antirrhinum graniticum
PYSYCSLKKSHCKRAHLPSEFTIHGLWPDNKSYPLLNCPHTYTVLKIENKGLVKKLRVNWPDLTRLKKFQGQKFWITQWKKHGSCALPLYSFEDYFIKALDLKKKSNVLNMLERKSLVPGDQPVDIGDVTAAVVKVTGGFPL

SEQ ID NO: 10796 - protein, 145 aa, Antirrhinum graniticum
PKSFCSLKTSTCLRSPLPKIFTIHGLWPDNYSWPLRDCKYKVYQLPKLQDGVLLEDLDKKWPDLTKRRRKGEPPDKDFWISQWKKHGSCALSVYKFRDYFDEALNLKNKYNFLTILRENGVIPGDVYDTKRVAGIIHAATKHDPA

SEQ ID NO: 10797 - protein, 144 aa, Antirrhinum graniticum
PKSFCLVNSRKCQRNPLPSNFTIHGLWPDNYTRQAPQSCTTNNFQRFTDTDIEQRMEESWPDLKQPSIAGLSYNFWQDQWRKHGSCCFPPHESEIYFLKALELKDRLDVLTILENNNFNPGTPQPFSVLRVFNTISRAIGKTPI

SEQ ID NO: 10798 - protein, 145 aa, Antirrhinum graniticum
PKSYCSLTTTTCRRNPLPSRFTIHGLWPDNYSWPLNECGFDFDLPVIKDKGLLRKLDKKWPDLTKRKRKPIRDADKKFWMSQWVKHGTCALSVYTFDDYFQETLKLKSRFNLLKILQDSQIRPGDLVDPALVVQAIKKYTKHVST

SEQ ID NO: 10799 - protein, 145 aa, Antirrhinum graniticum
PKSFCSLKTSTCVRTPLPAKFTIHGLWPDNYSWPLRDCKYTIQLPKLEDIDLLKTLDKEWPDLMKRRPRLNEIPKKKFWISQWEKHGSCALSVYSFEEYFQETLKLKRRFNILKILRKNSMRPGDDVDPKKVVSSIAEVTQHDPA

SEQ ID NO: 10800 - protein, 145 aa, Misopates orontium
PKSYCSLTTTTCRRNPLPSRFTIHGLWPDNYCWPLNECGFDFDLPVIKDKGLLRKLDKNWPDLTKRKRKPIRDADKKLWMSQWVKHGTCALSVYTFDDYFQETLKLKSRFNLLKILQDSQIRPGNLVDPALVVQAIKKYTKHVST

SEQ ID NO: 10801 - protein, 144 aa, Antirrhinum majus subsp. cirrhigerum
PKSFCLVNSRKCQRNPLPSNFTIHGLWPDNYTRQAPQSCTTNNFQRFTDTDIEQRMEESWPDLKQQSIAGLSYNFWQDQWRKHGSCCFPPHESEIYFLKALELKDRLDVLTILENNNFNPGTPQPFSVLRVFNTISRAIGKTPI

SEQ ID NO: 10802 - protein, 145 aa, Antirrhinum majus subsp. cirrhigerum
PKSYCSLTTTTCRRNPLPSRFTIHGLWPDNYSWPLNECGFDFDLPVIKDKGLLRKLDKNWPDLTKRKRKPIRDADKKFWMSQWVKHGTCALSVYTFDDYFQETLKLKSRFNLLKILQDSQIRPGNLVDPALVVQAIKKYTKHVST

SEQ ID NO: 10803 - protein, 145 aa, Antirrhinum majus subsp. cirrhigerum
PKSYCSLTTTTCRRNPLPSRFTIHGLWPDNYSWPLNECGFDFDLPVIKDKGLLRKLDKNWPDLTKRKRKPIRDADKKFWMSQWVKHGTCALSVYTFDDYFQETLKLKSRFNLLKILQDSQIRPGNLVDPALVVQVIKKYTKHVST

SEQ ID NO: 10804 - protein, 146 aa, Antirrhinum majus subsp. cirrhigerum
PKSYCSLETSRCLRKPLPSKFTIHGLWPDNYSWPLRDCKYTIQLPKLEDTAGLLDELDKDWPDLTKRRPRPNETPNKKFWISQWEKHGSCALSVYTFEEYFTETLKMKRRFNILGILGKNSMRPGDNVDPKKVVRSISKYTKHDAA

SEQ ID NO: 10805 - protein, 143 aa, Antirrhinum majus subsp. linkianum
PNSYCSLKTSTCRRNPLPLKFTIHGLWPDNYSWPLSDCGYDFTLPDITDKSLLKRLDRNWPDLTKRKNIRKPDKTFWLTQWEKHGTCALSVYTFDDYFRETLNMKRRFNILDMLQRKSMRPGDRVDPQEVARAISKVTKHEPE

SEQ ID NO: 10806 - protein, 225 aa, Malus transitoria
MSRMVYVVTMVFLLIVLILSSSTVGYDYFQFTQQYQLAVCNSNRTLCKDPPDKLFTVHGLWPSSMVGPDPSKCPIKNIRKREKLLEPQLEIIWPNVFDRTKNNLFWDKEWMKHGSCGYPTIDNENHYFETVIKMYITKKQNVSEILSKAKIEPDGKKRTLLDIENAIRNGADNKKPKLKCQKKGRMTELVEVTLCSDKSGEHFIDCPHPFEPISPHFCPTNNIKY

SEQ ID NO: 10807 - protein, 226 aa, Malus transitoria
MGTGIIYMVMMVFSLILLILSSSTVGFDYYQFTQQYQPAVCHSNPTPCKDPPDKLFTVHGLWPSDSNGNDPKYCKAPPYQTIKILEPQLAIIWPNVLNRNDHEGFWRKQWEKHGSCASSPIQNQKHYFDTVIKMYTTQKQNVSEILSKANIKPGRKNRTLVDIENAIRNVINNMTPKFKCQKNTRTSLTELVEVGLCSDSNLTQFINCPRPFPQGSRYFCPTSIQY

SEQ ID NO: 10808 - protein, 118 aa, Witheringia maculata
NWSGRLLHCIPNYTFVKIEIGEKSDILDKSWPQLENTKTDGLKRQTFWERQYKKHGTCCKNKYTKEAYFNLAINLKDRFDILKILSDQGIIPGKKYVVQKVHDAIETVTRQPPKLTCT

SEQ ID NO: 10809 - protein, 226 aa, Syncephalastrum racemosum
ADSCPADALSCSATSGDSCCSPTNGLLVLVQQWLKDYGPNTAFTLHGLWPDTCSGGIPGSGNTGCDSSRNVDDVGSVIKSGDSSLYSQMSQYWPSYTGDNSEFWTHEWNKHGTCVTTLDPDCFGASYTDNEDMFTYFQQAIDLRAKYNLYTILKDAGITPGGSYSVSALESAIEKSTGSTPKITCSSGAISEIWLYFHVKGTDSYVPTDAVDKSTCSGTVIYPAKS

SEQ ID NO: 10810 - protein, 237 aa, Prunus cerasus
MVTLKSSLAFLVLAFALFLCFIMSTGDGSYDYFQFVQQWPPATCSLSRTPCYKPRPPQIFTIHGLWPSNYSNPKRPSNCRGSLFDSRKVYPQLRLNLKISWPNVKSGNDTEFWESEWNKHGRCSEQTLNQMQYFERSDEMWNSYNITEILKKAQIVPNATRTWKYSDILSPIKAATNTTPILRCKPDPAQSKSQPSQPKSPQKPQLLHEVVFCYDYHAKKQIDCNRTGCLNKDISFQ

SEQ ID NO: 10811 - protein, 150 aa, Crataegus monogyna
AVCNSSTTPCKDPADKLFTVHGLWPSNWNGSHPQNCTNKTMNSLTIGNLTAQLETIWPNVLNRNDHLGFWNRQWNKHGTCGAPTINDSLQYFRTVINMYITQKQNVSQILAKANIKPEGKNRTLVDIVTAIRSATNNKAPKLKCQKKAST

SEQ ID NO: 10812 - protein, 139 aa, Crataegus monogyna
AVCNSNPTPCNDPTDKLFTVHGLWPSNKNGPDPEKCKTTALNSQKIGNMTAQLEIIWPNVLNRSDHVGFWEKEWIKHGTCGYPTIKDDMHYLQTVIRMYITQRQNVSAILSKAMIQPNGTNRPLVDIENAIRRGTNNTK

SEQ ID NO: 10813 - protein, 149 aa, Crataegus monogyna
AVCNSNPPPCKDPPDKLFTVHGLWPSNWNGTDPDYCKKTTFDAKRITNLHAELDIIWPNVYDRTDNAGFWGRQWEKHGICGSPTIQDDVNYFETVVNMYITEKQNVSEILSKGTIEPEGKQRAREDILKAIRKGTKGKRPKLKCKKNNR

SEQ ID NO: 10814 - protein, 150 aa, Crataegus monogyna
  unsure (1)..(150): unsure at all Xaa locations
AVCNSNPTPCNDPPDKMFTVHGLWPSNKNGPDPEKCKNIQMNSQKIGNMTAQLEIIWPNVLNRTDHVGFWEREWLKHGTCGYPTIRDDMHYLKTVIKMYITQKQNVSAILSKAMIQPNGKNRSLVAIENAIRSGTNXMKPKFKCQKNTRT

SEQ ID NO: 10815 - protein, 149 aa, Crataegus monogyna
  unsure (1)..(149): unsure at all Xaa locations
AVCYFNPTPCKDPPDKLFTVHGLWPSNLNGHHPENCTNATVNSQRLTNIQAQLKTIWPNVLDRTNNVGFWNKQWIKHGSCGNPPIMXDTHYFQTVINMYITQKQNVSGILSKAKIEPVGGKRPLVDIENAIRKSINNKKPKFKCQMKNK

SEQ ID NO: 10816 - protein, 140 aa, Crataegus monogyna
AACKFHHTPCKDPPDKLFTVHGLWPSNFNGPDPENCKVKPTASQTIDTSLKPQLEIIWPNVFNRADHEGFWQRQWDKHGTCGSPTIIDKNHYFETVIRMYITEKQNVSYILSKANINPDGKGRTRKDIQIAIRNSTNDKE

SEQ ID NO: 10817 - protein, 150 aa, Crataegus monogyna
AVCNSNSIPCKDPPDKLFTVHGLWPSDSNGHDPVNCSKTTVDAQKLGNLTTQLEIIWPNVYKRTDHISFWNKQWTKHGSCGHPTIMNDIHYFQTAIKMYITQNQNVSKILSQAKIEPEGKPRKQVDIVNAIRKGIDDKEPKLKCQKHNQV

SEQ ID NO: 10818 - protein, 139 aa, Crataegus monogyna
AVCNSYRIPCKDPPDKLFTVHGLWPSNWNGYDPIYCKQTNLDANKIAYLQAQLDIIWPNVYNRSDNVGFWSRQWEKHGICGSTTIHDDVNYFETVINMYIAQKQNVSEILSKAKIEPEGKNRTRVEIIKAIRNGTNGKR

SEQ ID NO: 10819 - protein, 150 aa, Crataegus monogyna
AACNSNPTPCNDRTDKLFTVHGLWPSKVKGPDPHDCKTKTNKSQTIDTSLKPQLGIIWPNVFNRADNESFWETQWEKHGTCGSPTIKDKNHYFETVIRMYITEKQNVSHYLSKANINPDGIARKRKDIEIAIRNSTNDKEPKLRCHTKNG

SEQ ID NO: 10820 - protein, 149 aa, Crataegus monogyna
AVCNSSRTPCKDPPDKLFTVHGLWPSSMVGPDPSNCPIKNIRKREKLLEPQLEIIWPNVFDRTKNKLFWDKEWMKHGSCGYPTIDNENHYFETVIKMYITKKQNVSRILSKAKIEPDGKKRALLDIENAIRNGADNKKPKLKCQKKGTT

SEQ ID NO: 10821 - protein, 139 aa, Crataegus monogyna
AVCSSNPTPCKDPPDKLFTVHGLWPSNVNGSEPKKCKTTILNPQTITNLIAQLKIIWPNVLNRKAHVRFWRKEWRRHGTCVYPTIADDMHYFSTVIEMYITKKQNVSEILSKANIKPEKKFRTRDDIVNAISPSIDYKK

SEQ ID NO: 10822 - protein, 138 aa, Crataegus monogyna
  unsure (1)..(138): unsure at all Xaa locations
AVCHFNPTPCXDPPDKLFTVHGLWPSNSTGNDPIYCKNTTLNSTKIANLTAQLEIIWPNVLDRTDHITFWNKQWIKHGSCGHPAIQNDMHYLQTVIKMYITQKQNVSEILSKAKIEPVGRFWTQKEIEKAIRKGPTIR

SEQ ID NO: 10823 - protein, 138 aa, Crataegus monogyna
AVCNSNPTPCNDPPDKMFTVHGLWPSSMVGPDPSNCPIRKFWKREKLLEPQLEIIWPNVFDRTKNKVFWDKEWMKHGTCGYPTIDNENHYFETVIKMYITKKQNVSEILSKAKIEPDGKKRTLLDIENAIRNGADNKK

SEQ ID NO: 10824 - protein, 150 aa, Crataegus monogyna
AVCNSNPTPCNDPPDKLFTVHGLWPSNKNGPDPKKCKNIQMNSQKIGNMTAQLEIIWPNVLNRTDHVGFWEREWLKHGTCGHPTIKGDMHYLKTVIKMYITQKQNVSAILSKAMIQPSGRNRSLVDIENAIRSSTNNMKPKFKCQKNTRT

SEQ ID NO: 10825 - protein, 139 aa, Crataegus monogyna
AVCNSKPTPCKDPTDKLFTVHGLWPSNFNGPHPENCTNTTVNLQRIQNIHAQLKIIWPNVLDRTNHVGFWNKQWIKHGSCGNPPIMNDTHYFQTVINMYVTQKQNVSEILSRAKIEPLGIQRPLVHIEKAIRNSINKKK

SEQ ID NO: 10826 - protein, 142 aa, Antirrhinum meonanthum
PNSYCSLEKSNCRRSRLPLEFTIHGLWPDNKSWPLLNCPYKSIPKIEDKELVKKLDIHWPDLTRRRKRIPEQKFWITQWKKHGTCAFPRYSFKDYFIQAIELKKKNNVLHMLEDKSLVPGDQPVDISDVHAAVLKVTGGAPI

SEQ ID NO: 10827 - protein, 145 aa, Antirrhinum meonanthum
PKSFCSLKTSTCVRTPLPAKFTIHGLWPDNYSWPLRDCKYTIQLPKLEDIDLLKTLDKEWPDLMKRRPRLNEIPKKKFWISQWEKHGSCALSVYSFEEYFQETLKLKRRSNILKILRKNSMRPGDDVDPKKVVSSIAEVTQHDPA

SEQ ID NO: 10828 - protein, 146 aa, Antirrhinum meonanthum
PKSYCSLETSRCLRKPLPSKFTIHGLWPDNYSWPLRDCKYTIQLPKLEDTAGLLDELDKDWPDLTKRRPRPNETPNKKFWISQWEKHGSCALSVYTFEEYFTETLKMKRRFNILGILGKNSMRPGDNVDPKKVVRSISKYTKHDVA

SEQ ID NO: 10829 - protein, 125 aa, Physalis longifolia
EKKGVDKLTFCSAQPNYTLFKDKKMLDDLDKHWIQLMYSKEKGLQKQEFWKRQYEKHGTCCLNRYNQTAYFSLALHLKEKIDLLSTLHNSGIDPGENYTFQEIAKAIKTVTNADSLFKCVKRTTQ

SEQ ID NO: 10830 - protein, 124 aa, Physalis longifolia
DTGRRLIYCIPNYVFLKIEQGEKSDILDKSWPQLEYNKTDGLDKQAFWERQYKKHGTCCKNKYTQEAYFNLAIKLKDRFDVLKILGDQGIIPGNKYAFQKVHDAIKKVIRRPPKLMCTEASQVL

SEQ ID NO: 10831 - protein, 276 aa, Antirrhinum mollissimum
MAVLTARPLNPAAIQCACFVILWIGLLCVNVGINGSGDLGEKLGANQRDFDYFHLALQWPGTFCRRTRHCCPTNGCCRGSNAPAEFTIHGLWPDYNDGSWPSCCTGKKFEEKEISTLLGDLNKYWPSLSCGSPSNCHGGKGLFWEHEWEKHGTCSSSVTGAEYNYFVTALKVYFKYNVTEVLREAGYVASNSEKYPLGGIVTAIQNAFHATPELKCSGDAVEELYLCFYKNFEPRDCATKSNKKSCPRYVSLPEYSSLKMANDGNEVSESALDSDI

SEQ ID NO: 10832 - protein, 232 aa, Antirrhinum mollissimum
LSLIVVGIVLLSKSCTITTAYFQYFRLVLHWPFSYCSLPDSKCKRTPLPSIFTIHGLWPNNYSQPLSDCNILVPFTNIYDQPLLQRMMRSWPDLNQPMNTGPSHNFWSYQWKKHGSCSLPRYSQTSYLFKALELYDRFNVLQILTDGRLAPGDNYTVSQINITIIQEIGAIPTVKCRSGFLTEVVICFDRRGKAVINCPFQFSYPCTDAKVEFPISGPPVTPLLHINIKDRI

SEQ ID NO: 10833 - protein, 235 aa, Antirrhinum mollissimum
MSTNKQTHIFFLVVCLVLFPDYAFTGRPPVGFEYLKLWLQWPPSFCSLSRVACGRDPVPAEFTIHGLWPDNYSHELNYCKSNKQLSVQIEDIGEWLDKDWPDLMKQATVNPDKGFYEEQWRKHRICSSNIFTPKEYFTLGMKLKKARNLLQVFHQNEIYESQFSSISRINKAIKIITGRQSPIVKCSRHPQKGSLLTEVILCFDLKGDYFKNCTDPFGRACPKSTNVFFPKKVIV

SEQ ID NO: 10834 - protein, 314 aa, Anopheles gambiae str. PEST
TELMHTITDRVASSSLRLSNRPSEDGIDRTEHFFGAMKLSIRIICALLFVQLCFAAPNSNRYDDEDSRENSIADVEQDTQVHQFDLLIFTQRWPITACYEWRETGKEHICGLPTPATVWTIHGIWPTKLNTIGPAFCNKSAIFDVSQLSPIEPQLEAHWVNVEKNKPDDSLWEHEWLKHGTCAAEAIEQLNTEAKYFGQGLSWLEQHSVSAAFATNGDIKPGFNYSLPTLNKALYDYYGKNVAIECFFDRKTHQQFLNEVRICFDKQLQSADCDGIVGLERIALPNSRVGTVISNCNAAKPIFYPDAVPKKQEE

SEQ ID NO: 10835 - protein, 238 aa, Aspergillus saitoi
TIDTCSSDSPLSCQTDNEASCCFNSPGGSLLQTQFWDYDPSDGPSDSWTIHGLWPDNCDGSYQEYCDDSREYSNITSILEAQDRTELLSYMKEYWPDYEGADEDESFWEHEWNKHGTCINTIDPSCYTDYYAQEEVGDFFQQVVDLFKTLDSYTALSDAGITPSEDATYKLSDIEDALAAIHDGYPPYVGCEDGALSQLYYYFNVKGSAIGGTYVASERLEDSNCKGSGIKYPPKSSS

SEQ ID NO: 10836 - protein, 200 aa, Magnetospirillum magnetotacticum
MLASTAAQADQCGPVRGRTGNFDYYLLSLSWSPSYCATTSGKQNPRQCGAEQRYGMVVHGLWPQHSDGTWPQCCQPVSAVKSSAATSQASKVMIGSSLLQHEWSKHGSCVTDQQDLYFGKINSAVSSLGLAPNLPGSRLERIKVSDLKRNWAVPADAITVHCKGKRLSEVHICLDKALAPIACPAAEVKNDNCPGTVRLD

SEQ ID NO: 10837 - protein, 215 aa, Petunia integrifolia subsp. inflata
MFNSTFSSVLFILLFSLSPIYGAYYEYMQLVLQWPTAFCHASPTCKVTPNNFTIHGLWPDNVSTTLNYCKSKTGKYNNIKDPTIKNELYKRWPDLTTSETDCLGNQNFWKREYNKHGTCCSGRYNLQQYFHLAMALKDKFNLLTSLTNHGIIPGSNYNVQKINSTIKTITRGYPNLSCTEEMELWEIGICFDSTVKNVIDCPHPKTCNPTIIKFP

SEQ ID NO: 10838 - protein, 221 aa, Petunia integrifolia subsp. inflata
MFRLQLLSALFILLFSLSPVSANFDYFQLVLTWPASFCYPKNFCKRKSNNFTIHGLWPENKHFRLEFCTGDKYSRFKEDNIINVLERHWIQMRFDEKYASTKQPLWEHEYNRHGICCKNLYDQEAYFLLAIRLKDKLDLLTTLRTHGITPGTKHTFGEIQKAIKTVTNNKDPDLKCVENIKGVKELNEIGICFNPAADSFHDCRHSKTCDETDSTQTLFRR

SEQ ID NO: 10839 - protein, 163 aa, Petunia integrifolia subsp. inflata
DNTSRRLNFCSGDKFNTIQDEDKQNALEYRWPNLTTTEAVSKKAQIFWENQYNKHGTCCSELYDKEAYFDLAIELKDKFDLLKILRMHGITPGTSHHTSNQIKNAVKAVTKGVPNVSCFDNFRGTLTELLEIGICFNRAADRVIDCPLPKSCRPKGTKGITFP

SEQ ID NO: 10840 - protein, 222 aa, Petunia integrifolia subsp. inflata
MFKSQLISALFISLFAFSPVCANFDYIQLVLTWPASFCYRPKNICRRIPNNFTIHGLWPEKEHFRLEFCDGDKFVSFSLKDRIVNDLERHWVQMKFDEKFAKIKQPLWTHEYNKHGICSSNLYDQRAYFLLAMRVKDKFDLLTTLRTHGITPGTKHTFGEIQKAIKTVTNNKDPDLKCVEHIKGVKELKEVGICFTPAADSFHDCRHSNTCDETDSTKILFR

SEQ ID NO: 10841 - protein, 163 aa, Petunia integrifolia subsp. inflata
DNTTTRLNFCGGEKFNTIEGDNKRNALEYRWPNLTTTEAVSKQGQVFWENQYNKHGTCCSDLYDQDAYFELAIDLKDKFDLLKILGKHGITPRTSYHTSNNIKMAIRAVTKAVPNISCLDNFRGSLTELSEIGICFNREADRVIDCPLPKSCRPKGTKGITFP

SEQ ID NO: 10842 - protein, 222 aa, Petunia integrifolia subsp. inflata
MVKSRIISVFFIFLFSFSPVYGNFEYLQLVLTWPASFCFRPKNICKRPAKNFTIHGLWPEITGFRLEFCTGSPKYETFKDNNIVDYLERHWVQMKFDENYAKYHQPLWSYEYRKHGMCCSKIYNQKAYFLLATRLKEKFDLLTTLRTHGITPGTKHTFGDIQKAIKTVTNQVDPDLKCVEHIKGVQELNEIGICFNPAADNFYPCHHSYTCDETDSKMILFR

SEQ ID NO: 10843 - protein, 162 aa, Petunia integrifolia subsp. inflata
DNVSVALYNCYPNRKFRPMTDKKDQAELEKRWPDLTSTEYASMRYQSFWKYQYEKHGTCCSDFYSQRAYFDFAINLKDRTDLLTIFRSQGVTPGSTYTGDKINSSIASVTRALPNLKCLYYQGNLELTEIGLCFNRTTVAMMSCPRISTSCKFGTNKAVTFR

SEQ ID NO: 10844 - protein, 163 aa, Petunia integrifolia subsp. inflata
ENKHFRPEYCTGDKFTRFPKEDKIINDLENHWIQMRFDEKYAKDKQPLWGHEYTKHGICCKSLYDQRAYFLLAMRLKDKLDLLTTLRTHGITPGTKHTFGEIQKAIKTVTNNKDPDLKCVQHIKGVKELNEIGICFNQAADSFHDCRHSNTCDETDTTKTLFR

SEQ ID NO: 10845 - protein, 160 aa, Petunia integrifolia subsp. inflata
DKEKHRLQFCTSDKYEIFEGSIRSSLDHHWIQLRYDKEYGLEHQPLWHDQYKKHGTCCSNLYDQRAYFLLAMRLKDKFDLLGTLRTHGITPGRRYTFQSIHSAIKTVTQKDPDLKCVEHIKGVLELNEIGICFTPNADGPYDCPQSRSCQKRGYTGILFR

SEQ ID NO: 10846 - protein, 160 aa, Petunia integrifolia subsp. inflata
DKERQRLQFCTSDKYEIFEGSIRSSLDHHWIQMRYEKEYGLQHQPLWRDQYKKHGTCCKNLYDQTPYFLLAMRLKDKFDLLGTLRTHGITPGKRYTFQKLHSAIKTVTRMDPDLKCVEHIKGVLELNEIGICFTPNADSPYDCPQSRSCQKRGYTGILFR

SEQ ID NO: 10847 - protein, 161 aa, Petunia integrifolia subsp. inflata
DNWSKPLQNCDPLATIDGVLDIEKRSQLDVRWPQLKHSKDDGMNLQPLWKGEYKKHGTCCNNMYNEQAYYDLAMNLKDRFDLLKILSSQGITPGKSYIVQKVQDAIRTVTHQLPRLKCVEYPGLELSEIVICFEPKGKNVVSCRRPGTCFKNGKMGTILYR

SEQ ID NO: 10848 - protein, 164 aa, Petunia integrifolia subsp. inflata
EKEHYRLEFCTGKKYAPFSEKDRIVNDLERHWVQMKFDEHYAKINQPLWNHEYKRHGICCSNLYDQRAYFLLAMRLKEKFDLLTTLRTHGITPGTKHTFGEIQNAIKTVTNNVDPDLKCVQHIKGVPELKEIGICFNPAADSFFQCRHSNTCDETGNTRILFRR

SEQ ID NO: 10849 - protein, 163 aa, Petunia integrifolia subsp. inflata
EKKRYRLEFCPGDKFSRFKEDNIINVLERHWIQMRFDEDYANSKQPLWEHEYNRHGICCKNLYDQKAYFLLAMRLKDKLDLLTTLRTHGITPGTKHTFGEIQKAIKTVTNNNDPALKCVENIKGVMELNEIGICYTPAADRFERCRHSNTCDETSSTKILFRG

SEQ ID NO: 10850 - protein, 161 aa, Petunia integrifolia subsp. inflata
DNQHVMLNNCAKTFQKITNVRKIKELDDRWPDLQKSKSEATRTQSFWQYEYNKHGTCCTERYDRQAYFDLAQNLKDKYDALQILKNHGIIPGKSYAVDKIEEAIRDATQAYPNLNCIGDPQKTMELKEIGICFVPDATKATACHRRRTCNPINNKEIDFPL

SEQ ID NO: 10851 - protein, 161 aa, Petunia integrifolia subsp. inflata
DNESNLLNDCLPKSYQDITDMPTKIKLDNRWPDLKTTKQLCMQDQEFWRYEYNKHGSCSLGPYNQKTYFDLAIKLKDKFDLLAALQNHGINPGSTHTVKEIGSAIESVTKVYPNMKCIGNPAGTMVLLEIGICFVPDATRVIPCYRPVICHNNENKRINIP

SEQ ID NO: 10852 - protein, 164 aa, Petunia integrifolia subsp. inflata
EKKRFRLEFCAGDEYSRFLKEDSIVNDLERHWIQMRFHENCAKDKQPLWEHEYTKHGICCSNLYKQREYFLLAMRLKDKLDLLTTLRTHGITPGTKHTFGEIQKAIKTVTNNNDPDLKCVQNIKGVMELNEIGICYTPAADRLDRCRHSNTCDETSSTKILFRG

SEQ ID NO: 10853 - protein, 236 aa, Bradyrhizobium japonicum USDA 110
MFHSRLHSFSRLMISLTLTFALPLAAGLVLPAGVAKAQDRRQNAPGEFDFYVLSLSWSPSFCEEAAERGGRSQIQCSGRPYSFVVHGLWPQYENGFPEYCQRPAPRLNRSIVSSMLDLMPAPGLIFNEWDKHGTCSGLADRSYFETIRKARAAIKIPAEYLELSQAKTVAPADVEEAFIKANPGLGSAAVSVTCNRTRLSEVRICLSKDLQFRACEEMDRRACRRDQVTMPPIRGG

SEQ ID NO: 10854 - protein, 213 aa, Crassostrea gigas
KDWNYFTFAQQWPIAVCAEHKSCFIPDSVVGWGIHGLWPSSDTESKGPENCNGSWPFDINNVMPLVPELKKYWPNLYPDTKANSFWEHEWSKHGTCATSLPATSNELKYFGMGLKLHAKYNISRILVNQGILPSKTAGYMINETEAAVKRELGVDAVIECVYDKEKTKKQLLYEISICLTKEFELISCNKKEVSETTCPRKEPFFYPPVHDNN

SEQ ID NO: 10855 - protein, 256 aa, Volvox carteri
MVSCLRLLALTSLLCIASGARPLSSISWSGDATSSAIPTAQRDFDYFMFVRQWAGSFCSTHACPLVPNRGFHFTIHGLWPNYSNGSWPQFCTPEDKFDEDQLEDLMDDLEVEWPSVYDSDETFWEHEWSKHGTCALDIFPSEHSYFGHILKLHWRYDLSAALRRADIVPSRTSVYRTKDLIAAIEDMYGARPLVHCGRKRQLSEIWMCLDKDLKAFDCDTSQEGNACQEVVIPPFKSRLDVDQLSSKDEEERDGVQ

SEQ ID NO: 10856 - protein, 68 aa, Atropa belladonna
VAIEDGVGHTPFIECNVDSQGNHQVYQVYLCVDSSASNFIDCPVFPHGGRCGSKIEFPPFSSTDHDEF

SEQ ID NO: 10857 - protein, 222 aa, Petunia axillaris
MFKLQLASVLCVFLFACSPISGSFDHWQLVLTWPAGYCKVKGCPRPVIPNDFTIHGLWPDSISLIMNNCDPTKTFATITEIKQITELEKRWPELTTTAQFALTSQSFWRYQYEKHGTCCFPVYSQSAYFDFAIKLKDKTDLLSILRSQGVTPGSTYTGERINSSSASVTRVKPNLKCLYYRGKLELTEIGICFDRTTVAMMSCPRISTSCKFGTNARITFRQ

SEQ ID NO: 10858 - protein, 219 aa, Petunia axillaris
MLKSQLTSVLSILLLVLSPVYGYFEYFQLVLTWPPYFCHFNNCNRPTPDNFTVHGLWPDNWSKPLQNCDPLATIDGVLDIEKRSQLDERWPQLKHSKDDGMNLQPLWKGEYKKHGTCCNNMYNEQAYYDLAMNLKDRFDLLKILSSQGITPGKSYIVQKVQDAIRTVTHQLPRLKCVEYPGLELSEIVICFEPKGKNVVSCRRPGTCFKNGKMGTILYR

SEQ ID NO: 10859 - protein, 222 aa, Petunia axillaris
MFKWRIVSALIILNFALFKVYGEFDYLQLVLTWPASFCYQPKDICKRTVNNFTIHGLWPEKKGFRLEFCSGGTKYKIFEDNMVKDLERHWLQMKFDENYAKKHQPLWSYQYRKHGMCCYKLYNQNAYFLLAMRLKDKLDLLTTLRTHGITPGTKHTFSEIQKAIKTVTNNKDPDLKCVEHIKGVKELNEIGICFNPAADSFHDCRHSYTCDETDSTKTLFRL

SEQ ID NO: 10860 - protein, 218 aa, Petunia axillaris
MLSSQLMSVAFILFLALSPVYGSFDQLQLVLTWPPSFCHEKSCNRIPRNFTIHGLWPDNQHVMLNDCAKTFKKITDVLKSKELDDRWPDLKYSRNNAIQTQSFWRYEYNKHGTCCSQRYNQQAYFDIAKNLKDKFDLLQILKKKGIIPGKTYTVDKIEEAIREVTQAYPNLNCIGDPQNTMELKEVGICFEPDATTVTACHRRRTCNPQNKKEISFPL

SEQ ID NO: 10861 - protein, 229 aa, Zinnia elegans
MKMQSNYPFMLIKLLTLHSLLALSAAQDFDFFYLVQQWPGSYCDTKQGCCYPSTGKPASDFGIHGLWPNRNDGSYPSNCDSSNPFDASKISDLTSHMQSEWPTLLCPSNNGLAFWGHEWDKHGTCSESVLNQHDYFATTLSLKNEINLLQALRSAGIQPNGQKYSLSSIKTAIKQASGYTPWVECNNDSSGNSQLYQIYLCVDSSASGFIECPVFPKGSCGSSIEFPSF

SEQ ID NO: 10862 - protein, 239 aa, Zinnia elegans
MMKLHGSTLLVIFLVTQSVAILTVAKEFDFFYFVQQWPGSYCDSRRGCCYPKTGKPAEDFSIHGLWPNYVDGTYPSNCDSSNQFDDSKVSNLESELQVHWPTLACPSGDGLKFWRHEWEKHGTCAESIFDERGYFEAALSLKKKANLLNALENAGIRPADGKFHTLDQIKDAITQAVGYEPYIECNVDSSGYHQLYQVYQCVDRSASNFIKCPVLLTGRACGNKVEFPSFSSASSRDEL

SEQ ID NO: 10863 - protein, 229 aa, Nicotiana glutinosa
MASDSATSVFLTLFLITQCLSVLAAAQDFDFFYFVQQWPGSYCDTKQSCCYPKTGKPASDFGIHGLWPNNNDGSYPSNCDSNSPYDQSQVSDLISRMQQNWPTLACPSGTGSAFWSHEWEKHGTCAENVFDQHGYFKKALDLKNQINLLEILQGAGINPDGGFYSLNSIKNAIRSAIGYAPGIECNVDESGNSQLYQIYICVDGSGSNLIECPIFPRGKCGSSIEFPTF

SEQ ID NO: 10864 - protein, 236 aa, Nicotiana glutinosa
MMKPQKSLLVKIFVVQCLLVLCVAQDFDFFYFVQQWPASYCDTRRSCCYPTTGKPDEDFSIHGLWPNYENGKWPQNCDRESSLDESEISDLISTMEKNWPSLACPSSDGVRFWSHEWLKHGTCSALGERAYFQAALDFRKKSNLLENLKNAEITPRNGEHYTLESIKKAIEEGVGHSPYIECNVDTQGNHQIYQVYLCVDKTATDFIDCPIFPHGRGCGSKIEFPPFSSESDHDEF

SEQ ID NO: 10865 - protein, 167 aa, Prunus armeniaca
WPSNYSNPTMPSNCNGSKFDDRNVSPQLRAKLKRSWPDVESGNDTRFWEGEWNKHGTCSEQTLNQMQYFERSQNMWRSYNITEILKNASIVPSATQTWTYSDIVSPIKTATQRTPLLRCKPDPAQNKSAPKPQLLHEVVFCYEYNALKQIDCNRTAGCKNRQAISFQ

SEQ ID NO: 10866 - protein, 160 aa, Prunus armeniaca
WPSNYSNPTMPSNCNGTKFDDRKVYPHMRSKLKISWPDVESGNDTNFWEREWNKHGTCSERTLNQFQYFERSYEMWRSHNITEILKNASIVPHPTQTWTYSDIVSPIKAATKRTPLLRCKYDKNTQLLHEVVFCYEYHALKQIDCNRTAGCKNPQAISFQ

SEQ ID NO: 10867 - protein, 139 aa, Prunus armeniaca
WPSNYSNPTMPSNCNGTKFDDRKVYPQLRSKLRRSWPDVESGNDTKFWESEWNKHGTCSEQTHNQMQYFERSHAMWYSHNITEILKNASIVPHPTQTWTYSDIVSAIKAATKRTPLLRCKPDPAQNKSAPKPQLLHEVV

SEQ ID NO: 10868 - protein, 160 aa, Prunus armeniaca
WPSNYSNPTKPSNCNGTKFDDRKVYPHMRSKLKISWPDVESGNDTNFWEREWNKHGTCSERTLNQFQYFERSYEMWRSHNITEILKNASIVPHPTQTWTYSDIVSPIKAATKRTPLLRCKYDKNTQLLHEVVLCYEYHVLKQIDCNRTAGCENPQAISFQ

SEQ ID NO: 10869 - protein, 151 aa, Sorbus aucuparia
AVCNSNPTPCNDPPDKLFTVHGLWPSNRNGPDPEKCKTTALNSQKIGNMTAQLEIIWPNVLNRSDHVGFWEREWIKHGTCGYPTIKDDMHYLKTVIRMYITQKQNVSAILSKATIQPNGTNRPLVDIENALRRGTNNTKPKFKCQKNSRTT

SEQ ID NO: 10870 - protein, 150 aa, Sorbus aucuparia
AACNSNPIPCKDPPDKLFTIHGLWPSDSNGHDPVNCSQSTVDAQKLGNLTTQLEIIWPNVYNRKDHISFWNKQWNKHGSCGHPTIMNDIHYFQTAIKMYITQKQNVSKILSNAKIEPEGKPRKQIDIVNAILKGTGDKEPKLKCQKNNQV

SEQ ID NO: 10871 - protein, 149 aa, Sorbus aucuparia
AVCHFNPTPCKDPPDKLFTVHGLWPSNSSGNDPIYCKNTTLNSTKIANLTAQLEIIWPNVLDRTDHITFWNKQWNKHGSCGHPAIQNDMHYLQTVINLYITQKQNVSEILSKAKIEPVGKFRTQKEIEKAIRKGTNNKEPKLKCQKNTQ

SEQ ID NO: 10872 - protein, 150 aa, Sorbus aucuparia
AVCYFNPTPCKDPPDKLFTVHGLWPSNLNGPHPENCTNATVNSQRITNIQAQLKIIWPNVLDRTNHVGFWNKQWIKHGSCGNPPIMNDTHYFQTVINMYITKKQNVSGILSKAKIEPVGGKRPLVDIENAIRKSINNKKPKFKCQMKNKV

SEQ ID NO: 10873 - protein, 148 aa, Sorbus aucuparia
AVCNSSRTRCKDPPDKLFTVHGLWPSSMVGPDPSNCPIKNIRKREKLLEPQLEIIWPNVFDRTKNKLFWDKEWMKHGSCGYPTIDNENHYFETVIKMYITRKQNVSGILSKAKIEPDGRKRTLLDIENAIRNGADNKKPKLKCQKKGT

SEQ ID NO: 10874 - protein, 150 aa, Sorbus aucuparia
AVCNSNPTPCKDPPEKLFTVHGLWPSNKNGPDPEKCKNIQMNSQKIGNMAAQLEIIWPNVLNRTDHVGFWEREWLKHGTCGYPTIRDDMHYLKTVIKMYITQKQNVSAILSKAMIQPNGQNRSLVDIENAIRSGTNNMKPKFKCQKNTRT

SEQ ID NO: 10875 - protein, 150 aa, Sorbus aucuparia
AVCNSNPTPCNDPPDKLFTVHGLWPSNVNGSEPKKCKTTILNPQTITNLTAQLEIIWPNVLNRRAHVRFWRKQWRKHGTCAYPTIADDMHYFSTVIEMYITKKQNVSEILSKAKIKPEKKFRTRDDIVNAISQSIDYKKPKLKCKNNNQM

SEQ ID NO: 10876 - protein, 151 aa, Sorbus aucuparia
AVCNSNPTPCKDPADKLFTVHGLWPSNWTGPQPQNCTNTTVNSLTIKLLKAQLEIIWPNVLNRADHVLFWRKQWAKHGTCGSPAIRDDMHYFQTVIKMYITQKQNISKILSKAKIEPEGRSRKVVDIENAIRNGNNNTKPKLKCQNNNNGA

SEQ ID NO: 10877 - protein, 139 aa, Sorbus aucuparia
AVCNSNPTPCKDPPDKLFTVHGLWPSNKNGPDPEKCKNIKMNSQKIGNMTAQLEIIWPNVLNRTDHVGFWEREWLKHGTCGYPTIKDDMHYLKTVIRMYITQKQNVSAILSRATIQPNGQNRSLVDIENAIRSGTNNMK

SEQ ID NO: 10878 - protein, 149 aa, Sorbus aucuparia
AACNSNPTPCKDPPDKLFTVHGLWPSNKIGRDPEYCKTRNRRKRAKTLEPQLGIIWPNVLDRTNHTGFWRRQWKKHGTCGYPTIQNENDYFETVIKMYITEKQNVSRILSNAKIEPDGQSRPLVDVENAIRNGTHNKKPKFKCQKNNGV

SEQ ID NO: 10879 - protein, 143 aa, Sorbus aucuparia
AVCNSNPTPCKDPPEKLFTVHGLWPSNSNGPDPVNCKRKTKVPQAPQPIDATLKPQLEIIWPNVFNRADNESFWNKQWDKHGTCGYPTIKDKNHYFQTVIKMYITQKQNVSQILSKANINPDGLGRTRKLIESAIRNGTNDKE

SEQ ID NO: 10880 - protein, 150 aa, Sorbus aucuparia
AVCNSKPTPCKDPPDKLFTVHGLWPSNLNGPHPENCTNATVNSHRLKNIQAQLKIIWPNVLDRTNHVGFWNKQWIKHGSCGYPAIMNDTHYFQTVINMYITQKQNVSEILSKAKIEPLGIQRPLVHIENAIRNSINNKKPKFKCQKNSGV

SEQ ID NO: 10881 - protein, 148 aa, Sorbus aucuparia
AVCNSNPTPCKDPPDKLFTVHGLWPSTKVGRDPEYCKTKRYRKIQRLEPQLEIIWPNVTDRTANRGFWRKQWYKHGSCASPALPNQEHYFETVIRMFLGEKQNVSRILSKATIEPEGKNRTLLEIQNAIRAGTNNMIPKLKCQKVNGV

SEQ ID NO: 10882 - protein, 150 aa, Sorbus aucuparia
AVCRSNPTPCKDPTDKLFTVHGLWPSNLNGPHPQNCTNATVNSHRIKNIQAQLKIIWPNVLDRTNHLGFWNKQWIKHGSCGNPPIMNDTHYFQTVINMYITQKQNVSEILSKAKIEPLGIQRPLVDIEKAIRNSINKKKPKFKCQNNGGV

SEQ ID NO: 10883 - protein, 150 aa, Sorbus aucuparia
AVCRSNPTPCKDPTDKLFTVHGLWPSNLNGPHPENCTNATVNAHRIKNIQAQLKIIWPNVLDRTNHVGFWNKQWIKHGSCGNPPIMNDTHYFQTVINMYITQKQNVSEILSRAKIEPLGIQRPLVHIDKAIRNSINNKKPKFKCKKNAGV

SEQ ID NO: 10884 - protein, 149 aa, Sorbus aucuparia
AVCNFNPTPCKDPTDKLFTVHGLWPSNSNGNDPKYCNAQQYQTMKILEPQLVIIWPNVLNRNDHEGFWRKQWEKHGSCASSPIQNQKHYFDTVIKMYTTKKQNISEILSKANIKPGRKNRTLVDIENAIRNVINNMTPQFKCQKNTRTS

SEQ ID NO: 10885 - protein, 150 aa, Sorbus aucuparia
AACNSNPTPCKDPPDKLFTVHGLWPSNWILPDPIFCKNTTITPQQIGHIEAQLEIIWPNVFNRTNHLAFWNKQWNKHGSCGYRTINDEIQYFESVIKMYIAKKQNVSKILSKAKIKPEGKNWTRAEIIDAILISTNNMTPKLKCQKNNGT

SEQ ID NO: 10886 - protein, 146 aa, Sorbus aucuparia
AVCNSNPTPCKDPPDKLFTVHGLWPSDSNGNDPKYCKAPPYQTIKILEPQLVIIWPNVLNRNDHEGFWRKQWEKHGSCASSPIQNQKHYFDTVIKMYKTQKQNVSEILSKANIKPGRKNTTLVDIENAIRNVINNMTPKFKCQKNP

SEQ ID NO: 10887 - protein, 214 aa, Luffa cylindrica
MAMAKREIVLVFVLTILFPMVKSQTFDSFWMVQHWPPAVCSFQQGRCVGQGLRSFTIHGVWPQKGGTSVINCPGPTFDFTKISHLESTLNVDWPNVITGNNKWFWGHEWNKHGICSVSKFDQQAYFQMAINMRNSIDLLSALRVGGVVPNGRSKARQRVQSAIRAQLGKEPVLRCRGTGRQSRLLEIVMCFDDDGVTLINCNPANSNCPNSFIF

SEQ ID NO: 10888 - protein, 214 aa, Luffa cylindrica
MATKVLLLATIVLLLTILFLGAESQTFDHFFFVQQWPPTTCQQQQKPCFQPPPATFKIHGLWPQKGPNSVVYCNKNFDRTQISSLENQLDVVWPDVVTGNNTGFWEHEWNKHGSCSESQFNQTLYFQTAINMMNKVNLLKALGKGGITSDERTKSSQTMQKVLLAQFGNQPFLRCKKVGQQFWLLEIVMCFKDDGVTMINCQPSKVSCPPNFIF

SEQ ID NO: 10889 - protein, 191 aa, Momordica charantia
FDSFWFVQQWPPAVCSFQKSGSCPGSGLRTFTIHGLWPQGSGTSLTNCPQGSPFDITKISHLQSQLNTLWPNVLRANNQQFWSHEWTKHGTCSESTFNQAAYFKLAVDMRNNYDIIGALRPHAAGPNGRTKSRQAIKGFLKAKFGKFPGLRCRTDPQTKVSYLVQVVACFAQDGSTLIDCTRDTCGANFIF

SEQ ID NO: 10890 - protein, 190 aa, Momordica charantia
FDSFWFVQQWPPAVCSFQKSGSCPGSGLRTFTIHGLWPQQSGTSLTNCPGSPFDITKISHLQSQLNTLWPNVLRANNQQFWSHEWTKHGTCSESTFNQAAYFKLAVDMRNNYDIIGALRPHAAGPNGRTKSRQAIKGFLKAKFGKFPGLRCRTDPQTKVSYLVQVVACFAQDGSTLIDCTRDTCGANFIF

SEQ ID NO: 10891 - protein, 222 aa, Arabidopsis thaliana
MKFFIFILALQQLYVQSFAQDFDFFYFVLQWPGAYCDSRHSCCYPQTGKPAADFGIHGLWPNYKTGGWPQNCNPDSRFDDLRVSDLMSDLQREWPTLSCPSNDGMKFWTHEWEKHGTCAESELDQHDYFEAGLKLKQKANLLHALTNAGIKPDDKFYEMKDIENTIKQVVGFAPGIECNKDSSHNSQLYQIYLCVDTSASKFINCPVMPHGRCDSRVQFPKF

SEQ ID NO: 10892 - protein, 230 aa, Arabidopsis thaliana
MKILLASLCLISLLVILPSVFSASSSSEDFDFFYFVQQWPGSYCDTQKKCCYPNSGKPAADFGIHGLWPNYKDGTYPSNCDDSKPFDSSTISDLLTSMKKSWPTLACPSGSGEAFWEHEWEKHGTCSESVIDQHEYFQTALNLKQKTNLLGALTKAGINPDGKSYSLESIRDSIKESIGFTPWVECNRDGSGNSQLYQVYLCVDRSGSGLIECPVFPHGKCGAEIEFPSF

SEQ ID NO: 10893 - protein, 230 aa, Arabidopsis thaliana
MKILLASLCLISLLVILPSVFSASSSSEDFDFFYFVQQWPGSYCDTQKKCCYPNSGKPAADFGIHGLWPNYKDGTYPSNCDASKPFDSSTISDLLTSMKKSWPTLACPSGSGEAFWEHEWEKHGTCSESVIDQHEYFQTALNLKQKTNLLGALTKAGINPDGKSYSLESIRDSIKESIGFTPWVECNRDGSGNSQLYQVYLCVDRSGSGLIECPVFPHGKCGAEIEFPSF

SEQ ID NO: 10894 - protein, 228 aa, Arabidopsis thaliana
MGAKGCVNVLLKLLVFQGLFVSRPQEDFDFFYFVLQWPGAYCDTSRACCYPTSGKPAADFGIHGLWPNYNGGSWPSNCDPDSQFDRSQISDLVSSLKKNWPTLSCPSNEGFNFWEHEWEKHGTCSESVMDQHEYFENALKLKQKANLLQILKNSGINPDDGFYNLDKITNAIKDGIGFTPGIECNKDPERNAQLHQIYICVDTSGTEFIECPVLPRGSCPSQIQFSKF

SEQ ID NO: 10895 - protein, 247 aa, Arabidopsis thaliana
MRGIIIVSLLILQSLVVSSSQTEPDFNFFYWVNYWPGAICDSQKGCCPPTKGNTASDFIIHGLWPQFNNGTWPAFCDQTNLFDISKISDLVCQMEKKWTEWGVWACPSNETNLWEHEWNKHGTCVQSIFDQHSYFRTNLKFKHKVHLLNILIQKGIKPNDGFYSLDEIKNAIKCAIGFAPGIECNEDVKGNKQLFQIYICLDNYAKEFVECPYVPDKSCASKIKFPSLPERDSLNESLSVMSSVSTT

SEQ ID NO: 10896 - protein, 248 aa, Arabidopsis thaliana
MRGIIIVSLLILQSLVVSSSQTEPDFNFFYWVNYVMFPTTLTYIYWPGAICDSQKGCCPPTKGNTASDFIIHGLWPQFNNGTWPAFCDQTNLFDISKKWTEWGVWACPSNETNLWEHEWNKHGTCVQSIFDQHSYFRTNLKFKHKVHLLNILIQKGIKPNDGFYSLDEIKNAIKCAIGFAPGIECNEDVKGNKQLFQIYICLDNYAKEFVECPYVPDKSCASKIKFPSLPERDSLNESLSVMSSVSTT

SEQ ID NO: 10897 - protein, 64 aa, Malus x domestica
FTIHGFWPNYNDGSYPSNCDSDNPYDESKDLISRLQADWPTLACPSGNGSKFWAHEWNKHGTCS

SEQ ID NO: 10898 - protein, 227 aa, Malus x domestica
MGITGMIYMFTMVFSLIVLILSSSTVGYDYFQFTQQYQPAVCNSNPTPCNDPPEKLFTVHGLWPSNKNGPDPEKCKNIQMNSQKIGNMAAQLEIIWPNVLNRTDHVGFWEREWLKHGTCGYPTIRDDMHYLKTVIKMYITQKQNVSAILAKAMIQPNGQNRSLVDIENAIRSGTNNMKPKFKCQKNTRTTTELVEVTLCRDRDLTKFINCPQPPQGSRYLCPADVQY

SEQ ID NO: 10899 - protein, 200 aa, Malus x domestica
YDYFQFTQQYQPAVCNSNPTPCNDPPEKLFTVHGLWPSNKNGPDPEKCKNIQMNSQKIGNMAAQLEIIWPNVLNRTDHVGFWEREWLKHGTCGYPTIRDDMHYLKTVIKMYITQKQNVSAILAKAMIQPNGQNRSLVDIENAIRSGTNNMKPKFKCQKNTRTTTELVEVTLCRDRDLTKFINCPQPPQGSRYLCPADVQY

SEQ ID NO: 10900 - protein, 228 aa, Malus x domestica
MGTTRMVYIVTMLFSLIVLILSSSTVGYDYFQFTQQYQPAACNSNPTPCKDPPDKLFTVHGLWPSNMNRSELFNCSSSNVTYAKIQNIRTQLEMIWPNVFNRKNHLGFWNREWNKHGACGYPTIRNDLHYFQTVIKMYITQKQNVSDILSKAKIEPDGNIRTQKEIVDAIRKGIHGKEPNLKCQKNTQMTELVEVTLCSDGNLKQFIDCPHHFPNGSRHNCPTNHILY

SEQ ID NO: 10901 - protein, 227 aa, Malus x domestica
MGITGITYVVTMVFSLIVLILSSYTAGYDYFQFTQQYQPAVCNSNPTPCKDPPDKLFTVHGLWPSNSTGRDPKYCNPSNVTSHMLKNIQAQLEIIWPNVLNRTDHIGFWERQWKKHGSCGRPAITNEVDYFQTVIKMYITQKQNVSKILSKAKIEPEGRIRMLKDIEDAIRNGTNNKKPKLKCQKNSRMTELVEVTLCRDSNLTQFINCPSPILPGSPFLCPANIRY

SEQ ID NO: 10902 - protein, 227 aa, Malus x domestica
MGITRMIYMVTMLFSLLVSILSSSTVGFDYFQFTQQYQPAACNSNPTPCKDPTDKLFTVHGLWPSNKIGRDPEYCKTRNRRKRAKTLEPQLEIIWPNVLDRTNHTGFWRRQWKKHGTCGYPTIQNENDYFETVIKMYITEKQNVSRILSNAKIEPDGQSRPLVDIENAIRNGTHNKKPKFKCQKNNGVTELVEITLCSDKNRAHFIDCPNPFLPGSPYLCPNISIRY

SEQ ID NO: 10903 - protein, 228 aa, Malus x domestica
MGITGMIYMVTMVFSLIVLILSSPTVGYDYFQFTQQYQPAVCHFNPTPCRDPPDKLFTVHGLWPSNSSGNDPIYCKNTTMNSTKIANLTARLEIIWPNVLDRTDHITFWNKQWNKHGSCGHPAIQNDMHYLQTVIKMYITQKQNVSEILSKAKIEPVGKFRTQKEIEKAIRKGTNNKEPKLKCQKNSQRTELVEVTICSDRNLNQFIDCPRPILNGSRYYCPTNNILY

SEQ ID NO: 10904 - protein, 228 aa, Malus x domestica
MGITGMIYMVTIVFSLIVLLLSSSAARYDYFQFTQQYQLAACNSKPIPCKDPPDKLFTVHGLWPSDSNGHDPVNCSKSTVDAQKLGNLTTQLEIIWPNVYNRTDHISFWDKQWNKHGTCGHPTIMNDIHYFQTVIKMYITQKQNVSKILSRAKIEPEGKPRKQVDIVNAIRKGTNDKEPKLKCQKNNQVTELVEVTLCSNRNLTGFINCPRHIPNGSRYSCPTKNILY

SEQ ID NO: 10905 - protein, 228 aa, Malus x domestica
MGITGMIYMVTMVFSLIVLMLSSSAVKFDYFQFTQQYQPAVCNSNPTPCKDPPDKLFTVHGLWPSNVNGSDPKKCKATILNPQTITNLKAQLEIIWPNVLNRRAHVRFWRKQWRKHGACGYPTIADDMHYFSTVIEMYITKKQNVSEILSKAKIKPEGRFRTRDDIVNAISQSIDYKKPKLKCKINNQTTELVEVGLCSDNNLTQFINCPNPFPQGSPYFCPTNNIRY

SEQ ID NO: 10906 - protein, 228 aa, Malus x domestica
MGITGMIYMVTMVFSLIVLMLSSSAVKFDYFQFTQQYQPAVCNSNPTPCKDPPDKLFTVHGLWPSNVNGSDPKKCKATILNPQTITNLKAQLEIIWPNVLNRRAHVRFWRKQWRKHGACGYPTIADDMHYFSTVIEMYITKKQNVSEILSKAKIKPEGRFRTRDDIVNAISQSIDYKKPKLKCKINNQTTELVEVGLCSDNNLTQFINCPNPFPQGSPYFCPTNNIQY

SEQ ID NO: 10907 - protein, 228 aa, Malus x domestica
MGITGMIYMVTMVFSLIVLILSSSAVKFDYFQFTQQYQPAVCSSNPTPCKDPPDKLFTVHGLWPSNVNGSDPKKCKTTILNPQTITNLTAQLEIIWPNVLNRKAHARFWRKQWRKHGTCGYPTIADDMHYFSTVIEMYITKKQNVSEILSKAKIKPEKKFRTRDDIVNAISQSIDYKKPKLKCKNNNQITELVEVGLCSDNNLTQFIDCPRPFPQGSPFFCPTNNIQY

SEQ ID NO: 10908 - protein, 227 aa, Malus x domestica
MGITGMISMITMVFSLLVLILSSSTVGFDYFQFTQQYQPAVCNFNPTPCKDPTDKLFTVHGLWPSNNVGGDPESCKIRNHRTRAKALEPQLEIIWPNVLDRTNHTAFWRRQWIKHGTCGYPTIQNENDYFETVVKMYITEKQNVSKILSNAKIEPDGIKRTLADLEIAIRSGTDNKKPKFKCQKKRRVTELVEVTLCSDKNRAHFIDCPNPFQPGSPYLCPTNNILY

SEQ ID NO: 10909 - protein, 228 aa, Malus x domestica
MGIMGMIYMVMMVFSLIVLILSSSTVGFDYFQFTHQYQPAVCNSNRTPCKDPPDKLFTVHGLWPSNRNGPDPEYCKNTTLDVTKIGNLQAQLDIIWPNVYDRTNNVGFWSKQWAKHGICGSPTIQDDVNYLETVINLYIIKKQNVFEILSNAKIEPEGKNRTRKDIVKAIRSGTKGKRPKLKCQKNNRTTELVEVTLCSDRNLTQLINCPNLIKPKSPYFCPLKSIQY

SEQ ID NO: 10910 - protein, 179 aa, Malus x domestica
DPPDKLFTVHGLWPSNFNGPDPENCKVKPTASQTIDTSLKPQLEIIWPNVFNRADHESFWQKQWDKHGTCGSPTIIDKNHYFETVIRMYITEKQNVSYILSKANINPDGKGRTRKDIQIAIRNSTNDKEPKLKCQTKNGITELVEVSLCSNYFGKNFINCPNKTPGKTRYSCPTNDIHY

SEQ ID NO: 10911 - protein, 169 aa, Malus x domestica
HGLWPSNSSGNDPIYCKNTTMNSTKIANLTARLEIIWPNVLDRTDHITFWNKQWNKHGSCGHPAIQNDMHYLQTVIKMYITQKQNVSEILSKAKIEPVGKFRTQKEIEKAIRKGTNNKEPKLKCQKNSQRTELVEVTICSDRNLNQFIDCPRPILNGSRYYCPTNNILY

SEQ ID NO: 10912 - protein, 226 aa, Malus x domestica
MGTGMIYMVMMVFSLILLILPSSTVGFDYYQFTQQYQPAVCNSNPTPCKDPTDKLFTVHGLWPSNSNGNDPKYCNAQQYQTMKILEPQLVIIWPNVLNRNDHEGFWRKQWEKHGSCASSPIQNQKHYFDTVIKMYTTQKQNISEILSKANIKPGRKNRTLVDIENAIRNVINNMTPQFKCQKNTRTSLTELVEVGLCSDSNLTQFINCPRPFPRGSRYFCPTNIQY

SEQ ID NO: 10913 - protein, 179 aa, Malus x domestica
KDPPDKLFTVHGLWPSDSNGHDPVNCSKSTVDAQKLGNLTTQLEIIWPNVYNRTDHISFWDKQWNKHGTCGHPTIMNDIHYFQTVIKMYITQKQNVSKILSRAKIEPEGKPRKQVDIVNAIRKGTNDKEPKLKCQKNNQVTELVEVTLCSNRNLTGFINCPRHIPNGSRYSCPTKNILY

SEQ ID NO: 10914 - protein, 226 aa, Malus x domestica
MGTGIIYMVMMVFSLILLILSSSTVGFDYYQFTQQYQPAVCHSNPTPCKDPPDKLFTVHGLWPSDSNGNDPKYCKAPPYQTIKILEHQLAIIWPNVLNRNDHEGFWRKQWEKHGSCASSPIQNQKHYFDTVIKMYTTQKQNVSEILSKANIKPGRKNRTLVDIENAIRNVINNMTPKFKCQKNTRTSLTELVEVGLCSDSNLTQFINCPRPFPQGSRYFCPTSIQY

SEQ ID NO: 10915 - protein, 226 aa, Malus x domestica
MVTGMIYVVMMVFSLILLILSSSTVGFDYYQFTQQYQPAVCNSNPTPCKDPPDKLFTVHGLWPSNSNGNDPEYCKAPPYHTIKMLEPQLVIIWPNVLNRNDHEGFWRKQWDKHGSCASSPIQNQKHYFDTVIKMYTTQKQNVSEILSKANIKPGRKNRPLVDIENAIRNVINNMTPKFKCQKNTRTSLTELVEVGLCSDSNLTQFINCPRPFPQGSRNFCPTNIQY

SEQ ID NO: 10916 - protein, 193 aa, Malus x domestica
MGFTGMIYMVTMVFSLIVLILSSSTVGFDYFQFTQQYQPAVCNFTATPCKDPPDKLFTVHGLWPSNAKGNDPEGCKTQKYQKMQILEPQLEIIWPNVYNRTANEVFWRKQWYKHGSCASPPLQNQTHYFETVIKMYRTQKQNVSYILSKANIEPKGEKRTRVDIENAIRSGTNNMVPKLKCQTNGRMTELVEV

SEQ ID NO: 10917 - protein, 152 aa, Malus x domestica
ACNSNPTPCKDPPAKLFTVHGLWPSNWNLPDPIFCKNTTITPQQIGHIEAQLEIIWPNVFNRTNHLVFWNKQWNKHGSCGYPIINDEIQYFETVIKMYIIKKQNVSKILSRAKIKPEGKNRTRTEIINAISISTNNMTPKLKCQKNNGTIEL

SEQ ID NO: 10918 - protein, 226 aa, Prunus dulcis
MKSNSSTLIKLLVLGCLSVVCVAEDFDFFYFVQQWPGSYCDTKKSCCYPTTGKPAADFGIHGLWPNYKDGSYPSNCDPSNPFDQSEISDIRSSMQKEWPTLACPSGSGIEFWTHEWEKHGTCSESVIDQHGYFAAALNLKKKLSLLQALESAGIQPNGDSYSLGNIKDAVKSATGFTPFIECNVDESGNSQLYQVYFCVDTSGSDLIECPVFPHGKCGSQIEFPSF

SEQ ID NO: 10919 - protein, 227 aa, Prunus dulcis
MRFSTSLILIKLFVIQYLSVLCVSQDFDFFYFVQQWPGAYCDTKQTCCYPKSGKPSADFGIHGLWPNYKDGSYPSNCDPDSVFDKSEISELTSNLEKNWPSLTCPSSNGFRFWSHEWEKHGTCSESELDQKDYFEAALKLKQKVNLLQILKTAGIVPDDGMYSLESIKEAIKEGAGYTPGIECNKDSAGNSQLYQVYLCVDTSGQDIIECPVLPKGRCASDVQFAKF

SEQ ID NO: 10920 - protein, 227 aa, Prunus dulcis
MAMLKLSLAFHVLAFVLFLCFTMSTGSYQYFQFVQQWPPTTCAVSKQPCYQNPPSIFTIHGLWPSNYSKKAWVANCTRTRFNNSLAPKLEAKLKISWPNVENANYTEFWEREWNKHGTCSEQTLDQEEYFQRSHDIWNAYNITNILKKANILPNGAIWNYSDIVSPIKTVTRKMPALRCKPDPTKPKNHKISHQLLHEVVLCLHYKGRALIDCNRTACDNNLKILFQ

SEQ ID NO: 10921 - protein, 227 aa, Pyrus pyrifolia
MRYSNTLILIKLLIIQYLSVLCVSQDFDFFYFVQQWPGAYCDTKHTCCYPKSGKPTADFGIHGLWPNYKDGGYPSNCDPDSVFDKSQISELLTSLNKNWPSLSCPSSNGYRFWSHEWEKHGTCSESELDQKEYFEAALKLREKVNLLQILKNAGIVPNDELYNLESIVEAIKVGVGHTPGIECNKDSAGNSQLYQIYLCVDTSGQDIIECPLLPKGRCASKIQFPKF

SEQ ID NO: 10922 - protein, 228 aa, Pyrus pyrifolia
MGITGMIYMVTMVFSLIVLILSSSKAQQYDYFQFTQQYQPAVCNSNPTPCKDSPDKLFTVHGLWPSNSSGPHPHNCTNTTVKSQTIRSLKAQLEIIWPNVLNRNDHVGFWSRQWGKHGTCASPALKSDMQYFQTVINMYTTQKQNVSRILSKANIKPNGTTKALTDIQNAIRNGNNNTMPKLKCKNNSGIPELVEVSFCSDSNLTRFINCPHPFLPGSPYFCPGHVQY

SEQ ID NO: 10923 - protein, 228 aa, Pyrus pyrifolia
MGVTGMTYMFTMVFSLIVLILSSSTVGYDYFQFTQQYQPAVCNSNPTPCNDPTDKLFTVHGLWPSNRNGPDPEKCKTTALNSQKIGNMTAQLEIIWPNVLNRSDHVGFWEKEWIKHGTCGYPTIKDDMHYLQTVIRMYITQKQNVSAILSKAAIQPNGTNRPLVDIENAIRRGTNNTKPKFKCQKNTRTTTELVEVTLCSDRDLKKFINCPHGPPQGSRFSCPSSVQY

SEQ ID NO: 10924 - protein, 226 aa, Pyrus pyrifolia
MGITGMIYIVTMVFSLIVLILSSSTVGYDYFQFTQQYQPAVCNSKPTPCKDPPDKLFTVHGLWPSNLNGPHPENCTNATVNPHRIKNIQAQLKIIWPNVLDRTNHVGFWNKQWIKHGSCGYPAIMNDTHYFQTVINMYITQKQNVSEILSKAKIEPLGIQRPLVHIENAIRNSTNNKKPKFKCQKNSGVTELVEVGLCSDGSLTQFRNCPHPPPGSPYLCPADVKY

SEQ ID NO: 10925 - protein, 227 aa, Pyrus pyrifolia
MGITGMVYVVTMVFLLIVLILSSSTVGYDYFQFTQQYQLAVCNSNRTPCKDPPDKLFTVHGLWPSSMAGPDPSNCPIRNIRKREKLLEPQLAIIWPNVFDRTKNKLFWDKEWMKHGTCGYPTIDNENHYFETVIKMYISKKQNVSRILSKAKIEPDGKKRALLDIENAIRNGADNKKPKLKCQKKGTTTELVEITLCSDKSGEHFIDCPHPFEPISPHYCPTNNIKY

SEQ ID NO: 10926 - protein, 228 aa, Pyrus pyrifolia
MGITGMTYMFTMVLSLIVLIFSASTVGFDYFQFTQQYQPAVCNSNPTPCNDPTDKLFTVHGLWPSNRNGPDPEKCKTTTMNSQKIGNMTAQLEIIWPNVLNRSDHVGFWEREWLKHGTCGYPTIKDDMHYLKTVIKMYITQKQNVSAILSKATIQPNGNNRSLVDIENAIRSGNNNTKPKFKCQKNTRTTTELVEVTLCSNRDLTKFINCPHGPPKGSRYFCPANVKY

SEQ ID NO: 10927 - protein, 223 aa, Pyrus pyrifolia
MTYMFTMVLSLIVLIFSASTVGFDYFQFTQQYQPAVCNSNPTPCNDPTDKLFTVHGLWPSNRNGPDPEKCKTTTMNSQKIGNMTAQLEIIWPNVLNRSDHVGFWEREWLKHGTCGYPTIKDDMHYLKTVIKMYITQKQNVSAILSKATIQPNGNNRSLVDIENAIRSGNNNTKPKFKCQKNTRTTTELVEVTLCSNRDLTKFINCPHGPPKGSRYFCPANVKY

SEQ ID NO: 10928 - protein, 222 aa, Pyrus pyrifolia
MVHVVMMVFLLIVLILCSSTVGYDYFQFTQQYQLAVCNSNRTLCKDPPDKLFTVHGLWPSNMVGPDPSKCPIKNIRKREKLLEHQLEIIWPNVFDRTKNNLFWDKEWMKHGSCGYPTIDNENHYFETVIKMYISKKQNVSRILSKAKIEPDGKKRALLDIENAIRNGADNKKPKLKCQKKGTTTELVEITLCSDKSGEHFIDCPHPFEPISPHYCPTNNIKY

SEQ ID NO: 10929 - protein, 227 aa, Pyrus pyrifolia
MGITGMVHVVMMVFLLIVLILCSSTVGYDYFQFTQQYQLAVCNSNRTLCKDPPDKLFTVHGLWPSNMVGPDPSKCPIKNIRKREKLLEHQLEIIWPNVFDRTKNNLFWDKEWMKHGSCGYPTIDNENHYFETVIKMYISKKQNVSRILSKAKIEPDGKKRALLDIENAIRNGADNKKPKLKCQKKGTTTELVEITLCSDKSGEHFIDCPHPFEPISPHYCPTNNIKY

SEQ ID NO: 10930 - protein, 200 aa, Pyrus pyrifolia
YDYFQFTQQYQLAVCNSNRTLCKDPPDKLFTVHGLWPSNMVGPDPSKCPIKNIRKREKLLEHQLEIIWPNVFDRTKNNLFWDKEWMKHGSCGYPTIDNENHYFETVIKMYISKKQNVSRILSKAKIEPDGKKRALLDIENAIRNGADNKKPKLKCQKKGTTTELVEITLCSDKSGEHFIDCPHPFEPISPHYCPTNNIKY

SEQ ID NO: 10931 - protein, 226 aa, Pyrus pyrifolia
MRITGMIYIFTMVFSLNVLILSSSAARYDYFQFTQQYQQAFCNSNPTPCKDPPDKLFTVHGLWPSTKVGRDPEYCKTKRYRKIQRLEPQLEIIWPNVSDRKANRGFWRKQWYKHGSCASPALPNQKHYFETVIRMFLAEKQNVSRILSMATIEPEGKNRTLMEIQNAIRAGTNNMIPKLKCQKVNGMTELVEVTLCHDSNLTQFINCPRPLPQASPYFCPIDDIQY

SEQ ID NO: 10932 - protein, 221 aa, Pyrus pyrifolia
MIYIFTMVFSLNVLILSSSAARYDYFQFTQQYQQAFCNSNPTPCKDPPDKLFTVHGLWPSTKVGRDPEYCKTKRYRKIQRLEPQLEIIWPNVSDRKANRGFWRKQWYKHGSCASPALPNQKHYFETVIRMFLAEKQNVSRILSMATIEPEGKNRTLLEIQNAIRAGTNNMIPKLKCQKVNGMTELVEVTLCHDSNLTQFINCPRPLPQASPYFCPIDDIQY

SEQ ID NO: 10933 - protein, 226 aa, Pyrus pyrifolia
MRITGMIYIFTMVFSLNVLILSSSAARYDYFQFTQQYQQAFCNSNPTPCKDPPDKLFTVHGLWPSTKVGRDPEYCKTKRYRKIQRLEPQLEIIWPNVSDRKANRGFWRKQWYKHGSCASPALPNQKHYFETVIRMFLAEKQNVSRILSMATIEPEGKNRTLLEIQNAIRAGTNNMIPKLKCQKVNGMTELVEVTLCHDSNLTQFINCPRPLPQASPYFCPIDDIQY

SEQ ID NO: 10934 - protein, 229 aa, Pyrus pyrifolia
MGITGMIYMVPMVFSLIVLISCSSTMGYNYFQFTQQYQPAVCNSNPTPCKDPPDKLFTVHGLWPSNDVGDDPIYCKNKTIKSQQIGNLTAQLIIIWPNVLDRTDHVGFWNRQWNKHGSCGKAPTIKDEMHYFKTVIKMYITQKQNVSEILSRAKIEPEGKIRRRDDIINAIRLGTKDKKPKLKCQKNNQTTELVEITICSDRNLTQFIDCPRSSFKGSPFHCPTNHILY

SEQ ID NO: 10935 - protein, 310 aa, Mesorhizobium loti
MSGTFVADAACPATQAIKNGKNPGNVSTEAGQSYQLLAGNKDAPTHYLILVPRADPERRWVKVTCGHLSGSSAATVPAAPGGQGKPAASGKPEYVFALSWQPAFCETKSSKTECRAQNPSEFDATNFTLHGLWPQPNGNFYCQVAASDKANDNPAHWKDLPPVNLDAGTRKELDQVMPGTASQLERHEWIKHGTCYGKSQQEYFSDALGLMRQVNASPVRDLFAKTIGGKLTADQIRGAFDTAFGAGAGDRVRVSCVIDPSNGRRLIGELTLGLAGPIGPNASLKDLLLASVPTNKAGCPIGTVDAIGFQ

SEQ ID NO: 10936 - protein, 229 aa, Cicer arietinum
MEFQGSILIKAILVLQCFSILCASQSQDFDFFYFVQQWPGSYCDSKKACCYPTTGKPDADFGIHGLWPNYKDGTYPSNCDPSKPFDESQISGLTSSLQKNWPTLACPSGDGITFWTHEWEKHGTCSESVLNQHDYFETTLNLKQKANLLKALTSAGINADGGSYSLSNIKTAIQDGVGFAPFIECNRDSSGNSQLYQVYLCVDNSGSDFIDCPVFPHGKCGPEIEFPTF

SEQ ID NO: 10937 - protein, 226 aa, Glycine max
MESKESIFVKLLLILHLSVLCVSQDFDFYYFVQQWPGSYCDTKNSCCYPTTGKPAADFGIHGLWPNYKDGSYPSNCDSNNRFQPSQISDLTSSLQRNWPTLACPSGNGVQFWTHEWEKHGTCSQSVLKQHDYFETALDLKQRANLLQALTNAGIQPDGGFYSLSSIKGAIKNAIGYTPYIECNVDTSRNNQLYQVYLCVDTSGSNFIECPVFPRGKCGSQVEFPTF

SEQ ID NO: 10938 - protein, 241 aa, Glycine max
ERNREIEGKKASKISESANFSFLSKLLILQYLSVLCISQEFDFFYFVQQWPGAYCDTKQSCCYPKTGKPAADFSIHGLWPNFKDGSWPSNCDPDSVFDKSQISDLISNMEKDWPSLSCPSSNGMRFWSHEWEKHGTCAESELDQREYFETTLKLKQKVNLLRILKNAGIEPDDEIYTLERVTEAIKKGTGFTPGIECNRDSARNSQLYQVYMCVDTSGSNLIECPVLPRSRCGEQIQFPKF

SEQ ID NO: 10939 - protein, 229 aa, Glycine max
  unsure (1)..(229): unsure at all Xaa locations
MISISTIAIKLLMLLSFGNIWISRDFDFFYFVQQWPGSFCDTKKSCCFPLTXGKPVSNFSIHGLWPNFSNGSFPSNCNIAENPFNQSKITDLIPRAEKGWASLSCAGSKKTEFWKHEWDKHGTCSDLILDQHAYFEATLNLKDRVDLLQILQYNGIKPDGNLYSIVNITKAITQAIGLEPGITCNTDPSGNRQLNEIYLCADKYASSFIECPILPSRKSCTDMVEFPIF

SEQ ID NO: 10940 - protein, 130 aa, Glycine max
MEFKGSVFIKLLLLLHFFSVLCASQDFDFFYFVQQWPGSYCDTQKSCCYPTKGKPAADFGIHGLWPNYNDGKYPSYCDPNNPFNPSGISDLTSSLESNWPTLACPSGDGIEFWTHEWDIHGTCSESVLKH

SEQ ID NO: 10941 - protein, 306 aa, Pisum sativum
MISIIPIILIHTLFYVGFSDDMPLTTTLPQSPTSPLPHFHLYNQNSNSYPSSTPLEESKRRSPPPRRRSPPPPPRRSPPPPPRRSSPPPPPPRIRSPPPPRPPPPPPPPLLFDHFKLSQTWPPTYCKLKNNDCVSPLPQKFTIHGLWPSKEGVEIRDCNKEGINVNDFVPIKTRLNENWPALFKKDHQEDANIQLWVNQWYAHGTCSDQLFKFISYFEETLNVYDRHIILDILEKNGTKPGGTYPKQNILNANQTHTLFRPQIRCERIDNLDYLYEIRLCLTPTLKLEYKDCEIPYSGCRDTEVYF

SEQ ID NO: 10942 - protein, 218 aa, Oryza sativa (japonica cultivar-group)
MAAAARATARVGLALLLAVVGVGAQDYDFFFLVLQWPGSYCDTKQSCCYPRSGKPAADFGIHGLWPNRDDGSYPQNCDPDSEFDPSKVSDLLGSMRSEWPTLACPSNDGIRFWAHEWEKHGTCAAAALGDEHGYFEAALRLRSRLPVLAALRDGGVSPDGGYYTLSQIKGAIQRGVGAEPFVECNRDESGNSQLYQLYFCVDAAGERFVDCPASPGGR

SEQ ID NO: 10943 - protein, 269 aa, Capsicum annuum
MKMKNLSLLLLTLTLLFISVCSQVQQTQFVYRWPETYCEKATPTVACTKIPLQFTLVGFWGTDSSGGIQQGCQDTGKYDWAKVFTTETANKLTAFWPSLSTQDPTEMWKAAWTTYGTCLISKFKTPTQYFNRAIRLSDAIGGGNLFQGQLIGKDGIVPCDSATYTNAEILKSLTAVTTVNNQKEKKVSFTCNSIYSTHAYLNQVTFCYTNNAQYYTDCPTTVISKRCNVPNIIVPRPPTPTARASSLQDLLTGEKIGPNVLWETLGQLF

SEQ ID NO: 10944 - protein, 230 aa, Lycopersicon esculentum
MASNSAFSLFLILLIITQCLSVLNAAKDFDFFYFVQQWPGSYCDTKQSCCYPTTGKPAADFGIHGLWPNNNDGTYPSNCDPNSPYDQSQISDLISSMQQNWPTLACPSGSGSTFWSHEWEKHGTCAESVLTNQHAYFKKALDLKNQIDLLSILQGADIHPDGESYDLVNIRNAIKSAIGYTPWIQCNVDQSGNSQLYQVYICVDGSGSSLIECPIFPGGKCGTSIEFPTF

SEQ ID NO: 10945 - protein, 208 aa, Lycopersicon esculentum
ASGSKDFDFFYFVQQWPGSYCDTKQSCCYPTTGKPAADFGIHGLWPNNNDGTYPSNCDPNSPYDQSQISDLISSMQQNWPTLACPSGSGSTFWSHEWEKHGTCAESVLTNQHAYFKKALDLKNQIDLLSILQGADIHPDGESYDLVNIRNAIKSAIGYTPWIQCNVDQSGNSQLYQVYICVDGSGSSLIECPIFPGGKCGTSIEFPTF

SEQ ID NO: 10946 - protein, 233 aa, Lycopersicon esculentum
MMKSQKKLLIKIIVVQCLLVLCVTSQDFDFFYFVQQWPASYCDTRRSCCYPTTGKPDEDFSIHGLWPNYKDGKWPQNCDRESSLDESEFSDLISTMEKNWPSLACPSSDGLKFWSHEWLKHGTCSALNQHAYFQTALDFKTKSNLLQNLNNAGIKPRNGDYYGVESIKKAIEKGVGHTPFIECNVDSQGNHQLYQVYLCVDSSASKFIDCPIFPHGGKCGSKIEFPSFSTNDD

SEQ ID NO: 10947 - protein, 237 aa, Lycopersicon esculentum
MMKSQKKLLIKIIVVQCLLVLCVTSQDFDFFYFVQQWPASYCDTRRSCCYPTTGKPDEDFSIHGLWPNYKDGKWPQNCDRESSLDESEFSDLISTMEKNWPSLACPSSDGLKFWSHEWLKHGTCSALNQHAYFQTALDFKTKSNLLQNLNNAGIKPRNGDYYGVESIKKAIEKGVGHTPFIECNVDSQGNHQLYQVYLCVDSSASKFIDCPIFPHGGKCGSKIEFPSFSTNDDHDEF

SEQ ID NO: 10948 - protein, 198 aa, Lycopersicon esculentum
MASNSAFSLFLILLIITQCLSVLNAAKDFDFFYFVQQWPGSYCDTKQSCCYPTTGKPAADFGIHGLWPNNNDGTYPSNCDPNSPYDQSQISDLISSMQQNWPTLACPSGSGSTFWSHEWEKHGTCAESVLTNQHAYFKKALDLKNQIDLLSILQGADIHPDGESYDLVNIRNAIKSAIGYTPWIQCNVDQSGNSQLYQ

SEQ ID NO: 10949 - protein, 215 aa, Lycopersicon peruvianum
FILFFGLSPISVHGSFDHWQLVLTWPPGFCEIKHCPKKPIPKNFTIHGVWPDHTDYIMYDCNPNKEFKKIYDKHLLNKLESRWPQLTSHEYAGLNDQTFWKYEYEKHGLCCEKVYDQSQYFDIAMKLKDSIDLLNILTTNRIVPGFQYSYTGDQISSAIKRVTQKDPNPKCTYSKGGLELTEIGICFNRTTNALMRCPRNSNSCKLGTTTKVVFR

SEQ ID NO: 10950 - protein, 210 aa, Lycopersicon peruvianum
FFALSTISIYGSFDHWQLVLTWPAGFCKTKDCPRKDIPNNFTIHGVWPDHTSFVMYDCDPLKKYKTIDDTNILTELDARWPQLTSTKIIGLQFQRFWEYEYRKHGTCCADVFNQSMYFDISMKLTDSIDLLKILRTKGIKPGYTYTGDQISRAIKSVTQNNPNPKCTYIGRSLELIEIGICFNRTTNALMPCPRISTSCKLGTLEGVKFR

SEQ ID NO: 10951 - protein, 205 aa, Lycopersicon peruvianum
RPLVFSPVCGDFDYFQLVLQWPRSFCKTRYCPNPVPRNFTIHGLWPDKQRIMPINCPRKESYKSITDSKKIKLLEQHWPDLTSNQGSAEFWRYQYKKHGTCSVDLYNQEQYFDLAIELKEKFDLLKTLKNHGITPSKTNTVIDVEEAIKAVTKEVPNLNCIGDSSQTMELLEIGICFNKEGTTVIACRRRWNNHPNGNQKITLPP

SEQ ID NO: 10952 - protein, 220 aa, Lycopersicon peruvianum
MSVLFTLLFSLAPVLGYFEYLQLVLQWPTTFCHTKPCPTWPPPNNFTIHGLWPDSKGKMLNDCGSGDDYDDIPDAHMRKQLESDWPNLTSRAGEIKKYQEFWGYEFNKHGTCSMDRYNQDQYFELALKLKNQFDLLNILRNHGIIPGKTCTVKDVEDAIKAVTAHVPNLNCIVRSSQRSSHIMELLEIGICFDREATQMIDCRRRWKSHPDINQPITLPR

SEQ ID NO: 10953 - protein, 217 aa, Lycopersicon peruvianum
MIKPQLMSVLFLFLFVFSPVCGDFDYLQLVLQWPRSFCKTRYCPNPVPRNFTIHGLWPDKQRIMPINCPAKESYKSITDSKKIKLLEQHWPDLTSNQGSAEFWRYQYKKHGTCSVDLYNQEQYFDLAIELKEKFDLLKTLKNHGITPSKTNTVIDVEEAIKAVTKEVPNLNCIGDSSQTMELLEIGICFNREGTTVIACRRRWINHPNGNQKITLPP

SEQ ID NO: 10954 - protein, 195 aa, Lycopersicon peruvianum
DFDYLQLVLQWPRSFCKTRYCPNPVPRNFTIHGLWPDKQRIMPINCPAKESYKSITDSKKIKLLEQHWPDLTSNQGSAEFWRYQYKKHGTCSVDLYNQEQYFDLAIELKEKFDLLKTLKNHGITPSKTNTVIDVEEAIKAVTKEVPNLNCIGDSSQTMELLEIGICFNREGTTVIACRRRWINHPNGNQKITLPP

SEQ ID NO: 10955 - protein, 212 aa, Lycopersicon peruvianum
FMFLFALSPIYGDFELLELVSTWPATFCYAYGCSRRPIPKNFTIHGLWPDNRSTILHDCDVPPEVDYVQIEDHKILNALDKRWPQLRYDYWYGIDKQYQWKNEFLKHGTCGINRYKQPAYFDLAMKIKDKFDLLGTLRKHGINPGSTYELNDIERAIKTVSIEVPSLKCIRKPPGNVELNEIGICLDPEAKYTVPCPRIGSCHEMGHKIKFR

SEQ ID NO: 10956 - protein, 213 aa, Lycopersicon peruvianum
MFRPQIIGFFIMLCAFYHVYGTFDQLQLVLRWPTSFCNGKNCKRTPKDFTIHGLWPDSEAGELNFCNPRASYTIVRHGTFEKRNKHWPDLMRSKDNSMDNQEFWKHEYIKHGSCCTDLFNETQYFDLALVLKDRFDLLTTFRIHGIVPRSSHTVDKIKKTIRSVTGVLPNLSCTKNMDLLEIGICFNREASKMIDCTRPKTCNPGEDNLIGFP

SEQ ID NO: 10957 - protein, 189 aa, Lycopersicon peruvianum
QLQLVLRWPTSFCNGKNCKRTPKDFTIHGLWPDSEAGELNFCNPRASYTIVRHGTFEKRNKHWPDLMRSKDNSMDNQEFWKHEYIKHGSCCTDLFNETQYFDLALVLKDRFDLLTTFRIHGIVPRSSHTVDKIKKTIRSVTGVLPNLSCTKNMDLLEIGICFNREASKMIDCTRPKTCNPGEDNLIGFP

SEQ ID NO: 10958 - protein, 209 aa, Lycopersicon peruvianum
LTAALFIVLFYLSPAYGDFDSLQLVLTWPASFCNLNNCKRIVPRNFTIHGLWPDKQGTLLQNCKPKLKYVNFKDMMFNDLDKNWIQLKFDEDYGKDEQPLWQYQYLKHGSCCQKMYNQNAYFSLALRLKDRFDILRTLQLHQIFPGSSYTFKEIFDAVKTATQMDPDLKCTKGAPELYEIGICFTPKADALIPCRPSNTCAKTGKIFFR

SEQ ID NO: 10959 - protein, 214 aa, Lycopersicon peruvianum
MFKTQHTLAFFILLCALPDVYGTFNQLQLVLRWPASFCKGKKCERTPNNFTIHGLWPDIKGTILNNCNPDAKYASVTGGKFVKRNKHWPDLILTEAASLNSQGFWAYQFKKHGTCCSDLFNQEKYFDLALILKDKFDLLTTFRNKGIIPKSTCTINKIQKTIRTVTGVVPNLSCTPTMELLEVGICFNRDASKLIDCDQPKTCDTSGNTEIFFP

SEQ ID NO: 10960 - protein, 214 aa, Lycopersicon peruvianum
MFKTQHTLAFFILLCALSDVYGTFNQLQLVLRWPASFCKGKKCERTPNNFTIHGLWPDIKGTILNNCNPDAKYASVTGGKFVKRNKHWPDLILTEAASLNSQGFWAYQFKKHGTCCSDLFNQEKYFDLALILKDKFDLLTTFRNKGIIPKSTCTINKIQKTIRTVTGVVPNLSCTPTMELLEVGICFNRDASKLIDCDQPKTCDTSGNTEIFFP

SEQ ID NO: 10961 - protein, 218 aa, Lycopersicon peruvianum
LTSVFFMFLFALSPIYGYFELLELVSTWPATYCYAYGCSRRPIPNNFTINGLWPDNKSVILNNCNFAKKEDRYTKITDPKKKSELDKRWPQLRYEKLYGIEKQDLWEKEFLKHGSCSINRYKQEAYFDLAMKIKDRFDLLGTLRNQGIIPGSTYELDDIERAVKTVSIEVPSLKCIQKPLGNVELNEIGICLDPEAKYTVPCPRIGSCHKMGHKIKFR

SEQ ID NO: 10962 - protein, 140 aa, Lycopersicon peruvianum
IHGVWPDHTDYIMYDCNPNKEFKKIYDKHLLNKLESRWPQLTSNEYAGLNDQTFWKYEYEKHGLCCEKVYDRSQYFDIAMKLKDSIDLLNILTTNRIVPGFQYSYTGDQIRSAIKRVTQKDPNPKCTYSKGGLELLEIGI

SEQ ID NO: 10963 - protein, 140 aa, Lycopersicon peruvianum
IHGVWPDHTDYIMYDCNPNKEFKKIYDKHLLNKLESRWPQLTSNEYAGLNDQTFWKYEYEKHGLCCEKVYDQSQYFDIAMKLKDSIDLLNILTTNRIVPGFQYSYTGDQISSAIKRVTQKDPNPKCTYSKGGLELKEIGI

SEQ ID NO: 10964 - protein, 181 aa, Lycopersicon peruvianum
PASFCDSNNCKRIAPKNFTIHGLWPDKEGTVLQKCKPKPNYVNFKDKMLNDLDKNWIQLKFDEDYGRDKQPLWVYQYLKHGSCCQKMYNQNTYFSLALRLKDRFDLLRTLEMHKIFPGSSYTFQEIFDAVKTATQMDPDLKCTKGAPELYEIGICFTKKADALIPCRPSNTCDRTGNIFFR

SEQ ID NO: 10965 - protein, 138 aa, Lycopersicon peruvianum
IHGVWPDHTSFIMYDCDPLKKYKTIDDTDILTKLDARWPQLTSIKSIGLKSQSFWDYEYRKHGTCCADVFNQSVYFDISMKLTDSIDLLKILRTKRIIPGYTYTGDQISRAIKSVTQNNPNPKCTYIGRSLELKEIGI

SEQ ID NO: 10966 - protein, 162 aa, Lycopersicon peruvianum
HGLWPDIKGTILNNCNPDAKYASVTGGKFVKRNKHWPDLILTEAASLNSQGFWAYQFKKHGTCCSDLFNQEKYFDLALILKDKFDLLTTFRNKGIIPKSTCTINKIQKTIRTVTGVVPNLSCTPTMELLEVGICFNRDASKLIDCDQPKTCDTSGNTEIFFP

SEQ ID NO: 10967 - protein, 162 aa, Lycopersicon peruvianum
HGLWPDIKGTILNNCNPDAKYASVTGGKFVKRNKHWPDLILTEAASLNSQGFWAYQFKKHGTCCSDLFNQEKYFDLALILKDKFDLLTTFRNKGIIPKSTCTINKIQKTIRTVTGVVPNLSCTPTMELLEVGICFNRDASKLIDCDQPKTCDTSGNTEIFFG

SEQ ID NO: 10968 - protein, 139 aa, Lycopersicon peruvianum
IHGLWPDNKSIMLNNCDSDVKYNRITNPDMLIQLEYHWPDLTSTVGDTRKLQDFWRYEFNKHGTCSINRYNQVQYFDLALKLKNQLDLLKTLRSHGIIPGKDCTVKDVEDAIKAVSAHVPNLNCIGRSSHTMELQEIGI

SEQ ID NO: 10969 - protein, 214 aa, Lycopersicon chilense
MVKPQLTAALLIVLFALSPAYGDFDSLQLVLTWPASFCDSNNCKRIAPKNFTIHGLWPDKEGTVLQQCKPKPNYVNFKDKMLNDLDKNWIQLKFDEDYGRDKQPLWVYQYLKHGSCCQKMYNQNTYFSLALRLKDRFDLLRTLEMHKIFPGSSYTFQEIFDAVKTATQMDPDLKCTKGAPELYEIGICFTKKADALIPCRPSNTCDRTGNIFFR

SEQ ID NO: 10970 - protein, 135 aa, Lycopersicon chilense
IHGVWPDKEGTLLQYCKPKPKFRLIKDQLLDDLDKNRIQLKYPQTHARNKQPLWEHEYLKHGTCCQKVYDQNTYFRLALRLKDRFDLLRTLQIHRIVPGSSYTFKEIFDAVKTVTQTHPDIKCTKGALELTEIGI

SEQ ID NO: 10971 - protein, 134 aa, Lycopersicon chilense
IHGVWPDSEAGELNFRNPRASYTIVRHGTFEKRNKHWPDLMRSKDNSVDNQEFWKHEYIKHGSCCTDLFDETQYFDLALVLKDRFDLLTTFRIHGIVPRSSHTVDKIKKTIRSVTGVLPNLSCTKNMELQEVGI

SEQ ID NO: 10972 - protein, 138 aa, Lycopersicon chilense
IHGAWPDNVSTELNYCGRKKDNYRIITDDRETNDLYDRWPDLTIEKDICLDKQNFWRYEYNKHGTCCEATYNQEQYFHLAVALKDKFDLLKSLGNHGIIPGSKYTVQKINNTIKTVTQGYPNLSCTRGKLMELQEIGI

SEQ ID NO: 10973 - protein, 231 aa, Nicotiana alata
MKMASNSATSLFLTLFLITQCLSVLTAAQDFDFFYFVQQWPGSYCDTKQSCCYPKTGKPASDFGIHGLWPNNNDGSYPSNCDSNSPYDQSQVSDLISRMQQNWPTLACPSGTGSAFWSHEWEKHGTCSESIFDQHGYFKKALDLKNQINLLEILQGAGINPDGGFYSLNSIKNAIRSAIGYTPGIECNVDDSGNSQLYQVYICVDGSGSNLIECPVFPRGKCGSSIEFPTF

SEQ ID NO: 10974 - protein, 196 aa, Nicotiana alata
AFEYMQLVLQWPAAFCHTTPSPCKRIPNNFTIHGLWPDNVSTMLNYCSGEDEYEKLDDDKKKKDLDDRWPDLTIARADCIEHQVFWKHEYNKHGTCCSKSYNLTQYFDLAMALKDKFDLLTSLRKHGIIPGNSYTVQKINSTIKAITQGYPNLSCTKRQMELLEIGICFDSKVKNVIDCPHPKTCKPMGNRGIKFP

SEQ ID NO: 10975 - protein, 218 aa, Nicotiana alata
MLNSPLTSVLFVLLFVLSPIYGAFEYMQLVLQWPTAFCHTTPCKRIPNNFTIHGLWPDNVSTTLNYCAAKENFKNIEDDTKKDDLYKRWPDLTTAETYCKQHQNFWRHEYNKHGKCCSESYNREQYFDLAMALKDKFDLLSSLRNHGIIPGRGMKYTVQKINSTIKKITQGYPNLSCTKGIMELVEIGICFDSMVKNVINCPHPKTCKPTGSNEIKFP

SEQ ID NO: 10976 - protein, 223 aa, Nicotiana alata
MLNSQITSAVLFLLFALSPIYGDFDYMQLVLTWPASFCYPKNFCSRIAPKNFTIHGLWPDKVRGRLQFCTSEKYVNFAQDSPILDDLDHHWMQLKYHRDFGLENQFLWRGQYQKHGTCCIPRYNQMQYFLLAMRLKDKFDLLATLRTHGITPGTKHTFNETRDAIKTVTNQVDPDLKCVEHIKGVRELYEIGICFTPTADSFFPCPHSNTCDETGITKILFRR

SEQ ID NO: 10977 - protein, 218 aa, Nicotiana sylvestris
MFRSQLVSIFFILSFALSPVFGDFDQMQLVLTWPPTYCHEKSCARIPTNFRIHGLWPDNQHELLNNCKKSFTTITNSSKSNALDDRWPDLKYSKMKTIQTQDFWKYQYNKHGTCCTELYSQEAYFDLAMKLKDKFDLLQMLKSQGVIPGKTYTVNKIEEAIREVTQVYPNLNCIGNPLKTMELKEIGICFNREATEVVACHRRKTCNPLNKNEISFPL

SEQ ID NO: 10978 - protein, 229 aa, Nicotiana tabacum
MASNSATSLFLTLFLITQCLSVLTAAQDFDFFYFVQQWPGSYCDTKQSCCYPKTGKPASDFGIHGLWPNNNDGSYPSNCDSNSPYDQSQVSDLISRMQQNWPTLACPSDTGSAFWSHEWEKHGTCAENVFDQHGYFKKALDLKNQINLLEILQGAGINPDGGFYSLNNIKNAIRSAVGYTPGIECNVDESGNSQLYQVYICVDGSGSDLIECPVFPRGKCGSSIEFPTF

SEQ ID NO: 10979 - protein, 219 aa, Petunia x hybrida
RLQLLSALFILLFALSPVSANFDYFQLVLTWPASFCYPKNKCQRRSNNFTIHGLWPEKKHFRLEFCPGDKFSRFKEDNIINVLERHWIQMRFDEDYANAKQPLWQHEYNRHGICCKNLYDQKAYFLLAIRLKDKLDLLTTLRTHGITPGTKHTFGEIQKAIKTVTNNKDPDLKCVENIKGVKELNEIGICFNPAADSFHDCRHSYTCDETDSTQTLFRR

SEQ ID NO: 10980 - protein, 222 aa, Petunia x hybrida
MFKLQLASVLCVFLFACSPISGSFDHWQLVLTWPAGYCKVKGCPRPVIPNDFTIHGLWPDSISVIMNNCDPTKTFVTITEINQITELEKRWPELTTTAQFALTSQSFWRYQYEKHGTCCFPVYSQSAYFDFAIKLKDKTDLLSILRSQGVTPGSTYTGERINSSIASVTRVKPNLKCLYYRGKLELTEIGICFDRTTVAMMSCPRISTSCKFGTNARITFRQ

SEQ ID NO: 10981 - protein, 222 aa, Petunia x hybrida
MFKLQLASVLCVFLFACSPISGSFDHWQLVLTWPAGYCKVKGCPRPVIPNDFTIHGLWPDSISVIMNNCDPTKTFATITEIKQITELEKRWPELTTTAQFALTSQSFWRYQYEKHGTCCFPVYSQSAYFDFAIKLKDKTDLLSILRSQGVTPGSTYTGERINSSIASVTRVKPNLKCLYYRGKLELTEIGICFDRTTVAMMSCPRISTSCKFGTNARITFRQ

SEQ ID NO: 10982 - protein, 222 aa, Petunia x hybrida
MFQFQLTSVFCIFLFAFSPIYGAFDHWQLVLTWPAGYCKIKGCPRTVIPDNFTIHGLWPDSVSVMMYNCDPPTRFNKIRETNIKNELEKRWPELTSTAQFALKSQSFWKYQYEKHGTCCLPFYSQSAYFDFAIKLKDKTDLLTILRNQGVTPGSTYTGEKLNSSIASVTRVAPNLKCLYYQGKLELTEIGICFNRTTVAMMSCPRISTSCKFGTNAGITFRQ

SEQ ID NO: 10983 - protein, 216 aa, Petunia x hybrida
LISAFFILLFSLSPVSANFDYFQLVLTWPASFCYPKNKCQRRSNNFTIHGLWPEKKRFLEFCTGDKYKRFLEEDNIINVLERHWIQMRFDETYANTKQPLWEHEYNRHGICCKNLYDQKAYFLLAMRLKDKLDLLTTLRTHGITPGTKHTFGEIQKAIKTVTSNNDPDLKCVENIKGVMELNEIGICYTPAADRFDRCRHSNTCDETSSTKILFRG

SEQ ID NO: 10984 - protein, 222 aa, Petunia x hybrida
MFRLQLISAFFILLFSLSPVSANFDYFQLVLTWPASFCYPKNKCQRRSNNFTIHGLWPEKKRFRLEFCTGDKYKRFLEEDNIINVLERHWIQMRFDETYANTKQPLWEHEYNRHGICCKNLYDQKAYFLLAMRLKDKLDLLTTLRTHGITPGTKHTFGEIQKAIKTVTSNNDPDLKCVENIKGVMELNEIGICYTPAADRFDRCRHSNTCDETSSTKILFRG

SEQ ID NO: 10985 - protein, 214 aa, Petunia x hybrida
MFRSQLTSVIFVLFFSLPPIYGYFEYMQLVLTWPPAFCHIKRCRRTPNNFTIHGLWPDNYSTMLNFCTDDEFVKFTDDDKKDKLDKRWPDLITDEADCKGTQDFWKREYEKHGTCCLSSYNQEQYFELAMVLKDRFDLVKSFRNHGIIPGTAGHTVQKINNTVKAITQGFPNLACTKALELKEIGICFDRTGKNVINCPHPRTCKQTRTGIKFP

SEQ ID NO: 10986 - protein, 220 aa, Petunia x hybrida
MFKSHLTAVIFILLFSLPPIYGDFDYMQLVLTWPASFCYRPRYLCKRTAPNNFTIHGLWPDNEQRRLQFCTSTEYSLFDGDILDDLDRHWIQLKFDKETGMQDQPLWHEQFRKHGTCCENRYKQMPYFLLAMRLKNKFDLLTTLRTHGIIPGTKHTFDEIQKAIKTVTNQVDPDLKCVQHIQGVPELNEIGICFTPAADRFFPCPQSKSCPKTGTKILFR

SEQ ID NO: 10987 - protein, 218 aa, Petunia x hybrida
MFKSQLTSALFVVLFFLSPTYGEFELLQLVLTWPASFCYANHCERIAPNNFTIHGLWPDNVTIRLQYCKPKPTYTTFAGKMLNDLDKHWIQLKYKEAYARREQPTWKYQYQKHGSCCQTKYKQIPYFSLALRLKDRFDLLTTLRTHHIVPGSSYTFDDIFDAVKTVTQMNPDLKCTEVTKGTQELDEIGICFTPKADKMFPCRQSDTCEKTRKILFRG

SEQ ID NO: 10988 - protein, 208 aa, Solanum chacoense
LLFSLSSCYGTFEHLQLVLTWPTSFCHKERCIRSSSNFTIHGLWPDNTSTRLNFCKIVKYNKIEDEHKIDALEYGWPNLTTTEAVSKEDQVFWGKQYTKHGSCCTDLYDKDAYFDLAMNLKDRFDLLKILAMHGITPGTSHHTSSNIQNAVKSVTQGVPHVTCFNNRFKGTSELLEIALCFDPQAQNVIHCPRPKTCNSKGTKGITFP

SEQ ID NO: 10989 - protein, 223 aa, Solanum chacoense
MFKSQLTSVFFMLLFALSPIYGDFELLELVSTWPATFCYAYGCSRRRPIPNNFTIHGLWPDNKSIILNNCNVANKERYIKIEDPKKLTELDKRWPQLRYDKLYGIDKQYLWEKEFLKHGTCSINRYKQAAYFDLAMNIKDRFDLLGTLRNHGINPGSTYDLDDIERAIKTVSIKVPSLKCIEKPPGNVELNEIGICLDPEAKYTVPCPRTGSCHELGPRIKFR

SEQ ID NO: 10990 - protein, 216 aa, Solanum chacoense
MFKSLASILIILLHLSPGNGTFEQLQLVFTWPTAFCHKVNCVRIPNNFTIHGLWPDNKSRRLNFCKSTKYIKSTDEGKKAYLEYRWPNLTTTEVESKKNQFFWEKEYIKHGTCCLPLYDQNAYFKLAVDLKDKFDLLNLLGKHGIRPGTTHLTSQKIANAIRTETRGIPNISCYDDFQGTSELLEIGICFDPNAIVKNCFRPKSCLPKGTTGVTFP

SEQ ID NO: 10991 - protein, 216 aa, Solanum chacoense
MFKSLLTSTLFIVLFSLSSTYGDFDKLQLVLTWPPSFCHANNCQRIVPKNFTIHGLWPDKEGPQLLKYCKPKLTYNYFSDKMLNDLDKHWIQLKIDQASARKDQPAWKYQYLKHGSCCQKIYNQNTYFSLALRLKDRFDLLRTLQIHRIVPGSSYTFEEIFDAVKTVTQMDPDIKCTEGAPNLYEIGICFTPNGDSLVRCRQSETCDKTGKIFFRP

SEQ ID NO: 10992 - protein, 211 aa, Solanum chacoense
EFFVLFFCLSPVYGTFDYMKLVLQWPPMYCRNKFCERIPRNFTVHGLWPDNKKYLLNNCRSYAYNALTNVREQSKLDDRWPDLTSNKSMTMKEQKFWEYEYNKHGTCCEKLYNQAQYFNLTMNLKDKFDLLRILRNHGIVPGSLALLSNSGRPLRQLTNKVFPSLKCIDNNGIMELLEVGICFDPAATKVIPCHRPWICHADENTRIELVK

SEQ ID NO: 10993 - protein, 245 aa, Solanum chacoense
MFKSLLTSTLFIVLFSLSSTYGDFDKLQLVLTWPPSFCHANNCQRIVPKNFTIHGLWPDKEGPQLLKYCKPKLTYNYFSVSSFIIFFRTGSFSVLFNLLKSLFLNFLQDKMLNDLDKHWIQLKIDQASARKDQPAWKYQYLKHGSCCQKIYNQNTYFSLALRLKDRFDLLRTLQIHRIVPGSSYTFEEIFDAVKTVTQMDPDIKCTEGAPNLYEIGICFTPNGDSLVRCRQSETCDKTGKIFFRP

SEQ ID NO: 10994 - protein, 223 aa, Solanum tuberosum
MAKSQLVSALFVFFFSLSPIYGDFDYMQLVLTWPRSFCYPRGFCNRIPPNNFTIHGLWPDKKPMRGQLQFCTSDDYIKFTPGSVLDALDHHWIQLKFEREIGIRDQPLWKDQYKKHGTCCLPRYNQLQYFLLAMRLKEKFDLLTTLRTHGITPGTKHTFKKIQDAIKTVTQEVPDLKCVENIQGVLELYEIGICFTPEADSLFPCRQSKSCHPTENPLILFRL

SEQ ID NO: 10995 - protein, 226 aa, Prunus avium
MAMLKSSLALLVLAFAFFFCYVMSSGSYDYFQFVQQWPPTNCRVRTKCSNPRPLQYFTIHGLWPSNYSNPKMPSNCIGSQFNESKVYPRLRSKLRISWPDVESGNDTKFWGDEWNKHGTCSQRILNQFQYFERSQQMWRSYNITNILKKAQIVPNATQTWSYSDIVSPIKTATNRTPLLRCKSQPKSQANFQLLHEVVLCFDYNALVHIDCNRTAGCWNNVDIKFQ

SEQ ID NO: 10996 - protein, 229 aa, Prunus avium
MAMLKSSLSFLVLGFAFFLCFIISAGDGSYVYFQFVQQWPPTTCRVQKKCSKPRPLQNFTIHGLWPSNYSNPTMPSNCNGSRFKKELLSPRMQSKLKISWPNVVSSNDTKFWESEWNKHGTCSEQTLNQVQYFEISHEMWNSFNITDILKNASIVPHPTQTWKYSDIVSAIQSKTQRTPLLRCKTDPAHPNANTQLLHEVVFCYGYNAIKQIDCNRTAGCKNQVNILFP

SEQ ID NO: 10997 - protein, 226 aa, Prunus avium
MAMLKSSLAFLVLAFAFFFCYVMSSGSYDYFQFVQQWPPTNCRVRIKRPCSKPRPLQNFTIHGLWPSNYSNPTKPSNCNGSKYEDRKVYPKLRSKLKRSWPDVESGNDTRFWEGEWNKHGRCSEQTLNQMQYFEISHDMWVSYNITEILKNASIVPHPTQKWSYSDIVSPIKTATKRTPLLRCKTDPATNTELLHEVVFCYEYHALKQIDCNRTAGCKNPQAISFQ

SEQ ID NO: 10998 - protein, 226 aa, Prunus avium
MGMLKSSLAFLVLALAFFLCFIMSTGDGSYDYFQFVQQWPPTNCRVRIKRPCSNPRPLQYFTIHGLWPSNYSNPTKPSNCNGSQFDGRKVSPQLRAKLKRSWPDVESGNDTRFWEGEWNKHGRCSEQTLNQMQYFERSQNMWRSYNITEILRNASIVPHPTQTWTYSDIVSPIKKATKRTPLLRCKQDKKTQLLHEVVFCYEYNALKQIDCNRTAGCQNQPAISFQ

SEQ ID NO: 10999 - protein, 208 aa, Prunus avium
LCFIMSTGDGSYDYFQFVQQWPPTNCRVRIKRPCSNPRPLQYFTIHGLWPSNYSNPTKPSNCNGSQFDGRKVSPQLRAKLKRSWPDVESGNDTRFWEGEWNKHGRCSEQTLNQMQYFERSQNMWRSYNITEILRNASIVPHPTQTWTYSDIVSPIKKATKRTPLLRCKQDKKTQLLHEVVFCYEYNALKQIDCNRTAGCQNQPAISFQ

SEQ ID NO: 11000 - protein, 223 aa, Prunus avium
MAILKSTLAFLVLAFAFFICYVMSSGSYDYFQFVQQWPPTNCRVRNKPCTKPRPLQNFTIHGLWPSNYSNPRMPSKCTGSLFNFRKVYPQLRSDLKISWPDVESGNDTRFWESEWNKHGRCSEASLNQMQYFERSHAMWISYNITEILKNASIVPSATKNWTYSDIVSPIKRATKRTPLLRCKYDKSTQLLHEVVFCYEYDALKQIDCNGTAGCPNQKVISFQ

SEQ ID NO: 11001 - protein, 223 aa, Prunus avium
MAMLKSSPAFLVLAFAFFLCFIMSNGSYVYFQFVQQWPPTNCRVRIKRPCSSPRPLQYFTIHGLWPSNYSNPRMPSNCTGPQFKRILSPQLRSKLQTSWPDVESGNDTKFWESEWNKHGTCSKETLNQMQYFERSYAMWMSYNITEILKNASIVPHPTQTWKYSDIVAPIKAATKRTPLLRCKQDKNTVLLHEVVFCYEYNALKQIDCNRTSGCQIQPAILFQ

SEQ ID NO: 11002 - protein, 223 aa, Prunus avium
MAMLKSSPAFLVLAFAFFLCFIMSNGSYVYFQFVQQWPPTNCRVRIKRPCSSPRPLQYFTIHGLWPSNYSNPRMPSNCTGPQFKRILSPQLRSKLQTSWPDVESGNDTKFWESEWNKHGTCSKETLNQMQYFERSYAMWMSYNITEILKNASIVPHPTQTWKYSDIVAPIKAATKRTPLLRCKQDKNTVLLHEVVFCYEYNALKQIDCNRTSGCQNQPAISFQ

SEQ ID NO: 11003 - protein, 132 aa, Prunus avium
LCFIISAGDGSYVYFQFVQQWPPTTCRVQKKCSKPRPLQNFTIHGLWPSNYSNPTMPSNCNGSRFKKELLSPRMQSKLKISWPNVVSSNDTKFWESEWNKHGTCSEQTLNQVQYFEISHEMWNSFNITDILK

SEQ ID NO: 11004 - protein, 132 aa, Prunus avium
FCYVMSSGSYDYFQFVQQWPPTNCRVRIKRPCSKPRPLQNFTIHGLWPSNYSNPTKPSNCNGSKYEDRKVYPKLRSKLKRSWPDVESGNDTRFWEGEWNKHGRCSEQTLNQMQYFEISHDMWVSYNITEILK

SEQ ID NO: 11005 - protein, 131 aa, Prunus avium
ICYVMSSGSYDYFQFVQQWPPTNCRVRNKPCTKPRPLQNFTIHGLWPSNYSNPRMPSKCTGSLFNFRKVYPQLRSDLKISWPDVESGNDTRFWESEWNKHGRCSEASLNQMQYFERSHAMWISYNITEILK

SEQ ID NO: 11006 - protein, 131 aa, Prunus avium
LCFIMSNGSYVYFQFVQQWPPTNCRVRIKRPCSSPRPLQYFTIHGLWPSNYSNPRMPSNCTGPQFKRILSPQLRSKLQTSWPDVESGNDTKFWESEWNKHGTCSKETLNQMQYFERSYAMWMSYNITEILK

SEQ ID NO: 11007 - protein, 241 aa, Nelumbo nucifera
MASASSFQLMILVIQCLAALSVSHATSVHFFHHAQVWAGSFCASEKGSCFPNTGMVSQEFTVHGLFPCSSSGTRLMNCDRGNSLDLSQITGLLHTMQRKWPSYSCPSSDSTPFWAHEWSKHGTCSLSVFDGQYDYFKAGLDLKDKVNILQILKKEGINPDGQYYSSERITRVLQIATGVTPALDCTVDKFGKYQLYQVMFCVDKSGSEFMDCPVYPEPTCPSIIRFPPFRGSAAEGIYLRS

SEQ ID NO: 11008 - protein, 198 aa, Dictyostelium discoideum
SSKPGDFDFYLFVQQWIYSYCDSQTCIQNKEREAFTIHGLWPENSDGSYPSFCSGPSFNVNAIQDLEDQLNFDWPSLTGPNTDFWTHEFSKHGTCSITGPITDIHDYFATGIKLYTEFNITAALESENIYPSDSNTYKPVDITNAITTHFGGKPGIQCSSGQLSTVAVCIDKNSLSIMDCPDLQGWSCSGSVKFPSTA

SEQ ID NO: 11009 - protein, 227 aa, Hordeum vulgare
MRPCCLSLALLVALSAVGSAAAQAADYDFFYLVLQWPGSYCDTKKSCCYPRTGKPAADFGIHGLWPNRDDGSYPQNCNPANAFDPSKVSDLLSSLRAEWPTLACPASDGLQFWAHEWEKHGTCAQNLFHEHGYFQTAAPPRPAPLLDALASAGVAPDGGYYTLSAVKGAIQQGTGFEPFVECNRDESGNSQLYQLYFCVDARASGFVECPVQPGGRPCGDRIEFPAF

SEQ ID NO: 11010 - protein, 229 aa, Oryza sativa
MAAAARATARVGLALLLAVVGVGAQDYDFFFLVLQWPGSYCDTKQSCCYPRSGKPAADFGIHGLWPNRDDGSYPQNCDPDSEFDPSKVSDLLGSMRSEWPTLACPSNDGIRFWAHEWEKHGTCAAAALGDEHGYFEAALRLRSRLPVLAALRDGGVSPDGGYYTLSQIKGAIQRGVGAEPFVECNRDESGNSQLYQLYFCVDAAGERFVDCPASPGGRPCGNRIEFPAF

SEQ ID NO: 11011 - protein, 229 aa, Oryza sativa; identical to SEQ ID NO: 11010

SEQ ID NO: 11012 - protein, 229 aa, Triticum aestivum
  unsure (1)..(229): unsure at all Xaa locations
MMRSCLSLALLVALSAAGCAAAQAADYDFFYLVLQWPGSYCDTKQSCCYPRSGKPAADFGIHGLWPNRDDGSYPQNCNPANAFDPSKVSDLLSSLRTEWPTLACPTSDGLQFWAHEWEKHGTCAQNLFNEHGYFQTALXPPRPAPLLDALAAAGVSPDGGYYTLSAIKGAIQQGTGFAPHVDCNRDESGNSQLFQLYFCVHADASRFVECPVQPXGGRPCGNRIEFPAF

SEQ ID NO: 11013 - protein, 230 aa, Triticum aestivum
  unsure (1)..(230): unsure at all Xaa locations
MMRSCLPLALLVALSAAGCAAAQAADYDFFYLVLHWPGSYCDTKXQSWCYPRSGKAAADFGIHGLWPNRDDGPYPQNCNPANAFDPSKVSDLLSSLRTEWPTLACPTSDGLQFWAHEWEKHGPCAQNLFNEHGYFQTALXPPRPAPLLDALAAAGVSPXDGGYYTMGAIKGAIQEGTGFAPHVDCNRDESGNSQLFQLYFCVHADASRFVECPVQPGGRPCGNRIEFPAF

SEQ ID NO: 11014 - protein, 253 aa, Calystegia sepium
MASSLPALQIILPLLLLLGTCSANLIRGGHKEFDYFTLALTWSGTECLSVKDSCPTNACSRSEVETGFTIKGLWPDYDDGTWPSCCEGAKYDENEISILSNDLSKYWPSYSCMSSSACGSFDASDLAYEWAKHGTCSSPVLGNQYEYFSTALMLYFKYNISEILSESGYLPSNTAEYKLEGIMSAIQSALRVTPVVKCKSDAVEQVQICFDKTLQLQECPSTASTCPSLVSLPIKNTIKPLETNNLSFRGMRA

SEQ ID NO: 11015 - protein, 212 aa, Calystegia sepium
GHKEFDYFTLALTWSGTECLSVKDSCPTNACSRSEVETGFTIKGLWPDYDDGTWPSCCEGAKYDQNEISILSNDLSKYWPSYSCPSSSACGSFDASDLAYEWAKHGTCSSPVLGNQYEYFSTTLMLYFKYNISEILSESGYLPSNTAEYKVEGIMSAIQSALRVTPVVKCKSDAVEQVQICFDKTLQLQECPSTASTCPSLVSLPIKNTIKP

SEQ ID NO: 11016 - protein, 222 aa, Rhizopus niveus
SSCSSTALSCSNSANSDTCCSPEYGLVVLNMQWAPGYGPDNAFTLHGLWPDKCSGAYAPSGGCDSNRASSSIASVIKSKDSSLYNSMLTYWPSNQGNNNVFWSHEWSKHGTCVSTYDPDCYDNYEEGEDIVDYFQKAMDLRSQYNVYKAFSSNGITPGGTYTATEMQSAIESYFGAKAKIDCSSGTLSDVALYFYVRGRDTYVITDALSTGSCSGDVEYPTK

SEQ ID NO: 11017 - protein, 238 aa, Rhizopus niveus
MKAVLALATLIGSTLASSCSSTALSCSNSANSDTCCSPEYGLVVLNMQWAPGYGPDNAFTLHGLWPDKCSGAYAPSGGCDSSLYSSSIASVIKSKDSSLYNSMLTYWPSNQGNNNVFWSHEWSKHGTCVSTYDPDCYDNYEEGEDIVDYFQKAMDLRSQYNVYKAFSSNGITPGGTYTATEMQSAIESYFGAKAKIDCSSGTLSDVALYFYVRGRDTYVITDALSTGSCSGDVEYPTK

SEQ ID NO: 11018 - protein, 238 aa, Rhizopus niveus
MKAVLALATLIGSTLASSCSSTALSCSNSANSDTCCSPEYGLVVLNMQWAPGYGPDNAFTLHGLWPDKCSGAYAPSGGCDSNRASSSIASVIKSKDSSLYNSMLTYWPSNQGNNNVFWSHEWSKHGTCVSTYDPDCYDNYEEGEDIVDYFQKAMDLRSQYNVYKAFSSNGITPGGTYTATEMQSAIESYFGAKAKIDCSSGTLSDVALYFYVRGRDTYVITDALSTGSCSGDVEYPTK

SEQ ID NO: 11019 - protein, 260 aa, Antirrhinum hispanicum
MATVQKSQHSHFFLLVGCIVHLSNFCSTTTAQFDYFKLVLQWPNSYCSLKTTHCPRTRLPSQFTIHGLWPDNKSWPLSNCRDTSADVLKITDKGLIQDLAVHWPDLTRRQRKVPGQKFWVTQWKKHGACALPMYSFNDYFVKALELKKRNNVLDMLSRKSLTPGDQRVDVSDVNGAITKVTGGIAILKCPEGYLTEVIICFDPSGFPVIDCPGPFPCKDDPLEFPSSVKKKVPRSVSIGGSTLGLEKGASFSLTNTNTGY

SEQ ID NO: 11020 - protein, 235 aa, Antirrhinum hispanicum
MATVQKSQHSHFFLLVGCIVHLSNFCSTTTAQFDYFKLVLQWPNSYCSLKTTHCPRTRLPSQFTIHGLWPDNKSWPLSNCRDTSADVLKITDKGLIQDLAVHWPDLTRRQRKVPGQKFWVTQWKKHGACALPMYSFNDYFVKALELKKRNNVLDMLSRKSLTPGDQRVDVSDVNGAITKVTGGIAILKCPEGYLTEVIICFDPSGFPVIDCPGPFPCKDDPLEFQVLSRRKFQDL

SEQ ID NO: 11021 - protein, 233 aa, Antirrhinum hispanicum
MAMIKKNRKVNPLSLLVVCVVPLNCCSTIIAKCDYLKLVLQWPKSFCLINSRKCQRNPLPSNFTIHGLWPDNYTRQAPQSCTTNNFQRFTDTDIEQRMEESWPDLKQQSIAGLSYNFWQDQWRKHGSCCFPPHESEIYFLKALELKDRLDVLTILENNNFNPGTPQPFSVLRVFNTISRAIGKTPILKCAQSYLKEVVICVDNNGASVVHCPRSRPRPRPRRDPCPFSDVKFP

SEQ ID NO: 11022 - protein, 233 aa, Antirrhinum hispanicum
MVAKKSHDHGQFSFLVLFVILLSSYCFTANAKYFEILKLVLQWPNSYCSLKTSTCRRNPLPLKFTIHGLWPDNYSWPLSDCGYDFTLPDITDKSLLKRLDRNWPDLTKRKNIRKPDKTFWLTQWEKHGTCALSVYTFDDYFRETLNMKRRFNILDMLQRKSMRPGDRVDPQEVARAISKVTNHEPEVKCREGFLTEIIICFDTGRDASVIDCPGPLCTDPMVDFPRSVVRTIR

SEQ ID NO: 11023 - protein, 223 aa, Antirrhinum hispanicum
MATRRNSHYRPFPSLIACVVLLLHYSSAQFDHFKLVLTWPHSFCLVYPGKCHRTPLPLNFTIHGLWPDKQKGKTSPCKKYPVSPLNDKNLELRLEESWPDLRRDSKLGFSTIFWKEQWDKHGSCAWPLYNYEKYFLKALEFKDKFDVLGHLVQDSLGPGTSPTVSRNLVNKTISQATTGIPILKCPSNYLTEVVICFKPTGVVVVACPQPPKDPCPNENVNFP

SEQ ID NO: 11024 - protein, 161 aa, Antirrhinum hispanicum
PDSNGQHLYNCKLDLDEESLGLNSSSTERLEASWPDLLKPEGEDMSFWISQYHKHGSCSQPLYDPQEYFLKALELKDRFDILTILEQGGIYPGKENSRSRVMSVINQATRGNPRLLCNMPKKKILREIVICTNIGGTRVIPCPFPNFRTCGPESNLHDLSN

SEQ ID NO: 11025 - protein, 124 aa, Physalis crassifolia
KKGVDKLTFCSAQPNYTLFQDKKMLDDLDKHWIQLKYSRENGLRKQEFWKRQYEKHGSCCLNRYNQTAYFSLALRLKDKIDLLSTLHNSGIDPGENYTFQEIAKAIKTVTTADSLFKCVKGTTQ

SEQ ID NO: 11026 - protein, 126 aa, Solanum carolinense
NKSQMLNDCSSKKRYHNILEPDKRKQLEDEWPDLTAMAGDTEKHQKFWGYEFNKHGTCSIDLYNQEAYFDLAIKLKNQFDILKTLRNHGIIPGKVSTTVKNVEDAIKAVSAHVPNLNCIGRSSKTM

SEQ ID NO: 11027 - protein, 120 aa, Solanum carolinense
IKGTVLNNCNSQARYTPVTGNDFDKRNKNWPDLFRTEADARKNQGFWRYEFVKHGTCCSDLFNEEKYFDLAVGLKDRFDLLKIFRNKGIIPGSNYTVNKIEKTIRTVTGVVANLSCTGAM

SEQ ID NO: 11028 - protein, 124 aa, Solanum carolinense
HTSFIMYDCNKTIKFKKIEDAAMLNKLDLRWPQLTSTESDASNDQPFWKYQFEKHGTCCSDVYSQSVYFEIAVKLKDSIDLLKILLTKRIIRGFRYTGDQISGAIKSVTQNDPNPKCTYIKRTL

SEQ ID NO: 11029 - protein, 127 aa, Solanum carolinense
WPDNVSTTLNYCKSKTGKYNNIKDPTIKNELYKRWPDLTTSETDCLGNQNFWKRHYNKHGTCCSGRYNLQQYFHLAMALKDKFWLLTSLTNHGIIPGSNYNVQKINSTIKTITRGYPNLSCTEEMEL

SEQ ID NO: 11030 - protein, 122 aa, Solanum carolinense
NVSRTLNFCSGKDDYKKFTEEKEKNDLDERWPDLKTDKIDCIGGQVFWKNEYNKHGTCCSETYNREQYFDLAINLKDKFDLLASLKKHGIIPGNKYTVQKINSTIKTITRGYPNLSCTKGFM

SEQ ID NO: 11031 - protein, 276 aa, Aspergillus oryzae
MGMLALGAMQLAAGAVFEFPSCPKDIPFSCQNSTAVADSCCFNSPGGALLQTQFWDTNPPSGPSDSWTIHGLWPDNCDGSYGQFCDKSREYSNITAILQEQGRTELLSYMKKYWPNYEGDDEEFWEHEWNKHGTCINTIEPSCYKDYSPQKEVGDYLQKTVDLFKGLDSYKALAKAGIVPDSSKTYKRSEIESALAAIHDGKKPYISCEDGALNEIWYFYNIKGNAITGEYQPIDTLTSPGCSTSGIKYLPKKSENSTASAWKFRSDKASQSVRFN

SEQ ID NO: 11032 - protein, 276 aa, Antirrhinum majus X Antirrhinum hispanicum
MALLTARPLNPAAIQCACFVILWIGLLCVNVGINGSGDLGEKLGANQRDFDYFQLALQWPGTFCRRTRHCCPNNGCCRGSNAPAEFTIHGLWPDYNDGSWPSCCTGKTFEEKEISTLLGDLNKYWPSLSCGSPSNCHGGKGLFWEHEWEKHGTCSSSVTGAEYNYFVTALKVYFKYNVTEVLREAGYVASNSEKYPLGGIVTAIQNAFHATPELKCSGDAVEELYLCFYKNFEPRDCATKSNKKSCPRYVSLPEYSSLKMANDGNEVSESALDSDI

SEQ ID NO: 11033 - protein, 411 aa, Irpex lacteus
MVASLVVLGSLAALVSAGPLSLYSPALGPMDIFKRVNSGCGTSGAESCSNSDDGTCCFEAPGGLLLQTQFWDTDPSTGPSDSWTIHGLWPDNCDGTFESSCDSSRAYTGIGDLLTAQGASDTLDFMNQYWVDINGQNEQFWEHEWSKHGTCYSTLETSCLPSGSPKGAEAVAFFQQVVTLFKTLPTYQWLAKAGITPDSSKTFTLSEITSALKSAAGVTPALDCDGKNLNQISWYFHLKGSLLDGKFVPIDAPKAGSCASSGLKYPPKSGSSSGGSSGGSTTTTSSGSSSTGNPGSLPSKATLHASTGGLLSAGTWSTQTLATYTISGSSSSFTLKTSKGSCGVVSSGQFECGSGVSATTFSAVTSGSSLLLASGGSTKWSSDGTPSGTTQEAIFTGSGHGTSLTLSIVSA

SEQ ID NO: 11034 - protein, 250 aa, Irpex lacteus
VNSGCGTSGAESCSNSDDGTCCFEAPGGLLLQTQFWDTDPSTGPSDSWTIHGLWPDNCDGTFESSCDASRAYTGIGDLLTAQGASDTLDFMNQYWVDINGQNEQFWEHEWSKHGTCYSTLETSCLPSGSPKGAEAVAFFQQVVTLFKTLPTYQWLAKAGITPDSSKTFTLSEITSALKSAAGVTPALDCDGKNLNQISWYFHLKGSLLDGKFVPIDAPKAGSCASSGLKYPPKSGSGSSSGGSSGGTSGS

SEQ ID NO: 11035 - protein, 234 aa, Trichoderma viride
ASKTCPSNTPLSCHNTTVVQDTCCFIPSGQLLQTQFWDTDPSTGPSDSWTIHGLWPDNCDGSFPQTCDASRAYTNITDILTAMGADDTLQYMQTYWKDYQGNDESFWEHEWGKHGTCITTLDPGCYDDYVPTEEAADFFSKTVSLFKTLPTYQWLADAGITPDGSKSYALDDIQSALSQQHGAEVTLGCDGKTLNEVWYHFNVKGSLQDGQFVAAEPDGAKSTCPDDVYYDPKK

SEQ ID NO: 11036 - protein, 220 aa, Petunia axillaris subsp. axillaris
MFKSQLTSAHFILLFAISPIYGDFDYMQLVLTWPATFCYPKGFCQRIPPKNFTIHGLWPDKERQRLQFCAKDYKYVNFEGDIKSSLDHHWIQLRFNKEVGLKYQPLWHDQYKKHGTCCSNLYDQTAYFLLAMRLKNKFDLLGTLRTNGITPGRRYTFQRIHGAIKTVTQMDPDLKCVEHIKGVLELNEIGICFTPNAESPYHCPQSHSCEKRGYTGILFR

SEQ ID NO: 11037 - protein, 221 aa, Petunia axillaris subsp. axillaris
MFESRLMSVLFIFLFALSPVYGTFEYMQLVLTWPISFCHTKHCERIPTNFTIHGLWPDNKNALLNNCVPDATYNKITNPELLKQMDYRWPELTSKEIDGKKKQGLWGHEFLKHGTCCTGYDTEEAYFKLAMGLKDRFDLLKILSARGIIPGTTHTLDNIQKAIKAVTRALPNLYCSSDPKRPRMELLEIGICFDPKATSVIVCRRYKTCHTDGTTLIDFPG

SEQ ID NO: 11038 - protein, 180 aa, Physarum polycephalum [sequence omitted]

SEQ ID NO: 11039 - protein, 409 aa, Pholiota nameko
MFFSVVVSSLAAIALATPFFSPNDPTSQLFDRANLISSGYSTTGTQSCHNTSSVSNLCCFEAPGGLLLQTQFWDTNPSTGPSDSWTIHGLWPDHCDTTFSENCDSSRDYTGIGTLLSNNGASDTLAFMQTHWVDINGQNEQFWEHEWATHGTCMSTLKPSCLPSGSVKGAEAVAFFQTVVKLFQTLPTFTFLSNEGITPSTTKTFTLSQLTTALKAQTGFTPALDCSSGALNQISWYFNLKGSIIDGTFVPINAPETGSCPSSGIKYPPKSGGSSTTTTGGSSPTGTPGSLPGKATIHAISSSGTVGGLLSAGTWSTQTLATYTITGTASSFTMTSSKGNCGVSGTTFSCGSGVTTTSFSAVTSGSDLLLASGGSTSFSSDGVPSGSTVFTVFTGTSHTDRYTLSIIST

SEQ ID NO: 11040 - protein, 409 aa, Pholiota nameko
MFFSVVVSSLAAIALATPFFSPNDPTSQLFDRANLISSGCSTTGTQSCHNTSSVSNLCCFEAPGGLLLQTQFWDTNPSTGPSDSWTIHGLWPDHCDTTFSENCDSSRDYTGIGTLLSNNGASDTLAFMQTHWVDINGQNEQFWEHEWATHGTCMSTLKPSCLPSGSVKGAEAVAFFQTVVKLFQTLPTFTFLSNEGITPSTTKTFTLSQLTTALKAQTGFTPALDCSSGALNQISWYFNLKGSIIDGTFVPINAPETGSCPSSGIKYPPKSGGSSTTTTGGSSPTGTPGSLPGKATIHAISSSGTVGGLLSAGTWSTQTLATYTITGTASSFTMTSSKGNCGVSGTTFSCGSGVTTTSFSAVTSGSDLLLASGGSTSFSSDGVPSGSTVFTVFTGTSHTDRYTLSIIST

SEQ ID NO: 11041 - protein, 279 aa, Caenorhabditis elegans
MKLLLLLCISCIPLAYSHDGEPFDYLMFTTIYPTAVCRADDDSVPESCEIPSGTPQWSIHGLWPNFENGSYPQNCRGTPRHFDENLIKSIEDRLVVVWPNLYPKKTIQSFWKHEYDKHGTCAQSEKLFESELAYFTEVMKVFDSIDVAGGLKSVGPSEKPITSSDLKNALSGVTSGKTFQFHCLRDKKTKQFLLGDIRLCLNKDLTIRDCPTDGKHPNRVSRFERSIGRNRRGPPLPSFQPCPAEFIYLPEMSSISKSSDSTSPSIFGRIWSAIKNIGN

SEQ ID NO: 11042 - protein, 137 aa, Caenorhabditis elegans
MKLLLLLCISCIPLAYSHDGEPFDYLMFTTIYPTAVCRADDDSVPESCEIPSGTPQWSIHGLWPNFENGSYPQNCRGTPRHFDENLIKSIEDRLVVVWPNLYPKKTIQSFWKHEYDKHGTCAQSEKLFESELAYFTE

SEQ ID NO: 11043 - protein, 139 aa, Lycopersicon hirsutum
IHGVWPDNKSTMLNNCDFDGEYDDITEPHKLKELEDQWPDLTSMDGDIKKHQDFWGYEFTKHGSCSIDLYNQEAYFDLALKLKNMFDLLKILKNHGIIPGKIYTVKNVEDAIKAVSTKAPNLNCIGRYTQTMELPEIGI

SEQ ID NO: 11044 - protein, 134 aa, Lycopersicon hirsutum
IHGVWPDNEQYMLNDCYGRMYTTIELPGEQNKMNDRWPDLRYTKEFSLEKQKFWEYEYNKHGTCCQPRYNQQQYFNLTMKLRDKFDLLSALQNHGITPGSTTTVKKIGLAIATVTKEFPSLKCIPTMELPEIGL

SEQ ID NO: 11045 - protein, 214 aa, Lycopersicon parviflorum
MVKPQLTAALFIVLFAISPAYGDFDSLQLVLTWPASFCHMNDCVRIAPKNFTIHGLWPDKEGTVLQNCKPKPNYSNFKEKMFNDLDKHWIQLKYDEDYGEKEQPLWFYQYLKHGSCCQKMYNQNTYFSLALRLKDKFDLLRTLQTHKIFPGSSYTFKEIFDAVKTATQMDPDLKCTKGAPELYEIGICFTPKADALIPCRQSNTCARTGKIFFR

SEQ ID NO: 11046 - protein, 221 aa, Todarodes pacificus
KDTHFDFFVFTQQWPPAVCVEAQAHGHLCSIPSDVKGWVVHGLWPSRKTDRMGPFFCNNTYSFDENKIKPIEAEMRKYWPNLFADSPDLSFWKHEWKKHGTCSLSDKLTPDEFGYFNTALNLFKKYNITSILGHSGVIPNTYTAYEVNDFSTAVENALNIVPVITCIYDKMSKHHYIMQVEICIDKELNAISCPDDHSEASSARNCPASKGIWYPPIIPQD

SEQ ID NO: 11047 - protein, 257 aa, Drosophila melanogaster
MSVQDHNWDVLIFTQQWPVTTCYHWREENPDQECSLPQKKEFWTIHGIWPTKLHQMGPNFCNNSANFDPSKLNPIEDRLETFWPDLKGMDSTEWLWKHEWQKHGTCAMLVEELDNELKYFEQGLTWREEYIMSRILDASDIHPDSNNTVAAINNAIVKALGKNPSIHCLYDGKHGISYLSEIRICFSKSLELIDCDGIKQGDAVPVGVPGGTIITNCHIGSLVHYPSLVPPLQRKSHWKLPLVNVYKLLQFLMWFTL

SEQ ID NO: 11048 - protein, 325 aa, Drosophila melanogaster
MQSQRFLFVAILACFLVTIKSTPLSDISDSDESTSVDEKTQKRPDDDSEFDGFPFREDDDSLQDSSREMSVQDHNWDVLIFTQQWPVTTCYHWREENPDQECSLPQKKEFWTIHGIWPTKLHQMGPNFCNNSANFDPSKLNPIEDRLETFWPDLKGMDSTEWLWKHEWQKHGTCAMLVEELDNELKYFEQGLTWREEYIMSRILDASDIHPDSNNTVAAINNAIVKALGKNPSIHCLYDGKHGISYLSEIRICFSKSLELIDCDGIKQGDAVPVGVPGGTIITNCHIGSLVHYPSLVPPLQRKSHWKLPLVNVYKLLQFLMWFTL

SEQ ID NO: 11049 - protein, 325 aa, Drosophila melanogaster
MQSQRFLFVAILACFLVTIKSTPLSDISYSDESTSVNEKTQKRPDDDSEFDGFPFREDDDSLQDSSREMSVQDHNWDVLIFTQQWPVTTCYHWREENPDQECSLPQKKEFWTIHGIWPTKLHQMGPNFCNNSANFDPSKLNPIEDRLETFWPDLKGMDSTEWLWKHEWQKHGTCAMLVEELDNELKYFEQGLTWREEYIMSRILDASDIHPDSNNTVAAINNAIVKALGKNPSIHCLYDGKHGISYLSEIRICFSKSLELIDCDGIKQGDAVPVGVPGGTIITNCHIGSLVHYPSLVPPLQRKSHWKLPLVNVYKLLQFLMWFTL

SEQ ID NO: 11050 - protein, 243 aa, Oncorhynchus keta
MKSLALVVLLCLGCGLMSSSFVLASPHMWSKLILTQHWPSTFCSMEHCDPKFDYWTLHGLWPDKGQECNSSWHFNVTLIQDLLPDMQKWWPDLITPASSEFWQYEWQKHGTCAAKAESLNSQHKYFGKVLELYHMVDLDGVMKKFNIVPSEAYYTFDHIEGIILNFYNVKPKIQCIHPKGGKVQILGQIEICFNSDFQLANCEHSETDTLRLIDFLNVKGTEFSVCDHATPVYYPPLKGKPSM

SEQ ID NO: 11051 - protein, 182 aa, Rana catesbeiana
TPEWKKLILTHHWPVTVCKMAEQKCDDIPNYWTLHGLWTDKEAQMCNISWPFDYSEIKDILADMNKWWPDVLHPNSSQLLKHEWQKHGTCAASLPSLNTQHKYFSKGLELYTRVSLSSALEKSGIKPANTYKVEEIENVILNVYGVIPKIQCIPPQQGEDAQTLGIEICFTKDFDLLNCTVE

SEQ ID NO: 11052 - protein, 117 aa, Lycium andersonii
IQGTVLNNCDSQAKYTTVTDDKFDKRDKHWPDLKLSKADALKHQDFWEYQFKKHGTCCADLFNEEKYFDLALGLKDRFDLLTTFRSHGIIPRSTHLLIKSLKPSGQSLGVIPNLYCT

SEQ ID NO: 11053 - protein, 118 aa, Lycium andersonii
NWSTTLQDCNRRVIINGVKDEQKRIYLDTRWPQLQHTKQFGMENQPFWRSEYRKHGTCCDNLYNEEAYFDLAMNLKDRFDILRILGNKGITPGQTYMVQKVQDAIRAVTHKLPKLKCV

SEQ ID NO: 11054 - protein, 118 aa, Lycium andersonii
NYSTTLNHCDHTKTYKKFKDNKEKSDLYKRWPDLTITEFDCLDKQAFWSREYMKHGTCCSDKFDRVQYFALAMALKDKFDLLKSLRNHGINRGYSYTVQKINSTIKAITRGYPNLTCA

SEQ ID NO: 11055 - protein, 188 aa, Prunus salicina
LCFIMSTGDGSYDYFQFVQQWPPTNCRVRTKCSNPRPLQIFTIHGLWPSNYSNPTMPSNCIGSQFNESKLYPHLRSKLKRSWPDVEGGNDTNFWGKEWNKHGKCSEQTLNLMQYFQRSHEMWNSFNITDILKNASIVPSPNQTWTYTDIVSALKTRTKRTPLLRCKPDPKAKSQPTRQAKSQPTSQPK

SEQ ID NO: 11056 - protein, 207 aa, Prunus salicina
FCYVMSSGSYDYFQFVQQWPPTNCRVRNKPCSKPRPLQNFTIHGLWPSNYSNPTMPSKCTGSRFKKENVYPQLRSKMKISWPDVGSGNDTRFWESEWNKHGTCSEGTLNQVQYFQRSHAMWRSHNVTEILRNASIVPHPTQTWSYSDIVSPIKTATKRTPLIRCKYDKKTQLLHEVVFCYEYNALKQIDCNRTAAAGCKNPQAISFQ

SEQ ID NO: 11057 - protein, 208 aa, Prunus salicina
FCYVMSSGSYDYFQFVQQWPPTNCRVRVKRPCSNPRPLQYFTIHGLWPSNYSNPRMPSNCTGSQFKKQNLYPYMQSKLKISWPDVESGNDTKFWEGEWNKHGTCSERTLNLMQYFQRSHAMWKSHNITEILKNASIVPHPTQTWKYSDIESPIKRATKRTPVLRCKRDPVQANTQLLHEVVFCYEYDALKLIDCNRTDCWKNVDIKFQ

SEQ ID NO: 11058 - protein, 175 aa, Prunus salicina
FCYVLSSGSYDYFQFVQQWPPTNCKIRKKCSKPRPLQMFAIHGLWPSNHSNPTTPSNCNGAQFDDRKVYPRLRSKLKISWPDVENGNDTKFWEGEWNKHGRCSEQTLNQMQYFERSYEIWNLFNITNILKNASIVPSATQTWTYSDIVSNIKAVTQRTPLLRCRRNPAYNKSGPN

SEQ ID NO: 11059 - protein, 212 aa, Prunus salicina
MCFIMSTGDGSYDYFQFVQQWPPATCRLSGKSCSKPRLQIFTIHGLWPSNYSNPKIPSNCKGALFEARKVYPQLQLNLKISWPDVKSGNETNFWQSEWNKHGTCSERTLNQMQYFERSDEMWNSYNITEILKNASIVPHPTQTWKYADIELPIKTATKRTPVLRCKRDPAQNKTGPKTQLLYEVVFCYDYHAKRQIDCNRTECWNKVDIKFH

SEQ ID NO: 11060 - protein, 169 aa, Prunus salicina
FCYVMSSGSYDYFQFVQQWPPTNCRVRNKPCSKPRPLQNFTIHGLWPSNYSNPTMPSKCTGSRFKKENVYPQLRSKMKISWPDVGSGNDTRFWESEWNKHGTCSEGTLNQVQYFQRSHAMWRSHNVTEILRNASIVPHPTQTWSYSDIVSPIKTATKRTPLIRCKYDKK

SEQ ID NO: 11061 - protein, 170 aa, Prunus salicina
FCYVMSSGSYDYFQFVQQWPPTNCRVRIKRPCSNPRPLQYFTIHGLWPSNYSNPTMPSNCNGTQFKIQNLFPYLRSRLKMSWPDVESGNDTKFWEGEWNKHGTCSERILNIMQYFQRSQSMWKSHNITEILKNASIVPHPTQTWKYSDIASPIKSATGRTPLLRCKQDKS

SEQ ID NO: 11062 - protein, 187 aa, Prunus salicina
LSFIMSAAHGSYDYFQFVQQWPPTNCRVRKQPCSKPRPLQIFTIHGLWPSNYSNPTKPSNCNGSQFDDRKVYPQLRTKLKRSWPDVEDGNDTKFWEREWNKHGTCSEGRLNQMQYFERSHNMWMSYNITEILKNASIVPHPTRTWSYSDIVSPIKTATKRTPLLRCKPDPAQPKKGKRAQPNSPPQS

SEQ ID NO: 11063 - protein, 171 aa, Prunus salicina
LCFVMSTGSYVYFQFVQQWPPTTCRVRWKPCSQPRPLQFFTIHGLWPSNYSNPKMPSNCIGSQFNFTKVYPHMRSKLKISWPDVESGNDTKFWEGEWKKHGTCSEERLNQMQYFERSFLMWKSYNITEILKNASIVPSATQTWKYSDIVSPIKAVTKTTPALRCKRDRATN

SEQ ID NO: 11064 - protein, 203 aa, Prunus salicina
LCFIMSTGSHVYFQFVQQWPPTTCRLSSKPRYKHRPLQNFTIHGLWPSNYSNPTKPSNCNGSQFKILPPQLISKLKISWPDVESGNDTRFWEGEWNKHGTCSEQTLNQLQYFEQSYSMWKSYNITEILKNASIIPSATQTWKYSDIVSAIKTATKRTPLLRCKWDKNTQLLHEVVFCYGYNAIKQIDCNRTAGCKNNVGISFQ

SEQ ID NO: 11065 - protein, 173 aa, Prunus salicina
FCYVMSSGSYDYFQFVQQWPPTNCRVRIKRPCSKPRPLQNFTIHGLWPSNYSNPKMPSNCNGSQFDARKVYPHMRSKLKRSWPDVESGNDTRFWEGEWNKHGRCSEQTLNQMQYFETSHDIWMSYNITEILKNASIVPSPSATQTWKYSDIVSPIKAATKRTPLLRCKRDKNN

SEQ ID NO: 11066 - protein, 173 aa, Prunus salicina
FCYVMSSGSYDYFQFVQQWPPTNCRVRVKRPCSNPRPLQYFTIHGLWPSNYSNPRMPSNCTGSQFKKQNLYPYMQSKLKISWPDVESGNDTKFWEGEWNKHGTCSERTLNLMQYFQRSHAMWKSHNITEILKNASIVPHPTQTWKYSDIESPIKRATKRTPVLRCKRDPVQAN

SEQ ID NO: 11067 - protein, 133 aa, Prunus salicina
  unsure (1)..(133): unsure at all Xaa locations
LCFIMSTGDGSYDYFQFVQQWPPTNCKVRTKCSNPRPLQIFTIHGLWPSNYSNPPMPSNCNGSKFEDRKVSPQLRSKLKRXWPDVESGNDTKFWEGEWNKHGTCSEQTLNQMQYFERSHSMWYSFNITEILRN

SEQ ID NO: 11068 - protein, 177 aa, Prunus salicina
LCFIMSTGDGSYDYFQFVQQWPPATCRLSGKSCSKPRLQIFTIHGLWPSNYSNPKIPSNCKGALFEARKVYPQLQLNLKISWPDVKSGNETNFWQSEWNKHGTCSERTLNQMQYFERSDEMWNSYNITEILKNASTVPHPTQTWKYADIELPIKTATKRTPVLRCKRDPAQNKTGPK

SEQ ID NO: 11069 - protein, 167 aa, Prunus salicina
LCFIMSTGSHVYFQFVQQWPPTTCRLSSKPRYKHRPLQNFTIHGLWPSNYSNPTKPSNCNGSQFKILPPQLISKLKISWPDVESGNDTRFWEGEWNKHGTCSEQTLNQLQYFEQSYSMWKSYNITEILKNASIIPSATQTWKYSDIVSAIKTATKRTPLLRCKWDKN

SEQ ID NO: 11070 - protein, 132 aa, Prunus salicina
LCFIMSTGSYVYFQFVQQWPPATCIRSNKPCTKHRPLPIFTIHGLWPSNYSNPRMPSNCRGSLFETRKLSPELQSKLKRAWPNVETDNDTKLWEHEWNKHGRCSEGTLNQTQYFQRSYSMWRSHNITEILRN

SEQ ID NO: 11071 - protein, 199 aa, Gallus gallus
EWSKLYLAHHWPVTVCKDCQDPPEYWTIHGLWPDKGEECNRTWHFNVTEIKDLMSDMRRYWPDVIHSSLNRTQFWKHEWEKHGTCAATLPILNSQKKYFSKTLELYQLVNLGFLLKAGIKPGSTTYYQMAAIKEVLTEFYGITPKIQCLPPEEGEEAQTLGCIEFSFTKELELRTCTEPKEELSVCNDTLPVYYPSQVK

SEQ ID NO: 11072 - protein, 408 aa, Hericium erinaceum
MLRAFLTTSAILASVVLANARLPGFSSADSHSLFKRISSGCSTSGAASCSSGSVGNTCCTESPGGLLLQTQFWDTNPSTGPSNSWTIHGLWPDNCDGTFEENCDSSRDYTNIAGLLQAQGASDTLSFMQEFWVDINGQNEQFWEHEWATHGTCMSTLEPSCLPSGSPTGAEAVAFYQTVVKLFKSLPTYDWLSQEGITPSSSKTYTLSDFTSALNKASGFTPALNCNGNTVNQISWYFHLKGSIIDGNFVAIDTPASGSCPSSGLKYPLKSGSSTSTSAGTSPTGSPGGLPSKATISALTSSGSSLGGLLSAGKWSTQTPGTYTISGSSNSFTLTSSKGACAVTSGEFACGGSSSSTFSAVTSGSNLLLAFQGSTAFSSDASPSGQAQETVFTGSSHSVQFSLTLIST

SEQ ID NO: 11073 - protein, 256 aa, Homo sapiens
MRPAALRGALLGCLCLALLCLGGADKRLRDNHEWKKLIMVQHWPETVCEKIQNDCRDPPDYWTIHGLWPDKSEGCNRSWPFNLEEIKDLLPEMRAYWPDVIHSFPNRSRFWKHEWEKHGTCAAQVDALNSQKKYFGRSLELYRELDLNSVLLKLGIKPSINYYQVADFKDALARVYGVIPKIQCLPPSQDEEVQTIGQIELCLTKQDQQLQNCTEPGEQPSPKQEVWLANGAAESRGLRVCEDGPVFYPPPKKTKH

SEQ ID NO: 11074 - protein, 189 aa, Homo sapiens
MRPAALRGRLLGCLCLALLCLGGADKRLRDNHEWKKLIMVQHWPETVCEKIQNDCRDPPDYWTIHGLWPDKSEGCNRSWPFNLEEIKDLLPEMRAYWPDVIHSFPNRSRFWKHEWEKHGTCAAQVDALNSQKKYFGRSLELYRELDLNSVLLKLGIKPSINYYQVADFKDALARVYGVIPKSSASTKPG

SEQ ID NO: 11075 - protein, 150 aa, Homo sapiens
MRPAALRGALLGCLCLALLCLGGADKRLRDNHEWKKLIMVQHWPETVCEKIQNDCRDPPDYWTIHGLWPDKSEGCNRSWPFNLEEIKDLLPEMRAYWPDVIHSFPNRSRFWKHEWEKHGTCAAQVDALNSQKKYFGRSLELYRELDLNRW

SEQ ID NO: 11076 - protein, 200 aa, Sus scrofa domestica
HEWKKLIMVHHWPMTVCNEKNCEHPPDYWTIHGLWPDKSGECNRSWPFNPDEIKGLLPDMRLYWPDVLHSSPNHSVHFWRHEWEKHGTCAAQLDALNSQRKYFGKTLDLYKELALNSTLQKLGIKPSISYYQISDIKHALVGVYGVVPKVQCLPPKSGEKVQTLGQIELCLTRDLQLQDCPEPGLEICEDGPVFYPPPKE

SEQ ID NO: 11077 - protein, 198 aa, Bos indicus
LEWSKLIMVHHWPATVCQEVARHCKDPPNYWTIHGLWPDKSEACNRSWPFNPHEIKDLLPDMKMYWPDLLHPSNSSLQFWSHEWKKHGTCAAQLNSQRKYFGKSLDLYKALALTSMLQKLGIEPSTDHYYQVSDIRDALVTVYKVVPKVQCFLLEKGQEVQLLGQVELCFSKDLQLQNCSHADLLVCNDGPVLYPPLL

SEQ ID NO: 11078 - protein, 511 aa, Rattus norvegicus
MEDIKDSKVKRFCSKNILIILGFSSVLAVIALIAVGLTHNKPLPENVKYGIVLDAGSSHTNLYIYKWPAEKENDTGVVQLLEECQVKGPGISKYAQKTDEIAAYLAECMKMSTERIPASKQHQTPVYLGATAGMRLLRMESKQSADEVLAAVSRSLKSYPFDFQGAKIITGQEEGAYGWITINYLLGRFTQEQSWLNFISDSQKQATFGALDLGGSSTQVTFVPLNQTLEAPETSLQFRLYGTDYTVYTHSFLCYGKDQALWQKLAQDIQVSSGGILKDPCFYPGYKKVVNVSELYGTPCTKRFEKKLPFNQFQVQGTGDYEQCHQSILKFFNNSHCPYSQCAFNGVFLPPLQGSFGAFSAFYFVMDFFKKMANDSVSSQEKMTEITKNFCSKPWEEVKASYPTVKEKYLSEYCFSGTYILSLLLQGYNFTGTSWDQIHFMGKIKDSNAGWTLGYMLNLTNMIPAEQPLSPPLPHSTYISLMVLFSLVLVAMVITGLFIFSKPSYFWKEAV

SEQ ID NO: 11079 - protein, 449 aa, Rattus norvegicus
MRLSWKERVFMVLLGVAAASGLTMLILILVKATNVLLPADTKFGILFDAGSSHTSLFVYQWPANKEKDTGVVSQALACQVEGPGISSYTSDPTQAGESLKSCLQEALALIPQTQHPVTPTFLGATAGMRLLSQKNSSQAQDILAAVSQTLSRAPVDFWGARILAGQDEGAFGWITVNYVLGMLLKYSSGQWILPEDGTLVGALDLGGASTQISFVPQGPILDQSTQVTFRLYGANYSVYTHSYLCFGRDQILRRLLAELVQSSQVARVRHPCYHSGYQATLSLASLYDSPCVHTPDSLNYTQNLTVEGIGNPGNCVAALRGLFNFSSCKGQEDCAFNGVYQPPVHGQFYAFSNFYYTFQFLNLTSRQPLNIVNDTIWKFCQKPWRLAGGTDIGWTLGFMLNLTGMIPAEALTQWRAQSYSIWIAGVVFAVLTLVAILGAAAVQLFWTQD

SEQ ID NO: 11080 - protein, 827 aa, Plasmodium falciparum 3D7
MENLIGTPLIEKKKKESHISIRKDKKLNDIEGEKKEKKIKERLFLCLICLLVIIWLIYFCYKNHIFLSYLQNEKEYGIIIDAGSNGTRIHLFEWKKREYELSNKKEENNLIELKEIFNAKVKKSISTISYNEIKDILIYLINKVIDHLIEKKIYVYNKQKWKSYPFYFQATGGMRNLKQEDRNLRMKYIKNILSNDNYNPFYFLNEYARILSGEEEGIYGWLAVNNLLNSIFSKPNNTYGAIDLGGSSTQITFYPMDHNILENYNSILLNNILIRLYSHSFIGYGWIDSLFRVNIYLCLEIIKKLSTRNIKNIYQLENYYDDYINDYFYNNLPNYNWFFYSTKKIINNNKENYNHHNYENINYDVNKRNYPYNNFQQKYIHTNPKKGNYTKGNINNSNKSYKNLSNILLQEIVKYIQHSQNDYPYSSLTDIYDYTYNIYDEKPYDIENFIKTIKNFNRHSKEDTIMLVQNPCLPYPYEMKITFPTYNLVTSQFVILKKNSRNEIGNINDIKNDGNNYTQNDDNNYTQNDGNYYRQNVGNYYRHNHNINDVYELNSSESYDNFISNFVLKLKIINNNMSLMDNIYEDFKNKGYLNNVLKKVNDNKISNTLKNEIIKRLFEKIINEKIKKLYINITVRIVGSNDFKKCLENTKKLFYEQPCFLSSCSFNGIYQPNLENNKFVLHGQFKKVITYLGFKKYVDLNQMKIYIQKLCNMNLYELTYNMSNKIMHNQIPTFCWKSIWSYSLLFYGFKFKETTKLLIINDNTNISYDSSSTSQASKQFYKSTLKKYKLYSEVFFVLFLIIFIILIILGGYIFKFKEILNKKYRFL

SEQ ID NO: 11081 - protein, 692 aa, Arabidopsis thaliana
MVFGRITELFTAASSRLPAGSQSSVPYMPTGSSPDVGTSVSDSISIGNGGRKNCLRHSASLQDFSSYHGFDPEESILPREAISWGQNGSSFSKEKGSVPNGTNPSTRRKLIRAVMIVMCLFLFAFLVYIVSMYIYTNWSRGASRYYVVFDCGSTGTRAYVYQASINYKKDSSLPIVMKSLTEGISRKSRGRAYDRMETEPGFDKLVNNRTGLKTAIKPLIQWAEKQIPKNAHRTTSLFVYATAGVRRLRPADSSWILGNVWSILAKSPFTCRREWVKIISGTEEAYFGWTALNYQTSMLGALPKKATFGALDLGGSSLQVTFENEERTHNETNLNLRIGSVNHHLSAYSLAGYGLNDAFDRSVVHLLKKLPNVNKSDLIEGKLEMKHPCLNSGYNGQYICSQCASSVQGGKKGKSGVSIKLVGAPNWGECSALAKNAVNSSEWSNAKHGVDCDLQPCALPDGYPRPHGQFYAVSGFFVVYRFFNLSAEASLDDVLEKGREFCDKAWQVARTSVSPQPFIEQYCFRAPYIVSLLREGLYITDKQIIIGSGSITWTLGVALLESGKALSSTLGLKSYETLSMKINPIALISILILSLLLLLCALSRVSNCLPRFFRKSYLPLFRHNSTSASSVLNIPSPFRFQRWSPMSTGNSICIILSYGQFFCSQFLTLSFFVSLIFFLGRYLFLELIFFQG

SEQ ID NO: 11082 - protein, 1052 aa, Arabidopsis thaliana
MTAPMILTGSGSAAERDARMAHTAMAFVQLFNGGYHVITKVALNVGVNQLVFCVCRDLLALSILAPLAYFRERSLLFQLGIWEPVVISYRSYIHKSHLCCCHSTIHPGLHLSLGCHDGFWFFDVSYLVCSTERVNLLRIEGQTKVGGTLVCVMGAVFMVVFRGPALLGDKDADFAMNNEISAKGQPEPTGWLVSGFLDLGFEQWHIGVLCLIGNCMCLDQRINCSLLTSVHVSFNVDIMETLQAPLLKKYPANLSVAALSYFFGTVLMCTTAFFMVKEPLDWKLTQSEVLAVIYAGVIASALNYGLLTWSNKIIGPALVALYNPLQPAASAFLSRIFLGSPIYLGRLDTFSGIFFNHPQSSLAKLNTFTFQHLVPFHSFHLQNFLTRFLFLYAALWAREMVFGRITELFTAASSRLPAGSQSSVPYMPTGSSPDVGTSVSDSISIGNGGRKNCLRHSASLQDFSSYHGFDPEESILPREAISWGQNGSSFSKEKGSVPNGTNPSTRRKLIRAVMIVMCLFLFAFLVYIVSITGTRAYVYQASINYKKDSSLPIVMKSLTEGISRKSRGRAYDRMETEPGFDKLVNNRTGLKTAIKPLIQWAEKQIPKNAHRTTSLFVYATAGVRRLRPADSSWILGNVWSILAKSPFTCRREWVKIISGTEEAYFGWTALNYQTSMLGALPKKATFGALDLGGSSLQVTFENEERTHNETNLNLRIGSVNHHLSAYSLAGYGLNDAFDRSVVHLLKKLPNVNKSDLIEGKLEMKHPCLNSGYNGQYICSQCASSVQGGKKGKSGVSIKLVGAPNWGECSALAKNAPCALPDGYPRPHGQFYAVSGFFVVYRFFNLSAEASLDDVLEKGREFCDKAWQVARTSVSPQPFIEQYCFRAPYIVSLLREGLYITDKQIIIGSGSITWTLGVALLESGKALSSTLGLKSYETLSMKINPIALISILILSLLLLLCALSRVSNCLPRFFRKSYLPLFRHNSTSASSVLNIPSPFRFQRWSPMSTGNSICIILSYGQFFCSQFLTLSFFVSLIFFLGRYLFLELIFFQG

SEQ ID NO: 11083 - protein, 385 aa, Glycine max
VTFESDQQLNSETSLYVRIGSVSHHLTAYSLPGYGLNEAFGKSVVYLFRKEFGSGNVDVGSGGNAELKHPCLQDGALAKVAVNLSEWTDLGAVDCGAQPCALGDNLPHPYGHFYVISGFYVVYRFFNLTSEATLDDVLAKGKGFCEKRWDVAKRSVAPQPFIEQYCFRAPYIASLLREGLHINDNQITVGSGNITWTLGVALLEAGKAFSTRFGLRDLEFFQMKINPLVLVPILLLSFILLLCALSCVGNWMPRFFRRQYLPISRHNSAGASVLNIPSPFRFQRWSPMYSGDGRLKMPLSPKIASSQQSQFGLGHSLDGGGIELMESSSSANNVSHSYSSNNLGQMQFDSGIWSPHRSQMRLQSRRSQSREDLNSSLAEVHLMKP

SEQ ID NO: 11084 - protein, 362 aa, Glycine max
  unsure (1)..(362): unsure at all Xaa locations
XERYSCSHCSNAVKKGGESPTVEGNGNVLGKKDGGLRTVVTLIGAPNWLECSALAKVAVNLSEWSDVSGMDCEVHPCALRDNLPRPMGHFYVISGFFVVYRFFNLTAEATLEDVLEKGREFCEKRWDVARKSVAPQPFIEQYCFRAPYIASLLREGLHITDKHITVGSGSITWTLGVALLEAGKAYSVRFGLRGFYLLQMKMNPLILIPILILSFILLLCALSWVVNWMPRFFRRQYLPFFRHNSASSACINIPSPFRFQRWSPMNSGDGRTKTPLSPTIAGSQDRPFSLGHGLSGGNIQLMESSFQASSVSHSYSSNNLGQMQFDSSIWSPHRSQMHLQSRRSQSREDLNSSLAETHMVKA

SEQ ID NO: 11085 - protein, 211 aa, Glycine max
  unsure (1)..(211): unsure at all Xaa locations
PASVSIESLKDGLRKNPSSGRAYDRMETEPGLDKLLHNRTGLKTALEPLLKWAQKQIPKTSHKTTSLFLYATAGVRRLPFDDSKWLLDNAWSFLKSSSPFVCKRDWVKIISGTEEAYLGWIALNYDSGILGVKPRKETYGALDLGGSSLQVTFEGNRNKEQQNQQLLNSETRLYVRIGSMNHHLTGYSLAGYGLNEAFEXSGAYVFKKYGY

SEQ ID NO: 11086 - protein, 702 aa, Oryza sativa (japonica cultivar-group)
MRLSSSLQDLPTFSRIDALERGSSTGSDLVSGRAKPIRTLQRDGAVASFSKEKTPPSSPTNRKKCMRAAGCAIALFLLVFFIYASLRYFHVFLSEGSPEYYVILDCGSTGTRVYVYEWSVNHDDGNTFPIALKPLGNAPKKKSGKLTGRAYQRMETEPGLNKLVHNETGLKMTIEPLLRMAEKLIPRRAHKHTPAFLYATAGVRKLPSADSEWLLDKAWDILKNSSFLCSRDRVKIISGMDEAYYGWIALNHHLNMLGTSSSKMTYGSLDLGGSSLQVTFETDNSIQDETSMSLRIGSISHQLSAYSLSGYGLNDAFDKSVAHLVKKLGGAAGNGKVQVKHPCLQTGYKEDYICSYCHPLKLDGSPSVGGKTTGKEKQGMAVELIGMPQWNECSALAKLTVNLSEWSNASSVDCNTKPCALPSTFPQPHGQFYAMSGFYVVFKFFNLTADATLIDVLNRGQEFCEKTWKVAKSSVPPQPFIEQYCFRAPYITSLLREGLQIKDNQVIIDSGSITWTLGVALLEAGQVLSTRIDIQGYRILHREINPNILIVLFLISIVLVICAILCVSNSIPRSFRKSYLPLFRQNSAGSPVLSMGSPFRFHLWSHITSGDARTKTPLSPTVAGSEPHPFSMSHGLGGSSVQLMESSRQSLGVYHSYSVGSLGQMQFSSGMWKPGQTTLQSRRSQSREDLTSSLADLHLPKV

SEQ ID NO: 11087 - protein, 681 aa, Oryza sativa (japonica cultivar-group)
MRLSSSLQDLPTFSRIDALERGSSTGSDLVSGRAKPIRTLQRDGAVASFSKEKTPPSSPTNRKKCMRAAGCAIALFLLVFFIYASLRYFHVFLSEGSPEYYVILDCGSTGTRVYVYEWSVNHDDGNTFPIALKPLGNAPKKKSGKLTGRAYQRMETEPGLNKLVHNETGLKMTIEPLLRMAEKLIPRRAHKHTPAFLYATAGVRKLPSADSEWLLDKAWDILKNSSFLCSRDRVKIISGMDEAYYGWIALNHHLNMLGTSSSKMTYGSLDLGGSSLQVTFETDNSIQDETSMSLRIGSISHQLSAYSLSGYGLNDAFDKSVAHLVKKLGGAAGNGKVQVKHPCLQTGYKEDYICSYCHPLKLDGSPSVGGKTTGKEKQGMAVELIGMPQWNECSALAKLTVNLSEWSNASSVDCNTKPCALPSTFPQPHGQFYAMSGFYVVFKFFNLTADATLIDVLNRGQEFCEKTWKVAKSSVPPQPFIEQYCFRAPYITSLLREGLQIKDNQVIIDSGSITWTLGVALLEAGQVLSTRIDIQGYRILHREINPNILIVLFLISIVLVICAILCVSNSIPRSFRKSYLPLFRQNSAGSPVLSMGSPFRFHLWSHITSGDARTKTPLSPTVAGSEPHPFSMSHGLGGSSVQLMESSRQSLGVYHSYSVGSLGQMQFSSGMWKPELLYDTM

SEQ ID NO: 11088 - protein, 563 aa, Oryza sativa
  unsure (1)..(563): unsure at all Xaa locations
XNFIRIKFTYTNFTSPTNRKKCMRAAGCAIALFLLVFFIYASLSTGTRVYVYEWSVNHDDGNTFPIALKPLGNAPKKKSGKLTGRAYQRMETEPGLNKLVHNETGLKMTIEPLLRMAEKLIPRRAHKHTPAFLYATAGVRKLPSADSEWLLDKAWDILKNSSFLCSRDRVKIISGMDEAYYGWIALNHHLNMLGTSSSKMTYGSLDLGGSSLQVTFETDNSIQDETSMSLRIGSISHQLSAYSLSGYGLNDAFDKSVAHLVKKLGGAAGNGKVQVKHPCLQTGYKEDYICSYCHPLKLDGSKEKQGMAVELIGMPQWNECSALAKLTPCALPSTFPQPHGQFYAMSGFYVVFKFFNLTADATLIDVLNRGQEFCEKTWKVAKSSVPPQPFIEQYCFRAPYITSLLREGLQIKDNQVIIDSGSITWTLGVALLEAGQVLSTRIDIQGYRILHREINPNILIVLFLISIVLVICAILCVSNSIPRSFRKSYLPLFRQNSAGSPVLSMGSPFRFHLWSHITSGISILKKLLLFSFYINYYVGLNFLIXLIYYYRKVVFVTXLYXQX

SEQ ID NO: 11089 - protein, 583 aa, Oryza sativa
  unsure (1)..(583): unsure at all Xaa locations
MPVAVSLDRTTSAVACKSIEAAAASKTSSPPPPSATTPPXTSVRADPTLPHTARSSTMRLSSSLQDLPTFSRIDALESAKPIRTLQRDGAVASFSKEKXXPPSSPTNRKKCMRAAGCAIALFLLVFFIYASLRYFHVFLSEGSPEYYVILDCGSTGTRVYVYEWSVNHDDGNTFPIALKPLGNAPKKKSGKLTGRAYQRMETEPGLNKLVHNETGLKMTIEPLLRMAEKLIPRRAHKHTPAFLYATAGVRKLPSADSEWLLDKAWDILKNSSFLCSRDRVKIISGMDEAYYGWIALNHHLNMLGTSSSKMTYGSLDLGGSSLQVTFETDNSIQDETSMSLRIGSISHQLSAYSLSGYGLNDAFDKSVAHLVKKLGGAAGNGKVQVKHPCLQTGYKEDYICSYCHPLKLDGSKEKQGMAVELIGMPQWNECSALAKLTVNLSEWSNAXXSVDCNTKPCALPSTFPQPHGQFYAMSGFYVVFKFFNLTADATLIDVLNRGQEFCEKTWKVAKSSVPPQPFIEQYCFRAPYITSLLREGLQIKDNQVIIDSGSHWASITAILLEAXVRCSFLVECGSQNCCTTPCX

SEQ ID NO: 11090 - protein, 435 aa, Oryza sativa
  unsure (1)..(435): unsure at all Xaa locations
XRAAGLGNAPKKKSGKLTGRAYQRMETEPGLNKLVHNETGLKMTIEPLLRVAEKLIPRRAHKHTPAFLYATAGVRKLPSADSEWLLDKAWDILKNSSFLCSRDRVKIISGMDEAYYGWIALNHHLNMXLGTSSSKMTYGSLDLGGSSLQVTFETDNSIQDETSMSLRIGSISHQLSAYSLSGYGLNDAFDKSVAHLVKKLGGAAGNGKVQVKHPCLQTGYKEDYICSYCHPLKLDGSKEKQGMAVELIGMPQWNECSALAKLTVNLSEWSNAXXSVDCNTKPCALPSTFPQPHGQFYAMSGFYVVFKFFNLTADATLIDVLNRGQEFCEKTWKVAKSSVPPQPFIEQYCFRAPYITSLLREGLQIKDNQVIIDSGSITWTLGVALLEAGQVLSTRIDIQGYRILHREINPXIFLMGLFLISIGLVICAILCVSNS

SEQ ID NO: 11091 - protein, 260 aa, Triticum aestivum
  unsure (1)..(260): unsure at all Xaa locations
XNLTPDATLVDVLKRGQEFCEKPWDVARSSVPPQPFIEQYCFRAPYITSLLREGLQIKDNQVIIGSGSITWTLGVALLEAGQALSRMDIQGYILLHREINPNILIVLFLISIVLVICAILCVSNSIPRSFRKSYLPLFRPNSGGSSALXGMGSPFRFHLWRHINSGDGRTKTPLSPTVAGSEPHPFSMTHGLGGSSVQLMESSRQSLGVYHSYSVGSLGQMQFSSELRNPTRGQTTLQSRRSQSREDLTSSLADLHIPKV

SEQ ID NO: 11092 - protein, 572 aa, Schizosaccharomyces pombe
MVRKYGIFIDAGSSGSRLLIYSWDYDTDSSLSDKVKKLPLIETGIGDGGKWSLKVQPGISSFANNPKHVGKKHLKELLDFAAHAIPKDVHKETPVFLSATAGMRLLGVDAQNKILSHACRYIKKNYDFDIPNCSNSIRVIDGKAEGMYGWLATNYLLKTLEEKDTSTVGFLDMGGASVQIAFELPPSQLKNYKDSISTVHIGLQNGQQLEYPLFVTTWLGFGANEAYRRYLGLLIESENGKVGNTLSDPCSLRGRTYDIDGIEFAGTGDLKQCLKLTYNLLNKDKPCSMDPCNFDGISIPPVDFANTEFVGVSEFWYTTNDVFDMGGSYHFPNFYKKVDEYCGTEWETMLSRLYNKELTPSTDENKLEKLCFKASWALNVLHEGFDVPKSNTSSNDAKDGLSVIPAYHSPFTSLEKIERTEVSWTLGQVLLYASNQQLLAKPEYANYYMDPYGKLIASPSKHWMRLFPNKLFFILSFIFCLFFLFSLVLFGYDPKRRQRFKKFLLRLQRRKAPYIMSANGSYEDIADFSDDLEMSSPSKWHGPPIRTTSSHVLADRLSFTASRERTPRSPFP

SEQ ID NO: 11093 - protein, 750 aa, Neurospora crassa
MTGRWGVILDAGSSGTRLHIYRWKDPEKALVDATPEELRSLPKITTKKKWTKKIRPGISTFGEKAGVVGQDYLKELIDHALDIIPADKIHDTPIFLMATAGMRLLPQVQQNAITGAVCTYLRKNTNFSLPDCDLHIQVIPGETEGLYGWIASNYLLGGFDHPEQHAHGQDHHTYGFLDMGGASAQIAFAPNSTEAQKHANDLKLLRLRTLDGSPAEYKVFTTTWLGFGVNRAREAYVQSLSDLYTTSDAGELPDPCLPKGLRLSLDGTPVSKPKKGETTLIGTGAFDECLRKTYPLLGKDKPCADDPCLINGQHVPAIDFDVNHFVGVSEYWHTTHGVFGGKENEAYDFTTYQKRVKDFCGRDWNSIEPSLDAHKKFAVKDAQEACFKASWLINILHEGIGVPRIGVEELPAPGLNASKGAIETAKQKGFLDPFHPVDKIDGIEVSWTLGKMVLYAAGQVPPKTGDDRFPVGFGTNIPSAGATELPPDFQYAGSTWTPLSGGASHNDSPYRPAVNGTTDDGSDWDLEAENLLGKTKAKTTHSLLIVFFIFLALLFFFRKKDRRMRFYGRVNNLFHKPRRSGLFGKMASSGHNNGPLSSLTNKLFGRRSLSSGSYERVLEEGEAAEFELNDSHFRNSASSYFDHNNDLNGFYSDSSDSSSSGGGRSKLGITSGLATPKLNLDGRFADLGCGNGLMTPGGSALDRAGLVVRTDSRERLGLTPTTTTMSLQGRRSRAGSPTRLKSPLMSPLQG

SEQ ID NO: 11094 - protein, 690 aa, Leishmania major
MPMTDGRVPGGKLRRSMSRVVLAFFAAVLFVVFLTAYEVGVGTANPLQSRHMQLTQNAVKKSEENLVNCREVNTDLRSGGDVNVARAMAEMRRQREELMNIVALERERVVSARSLLQVCEDELASDLSVLFGVADHNFTARLRSLEKKRKHLEGLHSMLNTDPFGAVQLRSSSEIRALQAALFHEMRASKKKAENGVASGAACAKSSVKYSVVFDIGSTGNRVHVYKYRVAPATRTAAAAGSELSDIDLVEELFELNHKALSELENSVQDAPEALWELFVKAKDFVPAELHACTAAEFKATAGLRMLGMEKANEILAGIRARYRNETFWLRGNASVRILDACEEGPMAWLTVNYLLGAFSRGATATDSTVAVIDLGGGSTQIVFEPGESTFHGMRTDFRYAATLGSRSVRAYQHSYEGYGLHAATKKLLYHIQGKSQEKPGGGTATNTAMTTTTTAPANGGDEVLPVWKALRNLGADGRSERGDIVTKRAPPMPPPDAEAMEAFPCFAVGYEDPLGVKNVKRNNAEEPVMPPNFQACANLFRDRLLKPVGLTCEAVNCGIAGVMQPPLTNFTGEIYAFSFIFDLLVLANSSLVPAGAAVSKEKFEVKLPDLAKIAEGHCAAFSLTRIAEATAKGGLGSLKPEYECMYYSYVYALLRYGYEVPEDRVLHVAKKIRGYETAWSLGASLLSLT

SEQ ID NO: 11095 - protein, 513 aa, Bos taurus
MEDRRESELKVFCSKNILSILGFSCIIAVIALLALGLTQNKALPENVKFGIVLDAGSSHTSLYIYRWPAEKENDTGVVTQIEESNVKGPGISGFAKKVNEINVYLTACMERAQKVIPSIQHMETPVYLGATAGMRLLRMENKQMADKILAAVASSISEYPFDFQGARIISGQEEGAYGWITVNYLLGKFTQKLSWFNLKPSKDDTQETYGALDLGGASTQITFVPQNETTESPNNNLYFRLYGKNYSVYTHSFLCYGKDQALLQKLALGLQGTNGIIHEPCFHSRYMRKIKMSVLNEGFCTKRHELNSSFYPLVDIEIRGAGNFQRCRQSIIQLFNTSYCPYSSCSFNGVFLPPLHGQFGAFSAFYYVMEFLNLTSEESVSVEQLTEKLEEFCAQRWEEVQKNFGEVKEKYLSEYCFSGTYILVLLLNGYHFTAESWKNIHFMNKVRSTDVGWTLGYMLNLTNKIPAEEPMSPPLPHSTYVFLMVLFSLILLAVIIVGIVVFHKPSYFWKDMV

SEQ ID NO: 11096 - protein, 479 aa, Aspergillus awamori
MPRTSLLTLACALATGASAFSYGAAIPQSTQEKQFSQEFRDGYSILKHYGGNGPYSERVSYGIARDPPTSCEVDQVIMVKRHGERYPSPSAGKDIEEALAKVYSINTTEYKGDLAFLNDWTYYVPNECYYNAETTSGPYAGLLDAYNHGNDYKARYGHLWNGETVVPFFSSGYGRVIETARKFGEGFFGYNYSTNAALNIISESEVMGADSLTPTCDTDNDQTTCDNLTYQLPQFKVAAARLNSQNPGMNLTASDVYNLMVMASFELNARPFSNWINAFTQDEWVSFGYVEDLNYYYCAGPGDKNMAAVGAVYANASLTLLNQGPKEAGSLFFNFAHDTNITPILAALGVLIPNEDLPLDRVAFGNPYSIGNIVPMGGHLTIERLSCQATALSDEGTYVRLVLNEAVLPFNDCTSGPGYSCPLANYTSILNKNLPDYTTTCNVSASYPQYLSFWWNYNTTTELNYRSSPIACQEGDAMD

SEQ ID NO: 11097 - protein, 467 aa, Aspergillus awamori
MGVSAVLLPLYLLAGVTSGLAVPASRNQSTCDTVDQGYQCFSETSHLWGQYAPFFSLANESAISPDVPAGCRVTFAQVLSRHGARYPTESKGKKYSALIEEIQQNVTTFDGKYAFLKTYNYSLGADDLTPFGEQELVNSGIKFYQRYESLTRNIIPFIRSSGSSRVIASGEKFIEGFQSTKLKDPRAQPGQSSPKIDVVISEASSSNNTLDPGTCTVFEDSELADTVEANFTATFAPSIRQRLENDLSGVTLTDTEVTYLMDMCSFDTISTSTVDTKLSPFCDLFTHDEWIHYDYLQSLKKYYGHGAGNPLGPTQGVGYANELIARLTHSPVHDDTSSNHTLDSNPATFPLNSTLYADFSHDNGIISILFALGLYNGTKPLSTTTVENITQTDGFSSAWTVPFASRLYVEMMQCQAEQEPLVRVLVNDRVVPLHGCPIDALGRCTRDSFVRGLSFARSGGDWAECSA

SEQ ID NO: 11098 - protein, 443 aa, Trametes pubescens
MAFSILASLLFVCYAYARAVPRAHIPLRDTSACLDVTRDVQQSWSMYSPYFPAATYVAPPASCQINQVHIIQRHGARFPTSGAAKRIQTAVAKLKAASNYTDPLLAFVTNYTYSLGQDSLVELGATQSSEAGQEAFTRYSSLVSADELPFVRASGSDRVVATANNWTAGFALASSNSITPVLSVIISEAGNDTLDDNMCPAAGDSDPQVNQWLAQFAPPMTARLNAGAPGANLTDTDTYNLLTLCPFETVATERRSEFCDIYEELQAEDAFAYNADLDKFYGTGYGQPLGPVQGVGYINELIARLTAQNVSDHTQTNSTLDSSPETFPLNRTLYADFSHDNQMVAIFSAMGLFNQSAPLDPTTPDPARTFLVKKIVPFSARMVVERLDCGGAQSVRLLVNDAVQPLAFCGADTSGVCTLDAFVESQAYARNDGEGDFEKCFAT

SEQ ID NO: 11099 - protein, 439 aa, Peniophora lycii
MVSSAFAPSILLSLMSSLALSTQFSFVAAQLPIPAQNTSNWGPYDPFFPVEPYAAPPEGCTVTQVNLIQRHGARWPTSGARSRQVAAVAKIQMARPFTDPKYEFLNDFVYKFGVADLLPFGANQSHQTGTDMYTRYSTLFEGGDVPFVRAAGDQRVVDSSTNWTAGFGDASGETVLPTLQVVLQEEGNCTLCNNMCPNEVDGDESTTWLGVFAPNITARLNAAAPSANLSDSDALTLMDMCPFDTLSSGNASPFCDLFTAEEYVSYEYYYDLDKYYGTGPGNALGPVQGVGYVNELLARLTGQAVRDETQTNRTLDSDPATFPLNRTFYADFSHDNTMVPIFAALGLFNATALDPLKPDENRLWVDSKLVPFSGHMTVEKLACSGKEAVRVLVNDAVQPLEFCGGVDGVCELSAFVESQTYARENGQGDFAKCGFVPSE

SEQ ID NO: 11100 - protein, 442 aa, cf. Ceriporia sp. CBS 100231
MLFGFVALACLLSLSEVLATSVPKNTAPTFPIPESEQRNWSPYSPYFPLAEYKAPPAGCQINQVNIIQRHGARFPTSGATTRIKAGLTKLQGVQNFTDAKFNFIKSFKYDLGNSDLVPFGAAQSFDAGQEAFARYSKLVSKNNLPFIRADGSDRVVDSATNWTAGFASASHNTVQPKLNLILPQTGNDTLEDNMCPAAGDSDPQVNAWLAVAFPSITARLNAAAPSVNLTDTDAFNLVSLCAFLTVSKEKKSDFCTLFEGIPGSFEAFAYGGDLDKFYGTGYGQELGPVQGVGYVNELIARLTNSAVRDNTQTNRTLDASPVTFPLNKTFYADFSHDNLMVAVFSAMGLFRQPAPLSTSVPNPWRTWRTSSLVPFSGRMVVERLSCFGTTKVRVLVQDQVQPLEFCGGDRNGLCTLAKFVESQTFARSDGAGDFEKCFATSA

SEQ ID NO: 11101 - protein, 442 aa, cf. Ceriporia sp. CBS 100231
MHLGFVTLACLIHLSEVFAASVPRNIAPKFSIPESEQRNWSPYSPYFPLAEYKAPPAGCEINQVNIIQRHGARFPTSGAATRIKAGLSKLQSVQNFTDPKFDFIKSFTYDLGTSDLVPFGAAQSFDAGLEVFARYSKLVSSDNLPFIRSDGSDRVVDTATNWTAGFASASRNAIQPKLDLILPQTGNDTLEDNMCPAAGESDPQVDAWLASAFPSVTAQLNAAAPGANLTDADAFNLVSLCPFMTVSKEQKSDFCTLFEGIPGSFEAFAYAGDLDKFYGTGYGQALGPVQGVGYINELLARLTNSAVNDNTQTNRTLDAAPDTFPLNKTMYADFSHDNLMVAVFSAMGLFRQSAPLSTSTPDPNRTWLTSSVVPFSARMAVERLSCAGTTKVRVLVQDQVQPLEFCGGDQDGLCALDKFVESQAYARSGGAGDFEKCLATTV

SEQ ID NO: 11102 - protein, 463 aa, Aspergillus nidulans
MAFFTVALSLYYLLSRVSAQAPVVQNHSCNTADGGYQCFPNVSHVWGQYSPYFSIEQESAISEDVPHGCEVTFVQVLSRHGARYPTESKSKAYSGLIEAIQKNATSFWGQYAFLESYNYTLGADDLTIFGENQMVDSGAKFYRRYKNLARKNTPFIRASGSDRVVASAEKFINGFRKAQLHDHGSKRATPVVNVIIPEIDGFNNTLDHSTCVSFENDERADEIEANFTAIMGPPIRKRLENDLPGIKLTNENVIYLMDMCSFDTMARTAHGTELSPFCAIFTEKEWLQYDYLQSLSKYYGYGAGSPLGPAQGIGFTNELIARLTQSPVQDNTSTNHTLDSNPATFPLDRKLYADFSHDNSMISIFFAMGLYNGTQPLSMDSVESIQEMDGYAASWTVPFGARAYFELMQCEKKEPLVRVLVNDRVVPLHGCAVDKFGRCTLDDWVEGLNFARSGGNWKTCFTL

SEQ ID NO: 11103 - protein, 482 aa, Anopheles gambiae str. PEST
VILLLHCAVQLIAAQRSTCCESYCYNDDPERKQVKHFATKTMYELVRAPDTDRQHIVPNCVPVKFWLLSRHGTRLPGKSEINELPKQLKLLQDAIMDNYFTRRTPPDNGRMCEEDLELLRQWHWDPNITEQYDSFLTDQGWEDLKYIALRAKEKYWQVFGSGYQPAKFMFRHTKTQRTEASFKAFAEGLFGREEAQRVKPTPATEPDRLLKPYDDCPDFDANKDRNKRDENSEVNKFLRSALFTGTVWDISQRLGFRHNLSVEQVETLWDACRYEQAWKISRPSPFCAAFTEDQVRVLEYKEDLAYYYRQSYGYGPSTELACHAMADMLRQLSSRDDPSVVAYFTHDTEIQLFLAALGAKRDEMPLRADNFPFMRNRKYTTSDIPFAANVAAVKYQCAEQREPERVIFFLNEKPLMLDWCSVGLCNWSDVKQKYQRFTEGNCDRTFCQSSGAVGTHLAGSIALGVAPLLLLAVLRRLTSLSL

SEQ ID NO: 11104 - protein, 466 aa, Talaromyces thermophilus
MSLLLLVLSGGLVALYVSRNPHVDSHSCNTVEGGYQCRPEISHSWGQYSPFFSLADQSEISPDVPQNCKITFVQLLSRHGARYPTSSKTELYSQLISRIQKTATAYKGYYAFLKDYRYQLGANDLTPFGENQMIQLGIKFYNHYKSLARNAVPFVRCSGSDRVIASGRLFIEGFQSAKVLDPHSDKHDAPPTINVIIEEGPSYNNTLDTGSCPVFEDSSGGHDAQEKFAKQFAPAILEKIKDHLPGVDLAVSDVPYLMDLCPFETLARNHTDTLSPFCALSTQEEWQAYDYYQSLGKYYGNGGGNPLGPAQGVGFVNELIARMTHSPVQDYTTVNHTLDSNPATFPLNATLYADFSHDNTMTSIFAALGLYNGTAKLSTTEIKSIEETDGYSAAWTVPFGGRAYIEMMQCDDSDEPVVRVLVNDRVVPLHGCEVDSLGRCKRDDFVRGLSFARQGGNWEGCYAASE

SEQ ID NO: 11105 - protein, 469 aa, Kluyveromyces lactis
MLSILLSLLSLSGTHAAPISKDNGTVCYALNSSTTDESIFPLLNGQGPHYDYPQSFGIPVEVPDQCTVEHVQMLARHGERYPTASKGKLWIALWDKLKEFQGQYNGPMEVFNDYEFFVSNTKYFDQLTNSTDVDPSNPYAGAKTAQHLGKYIAYNYGDLFSDSNPVFTSSSGRVHQTAKYVVSSLEEELDIQLDLQIIQENETSGANSLTPADSCMTYNGDLGDEYFENATLPYLTDIKNRWMKKNSNLNLTLEHDDIELLVDWCAFETNVKGSSAVCDLFERNDLVAYSYYANVNNFYRRGAGNPMSNPIGSVLVNASYNLLTQADELDNKVWLSFSHDTDIQQFISALGLIDNGVTEYSLDQVDFQNIQQLSWVTPMGGRIFTEKLKCGNASYVRYIINDVIIPVPGCTSGPGFSCPIEDFDDYITNRLNGIDYVSSCEVQQVSNTTELTFYWDYNEVEYNGPVSNK

SEQ ID NO: 11106 - protein, 469 aa, Kluyveromyces lactis
MLSILLGLLSLSGTHAAPISKDNGTVCYALNNSTTDESIFSLLNGQGPHYDYPQSFGIPVEVPDQCTVEHVQMLARHGERYPTASKGKLMIALWDKLKEFQGQYNDPLEVFNDYEFFVSNTKYFDQLTNSTDVDPSNPYAGAKTAQHLGKYIAYNYGDLFSDSNPVFTSSSGRVHQTAKYVVSSLEEELDIQLDLQIIQENETSGANSLTPADSCMTYNGDLGDEYFENATLPYLTDIKNRWMKKNSNLNLTLEHDDIELLVDWCAFETNVKGSSAVCDLFERNDLVAYSYYANVNNFYRRGAGNPMSNPIGSVLVNASYNLLTQADELDNKVWLSFSHDTDIQQFISALGLIDNGVTEYSLDQVDFQNIQQLSWVTPMGGRIFTEKLKCGNASYVRYIINDVIIPVPGCTSGPGFSCPIEDFDDYITNRLNGIDYVSSCEVQQVSNTTELTFYWDYNEVEYNGPVSNK

SEQ ID NO: 11107 - protein, 464 aa, Fugu rubripes
MTAPVWKVIVRFAAVFGLCAGFRCDVVAEENPNIPAIANYFTTKGRYEEVNPHLIDDILAVNSSILQPPSAQCRIIHLTAIVRHGTRYPTGKNIKKMHDFYELMKSSAVGRESWLQELQNQWTMWYTEDMDGRLVQKGVDDLKNLAVRLSKLFPSMISEEKLRAGMIKFITSSKHRCVNSTLSFKAGLTELWAISDQEIEHTVNDALMRFFDQCTRFVQEVDGNPSALSEVESFRLGPEMRRVQEKIAERLRVPYSDITCDSAEAAFYLCAYEFAIKTVNSPWCRLFDQVDAQIMEYANDLKQFWKRGYGHDINSKSSCILFHDLFSRLEKAVSDHKSGQKVTEAVTVQVGHAKTLLPLLTLLGFFKDNNRMTSVNYAAQTRRSFRTSLMVPYAANLVLVLYDCGNDDLRLQPLLNEKPVDFPGLTTQKASMPRFQDVKELYRELLQGCDFESECRLFRAPAEG

SEQ ID NO: 11108 - protein, 448 aa, synthetic construct
MAVPASRNQSTCDTVDQGYQCFSETSHLWGQYAPFFSLANKSAISPDVPAGCHVTFAQVLSRHGARYPTDSKGKKYSALIEEIQQNATTFEGKYAFLKTYNYSLGADDLTPEGEQELVNSGVKFYQRYESLTRNIVPFIRSSGSSRVIASGNKFIEGFQSTKLKDPRAQPGQSSPKIDVVISEASTSNNTLDPGTCTVFEDSELADDIEANFTATFVPSIRQRLENDLSGVSLTDTEVTYLMDMCSFDTISTSTVDTKLSPFCDLFTHEEWINYDYLQSLNKYYGHGAGNPLGPTQGVGYANELIARLTHSPVHDDTSSNHTLDSNPATFPLNSTLYADFSHDNGIISILFALGLYNGTKPLSSTTAENITQTDGFSSAWTVPFASRMYVEMMQCQSEQEPLVRVLVNDRVVPLHGCPVDALGRCTRDSFVKGLSFARSGGDWGECFA

SEQ ID NO: 11109 - protein, 449 aa, synthetic construct
MLAVPASRNQSSCDTVDQGYQCFSETSHLWGQYAPFFSLANESVISPEVPAGCRVTFAQVLSRHGARYPTDSKGKKYSALIEEIQQNATTFDGKYAFLKTYNYSLGADDLTPFGEQELVNSGIKFYQRYESLTRNIVPFIRSSGSSRVIASGKKFIEGFQSTKLKDPRAQPGQSSPKIDVVISEASSSNNTLDPGTCTVFEDSELADTVEANFTATFVPSIRQRLENDLSGVTLTDTEVTYLMDMCSFDTISTSTVDTKLSPFCDLFTHDEWINYDYLQSLKKYYGHGAGNPLGPTQGVGYANELIARLTHSPVHDDTSSNHTLDSSPATFPLNSTLYADFSHDNGIISILFALGLYNGTKPLSTTTVENITQTDGFSSAWTVPFASRLYVEMMQCQAEQEPLVRVLVNDRVVPLHGCPVDALGRCTRDSFVRGLSFARSGGDWAECFA

SEQ ID NO: 11110 - protein, 449 aa, synthetic construct
MLAVPASRNQSTCDTVDQGYQCFSETSHLWGQYAPFFSLANKSAISPDVPAGCHVTFAQVLSRHGARYPTDSKGKKYSALIEEIQQNATTFEGKYAFLKTYNYSLGADDLTPFGEQELVNSGVKFYQRYESLTRNIVPFIRSSGSNRVIASGNKFIEGFQSTKLKDPRAQPGQSSPKIDVVISEASTSNNTLDPGTCTVFEDSELADDIEANFTATFVPSIRQRLENDLSGVSLTDTEVTYLMDMCSFDTISTSTVDTKLSPFCDLFTHEEWINYDYLQSPNKYYGHGAGNPLGPTQGVGYANELIARLTHSPVHDDTSSNHTLDSNPATFPLNSTLYADFSHDNGIISILFALGLYNGTKPLSSTTAENITQTDGFSSAWTVPFASRMYVEMMQCQSEQEPLVRVLVNDRVVPLHGCPVDALGRCTRDSFVKGLSFARSGGDWAECFA

SEQ ID NO: 11111 - protein, 448 aa, synthetic construct
MAVPASRNQSTCDTVDQGYQCFSETSHLWGQYAPFFSLANKSAISPDVPAGCQVTFAQVLSRHGARYPTDSKGKKYSALIEEIQQNATTFKEKYAFLKTYNYSLGADDLTPEGEQELVNSGVKFYQRYESLTRNIVPFIRSSGSSRVIASGNKFIEGFQSTKLKDPRAQPGQSSPKIDVVISEASSSNNTLDPGTCTVFEDSELADTVEANFTATFVPSIRQRLENDLSGVTLTDTEVTYLMDMCSFDTISTSTVDTKLSPFCDLFTHDEWINYDYLQSLKKYYGHGAGNPLGPTQGVGYANELIARLTHSPVHDDTSSNHTLDSSPATFPLNSTLYADFSHDNGIISILFALGLYNGTKPLSTTTVENITQTDGFSSAWTVPEASRLYVEMMQCQAEQEPLVRVLVNDRVVPLHGCPVDALGRCTRDSFVRGLSFARSGGDWAECFA

SEQ ID NO: 11112 - protein, 477 aa, synthetic construct
MNFLKSFPFYAFLCFGQYFVAVTHALAVPASRNQSTCDTVDQGYQCFSETSHLWGQYAPFFSLANKSAISPDVPAGCQVTFAQVLSRHGARYPTDSKGKKYSALIEEIQQNATTFKEKYAFLKTYNYSLGADDLTPEGEQELVNSGVKFYQRYESLTRNIVPFIRSSGSSRVIASGNKFIEGFQSTKLKDPRAQPGQSSPKIDVVISEASSSNNTLDPGTCTVFEDSELADTVEANFTATFVPSIRQRLENDLSGVTLTDTEVTYLMDMCSFDTISTSTVDTKLSPFCDLFTHDEWINYDYLQSLKKYYGHGAGNPLGPTQGVGYANELIARLTHSPVHDDTSSNHTLDSSPATFPLNSTLYADFSHDNGIISILFALGLYNGTKPLSTTTVENITQTDGFSSAWTVPEASRLYVEMMQCQAEQEPLVRVLVNDRVVPLHGCPVDALGRCTRDSFVRGLSFARSGGDWAECFAKDEL

SEQ ID NO: 11113 - protein, 467 aa, synthetic construct
MRVSAVLLPLYLLSGVTSGLAVPASRNQSTCDTVDQGYQCFSETSHLWGQYAPFFSLANKSAISPDVPAGCQVTFAQVLSRHGARYPTDSKGKKYSALIEEIQQNATTFKEKYAFLKTYNYSLGADDLTPEGEQELVNSGVKFYQRYESLTRNIVPFIRSSGSSRVIASGNKFIEGFQSTKLKDPRAQPGQSSPKIDVVISEASSSNNPLDPGTCTLFEDSELADTVEANFTATFVPSIRQRLENDLSGVTTTDTEVTYLMDMCSFDTISTSTVDTKLSPFCDLFTHDEWINYDYLQSLKKYYGHGAGNPLGPTQGVGYANELIARLTHSPVHDDTSSNHTLDSSPATFPLNSTLYADFSHDNGIISILFALGLYNGTKPLSTTTVENITQTDGFSSAWTVPEASRLYVEMMQCQAEQEPLVRVLVNDRVVPLHGCPVDALGRCTRDSFVRGLSFARSGGDWAECFA

SEQ ID NO: 11114 - protein, 443 aa, synthetic construct
SKSCDTVDLGYQCSPATSHLWGQYSPFFSLEDELSVSSKLPKDCRITLVQVLSRHGARYPTSSKSKKYKKLVTAIQANATDFKGKFAFLKTYNYNLGADDLNPFGEQQLVNSGIKFYQRYKALARSVVPFIRASGSDRVIASGEKFIEGFQQAKLADPGATNRAAPAISVIIPESETFNNTLDHGVCTKFEASQLGDEVAANFTALFAPDIRARAEKHLPGVTLTDEDVVSLMDMCSFDTVARTSDASQLSPFCQLFTHNEWKKYNYLQSLGKYYGYGAGNPLGPAQGIGFTNELIARLTRSPVQDHTSTNSTLVSNPATFPLNATMYVDFSHDNSMVSIFFALGLYNGTEPLSRTSVESAKELDGYSASWVVPFGARAYFETMQCKSEKEPLVRALINDRVVPLLGCDVDKLGRCKLNDFVKGLSWARSGGNWGECFSKDEL

SEQ ID NO: 11115 - protein, 465 aa, synthetic construct
MVTLTFLLSAAYLLSGRVSAAPSSAGSKSCDTVDLGYQCSPATSHLWGQYSPFFSLEDELSVSSKLPKDCRITLVQVLSRHGARYPTSSKSKKYKKLVTAIQANATDFKGKFAFLKTYNYNLGADDLNPFGEQQLVNSGIKFYQRYKALARSVVPFIRASGSDRVIASGEKFIEGFQQAKLADPGATNRAAPAISVIIPESETFNNTLDHGVCTKFEASQLGDEVAANFTALFAPDIRARAEKHLPGVTLTDEDVVSLMDMCSFDTVARTSDASQLSPFCQLFTHNEWKKYNYLQSLGKYYGYGAGNPLGPAQGIGFTNELIARLTRSPVQDHTSTNSTLVSNPATFPLNATMYVDFSHDNSMVSIFFALGLYNGTEPLSRTSVESAKELDGYSASWVVPFGARAYFETMQCKSEKEPLVRALINDRVVPLLGCDVDKLGRCKLNDFVKGLSWARSGGNWGECFS

SEQ ID NO: 11116 - protein, 477 aa, synthetic construct
MDFLKSFPFYAFLCFGQYFVAVTHALAVPASRNQSTCDTVDQGYQCFSETSHLWGQYAPFFSLANKSAISPDVPAGCQVTFAQVLSRHGARYPTDSKGKKYSALIEEIQQNATTFKEKYAFLKTYNYSLGADDLTPEGEQELVNSGVKFYQRYESLTRNIVPFIRSSGSSRVIASGNKFIEGYQSTKLKDPRAQPGHSSPKIDVVISEASTSNNTLDPGTCTVSEDNELADDFEANFTATFVPSIRQSLENNLSGVALTDTEVTYLMDLCSFDTISTSTVDTKLSPFCDLFTHEKWINYDYLQSLNKYYGHGAGNPLGPTQGVCYANELISRLTHSPVHDYTSSNHILDSSQDTFPLNSTLYADFSLNNGIISILFAWGLNKGTKPLSSTTAENITQTDGFSSAWTVPFASRMYVEMMQCQSEQEPLVRVLVNDRVVPLHGCPVDALGRCTRDSFVRGLSFARSGGDWAECFAKDEL

SEQ ID NO: 11117 - protein, 448 aa, synthetic construct
MAVPASRNQSTCDTVDQGYQCFSETSHLWGQYAPFFSLANKSAISPDVPAGCQVTFAQVLSRHGARYPTDSKGKKYSALIEEIQQNATTFKEKYAFLKTYNYSLGADDLTPEGEQELVNSGVKFYQRYESLTRNIVPFIRSSGSSRVIASGNKFIEGYQSTKLKDPRAQPGHSSPKIDVVISEASTSNNTLDPGTCTVSEDNELADDFEANFTATFVPSIRQSLENNLSGVALTDTEVTYLMDLCSFDTISTSTVDTKLSPFCDLFTHEKWINYDYLQSLNKYYGHGAGNPLGPTQGVCYANELISRLTHSPVHDYTSSNHILDSSQDTFPLNSTLYADFSLNNGIISILFAWGLNKGTKPLSSTTAENITQTDGFSSAWTVPFASRMYVEMMQCQSEQEPLVRVLVNDRVVPLHGCPVDALGRCTRDSFVRGLSFARSGGDWAECFA

SEQ ID NO: 11118 - protein, 409 aa, synthetic construct
MPIPAQNTSNWGPYDPFFPVEPYAAPPEGCTVTQVNLIQRHGARWPTSGARSRQVAAVAKIQMARPFTDPKYEFLNDFVYKFGVADLLPFGANQSHQTGTDMYTRYSTLFEGGDVPFVRAAGDQRVVDSSTNWTAGFGDASGETVLPTLQVVLQEEGNCTLCNNMCPNEVDGDESTTWLGVFAPNITARLNAAAPSANLSDSDALTLMDMCPFDTLSSGNASPFCDLFTAEEYVSYEYYYDLDKYYGTGPGNALGPVQGVGYVNELLARLTGQAVRDETQTNRTLDSDPATFPLNRTFYADFSHDNTMVPIFAALGLFNATALDPLKPDENRLWVDSKLVPFSGHMTVEKLACSGKEAVRVLVNDAVQPLEFCGGVDGVCELSAFVESQTYARENGQGDFAKCGFVPSE

SEQ ID NO: 11119 - protein, 466 aa, Aspergillus terreus
MGFLAIVLSVALLFRSTSGTPLGPRGKHSDCNSVDHGYQCFPELSHKWGLYAPYFSLQDESPFPLDVPEDCHITFVQVLARHGARSPTHSKTKAYAATIAAIQKSATAFPGKYAFLQSYNYSLDSEELTPFGRNQLRDLGAQFYERYNALTRHINPFVRATDASRVHESAEKFVEGFQTARQDDHHANPHQPSPRVDVAIPEGSAYNNTLEHSLCTAFESSTVGDDAVANFTAVFAPAIAQRLEADLPGVQLSTDDVVNLMAMCPFETVSLTDDAHTLSPFCDLFTATEWTQYNYLLSLDKYYGYGGGNPLGPVQGVGWANELMARLTRAPVHDHTCVNNTLDASPATFPLNATLYADFSHDSNLVSIFWALGLYNGTAPLSQTSVESVSQTDGYAAAWTVPFAARAYVEMMQCRAEKEPLVRVLVNDRVMPLHGCPTDKLGRCKRDAFVAGLSFAQAGGNWADCF

SEQ ID NO: 11120 - protein, 466 aa, Aspergillus terreus
MGVFVVLLSIATLFGSTSGTALGPRGNHSDCTSVDRGYQCFPELSHKWGLYAPYFSLQDESPFPLDVPDDCHITFVQVLARHGARSPTDSKTKAYAATIAAIQKNATALPGKYAFLKSYNYSMGSENLNPFGRNQLQDLGAQFYRRYDTLTRHINPFVRAADSSRVHESAEKFVEGFQNARQGDPHANPHQPSPRVDVVIPEGTAYNNTLEHSICTAFEASTVGDAAADNFTAVFAPAIAKRLEADLPGVQLSADDVVNLMAMCPFETVSLTDDAHTLSPFCDLFTAAEWTQYNYLLSLDKYYGYGGGNPLGPVQGVGWANELIARLTRSPVHDHTCVNNTLDANPATFPLNATLYADFSHDSNLVSIFWALGLYNGTKPLSQTTVEDITRTDGYAAAWTVPFAARAYIEMMQCRAEKQPLVRVLVNDRVMPLHGCAVDNLGRCKRDDFVEGLSFARAGGNWAECF

SEQ ID NO: 11121 - protein, 453 aa, Schizosaccharomyces pombe
MFLQNLFLGFLAVVCANAQFAEFTAFDGKFDFKEHLTSRSPYHKPYFYGPSIDFPTTCKIKQVHTLQRHGSRNPTGGNAAFDAVGIANFQQRLLNGSVPIDYSVSGNPLSFVPTWTPVIEAANADALSSSGRVELFDMGRQFYERYHELFNASTYNIYTAAQQRVVDSALWYGYGMFGEDVHNFTNYILVSENATAGSNSLSSYNACPASDADDFTTPALEAWRNVYMPPIRQRLNPYFSNYNLTNDDILNLYGICSYEIALQDYSEFCKLFNSVDFLNFEYEGDLSFSYGMGNSVKWGSIFGGAYANSLANSLRSVENNTQQVFFAFTHDANIIPVETALGFFTDNTPENPLPTSYQVHSHSMKASEFVPFAGNLITELFQCEDSKYYVRHLVNEEVFPLSDCGFGPSNTSDGMCELYAYLNSPVRVNGTSNGIQNFDTLCNASAVAAVYPY

SEQ ID NO: 11122 - protein, 463 aa, Schizosaccharomyces pombe
MKLSGISLWLLAASIVHAGKSQFEAFENEFYFKDHLGTISVYHEPYFNGPTTSFPESCAIKQVHLLQRHGSRNPTGDDTATDVSSAQYIDIFQNKLLNGSIPVNFSYPENPLYFVKHWTPVIKAENADQLSSSGRIELFDLGRQVFERYYELFDTDVYDINTAAQERVVDSAEWFSYGMFGDDMQNKTNFIVLPEDDSAGANSLAMYYSCPVYEDNNIDENTTEAAHTSWRNVFLKPIANRLNKYFDSGYNLTVSDVRSLYYICVYEIALRDNSDFCSLFTPSEFLNFEYDSDLDYAYWGGPASEWASTLGGAYVNNLANNLRKGVNNASDRKVFLAFTHDSQIIPVEAALGFFPDITPEHPLPTDKNIFTYSLKTSSFVPFAGNLITELFLCSDNKYYVRHLVNQQVYPLTDCGYGPSGASDGLCELSAYLNSSVRVNSTSNGIANFNSQCQAHSTNVTVYY

SEQ ID NO: 11123 - protein, 463 aa, Schizosaccharomyces pombe
MQLCIISLWFLAAFIVNADNVQFEDYESNFFFKEHLGTLSPYHEPYFDGLDSAFPETCEIQQVHLLQRHGSRNPTGDVTATDVYSSQYLNNFQEKLLNGSIPVNFSYPENPLCFIKQWTPVIDAENADQLSSRGRLELFDLGRQLYQRYYKLFDSYVYDINTAEQERVVESAKWFTYGLFGDKMYEKTNFILISEGKAAGANSLSMYNACPVFKDNNFHKNATDAAHAVWRNIFIEPIVNRLAKYFDSSYKLTINDVRSLFYICEYEIAIKDHSDFCSIFTPSEFLNFEYDSDLDQAYGGGPVSEWASTLGGAYINNLADSLRNVTNPDFDRKVFLAFTHDSNIIPVEAALGFFPDITPQNPLPTDKNIYTYSQKTSSFVPFAGNLITELFFCSDSKYYVRHLVNQQVYPLIDCGYGPSGTSDGLCELQAYLNSPIRANSTSNGISIFNTECQARPTNVTIYF

SEQ ID NO: 11124 - protein, 198 aa, Schizosaccharomyces pombe
NFQQRLLNGSVPIDYSVSGNPLSFVPTWTPVIEAANADALSSSGRVELFDMGRQFYERYHELFNASTYNIYTAAQQRVVDSALWYGYGMFGEDVHNFTNYILVSENATAGSNSLSSYNACPASDADDFTTPALEAWRNVYMPPIRQRLNPYFSNYNLTNDDILNLYGICSYEIALQDYSEFCKLFNSVDFLNFEYEGD

SEQ ID NO: 11125 - protein, 442 aa, Pichia angusta
MFSFATTLLVGAIVANGLILHPGYDQVATDQYNLLKFMIGAGPFVEHSGFGIPLDTPPHCEIEQAQLFMRHGERFPTKSSGKQYKKFYDKLKKANITDYKGPLAFIEDLEYFVPDSDNYELETTRGLYSGLLNAFKFGTYLRERYDSLVDTSSVLPIFAASEDRVVDTARSFGRGFFGPDYATSCSIQVVNETDTSKGANALTTKDNCPTYNSSFYDYSFGDEIFQREADRLNELSPGFNITADDIITMGTYCAYETNVKGHSSFCDALSREAFIALQYNNDVTKFYQFGPGYNMSAVAGGVYANATAKLLQEDGKLWFSFSHDNDLLNYITALGLITDTELGTEDVDFHRSFKTSELVPQGARLIIEKLNCSDTSFVRTILNDKVYPVPGCSSGPGYSCPLEDYLDIITPEVDYASACELPDDAPKEISFYWDWKPTFENN

SEQ ID NO: 11126 - protein, 468 aa, Pichia pastoris
MFSPILSLEIILALATLQSVFAVELQHVLGVNDRPYPQRTDDQYNILRHLGGLGPYIGYNGWGIAAESEIESCTIDQAHLLMRHGERYPSTNVGKQLEALYQKLLDADVEVPTGPLSFFQDYDYFVSDAAWYEQETTKGFYSGLNTAFDFGTTLRERYDHLINTSEEGKKLSVWAGSQERVVDTAKYFAQGFMKSNYTDMVEVVALEEEKSQGLNSLTARISCPNYNSHIYKDGDFPNDIAEREADRLNTLSPGFNITADDIPTIALYCGFELNVRGESSFCDVLSREALLYTAYLRDLGWYYNVGNGNPLGKTIGYVYANATRQLLENTEADPRDYPLYFSFSHDTDLLQVFTSLGLFNVTDLPLDQIQFQTSFKSTEIVPMGARLLTERLLCTVEGEEKYYVRTILNDAVFPLSDCSSGPGFSCPLNDYVSRLEALNEDSDFAENCGVPKNASYPLELSFFWDDLS

SEQ ID NO: 11127 - protein, 479 aa, Aspergillus ficuum
MPRTSLLTLACALATGASAFSYGAAIPQSTQEKQFSQEFRDGYSILKHYGGNGPYSERVSYGIARDPPTGCEVDQVIMVKRHGERYPSPSAGKSIEEALAKVYSINTTEYKGDLAFLNDWTYYVPNECYYNAETTSGPYAGLLDAYNHGNDYKARYGHLWNGETVVPFFSSGYGRVIETARKFGEGFFGYNYSTNAALNIISESEVMGADSLTPTCDTDNDQTTCDNLTYQLPQFKVAAARLNSQNPGMNLTASDVYNLMVMASFELNARPFSNWINAFTQDEWVSFGYVEDLNYYYCAGPGDKNMAAVGAVYANASLTLLNQGPKEAGPLFFNLAHDTNITPILAALGVLIPNEDLPLDRVAFGNPYSIGNIVPMGGHLTIERLSCQATALSDKGTYVRLVLNEAVLPFNDCTSGPGYSCPLANYTSILNKNLPDYTTTCNVSASYPQYLSFWWNYNTTTELNYRSSPIACQEGDAMD

SEQ ID NO: 11128 - protein, 438 aa, Aspergillus ficuum
SCDTVDQGYQCFSETSHLWGQYAPFFSLANESVISPEVPAGCRVTFAQVLSRHGARYPTDSKGKKYSALIEEIQQNATTFDGKYAFLKTYNYSLGADDLTPFGEQELVNSGIKFYQRYESLTRNIVPFIRSSGSSRVIASGKKFIEGFQSTKLKDPRAQPGQSSPKIDVVISEASSSNNTLDPGTCTVFEDSELADTVEANFTATFVPSIRQRLENDLSGVTLTDTEVTYLMDMCSFDTISTSTVDTKLSPFCDLFTHDEWINYDYLQSLKKYYGHGAGNPLGPTQGVGYANELIARLTHSPVHDDTSSNHTLDSSPATFPLNSTLYADFSHDNGIISILFALGLYNGTKPLSTTTVENITQTDGFSSAWTVPFASRLYVEMMQCQAEQEPLVRVLVNDRVVPLHGCPVDALGRCTRDSFVRGLSFARSGGDWAECFA

SEQ ID NO: 11129 - protein, 441 aa, Aspergillus ficuum
ASRNQSSCDTVDQGYQCFSETSHLWGQYAPFFSLANESVISPEVPAGCRVTFAQVLSRHGARYPTDSKGKKYSALIEEIQQNATTFDGKYAFLKTYNYSLGADDLTPFGEQELVNSGIKFYQRYESLTRNIVPFIRSSGSSRVIASGKKFIEGFQSTKLKDPRAQPGQSSPKIDVVISEASSSNNTLDPGTCTVFEDSELADTVEANFTATFVPSIRQRLENDLSGVTLTDTEVTYLMDMCSFDTISTSTVDTKLSPFCDLFTHDEWINYDYLQSLKKYYGHGAGNPLGPTQGVGYANELIARLTHSPVHDDTSSNHTLDSSPATFPLNSTLYADFSHDNGIISILFALGLYNGTKPLSTTTVENITQTDGFSSAWTVPFASRLYVEMMQCQAEQEPLVRVLVNDRVVPLHGCPVDALGRCTRDSFVRGLSFARSGGDWAE

SEQ ID NO: 11130 - protein, 448 aa, Aspergillus ficuum
LAVPASRNQSTCDTVDQGYQCFSETSHLWGQYAPFFSLANKSAISPDVPAGCQVTFAQVLSRHGARYPTDSKGKKYSALIEEIQQNATTFEEKYAFLKTYNYSLGADDLTPFGEQELVNSGVKFYQRYESLTRNIVPFIRSSGSSRVIASGNKFIEGFQSTKLKDPRAQPGQSSPKIDVVISEASTSNNTLDPGTCTVFEDSELADDIEANFTATFVPSIRQRLENDLSGVTLTDTEVTYLMDMCSFDTISTSTVDTKLSPFCDLFTHEEWINYDYLQSLNKYYGHGAGNPLGPTQGVGYANELIARLTHSPVHDDTSSNHTLDSNPATFPLNSTLYADFSHDNGIISILFALGLYNGTKPLSSTTAENITQTDGFSSAWTVPFASRMYVEMMQCQSEQEPLVRVLVNDRVVPLHGCPVDALGRCTRDSFVKGLSFARSGGDWAECFA

SEQ ID NO: 11131 - protein, 467 aa, Aspergillus ficuum
MGVSAVLLPLYLLSGVTSGLAVPASRNQSTCDTVDQGYQCFSETSHLWGQYAPFFSLANKSAISPDVPAGCHVTFAQVLSRHGARYPTDSKGKKYSALIEEIQQNATTFEGKYAFLKTYNYSLGADDLTPFGEQELVNSGVKFYQRYESLTRNIVPFIRSSGSSRVIASGNKFIEGFQSTKLKDPRAQPGQSSPKIDVVISEASTSNNTLDPGTCTVFEDSELADDIEANFTATFVPSIRQRLENDLSGVSLTDTEVTYLMDMCSFDTISTSTVDTKLSPFCDLFTHEEWINYDYLQSLNKYYGHGAGNPLGPTQGVGYANELIARLTHSPVHDDTSSNHTLDSNPATFPLNSTLYADFSHDNGIISILFALGLYNGTKPLSSTTAENITQTDGFSSARTVPFASRMYVEMMQCQSEQEPLVRVLVNDRVVPLHGCPVDALGRCTRDSFVKGLSFARSGGDWAECFA

SEQ ID NO: 11132 - protein, 479 aa, Aspergillus niger [sequence omitted]

SEQ ID NO: 11133 - protein, 460 aa, Aspergillus niger
FSYGAAIPQSTQEKQFSQEFRDGYSILKHYGGNGPYSERVSYGIARDPPTSCEVDQVIMVKRHGERYPSPSAGKDIEEALAKVYSINTTEYKGDLAFLNDWTYYVPNECYYNAETTSGPYAGLLDAYNHGNDYKARYGHLWNGETVVPFFSSGYGRVIETARKFGEGFFGYNYSTNAALNIISESEVMGADSLTPTCDTDNDQTTCDNLTYQLPQFKVAAARLNSQNPGMNLTASDVYNLMVMASFELNARPFSNWINAFTQDEWVSFGYVEDLNYYYCAGPGDKNMAAVGAVYANASLTLLNQGPKEAGSLFFNFAHDTNITPILAALGVLIPNEDLPLDRVAFGNPYSIGNIVPMGGHLTIERLSCQATALSDEGTYVRLVLNEAVLPFNDCTSGPGYSCPLANYTSILNKNLPDYTTTCNVSASYPQYLSFWWNYNTTTELNYRSSPIACQEGDAMD

SEQ ID NO: 11134 - protein, 467 aa, Aspergillus niger
MGVSAVLLPLYLLSGVTSGLAVPASRNQSTCDTVDQGYQCFSETSHLWGQYAPFFSLANKSAISPDVPAGCHVTFAQVLSRHGARYPTDSKGKKYSALIEEIQQNATTFEGKYAFLKTYNYSLGADDLTPFGEQELVNSGVKFYQRYESLTRNIVPFIRSSGSSRVIASGNKFIEGFQSTKLKDPRAQPGQSSPKIDVVISEASTSNNTLDPGTCTVFEDSELADDIEANFTATFVPSIRQRLENDLSGVSLTDTEVTYLMDMCSFDTISTSTVDTKLSPFCDLFTHEEWINYDYLQSLNKYYGHGAGNPLGPTQGVGYANELIARLTHSPVHDDTSSNHTLDSNPATFPLNSTLYADFSHDNGIISILFALGLYNGTKPLSSTTAENITQTDGFSSAWTVPFASRMYVEMMQCQSEQEPLVRVLVNDRVVPLHGCPVDALGRCTRDSFVKGLSFARSGGDWGECFA

SEQ ID NO: 11135 - protein, 467 aa, Aspergillus niger
MGVSAVLLPLYLLSGVTSGLAVPASRNQSTCDTVDQGYQCFSETSHLWGQYAPFFSLANESAISPDVPAGCRVTFAQVLSRHGARYPTDSKGKKYSALIEEIQQNATTFDGKYAFLKTYNYSLGADDLTPFGEQELVNSGIKFYQRYESLTRNIIPFIRSSGSSRVIASGKKFIEGFQSTKLKDPRAQPGQSSPKIDVVISEASSSNNTLDPGTCTVFEDSELADAVEANFTATFVPTIRQRLENDLSGVSLTDTEVTYLMDMCSFDTISTSTVDTKLSPFCDLFTHDEWINYDYLQSLKKYYGHGAGNPLGPTQGVGYANELIARLTHSPVHDDTSSNHTLDSNSATFPLNSTLYADFSHDNGIISILFALGLYNGTKPLSTTTVQNITQTDGFSSAWTVPFASRLYVEMMQCQAEQEPLVRVLVNDRVVPLHGCPVDALGRCTRDSFVKGLSFARSGGDWAECFA

SEQ ID NO: 11136 - protein, 467 aa, Aspergillus niger
MGVSAVLLPLYLLSGVTSGLAVPASRNQSSCDTVDQGYQCFSETSHLWGQYAPFFSLANESVISPEVPAGCRVTFAQVLSRHGARYPTDSKGKKYSALIEEIQQNATTFDGKYAFLKTYNYSLGADDLTPFGEQELVNSGIKFYQRYESLTRNIVPFIRSSGSSRVIASGKKFIEGFQSTKLKDPRAQPGQSSPKIDVVISEASSSNNTLDPGTCTVFEDSELADTVEANFTATFVPSIRQRLENDLSGVTLTDTEVTYLMDMCSFDTISTSTVDTKLSPFCDLFTHDEWINYDYLQSLKKYYGHGAGNPLGPTQGVGYANELIARLTHSPVHDDTSSNHTLDSSPATFPLNSTLYADFSHDNGIISILFALGLYNGTKPLSTTTVENITQTDGFSSAWTVPFASRLYVEMMQCQAEQEPLVRVLVNDRVVPLHGCPVDALGRCTRDSFVRGLSFARSGGDWAECFA

SEQ ID NO: 11137 - protein, 466 aa, Aspergillus oryzae
MAVLSVLLPITFLLSSVTGTPVTSPRQQSCNTVDEGYQCFSGVSHLWGQYSPYFSVDDESSLSEDVPDHCQVTFAQVLSRHGARYPTKSKSEKYAKLIKAVQHNATSFSGKYAFLKSYNYSLGADDLTPFGENQLVDSGIKFYQRYEELAKNVVPFIRASGSDRVIASGEKFIEGFQKAKLGDSKSKRGQPAPIVNVVITETEGFNNTLDHSLCTAFENSTTGDDAEDKFTAVFTPSIVERLEKDLPGTTLSSKEVVYLMDMCSFDTIALTRDGSRLSPFCALFTQEEWAQYDYLQSVSKYYGYGGGNPLGPAQGIGFANELIARLTKSPVKDHTTTNTTLDSNPATFPLNATLYADFSHDNTMTSVFFALGLYNTTEPLSQTSVQSTEETNGYSSARTVPFGARAYVEMMQCTDEKEPLVRVLVNDRVIPLQGCDADEYGRCKRDDFVEGLSFVTSGGNWGECFA

SEQ ID NO: 11138 - protein, 442 aa, Aspergillus fumigatus
SAGSKSCDTVDLGYQCSPATSHLWGQYSPFFSLEDELSVSSKLPKDCRITLVQVLSRHGARYPTSSKSKKYKKLVTAIQANATDFKGKFAFLKTYNYTLGADDLTPFGEQQLVNSGIKFYQRYKALARSVVPFIRASGSDRVIASGEKFIEGFQQAKLADPGATNRAAPAISVIIPESETFNNTLDHGVCTKFEASQLGDEVAANFTALFAPDIRARAEKHLPGVTLTDEDVVSLMDMCSFDTVARTSDASQLSPFCQLFTHNEWKKYNYLQSLGKYYGYGAGNPLGPAQGIGFTNELIARLTRSPVQDHTSTNSTLVSNPATFPLNATMYVDFSHDNSMVSIFFALGLYNGTEPLSRTSVESAKELDGYSASWVVPFGARAYFETMQCKSEKEPLVRALINDRVVPLHGCDVDKLGRCKLNDFVKGLSWARSGGNWGECFS

SEQ ID NO: 11139 - protein, 465 aa, Aspergillus fumigatus
MVTLTFLLSAAYLLSGRVSAAPSSAGSKSCDTVDLGYQCSPATSHLWGQYSPFFSLEDELSVSSKLPKDCRITLVQVLSRHGARYPTSSKSKKYKKLVTAIQANATDFKGKFAFLKTYNYTLGADDLTPFGEQQLVNSGIKFYQRYKALARSVVPFIRASGSDRVIASGEKFIEGFQQAKLADPGATNRAAPAISVIIPESETFNNTLDHGVCTKFEASQLGDEVAANFTALFAPDIRARAEKHLPGVTLTDEDVVSLMDMCSFDTVARTSDASQLSPFCQLFTHNEWKKYNYLQSLGKYYGYGAGNPLGPAQGIGFTNELIARLTRSPVQDHTSTNSTLVSNPATFPLNATMYVDFSHDNSMVSIFFALGLYNGTEPLSRTSVESAKELDGYSASWVVPFGARAYFETMQCKSEKEPLVRALINDRVVPLHGCDVDKLGRCKLNDFVKGLSWARSGGNWGECFS

SEQ ID NO: 11140 - protein, 482 aa, Monascus purpureus
MPLFSFLSATPTVMQLIFTVAAIASVAAGFQSVISEKQFSQEFLDNYSILKHYGGNGPYSSRRSYGISREPPDSCSVDQVIMIMRHGERYPSPDLGASIEAALAKIKSSNVSTYQGDLDFLNSWTYYVPNHCAYNAETSTGPYAGLLEGFKRGSDYRARYGHLWDGESIVPIFAAGYQRIIATSRKFGEGFFGANYSTNAAINIISEAKEMGANSLTPTCDHDNDTSTCNSLTTVWPQFKVAAARLNSQNPGLDLNATDIYYLMSMASFELNARPYSDWINVFTLDEWVTFGYVQDLNYYYCAGPGDKNMAAVGAVYVNASLTLLNQGPSAGTLWFNFAHDTNITPILAALGVLTPERDLPTDRVVFDSKWSSGDIVPQAGHLTIERLNCTSTAASPAGVYVRLVQNEAVIPVEACQSGPGYSCSLADFTEIMSKQLPDFVSTCSIRSSYPQYLDFWWNYNTTTDLNYPKGPVPCAEGVATS

SEQ ID NO: 11141 - protein, 610 aa, Neurospora crassa
MATLLRRTTVKMRSPINPQAPGHNPVGLAEKEELVLRPLLAHDTQPSPGQRLKRKLSILLASCAVSLAVLFAFNILACNGTLFGIKPRPSELASPTPLQARDDQRSSGEKDCPCKPTSTVPDYFNTSPGPWIGKTATGKAPFMAQTRTFDHAATYVPNAPLQTQVPIQGWHPGNLSIFGMMGFLTPYTPSTGFGVDEWPLPDGAEIIWLQMVSRHGSRYPTGGSNVESFGARLANATGKFNATGELEFLNNWKYQMGTEILVPRGRQELFDSGVLHAYMYSSLYDPNTKIIARTTTQDRMLRSAENFLAGMFGLEWPNNVTLEVIIEGSNLNNSLAGYMNCPNEREDGLGSAARDIWVGHYLQNATERFSKLVTGYNWTLDDTYAAQTLCAYDTVASGYSRFCSLFTYEEWIGFGYSHDLQFYGNNAFGSETGRAIGIGFQQEVLARLQNHTIPYSETQVNVTLDNNTVTFPLNQSLYLDFSHDTNIVSILAAFGLTQFEEDLPADKYPGEHNFTVSHMTPFGARLDIEIIKTPKPLKADRSGYEDEGEETKYVHFVLNQRTVPLGWSHPECDAERVDGWCEFEAFLKVQEKMPGLARYEEVCFADGGSP

SEQ ID NO: 11142 - protein, 596 aa, Neurospora crassa
MDPATKGTTRASSASTSLFGMGGGSQHKYSPLGRDGDDSESQTQLLPGESTAEDLDEESQLQQQNKKRGLLYRLVWGDPNKIFVKLIMFLLMVPLFSYLAAASLRVLSPNPASCDSPELGYQCNSETTHTWGQYSPFFSVPSEISPSVPEGCRLTFAQVLSRHGARFPTPGKAAAISAVLTKIKTSATWYAPDFEFIKDYNYVLGVDHLTAFGEQEMVNSGIKFYQRYASLIRDYTDPESLPFIRASGQERVIASAENFTTGFYSALLADKNPPPSSLPLPRQEMVIISESPTANNTMHHGLCRAFEDSTTGDAAQATFIAANFPPITARLNAQGFKGVTLSDTDVLSLMDLCPFDTVAYPPSSSLTTSSSPSGGSKLSPFCSLFTAQDFTVYDYLQSLGKFYGYGPGNSLAATQGVGYVNELLARLTVSPVVDNTTTNSTLDGNEDTFPLSRNRTVFADFSHDNDMMGILTALRIFEGVDAEKMMDNTTIPREYGETGDDPANLKEREGLFKVGWVVPFAARVYFEKMICDGDGSGEMVQSEEEQDKELVRILVNDRVVKLNGCEADELGRCKLDKFVESMEFARRGGDWDKCFA

SEQ ID NO: 11143 - protein, 487 aa, Corynascus heterothallicus
MTGLGVMVVMVGFLAIASLQSESRPCDTPDLGFQCGTAISHFWGQYSPYFSVPSELDASIPDDCEVTFAQVLSRHGARAPTLKRAASYVDLIDRIHHGAISYGPGYEFLRTYDYTLGADELTRTGQQQMVNSGIKFYRRYRALARKSIPFVRTAGQDRVVHSAENFTQGFHSALLADRGSTVRPTLPYDMVVIPETAGANNTLHNDLCTAFEEGPYSTIGDDAQDTYLSTFAGPITARVNANLPGANLTDADTVALMDLCPFETVASSSSDPATADAGGGNGRPLSPFCRLFSESEWRAYDYLQSVGKWYGYGPGNPLGPTQGVGFVNELLARLAGVPVRDGTSTNRTLDGDPRTFPLGRPLYADFSHDNDMMGVLGALGAYDGVPPLDKTARRDPEELGGYAASWAVPFAARIYVEKMRCSGGGGGGGGGEGRQEKDEEMVRVLVNDRVMTLKGCGADERGMCTLERFIESMAFARGNGKWDLCFA

SEQ ID NO: 11144 - protein, 457 aa, Danio rerio
MKAFFLNFITTYLSIMVGLSLSKLAKPTVPSIAHYFGTKGRYEEVNPHLLDDVLFVNKSQVAPPSLDCRAIHMVSVIRHGTRYPTTKNVRKIAQLFDLVKSDSLRLASSWLNDLKTWKMWYTEDMDGRLVEKGRDDHRHLAMRLAKSFPTLITADHLRANRIEFMTSSKHRCVDSVKAFQEGLHRLWDVQDMDYQHYVDDSLMRFFDHCEKFVEGVENNKTALKEVQRFKSSSEMDSVRRKISSRLQIPYDRITADMAEAAFFLCSYEFAIKSEYSPWCELLDESDAQVLEYKNDLKQYWKRGYGHDINRKSSCPLFHDIFSRLDNAAKDHRFGEVKKTATIQVGHGETLLPLLSLMGFFKDEKPLTSENFALQRKRVFRSSKILPYAANVVLVLYECSDGLRVQLFLNEKPMIFPSMNHAAPLYERVRKHYSKLLHGCDFNKECDLPQLNLRNTEL

SEQ ID NO: 11145 - protein, 453 aa, Agrocybe pediades
MSLFIGGCLLVFLQASAYGGVVQATFVQPFFPPQIQDSWAAYTPYYPVQAYTPPPKDCKITQVNIIQRHGARFPTSGAGTRIQAAVKKLQSAKTYTDPRLDFLTNYTYTLGHDDLVPFGALQSSQAGEETFQRYSFLVSKENLPFVRASSSNRVVDSATNWTEGFSAASHHVLNPILFVILSESLNDTLDDAMCPNAGSSDPQTGIWTSIYGTPIANRLNQQAPGANITAADVSNLIPLCAFETIVKETPSPFCNLFTPEEFAQFEYFGDLDKFYGTGYGQPLGPVQGVGYINELLARLTEMPVRDNTQTNRTLDSSPLTFPLDRSIYADLSHDNQMIAIFSAMGLFNQSSPLDPSFPNPKRTWVTSRLTPFSARMVTERLLCQRDGTGSGGPSRIMRNGNVQTFVRILVNDALQPLKFCGGDMDSLCTLEAFVESQKYAREDGQGDFEKCFD

SEQ ID NO: 11146 - protein, 494 aa, Sulfolobus tokodaii
MSNNPFKSLDSLKLSFNHIKIWYTAGMGFFTDAYDLLIIGYIIATIEYAHTYAGIIIPGFTEYLIGHNAAFWTGLLASSAIWTAIIGQLLFGYLGDRLGRKSVYGIEAMLLTLGAFLSALAWNLPALIAFRMLMGFGIGGDYPISSTIMSEYANVKDRGKLVSLVFANQGIGSIVAAVVGIVSALTLPPDIAWRVMAGIGAIPAATVIYLRRKVPETPRYSLLAKGNIEEAKKAAELLGTKLDVDKRVISKRLSISEFFAKYGLLLIGTAGTWFILDIAFYGTGTYSSAVLAPIFGSPFPATHVTLSLAEFQADLAKDLFLGAIPFLVGFPGYFTAVALMDKLGRKVIQLQGFVMMALIYGIVASIALTSGTKITGFIIPSTLAFAIYSLSYFFIDFGPNTTTFVIPAEVYPVRYRTTGHGISAASGKLGAAITTYLFPLLLASIGIKNILIMLAIVSIIGAVLTYFFVPEPKHKPLEEVAKEELEEEQNVQSQ

SEQ ID NO: 11147 - protein, 458 aa, Sulfolobus tokodaii
MKLSDIFKPLDQRNFDVWHIKSLLTTGMGVFTDGYDLSSIGIVLAMVLSSFGITSKSPDYTLWQSLVSGSALIGAAVGAIIFGILSNRGRKTFYGIDVALLSIGALLQAFVSTPLELVIVRGLLGLGVGADYVLSPMIMAEYSNAKDRGKLLAFGFGLMWGFGATTAAAIALGLEALSVPTNIIWRVVLVTGAIPSASVIYLRRKIPETPRYLARIKGDVEKFREVVRTLANTDIHVNKELKDINSFSSYFSKFWKTFLAACLLWFLFDIVAYSGILFGPTDIAKSIGINNSAIFQFVIEFGFTLPGGIIALLTLDRIGRKPMQTFGFFGMAISLLLFSLLKSSIPATTALILYGLQNLFSQAGPGSVSASGMLGVELAPTKVRGLVQSLTVASGRIGAALTAFVFPALFNTYGESFAVAFLSSVAFVAAVLTLIAVPETKGKPLEVSSQEDLIVQEI

SEQ ID NO: 11148 - protein, 418 aa, Sulfolobus tokodaii
MSFEKIPWAIKVRAFFVSSGGFLLDGYDLSVISFASTIISKEFSLTSAELGLLVSSSLIGMIPGSIIFGYLADKIGRKKLMGFDLLIFLVFGILTAISNSFASLFLSRLFLGFGIGGDYPISSTIMSELSPSFSRGKYLVGSISMYWIGTAISALFTLLLLPTGEYFWRYVFLVGAIISLPIVLLRVKLIESPRWLVAIGKEKGEKELQVKGATSFMDIFKGRLLVVTFFVTSVWFLFDVASYGIGLYYPYVLEQFAFPSKYEVVLGTLAISVGAIIGYIIAINIVDPLGRRLTLITGLSVMSILLYLGALTHISGSILVPYFMTFVAFEQWAGAVTLFYPTELYPTSVRASGQGFATAISRIGGVLGTFYFPILEHQLGFANVLMLFGSLSLLADIISIVLAKETSRKPLEETSISV

SEQ ID NO: 11149 - protein, 446 aa, Sulfolobus tokodaii
MMRLSWTSVLVSGMGVFTDGYNLYSLSLTIYLISNYISLNSVTEGILVAGSYFGAGIAALLFGILSDFKGRKRMYGIDVTLMSIGAIAQAISQNYVELFVSRLLLGMGIGADYVLSPIIVAENAEAKNRGKLMVITFAVLWGLGAVFAAFVDQISSIFLPSSLVWRVVLGVGAIPAISVIMARRKLTETLQFLTKVKPDENELQKIKTNYGLLLGINVDKEKFINRLKASLPFIIVASVLWLLYDIYSSTFAIYGPIVIASNLGLTPITFTYVAQFFAGIPGQLLCIYLIDKVGRKILITIGYAGVALWLVMYSLLLLDPYLFGFKPMKELVGEAALLGFSFYMLNYFFSAIGPASIIGSAMVTPELTYTKVRGTGQAISVAVDRFASATVISLFPSLVNIVGLGAMVGVYAGIAFLSSLITMLFVPETKGKELDEVVKSSLKYGK

SEQ ID NO: 11150 - protein, 535 aa, Hordeum vulgare subsp. vulgare
MAREQLEVLSALDTAKTQWYHFTAIVIAGMGFFTDAYDLFCISLVTKLLGRIYYYREGADAPGSLPPNVAAAVNGVAFCGTLSGQLFFGWLGDRMGRKRVYGMTLMCMVLCSIASGLSFGSTPGSVMATLCFFRFWLGFGIGGDYPLSATIMSEYANKKTRGAFIAAVFAMQGFGILTGGVVTLIVSAAFRAAFHAPAYEKGAVASTPPQADFVWRFILMFGAVPALLTYYWRMKMPETARYTALVAKNAKQAAADMSKVLQVEIAAEDETKDNDGAGEDRNSFGLFSGEFLRRHGLHLLGTATCWFLLDIAFYSQNLFQKDIFTAINWIPKAKTMSALEEVHRIARAQTLIALCGTVPGYWFTVALIDRIGRFWIQLGGFFFMAVFMLGLAFPYHHWTTPGNHIGFVVLYALTFFFANFGPNSTTFIVPAEIFPARLRSTCHGISAAAGKLGAIVGSFGFLYLAQNQDPSKVDHGYKAGIGVKNSLFILAACNFLGMAFTFCAPESNGISLEELSGENDDEAPAPATHARTVPV

SEQ ID NO: 11151 - protein, 538 aa, Hordeum vulgare subsp. vulgare
MARSEQQGLQVLSALDAAKTQWYHFTAIVVAGMGFFTDAYDLFCISLVTKLLGRIYYTDLSKPDPGSLPPSVAAAVNGVAFCGTLAGQLFFGWLGDKMGRKSVYGMTLLLMVICSIGSGLSFAHTPKSVMATLCFFRFWLGFGIGGDYPLSATIMSEYANKKTRGAFIAAVFAMQGFGILAGGIVTLIISSAFRAGFHEPAYQDDRVASTGTEADFVWRIILMLGALPALLTYYWRMKMPETARYTALVAKNAKLAAADMSKVLQVELEDETEKMDEMVSRGANDFGLFSPQFARRHGLHLVGTATTWFLLDIAFYSQNLFQKDIFTSINWIPKARTMSALDEVFRISRAQTLIALCGTVPGYWFTVFLIDVVGRFAIQLMGFFMMTVFMLGLAVPYHHWTTPGNQIGFVVMYGFTFFFANFGPNATTFVVPAEIFPARLRSTCHGISAAAGKAGAMIGAFGFLYAAQDPHKPDAGYRPGIGVRNSLFVLAGVNLLGFMFTFLVPEANGKSLEEMSGEAQDNENEDQARTAAVQPSMA

SEQ ID NO: 11152 - protein, 539 aa, Hordeum vulgare subsp. vulgare
MASRQQQQLQVLSALDGAKTQLYHFRAVVVAGMGFFTDAYDLFCISLVTKLLGRIYYADPSSPNPGSLPPNVAAAVNGVALCGTLAGQLFFGWLGDRLGRKSVYGMTLILMVVCSVASGLSFGHTPASVMATLCFFRFWLGFGIGGDYPLSATIMSEYANKKTRGAFIAAVFAMQGFGILAGGVVTLVLSTVFRSAFPAPAYQTDAAASTVPQADYVWRIILMLGALPAALTYYWRTKMPETARYTALVAKNAKKASLDMSKVLQSEVEAEPEKLDEIMARGEDYGLLTSRFAKRHGLHLLGTATAWFLVDVAYYSQNLFQKDIFGSIGWIPKARTMDALEEVFRISRAQTLIALCGTVPGYWFTVFLIDVIGRFWIQLVGFAMMAVFMLGLAVPYHHWTTPGNHVGFVVMYGLTFFFANFGPNATTFIVPAEIFPARLRSTCHGISAAAGKAGAIIGAFGFLYAAQSPDLAHVDAGYKPGIGVQKALYVLAACNLLGFLVTFLVPESKGKSLEEMSGEADAEEGNGANNVRPSGEQLV

SEQ ID NO: 11153 - protein, 525 aa, Hordeum vulgare subsp. vulgare
MATEQLNVLKALDVAKTQLYHFKAVVIAGMGFFTDAYDLFCIALVTKLLGRIYYTDPALNEPGHLPANVSAAVNGVALCGTLAGQLFFGWLGDKLGRKSVYGFTLILMVLCSIASGLSFGHEAKGVMGTLCFFRFWLGFGVGGDYPLSATIMSEYANKKTRGTFIAAVFAMQGFGILFGTIVTIIVSSAFRHAFPAPPFYIDAAASIGPEADYVWRIIVMFGTIPAALTYYWRMKMPETARYTALIAGNTKQATSDMSKVLNKEISEEAGQGERATGDTWGLFSRQFMKRHGVHLLATTSTWFLLDVAFYSQNLFQKDIFTKIGWIPPAKTMNALEELYRIARAQALIALCGTVPGYWFTVAFIDIIGRFWIQLMGFTMMTIFMLAIAIPYDYLVKPGNHTGFVVLYGLTFFFANFGPNSTTFIVPAEIFPARLRSTCHGISAATGKAGAIIGAFGFLYASQDQKKPETGYSRGIGMRNALFVLAGTNFLGLLFSLLVPESKGKSLEELSKENVGDDDAIAPTGV

SEQ ID NO: 11154 - protein, 527 aa, Hordeum vulgare subsp. vulgare
MAGDQVHVLAALDGAKTQWYHFTAIVVAGMGFFTDAYDLFCISLVTKLIGRIYYTVPGSPSPGSLPPTVSAVVNGVAFVGTLSGQLFFGWLGDKVGRKSVYGMTLMLMIICSVASGLSFGRTPTSVMATLCFFRFWLGFGIGGDYPLSATIMSEYANKRTRGAFIAAVFAMQGFGILAGGGVAIGITALFRALFPAPPYAADPVASTPDQADYVWRIVLMLGALPAALTFYWRMKMPETPRYTALIAKNAERAAADMSKVLNVEITKEQAGDLETAISIKSHTSPSFGLFSREFMRRHGLHLLGTASTWLLLDIAYYSQNLFQKDIFSAIGWIPPAPTMSALDELYHIARAQILIALCGTVPGYWFTVAFIDSVGRFKIQLMGFFMMTAFMLGLAGPYDYWTGQGHQVGFVVMYALTFFFANFGPNATTFIVPAEIYPARFRATCHGISAASGKVGAIIGSFGFLYLAQSPDPAKTAHGYHPGIGVRYSLFVLALCSLLGFMLTFLVPEPKGKSLEEMSRETEPDHC

SEQ ID NO: 11155 - protein, 521 aa, Hordeum vulgare subsp. vulgare
MATEQLNVLKALDVAKTQLYHFKAVVIAGMGFFTDAYDLFCIALVTKLLGRIYYTDPALNEPGHLPANVSAAVNGVALCGTLAGQLFFGWLGDKLGRKSVYGFTLILMVLCSIASGLSFGHEAKGVMGTLCFFRFWLGFGVGGDYPLSATIMSEYANKKTRGTFIAAVFAMQGFGILFGTIVTIIVSSAFRHAFPAPPFYIDAAASIGPEADYVWRIIVMFGTIPAALTYYWRMKMPETARYTALIAGNTKQATSDMSKVLNKEISEEAGQGERATGDTWGLFSRQFMKRHGVHLLATTSTWFLLDVAFYSQNLFQKDIFTKIGWIPPAKTMNALEELYRIARAQALIALCGTVPGYWFTVAFIDIIGRFWIQLMGFTMMTIFMLAIAIPYDYLVKPGNHTGFVVLYGLTFFFANFGPNSTTFIVPAEIFPARLRSTCHGISAATGKAGAIIGAFGFLYASQDQKKPETGYSRGIGMRNALFVLAGTNFLGLLFSLLVPESKGKSLEELSKENVGDDGIDA

SEQ ID NO: 11156 - protein, 509 aa, Hordeum vulgare subsp. vulgare
MATEQLNVLKALDVAKTQLYHFKAVVIAGMGFFTDAYDLFCIALVTKLLGRIYYTDPALNEPGHLPANVSAAVNGVALCGTLAGQLFFGWLGDKLGRKSVYGFTLILMVLCSIASGLSFGHEAKGVMGTLCFFRFWLGFGVGGDYPLSATIMSEYANKKTRGTFIAAVFAMQGFGILFGTIVTIIVSSAFRHAFPAPPFYIDAAASIGPEADYVWRIIVMFGTIPAALTYYWRMKMPETARYTALIAGNTKQATSDMSKVLNKEISEEAGQGERATGDTWGLFSRQFMKRHGVHLLATTSTWFLLDVAFYSQNLFQKDIFTKIGWIPPAKTMNALEELYRIARAQALIALCGTVPGYWFTVAFIDIIGRFWIQLMGFTMMTIFMLAIAIPYDYLVKPGNHTGFVVLYGLTFFFANFGPNSTTFIVPAEIFPARLRSTCHGISAATGKAGAIIGAFGFLYASQDQKKPETGYSRGIGMRNALFVLAGTNFLGLLFSLLVPESKGKSLEEL

SEQ ID NO: 11157 - protein, 159 aa, Hordeum vulgare subsp. vulgare
QLMGFFMMTVFMLGLAVPYHHWTTPGNQIGFVVMYGFTFFFANFGPNATTFVVPAEIFPARLRSTCHGISAAAGKAGAMIGAFGFLYAAQDRHKPDAGYRPGIGVLNSLFVLAGVNLLGFMFTFLVPEANGKSLEEMSGEAQDNEEDQARTAAVQPSMA

SEQ ID NO: 11158 - protein, 461 aa, Bacillus subtilis
MKKDTRKYMIYFFGALGGLLYGYDTGVISGALLFINNDIPLTTLTEGLVVSMLLLGAIFGSALSGTCSDRWGRRKVVFVLSIIFIIGALACAFSQTIGMLIASRVILGLAVGGSTALVPVYLSEMAPTKIRGTLGTMNNLMIVTGILLAYIVNYLFTPFEAWRWMVGLAAVPAVLLLIGIAFMPESPRWLVKRGSEEEARRIMNITHDPKDIEMELAEMKQGEAEKKETTLGVLKAKWIRPMLLIGVGLAIFQQAVGINTVIYYAPTIFTKAGLGTSASALGTMGIGILNVIMCITAMILIDRVGRKKLLIWGSVGITLSLAALSGVLLTLGLSASTAWMTVVFLGVYIVFYQATWGPVVWVLMPELFPSKARGAATGFTTLVLSAANLIVSLVFPLMLRPMGIAWVFMVFSVICLLSFFFAFYMVPETKGKSLEEIEASLKKRFKKKKSTQNQVLNERTL

SEQ ID NO: 11159 - protein, 451 aa, Bacillus subtilis
MKTIFKQKNTHPFSNAANRLGRLPISRVHFQVLTALGIVYFFDLADLFTLSNVAPALIENWGIPLSTIANVTAASFLGMFLGSSLGGRLSDRIGRKKPLNLFVFVFSIASLCNAAAWDIPSLMTFRFLTGFGVAAAMVITNSYLAEFFPSSVRGKYISFCAMIGLIGVPITNIVSAFVIPLGSWGWRLVFVWGAVGLIYFFFIHRLEESPRWHENRGEYAKADAILTRIEEQVEKEKGPLPAASQPKVSETVKQNAGYAGLLKGRNLKITIVLSAVWIFETFGFYGFASWVPSLLKSNGVTMENTLWYNVLHSVGAPLGALLGSMISERFQRKWILAASAFLTAIAGLLYGMTFIPIMIIVFGFIVNITERVFTSNLYAYTSEPYPTEYRSSGSGLAYGLGRFSNIFGSLLVGFIAVQLGYISVFLFIGGCWLACSLLLIFFGPNTNAKQI

SEQ ID NO: 11160 - protein, 469 aa, Clostridium acetobutylicum
MGENNSHKHSLLFIVLISCAAGLGGLLYGYDTAVISGAIGFLKKLYNLSPAMQGFVISSIMVGGVLGVGFSGFLGDAIGRRKVLMLAAALFAISAVISSISTSAFMLIFARIVGGLGIGMASALSVTYITECAPPSIRGRLSSLYQLFTILGISITFFVNLGIVNMGSETWRVSTGWRYMLACGTVPAIVFLITLFFVPESPRFLVKSGNIKKAAAVLTKINGAEIAKQELDSISKSLATENDSSLGQLLQPGLRRALLIGIFLAIFNQAIGMNSITYYGPEIFQMIGFKNNSSFLATSVIGVVEVFSTILAMFLIDKLGRKKLMEIGSAAMAVFMLLIGTSFYIKLSNGFVILIFIICFVVSFCISMGPIPWIMIPEIFPNHLRARATGIATIFLWGANWAIGQFTPMLLNGIGGAYTFWIFCGINVICFLVVTTKVPETKNKSLEEIEKFWIPKSKQNAKGSSVGAK

SEQ ID NO: 11161 - protein, 467 aa, Staphylococcus epidermidis ATCC 12228
MLKRFHKGIIISLAIEKGMIRMKANKYLIFILGALGGLLYGYDNGVISGALLFIHKDIPLNSTTEGIVVSSMLIGAIVGAGSSGPLADKLGRRRLVMLIAIVFIIGALILAASTNLALLIIGRLIIGLAVGGSMSTVPVYLSEMAPTEYRGSLGSLNQLMITIGILAAYLVNYAFADIEGWRWMLGLAVVPSVILLVGIYFMPESPRWLLENRNEEAARQVMKITYDDSEIDKELKEMKEINAISESTWTVIKSPWLGRILIVGCIFAIFQQFIGINAVIFYSSSIFAKAGLGEAASILGSVGIGTINVLVTIVAIFVVDKIDRKKLLVGGNIGMIASLLIMAILIWTIGIASSAWIIIVCLSLFIVFFGISWGPVLWVMLPELFPMRARGAATGISALVLNIGTLIVSLFFPILSDALSTEWVFLIFAFIGVLAMIFVIKFLPETRGRSLEEIEYELRERTGARTE

SEQ ID NO: 11162 - protein, 443 aa, Agrobacterium tumefaciens str. C58 (U. Washington)
MNWSLPVNIMANGPATAPDQKTRLKSIIGGSAGNLVEWYDWYVYSAFTLYFAPVFFPSGNQTAELLSAAAVFAVGFLMRPIGAWFMGTYADRKGRKAGLTLSVTLMCLGSLLIAVTPGHETIGIAAPAILVFARLLQGISVGGEYGASATYLSEMAGKSRRGFFSSFQYVTLISGQLLALAVLLVLQRVLTPEQLGSWGWRIPFFIGGMLAIAVFYIRRGLAETQSFENAKAGEADKPKSSGWALFKHYPREALMVMALTSGGTLAFYAYTTYLQKFLVNTSGFSKESATEITTAALFVFMLCQPLAGALSDRVGRKPLMVGFGILGTLFTYLIFSTLATTTDPIMAFVLVLVGLLIVTGYTSINAVVKAEMFPAHIRALGVALPYALANTIFGGTAEFVALKFKQIGHENWFFWYVTIMIALSLVVYVKMRDTRDHSHIHED

SEQ ID NO: 11163 - protein, 488 aa, Fusarium sp. IFO 7772
IVYYPEKGKLPTSSDNAIKLSTSAGTVIGQLFFGAMADIVGRKRMYGLELILIIFATLAQALTAGSPSVSIIGVIIFWRVLMGVGIGGDYPLSSIITSEFATTKWRGAMMAAVFAMQGIGQLVAALVMMFLTLGFKSSLETAADTKSCTGGCQVSVDKMWRTLIGFGAVPACIALYYRLTIPETPRYTFDVARDVEQADEDVKAYMTGKREGETDEVARAQVHQGAKANLQVPKASFRDFLKHYSKWKNASLLLGTAGSWFCLDVAFYGLSLNNGTILKVIGYSAKNTHSVYEYLYNTAVGNIIIVLAGAVPGYWVSVATIDTLGRKTIQLGGFIILTILFVVLGFAYNHIPSNGLLAIYVLAQFFFNFGPNTTTFIVPGEVFPTRYRSTSHGISAASGKIGSIIGQGAISILRTRGATETNEAPWMDHVLEIYALFMLLGVFTTLLIPETARKTLEELSGDDDFANTHDDHALGHESHSGKPERTSV

SEQ ID NO: 11164 - protein, 62 aa, Helianthus annuus x Helianthus argophyllus
RGYPTGIGIRYTLIILGVVNALGLLFTFLVPEPNGKSLEEMSGENEEDIEPTANTTNRTVPV

SEQ ID NO: 11165 - protein, 481 aa, Xanthomonas campestris pv. campestris str. ATCC 33913
MFPGEPMSSVSIDGAPDAGENTRFIILISCVATIGGFLFGFDSGVINGTVDGLKQTFQSSAAETGFEVASMLLGCAIGAFFAGRLADRWGRRAVLIISAALFLLSAIGAGASHSSGFFIFARVMGGFAVGAASVISPAYIAEVASARYRGRLATMQQIAIISGLFCAFLSNYLLANAAGASTEPLWGGQAAWRWMFWMQAIPSLLFLLLLLVIPESPRYLVVKGRREQALVVLKRLYGNAAAQTKLGEISASMSADQHKPKFSDLISKTTGKIRPIVWIGVGLAVFQQLVGINVVFYYGAVLWQAVGFSEQDALLINVLSGGLSIGACLVTVMLVDKIGRKPLLWIGSAGMAVSLALVTYAFATASLDPNGKLAMSDAMGMLALVAANVYVVFFNASWGPVMWVMLGEMFPNQIRGSGLAIAGAAQWTSNFAITVSFPILLGSIGLAGAYGIYTVAAFISVFFVLKYVYETKGKELEQMEG

SEQ ID NO: 11166 - protein, 496 aa, Xanthomonas campestris pv. campestris str. ATCC 33913
MHDTRAIRSHFGWFKRRRQLQLDEVTVVDRGMLRKAVGAAALGNAMEWFDFGVYGYLAVTLGQVFFPSSSPTAQLIATFATFTVAFLVRPIGGMVFGPLGDRYGRQKVLAATMILMALGTFSIGLIPSYAQIGLWAPALLLLARLLQGFSTGGEYGGAATFIAEYATDRNRGLMGSWLEFGTLGGYIAGAATVTALHMALSQAQMLDWGWRVPFLVAGPLGLLGLYMRMKLEETPAFRAYTEQSEQRERETAGQGLMTLLRLHWPQLLKCVGLVLVFNVTDYMLLTYMPSYLSVTMGYAESKGLLLIILVMLVMMPLNVVGGMFSDKLGRRPMIIGACAALFALAIPCLLLIGSGSDVLIFTGLMLLGLALVCFTSSMPSTLPALFYTPVRYSALSIAFNVSVSLFGGTTPLVTAWLVERTGDPLVPAYYLMGAAAIGLVTMLFVRETAGLPLRGSPPAVASDAEARALLQGDSPVTVDAQLPLSGTPSIGQPRPA

SEQ ID NO: 11167 - protein, 475 aa, Xanthomonas axonopodis pv. citri str. 306
MSSVSIDGAPDAGENTRFIILISCVATIGGFLFGFDSGVINGTVDGLKQTFQSTAAETGFEVASMLLGCAIGAFFAGRLADRWGRRAVLIISAALFLLSAIGAGASHSSAFFIFARVMGGFAVGAASVISPAYIAEVASARYRGRLATMQQIAIISGLFCAFLSNYLLANAAGASTEPLWAGQAAWRWMFWMQAVPSILFLLLLLVIPESPRYLVVKGRREQALVVLKRLYGNAAAQTKLGEISASMAADQHKPKFSDLINKATGKIRPIVWIGIGLAVFQQLVGINVVFYYGAVLWQAVGFSEQDALLINVLSGGLSIGACLVTVMLVDKIGRKPLLWIGSAGMAVSLALVTYAFATASLDPNGKLAMSDAMGMLALVAANVYVVFFNASWGPVMWVMLGEMFPNQIRGSGLAIAGAAQWTSNFAITVSFPILLGSIGLAGAYGIYTVAAFISVFFVLKYVYETKGKELEQMEG

SEQ ID NO: 11168 - protein, 427 aa, Xanthomonas axonopodis pv. citri str. 306
MTTHAPPTQLTRSDYKTLGLSALGGALEFYDFIIFIFFAKVLGELFFPPGIPEWTRQLQTFGIFAAGYLIRPLGGIVMAHFGDLLGRKRMFALSIGLMALPTLAIGVLPTYAQIGVAAPLLLLTMRLLQGAAIGGEVPSAWVFVAEHVPARRTGLACGTLTAGLAAGVLLGSLSAGALHRAFSPDQIAEYAWRLPFLAGGIFGLLSVYLRRWLHETPVFAELVAMRALARETPLKVVLRDHPRSLAMSLWLTWVIAAAVLVVSLMTPTLLQSAYGYPSPVALQANLLAVLLQAVGSVVAGALSDRWGNGRVLLAGSVLLGVSAWLFYRLAGDPYLLFPLYALLGAALGVLGAIPRVMVEAFPPVVRLSGVSFAYNLGYAVFGGLTPLLVVMLLKLHPMGPAYYVILLASIGAIVGARLSQRERISRW

SEQ ID NO: 11169 - protein, 490 aa, Xanthomonas axonopodis pv. citri str. 306
MRSHFGWFKRRRQLQLDEVTVVDRSMLRRAVGAAALGNAMEWFDFGVYGYLAVTLGQVFFPASNPTAQLIATFATFTVAFLVRPIGGMVFGPLGDRYGRQKVLAATMILMALGTFSIGLIPAYQRIGLWAPALLLLARVLQGFSTGGEYGGAATFIAEYATDRNRGLMGSWLEFGTLGGYIAGAATVTALHMSVTPAQMLDWGWRVPFLIAGPLGLLGLYMRMKLEETPAFRAHTEQSEQRERQTAAQGLTTLLRLHWPQLLKCVGLVLVFNVTDYMLLTYMPSYLSVTMGYAESKGLLLIILVMLVMMPLNIVGGMFSDKLGRRPMIIGACIALFALAIPCLLLVGSGNDGLIFAGLMLLGLALVCFTSSMPSTLPALFYTPVRYSALSIAFNVSVSLFGGTTPLVTAWLVERTGDPLVPAYYLMGAAAIGLLTMLFVRETAGLPLRGSPPAVASDAEARALLQADSPVTVDAQLPVTTAASMGQPRTA

SEQ ID NO: 11170 - protein, 431 aa, Campylobacter jejuni subsp. jejuni NCTC 11168
MRKSKFGTKEIKILGLSSLGGTLEFYDFIIFVFFAEYIANVFFPKDMSEFWALLNTYGAFAAGYLARPLGGIVMAHFGDKFGRKNMFMLSILLMVLPTFVLAFIPGYETLGFLAPVLLILIRIFQGIAIGGELPGAWVFVREYCQEKQKAFFLSCLNSAMALGILLGSIVFLIINAFFSIEEIAAYAWRIAFFVGGIFGIISIYLRRFLQETPVFKQMKKESSLSSFPLKDLFKEKDIVKNLFSSMMMTWVLTGCVIVLVLLMPKFMPSILNLSGVEGSYLQILGILGIALGGAFMGYLVDKFGLFKICIFFSLTFVFFSFLYFYALYELKNLVLVCILYSIICFLGGINVFAPILMSEVFRAKIRFSGISFSYNISYAISGGITPQLVFWLNTLASKNENPFLYGMSIYMIFLALLAICAVFIVKDKIKF

SEQ ID NO: 11171 - protein, 453 aa, Campylobacter jejuni subsp. jejuni NCTC 11168
MTNQQIDGIADKNFNTPEGRKVFKKAVFSCWLGTAMEYADFALYGLAAATIFSEVFFPEQTPVIALLLSFVTYGIGFIARPIGALFFGHLGDKHGRKNVMMATIALMGISTTLIGFIPSYAVIGVWAPICLVALRFMQGFGAGAELSGGTVMLAEYAPSKRRGLVSSVIALGSNSGTLLASFVWLLMVQMDEASFKEWGWRVPFMGSILIALFAVYIRFHVKETPVFEKQKNEMMKLRLNNEKHMKKDERSFWQRSRAFWTMVGLRIGENGPSYLAQGFIVGYVTKILLLDKSVATTAVMIASLVGFLVIPLAGYLSDKFGRCITYRMFCLLLMIYAFPAFMLLDSKNEIIVILTIIVGMSLASLGIFGVQAAWGVELFGVKNRYTKMAFAKELGSILSGGTAPMVASALLAYYGSWWPIATYFVLTAGIGFVTTFFAPETRGRDLNKIEDAI

SEQ ID NO: 11172 - protein, 480 aa, Corynebacterium efficiens YS-314
MFGGRTHPGPTRTPSRTGVVLCAGMLIDAGYPRPTGVVFPHMNLTRNDRLDRLPVTSKHRKLLGGSGIGWALDAMDVGLISFIMAALVTHWDLSPTEASLLGSIGFVGMALGATFGGLLADKVGRRQVFALSLLVYGLATGASALSVSLVMLMALRFVVGLGLGAELPVASTLISEFSPRRIRGRMVVILEAFWALGWIMAAIIGTFVVTIGENGWRWALALGCVPAAYAIYVRLGLPESVRFLESKGRHEEAEAIVVSFEEQAVREGKPLTDSLPESRDVEVEGSESIWAKNLRRRTAALWVVWFCINLSYYGAFIWIPSLLVADGFTLVRSFQFTLIITLAQLPGYAAAAWLIEKWGRRATLSTFLAGSAVSAAMYGMADAEWQILVAGCLLSFFNLGAWGALYAIGPELYPTDVRGTGTGAAAGFGRIASIIAPLIVPPVISLGGPVLLFALFASAFALAAVAAFTLPEQKGKALAD

SEQ ID NO: 11173 - protein, 464 aa, Shigella flexneri 2a str. 301
MQPSRNFDDLKFSSIHRRILLWGSGGPFLDGYVLVMIGVALEQLTPALKLDADWIGLLGAGTLAGLFVGTSLFGYISDKVGRRKMFLIDIIAIGVISVATMCVSSPVELLVMRVLIGIVIGADYPIATSMITEFSSTRQRAFSISFIAAMWYVGATCADLVGYWLYDVEGGWRWMLGSAAIPCLLILIGRFELPESPRWLLRKGRVKECEEMMIKLFGEPVAFDEEQPQQTRFRDLFNRRHFPFVLFVAAIWTCQVIPMFAIYTFGPQIVGSLGLGVGKNAALGNVVISLFFMLGCIPPMLWLNTAGRRPLLIGSFAMMTLALAVLGLIPDMGIWLVVMAFAVYAFFSGGPGNLQWLYPNELFPTDIRASAVGVIMSLSRIGTIVSTWALPIFINNYGISNTMLMGAGISLFGLLISVAFAPETRGMSLAQTSNMTIRGQRMGLFVQISLFSESILLTISRVNI

SEQ ID NO: 11174 - protein, 452 aa, Shigella flexneri 2a str. 2457T
MEQYDQIGARLDRLPLARFHYRIFGIISFSLLLTGFLSYSGNVVLAKLVSNGWSNNFLYAAFTSALMFGYFIGSLTGGFIGDYFGRRRAFRINLLIVGIAATGAAFVPDMYWLIFFRFLMGTGMGALIMVGYASFTEFIPATVRGKWSARLSFVGNWSPMLSAAIGVVVIAFFSWRIMFLLGGIGILLAWFLSGKYFIESPRWLEGKGQIAGAESQLREVEQQIEREKSIRLPQLTLNQSNSKVKVIKGTFRLLFKGEMLRRTLVAITVLIAMNISLYTITVWIPTIFVNSGIDVDKSILMTAVIMIGAPVGIFIAALIIDHFPRRLFGSALLIIIAVLGYIYSSQTTEWAILIYGLVMIFFLYMYVCFASAVYIPELWPTHLRLRGSGFVNAVGRIVAVFTPYGVAALLTHYGSITVFMVLGVMLVLCALVLSIFGIETRKVSLEEISEVN

SEQ ID NO: 11175 - protein, 500 aa, Shigella flexneri 2a str. 2457T
MLKRKKVKPITLRDVTIIDDGKLRKAITAASLGNAMEWFDFGVYGFVAYALGKVFFPGADPSVQMVAALATFSVPFLIRPLGGLFFGMLGDKYGRQKILAITIVIMSISTFCIGLIPSYDTIGIWAPILLLICKMAQGFSVGGEYTGASIFVAEYSPDRKRGFMGSWLDFGSIAGFVLGAGVVVLISTIVGEANFLDWGWRIPFFIALPLGIIGLYLRHALEETPAFQQHVDKLEQGDREGLQDGPKVSFKEIATKYWRSLLTCIGLVIATNVTYYMLLTYMPSYLSHNLHYSEDHGVLIIIAIMIGMLFVQPVMGLLSDRFGRRPFVLLGSVALFVLAIPAFILINSNVIGLIFAGLLMLAVILNCFMGVMASTLPAMFPTHIRYSALAAAFNISVLVAGLTPTLAAWLVESSQNLMMPAYYLMVVAVIGLITGVTMKETANRPLKGATPAASDIQEAKEILVEHYDNIEQKIDNIDHEIADLQAKRTRLVQQHPRIDE

SEQ ID NO: 11176 - protein, 472 aa, Thermobifida fusca
MSTTGEAPSSGEVNIAHVVMIAAAAAMGGFLFGYDSAVINGAVSAIQDTFRVGSTVIGFTVAAALIGSAVGAAIAGALADRIGRIRVMQLAAVLFAASAVGSALPFTVWDLAWWRVVGGVAIGIASVIAPTYIAEVSPPAFRGRLASLQQLAIVLGIATSQLVNYGLAAAVGGSALHRLGPLQAWQWMLGIEVLPAATYFVLTLVIPESPRHLVRIGRDARARRVLAEVEGGDVDGRVAEIRRVLGRERRPRLRDLRGRYGLLAIVWVGMALSAFQQLVGINVIFYYSAVLWQSVGIAETDSLLLSLFTSIVNIVGTLIAIGLVDRVGRKPLLLAGSAGMTVALAFTAFAFSHARGEGDDVVLSTAWALTALVSASTFVLFFALSWGVVTWVLLGEMFPLRIRAAAMAVATATQWITNWLVTVTFPSLRDWSLPGTYLVYTAFALLSFGFVLRFVRETKGRTLESMDELAGQ

SEQ ID NO: 11177 - protein, 459 aa, Leuconostoc mesenteroides subsp. mesenteroides ATCC 8293
MENGSTKRIASSFIYFFGAFGGILFGYDIGVMTGALPFLQKDWHLTDAGTIGWITSTLMLGAILGGALAGQLSDRLGRRRMILASSFIFAVGAIMAGVSPNNGVVWLLIARFLLGLAVGAASALVPSYMSEMAPAKNRGRLSGLNQLMIVSGMLLSYIVDYLLQGLPHTIAWRLMLGLAAVPAIILFVGVLRLPESPRFLVKTHKLAEARQVLTYIRTASEVDPELEDIQNTVAIESGAQKNITLSTLFSSKYRYLVTAGIGVAAFQQFMGANAIFYYIPLIVEKASGQAASSALLWPIVQGVILVLGALLYMVIADKFKRRTLLMVGGTVMALSFLMPSALNALVGADKFPPMLIVVFLSIFVAFYSFTWAPLTWVLVGEVFPLAIRGRASGLASSFNWLGSFAVGLLFPIMTAAMPQATVFAIFGVISIIAVLFIKFAVPETHGRTLEEIEAQGTNH

SEQ ID NO: 11178 - protein, 428 aa, Leuconostoc mesenteroides subsp. mesenteroides ATCC 8293
MEQAMNLQQRMDTTKETATFYRVFAMIAAGMILDGADVYLASAVNSAIVSTHFATLAQGSVFLSSGFLGLFFGSIFAGFIGDFLGRRKAYSTNLLIFGVLTLCAAFATNIWMLVGLRFFAAIGLGAEIVTGYALINEFAPIKNRGRWSGVTSVIANLAAPLTLLLAASVIPRYTWRAMFVIVGVLALILWVVRRHFPESPRWLIARGEYDKAEKIIEKLEVNGSYSTNDSSVKRQPVKTRIGIGLLVATVAVSAVNLTQYTFTSWMPTLLIKQGIEVVHSLTFSAVMMAGAPIGALIGALLVDVIGRKKVIVSAFVMTAVFGMIYSQQHTTVGILTVGFLVVTMMYILMASVVGVYMSELFPTYFRFRGTGYANGVAKILTVLTPYFAAWAITQFSANLIFYFIAAVALIAAIVVAVYGPETKQKAIY

SEQ ID NO: 11179 - protein, 480 aa, Oenococcus oeni MCW
MENKKTNISKTNYALNFIKTKSKAERHLKIIALCVTLGGLLFGVDTGVINGALPYMAKKQELNLNPATEGLVTSSITLGAAFGAIFAGRLADRYGRKRILFYLSIVFFFCTAICSLAPNAIIMMIFRFLLGLAVGSASVIVPTFLSEIATVKLRGPLVTQNEIMITGGQLLAFVVNAILGNIFVNVSNIWRYMIAFGMIPSALLFIGTLIVPESPRWLIMKGKTKTALKILKGIRSDKRQSQQEVTQIQATLKKEKEVSHISWYDLKKPWIKKLIILGSGLGIVQQIVGINIIMYYGTTVLIKAGFTHNIALITNIANGIVSVLATYTGMHLMNHINRRKMLLTGIAGTGGALALITLVSQILPHSKLLPVCVVFLTLIFLSFFQGCISPTIWLLMSEIFPQNLRGLGMGISTFFLWMANFLVGFLFPIFLNYFGFSITFGIFVLCNLISFIFVYKFAPETRNKSLERVQLELRTRIDKN

SEQ ID NO: 11180 - protein, 449 aa, Bifidobacterium longum DJO10A
MSTTTSAQPAQLTRNERLDRLPFNKAHRKLLVASGIGWAFDAMDVGLVSFVVAAIAADPHFNLTPTEKSWVLSIGFVGMAIGAAVGGFIADRVGRKTVFTATLIIFGIANGAMALSWSLGMLLGARLIIGLGLGAELPVASTLVSEFSPTKQRGRMTVLLESFWAVGWIVAAMIGYFVIPNTGDWGWRWALAIGALPLLYAIVTRVHIPESVRFLEAKGREDEAEKAVRYFEEAGGVAPVTSPKGKPLPKIKTRELFGSKYLARTIAIWATWFFVNFSYYGAFTWMPSLLADQFGSLTKSFGYTLAISIAQLPGYFLAAWLVEVWGRRKTLSIFLAVSAVAAFAFSQAGSVALVLVFGMLLSASNLGAWGVLYAVTPEIYPTRLRGAAAGAAAAVGRIAAIIAPLLMPWFLTLSGGNKAVAFIIFAAAFIIACVAALCLPERKGLDLED

SEQ ID NO: 11181 - protein, 449 aa, Bifidobacterium longum NCC2705
MSTTTPAQPAQLTRNERLDRLPFNKAHRKLLVASGIGWAFDAMDVGLVSFVVAAIAADPHFNLTPTEKSWVLSIGFVGMAIGAAVGGFIADRVGRKTVFTATLIIFGIANGAMALSWSLGMLLGARLIIGLGLGAELPVASTLVSEFSPTKQRGRMTVLLESFWAVGWIVAAMIGYFVIPNTGDWGWRWALAIGALPLLYAIVTRVHIPESVRFLEAKGREDEAEKAVRYFEEAGGVAPVTSPKGKPLPKIKTRELFGSKYLARTIAIWATWFFVNFSYYGAFTWMPSLLADQFGSLTKSFGYTLAISIAQLPGYFLAAWLVEVWGRRKTLSIFLAVSAVAAFAFSQAGSVALVLVFGMLLSASNLGAWGVLYAVTPEIYPTRLRGAAAGAAAAVGRIAAIIAPLLMPWFLTLSGGNKAVAFIIFAAAFIIACVAALCLPERKGLDLED

SEQ ID NO: 11182 - protein, 446 aa, Salmonella enterica subsp. enterica serovar Typhi Ty2
MPQPRNFDDLKFSSIHRRIMLWGSGGPFLDGYVLVIIGVALEQLTPLLHLDAEWIGALGAATLAGLFIGTSLFGYICDKVGRRKMFLLDIIAIGVISVATMFVSTPLELLVMRVLIGIVIGADYPIATSMITEFSNTRQRAFSIGFIAAMWYVGATCANLVGYWLYDMEGGWRWMLGSAFIPCLIILIGRFDLPESPRWLLRKGRVKECEQMMIKLFGEPVCFDDEPPQETRFLQLFNRRHFPFVLFVAAIWSCQVIPMFAIYTFGPQIVGLLGWEQGRNAALGNVVISLFFMLGCIPAMFWLNSIGRRPLLIGSFAMMTIALALLGLVSNLGIILVVVAFAVYAFFSGGPGILQWLYPNELFPTDIRASAVGVIMSLSRIGTIVSTWALPIFITRYGINNVMLIGALISLVGLGVSVMFAPETRGLTLTQTGNMTLRGTPSDNPR

SEQ ID NO: 11183 - protein, 452 aa, Yersinia pestis CO92
MQTLPSEKIRMDDVPLNRFHIRIAGLTFGAHFIDGYILGLIGFALIQLKPIMALTPLWEGLLGSAALIGLFLGSLILGWISDYIGRQKIFSFSFVIITLASALQFFASTPEQLFILRVIVGIGIGGDYSVGHTLLAEFSPRKHRGVLLGAFSVIWTFGYVSASFVGHYLSMVSPEAWRWLLSSAALPALLILLVRIGTPESPRWLMGKGREDDAMAIVHKYFGPNVTLIDEEPATSTRRFLSLFGRKYWRRTAFNSLFFVCLVIPYFAIYTFLPSILNVMALSQNFATDLLLNGLLVVGALVGIVLTAFCSRRSFLISSFIFLATCLLLLSILPSNQTFWLIALFAAFTLVMSAVSNLVGVFPAESFPTEVRSMGVGFATSMSRLGSAIGTSLLPLAIVNYGMPVTTTLLAFVLIIGAIVSIAWAPETKGLTLVDASQSATTPRPPSSIIPN

SEQ ID NO: 11184 - protein, 525 aa, Triticum aestivum/Thinopyrum intermedium alien addition line
MATEQLNVLKALDVAKTQLYHFKAVVIAGMGFFTDAYDLFCIALVTKLLGRIYYTDPALNEPGHLPANVSAAVNGVALCGTLAGQLFFGWLGDKLGRKSVYGFTLILMVLCSIASGLSFGHEAKGVMGTLCFFRFWLGFGVGGDYPLSATIMSEYANKKTRGTFIAAVFAMQGFGILFGTIVTIVVSSAFRHAFPAPPFYIDAAASIGPEADYVWRIIVMFGTIPAALTYYWRMKMPETARYTALIAGNTKQATSDMSKVLNKEISEEDVQGERATGDTWGLFSRQFLKRHGVHLLATTSTWFLLDVAFYSQNLFQKDIFSKIGWIPPAKTMNALEELYRIARAQALIALCGTVPGYWFTVAFIDIIGRFWIQLMGFTMMTIFMLAIAIPYDYLVKPGHHTGFVVLYGLTFFFANFGPNSTTFIVPAEIFPARLRSTCHGISAATGKAGAIIGAFGFLYASQDQKKPETGYSRGIGMRNALFVLAGTNFLGLLFSLLVPESKGKSLEELSKENVGDDDAIAPTGV

SEQ ID NO: 11185 - protein, 525 aa, Triticum aestivum/Thinopyrum intermedium alien addition line
MATEQLNVLKALDVAKTQLYHFKAVVIAGMGFFTDAYDLFCIALVTKLLGRIYYTDPALNEPGHLPANVSAAVNGVALCGTLAGQLFFGWLGDKLGRKSVYGFTLILMVLCSIASGLSFGHEAKGVMGTLCFFRFWLGFGVGGDYPLSATIMSEYANKKTRGTFIAAVFAMQGFGILFGTIVTIIVSSAFRHAFPAPPFYIDAAASIGPEADYVWRIIVMFGTIPAALTYYWRMKMPETARYTALIAGNTKQATSDMSKVLNKEISEENVQGERATGDTWGLFSRQFMKRHGVHLLATTSTWFLLDVAFYSQNLFQKDIFTKIGWIPPAKTMNALEELYRIARAQALIALCGTVPGYWFTVAFIDIIGRFWIQLMGFTMMTIFMLAIAIPYDYLVKPGHHTGFVVLYGLTFFFANFGPNSTTFIVPAEIFPARLRSTCHGISAATGKAGAIIGAFGFLYASQDQKKPETGYSRGIGMRNALFVLAGTNFLGLLFSLLVPESKGKSLEELSKENVGDDDTIVPTGV

SEQ ID NO: 11186 - protein, 525 aa, Triticum aestivum/Thinopyrum intermedium alien addition line
MATEQLNVLKALDVAKTQLYHFKAVVIAGMGFFTDAYDLFCIALVTKLLGRIYYTDPALNEPGHLPANVSAAVNGVALCGTLAGQLFFGWLGDKLGRKSVYGFTLILMVLCSIASGLSLGHEAKGVMGTLCFFRFWLGFGVGGDYPLSATIMSEYANKKTRGTFIAAVFAMQGFGILFGTIVTIIVSSAFRHAFPAPPFYIDAAASIGPEADYVWRIIVMFGTIPAALTYYWRMKMPETARYTALIAGNTKQATSDMSKVLNKEISEENVQGERATGDTWGLFSRQFMKRHGVHLLATTSTWFLLDVAFYSQNLFQKDIFTKIGWIPPAKTMNALEELYRIARAQALIALCGTVPGYWFTVAFIDIIGRFWIQLMGFTMMTIFMLAIAIPYDYLVKPGHHTGFVVLYGLTFFFANFGPNSTTFIVPAEIFPARLRSTCHGISAATGKAGAIIGAFGFLYASQDQKKPETGYSRGIGMRNALFVLAGTNFLGLLFSLLVPESKGKSLEELSKENVGDDDTIVPTGV

SEQ ID NO: 11187 - protein, 370 aa, Triticum aestivum/Thinopyrum intermedium alien addition line
DLFSLSLVVDLIGHRYYTGGPIPTYISVYINAAALCGTVPGQLVFGWLGDKMGRKRIYGVTLLLMVFCSLASGFTFGKSNYKSVVITLCFFRFWLGVSIGGDYPLSATIMSEYANKKTRGAFMSAVFAMQGFGNVVAGLVGMITSQVFRKSSPGNIDVVWRIVLMFGAVPALLTYYWRMKMPETARYTALIAKDANMAAADMSAVLSMHIVPEEDNLGSHDQYGLFSSEFRQRHGLHLLSTTVCWFVLDVTFYSLNLCMKDIFTTVGLLKGHDDEVCKVNTCQVARYHKADNPFQRTIDITAVHMAIAAGCTLPGYFFAVAFIDRIGRVKIQLLGFTMMTVFQLCLAIPYDKWLECNNNKYGFAVMYGFI

SEQ ID NO: 11188 - protein, 370 aa, Triticum aestivum/Thinopyrum intermedium alien addition line
DLFSLSLVVDLISQRYYTGGPIPTHISVYINAAALCGTVPRQLVFGWLGDKMGRKRIYGVTLLLMVFCSLASGFTFGKSNYKSVVITLCFFRFWLGVSIGGDYPLSATIMSEYANMRTRGAFLSAVFAMQGFGNVVAGLVGMITSQAFKKSSPDNIDFVWRIVLIFGAVPALLTYYWRMKMPETARYTALIAKDADMAAADMSAVLSMHIAPEEDSLGSQDQYGLFSSEFRQRHGLHLLGTTVCWFILDVTFYSLNLCMKDIFTTVGLLEGHDDEVCKVNSCQGASYHKADNPFQRTIDITAMHMAIAAGCTLPGYFFAVAFIDRIGRVKIQLLGFTMMTVFQLCLAIPYYKWQECNHNKYGFAVMYGLI

SEQ ID NO: 11189 - protein, 121 aa, Triticum aestivum/Thinopyrum intermedium alien addition line
RHGRHLLGTTVCWFVLDIAFYSQNLFQKDIYTAVEWLPRADTMNALQEMFKISRAQTLVALCGTIPGYWFTVFLIDVVGRFAIQLGGFFFMTAFMLGLAVPYHHWTTPGNHVGFVVMFSLT

SEQ ID NO: 11190 - protein, 50 aa, Triticum aestivum/Thinopyrum intermedium alien addition line
VAFIDKIGRFTIQLMGFFFMTVFMFAIAIPYKHWTHSENRIGFVVMYSFT

SEQ ID NO: 11191 - protein, 466 aa, Lactobacillus plantarum WCFS1
MNKQKKVSSKFIFFFGSFGGILFGYDIGVMTGALPFLKTDWALTNATLVGWVTSAVMFGAIFGAAIAGQLADRLGRRRMILMSSLIFAIGSILCGFSPNNGTYYLIGMRIFLGLAVGAASALVPAYMSEMAPARLRGSLSGINQTMIVSGMLISYIVDYILKDLPENMSWRLMLGLAAVPAIILFLGVLKLPESPRFLIKANRLDEARQVLSFVRKPDEVDSEVKAIQSTAQTEANNLEKTSWATLFNGKYRYLVMAGVGVAAFQQFQGANAIFYYIPLIVEKATGSAASSALMWPIVQGILLVLGSLLYIWIAEKFNRRTLLMLGGSVMALSFLLPAVINSLVPNASPMMIVVFLSIYVAFYSFTWAPLTWVLVGEVFPLAVRGRASGLASSFNWIGSWAVGLLFPIMTASMSQEAVFAVFGVICVLGVLFVRFCVPETRGHSLEEIEAAGTNHHKQVPVQQASH

SEQ ID NO: 11192 - protein, 488 aa, Lactobacillus plantarum WCFS1
MSAEKSISSDHVPLSDPALKTINRNAGRNLNHIAFISTLGGLLFGVDTGVINGAIGYMATPAELNLSPNNEGLVTSGITLGAAFGAVFAGHLSDRIGRKRLLKYLALLFFVCTLACSLAPNALFMIISRVLLGLAVGGASVIVPTYLSEISTPEIRGRLVTQNELMIVTGQLLAFIVNAILGNWFGHISNIWRYMIGFGMIPAVALFFGMMVVPESPRWLVMVNQLDNAFDSLRKIRSHPETCNEEITQIQDTLNQESEIKQATFKDLSTPWIRRLVFIGIGLGVMQQFIGINIMMYYGTTILTNSGFAHNAALIANIGNGLVSVIATFIGMSIMNRVNRRSMLIAGIIGTTTSLILIVGVSAFLSQSPLLPILVVLCTMMFLGFFQGFISPLVWLLLSEIFPQNLRGLGMGVSTFFLWFANFLVGYFFPILLSAVGMTWTFLIFVFFNILSFIFAYKYAPETRGKSLELIQMEFKYGDTTGINPEDK

SEQ ID NO: 11193 - protein, 470 aa, Lactobacillus plantarum WCFS1
MDVSESTNKKSNSHTGFLWLATFIAAMGSLLFGYDTGIVNGSLEFMAVKGQLDLTAFQQGIVSSGLTLGAAFGAIIGGPFADKIGRKKILTILGIIFSVGALGCAFATNITILIVFRFILGLAVGSASANVPVYIAEIAPTELRGKMVTTAQVMIVSGQFVAFGVNAALTPLGAQNAAIWRWMLGLGTIPGIILWIGMYLIPESPRWLVSQGKMDKALGVLRRIRSAASVESEMKEIQDKDKADKELNAEQATFKELISKRWVVQILITGAMLGIIQQFAGINSIMYYGGKIIQESGFDTTVAAILNAGNGFLSIVGAVLGMFTIDWLGRRKLEFAGLTICGITLVSAGVIHTVAPNASWAGITIVVLVYLYIIFFQGTLGPVTWLINSEIFPQRYRGIGTGITIFVLWIGNFIVGLLSPVLLEWNMSNTFYIFAVCCVLGIIFVALRVPETKGVPLEEIEKYFRTKYDK

SEQ ID NO: 11194 - protein, 463 aa, Oceanobacillus iheyensis HTE831
MIQDKKISSKFIYFFGAFGGILFGYDIGVMTGALPFLQSDWNLQNDPTAIGWITSSLMLGAIFGGALSGQLSDRIGRRKMILIASIIFALGSIMAGISPHNGILFMIVSRIILGLAVGAASALVPAYMSEMAPARLRGRLSGINQTMIVSGMLLSYIVAFVLKDLPETMAWRLMLSLAAVPALILFFGVLRLPESPRFLIKNNKINEARKVLSYIRPKEKIESEISQIQASTKYEEKASQKTSWGTLLSGKYRYLVIAGLGVAAFQQFQGANAIFYYIPLIVENATGNAASSALMWPIIQGIILVLGSLLFLLIADKFNRRTLLTLGGTVMGLSFILPAILNIVIPNASPMMIVVFLSIYVAFYSFTWAPLTWVIVGEIFPLVIRGRSSGLASSFNWIGSFLVGLLFPVMVASMAQEAVFAIFGAICLLGVLFVRLCVPETRGRSLEEIEKIGESKQLHKKTV

SEQ ID NO: 11195 - protein, 400 aa, Bacillus subtilis subsp. subtilis str. 168
MGKQQPISQRKLLGVAGLGWLFDAMDVGILSFIIAALHVEWNLSPEEMKWIGSVNSIGMAAGAFLFGLLADRIGRKKVFIITLLCFSIGSGISAFVTSLSAFLILRFVIGMGLGGELPVASTLVSEAVVPEKRGRVIVLLESFWAVGWLAAALISYFVIPSFGWQAALLLTALTAFYALYLRTSLPDSPKYESLSAKKRSMWENVKSVWARQYIRPTVMLSIVWFCVVFSYYGMFLWLPSVMLLKGFSMIQSFEYVLLMTLAQLPGYFSAAWLIEKAGRKWILVVYLIGTAGSAYFFGTADSLSLLLTAGVLLSFFNLGAWGVLYAYTPEQYPTAIRATGSGTTAAFGRIGGIFGPLLVGTLAARHISFSVIFSIFCIAILLAVACILIMGKETKQTELE

SEQ ID NO: 11196 - protein, 461 aa, Bacillus subtilis subsp. subtilis str. 168
MKKDTRKYMIYFFGALGGLLYGYDTGVISGALLFINNDIPLTTLTEGLVVSMLLLGAIFGSALSGTCSDRWGRRKVVFVLSIIFIIGALACAFSQTIGMLIASRVILGLAVGGSTALVPVYLSEMAPTKIRGTLGTMNNLMIVTGILLAYIVNYLFTPFEAWRWMVGLAAVPAVLLLIGIAFMPESPRWLVKRGSEEEARRIMNITHDPKDIEMELAEMKQGEAEKKETTLGVLKAKWIRPMLLIGVGLAIFQQAVGINTVIYYAPTIFTKAGLGTSASALGTMGIGILNVIMCITAMILIDRVGRKKLLIWGSVGITLSLAALSGVLLTLGLSASTAWMTVVFLGVYIVFYQATWGPVVWVLMPELFPSKARGAATGFTTLVLSAANLIVSLVFPLMLSAMGIAWVFMVFSVICLLSFFFAFYMVPETKGKSLEEIEASLKKRFKKKKSTQNQVLNERTL

SEQ ID NO: 11197 - protein, 451 aa, Bacillus subtilis subsp. subtilis str. 168
MNTIFKQKNTHPFSNAANRLDRLPISRVHFQVLTALGIVYFFDLADLFTLSNVAPALIEHWGIPLSTIANVTAASFLGMFLGASLGGRLSDRIGRKKALNLFVFVFSIASLCNAAAWDIPSLMTFRFLTGFGVAAAMVITDSYLAEFFPSSVRGKYISFCAMIGLIGVPITNIVSAFVIPLGSWGWRLVFVWGAVGLIYFFFIHRLEESPRWHENRGEYAKADAILTRIEEQVEKEKGPLPAASQPKVSETVKQNAGYAGLLKGRNLKITIVLSAVWIFETFGFYGFASWVPSLLKSNGVTMENTLWYNVLHSVGAPLGALLGSMISERFQRKWILAASAFLTAIAGLLYGMTFIPIMIIVFGFIVNITERVFTSNLYAYTSEPYPTEYRSSGSGLAYGLGRFSNIFGSLLVGFIAVQLGYISVFLFIGGCWLACSLLLIFFGPNTNAKQI

SEQ ID NO: 11198 - protein, 419 aa, Bacillus subtilis subsp. subtilis str. 168
MDMNEHRNRRLKLIMISATFGGLLFGYDTGVINGALPFMARPDQLDLTPVTEGLVTSILLLGAAFGALLCGRLADRDRRRKMILNLSFLFFLASLGTALAPNVFIMAVFRFLLGLAVGGASAMVPAFLAEMAPHEKRGRMVTQNELMIVGGQFLAYVFNAILGVTMANTGHVWRYMLVICAVPAIMLFASMLKVPESPRWLISKGKNSEALRVLKQIREDKRAEAECREIQEAVEKDTALEKASLKDFSTPWLRRLLWIGIGVAIVNQITGVNSIMYYGTQILKESGFGTKAALIANIGNGLISVIAVIFGIWLVGKVRRRPILLIGLAGTTTALLLIAIFSIVLDGSMALPYVVLSLTVLFLAFMQGCVGPVTWLVIAEIFPQRLRGLGSGISVFFLWILNFVIGFAFPILLSSVGLS

SEQ ID NO: 11199 - protein, 482 aa, Bacillus subtilis subsp. subtilis str. 168
MSTKKKEAVIGKESLAHKGLLRTITLVSTFGGLLFGYDTGVINGALPFMATAGQLNLTPVTEGLVASSLLLGAAFGAMFGGRLSDRHGRRKTILYLALLFIAATLGCTFSPNASVMIAFRFLLGLAVGCASVTVPTFLAEISPAERRGRIVTQNELMIVIGQLLAYTFNAIIGSTMGESANVWRYMLVIATLPAVVLWFGMLIVPESPRWLAAKGRMGDALRVLRQIREDSQAQQEIKEIKHAIEGTAKKAGFHDFQEPWIRRILFIGIGIAIVQQITGVNSIMYYGTEILREAGFQTEAALIGNIANGVISVIAVIFGIWLLGKVRRRPMLIIGQIGTMTALLLIGILSIVLEGTPALPYVVLSLTILFLAFQQTAISTVTWLMLSEIFPMHVRGLGMGISTFCLWTANFLIGFTFPILLNHIGMSATFFIFVAMNILAILFVKKYVPETKGRSLEQLEHSFRQYGRRADQEIQNQTTHLS

SEQ ID NO: 11200 - protein, 473 aa, Bacillus subtilis subsp. subtilis str. 168
MNKQGNQMSFLRTIILVSTFGGLLFGYDTGVLNGALPYMGEPDQLNLNAFTEGLVTSSLLFGAALGAVFGGRMSDFNGRRKNILFLAVIFFISTIGCTFAPNVTVMIISRFVLGIAVGGASVTVPAYLAEMSPVESRGRMVTQNELMIVSGQLLAFVFNAILGTTMGDNSHVWRFMLVIASLPALFLFFGMIRMPESPRWLVSKGRKEDALRVLKKIRDEKRAAAELQEIEFAFKKEDQLEKATFKDLSVPWVRRIVFIGLGIAIVQQITGVNSIMYYGTEILRNSGFQTEAALIGNIANGVISVLATFVGIWLLGRVGRRPMLMTGLIGTTTALLLIGIFSLVLEGSPALPYVVLSLTVTFLAFQQGAISPVTWLMLSEIFPLRLRGLGMGVTVFCLWMVNFAVSFTFPILLAAIGLSTTFFIFVGLGICSVLFVKRFLPETKGLSLEQLEENFRAYDHSGAKKDSGAEVIG

SEQ ID NO: 11201 - protein, 452 aa, Bradyrhizobium japonicum USDA 110
MSMISARIERLPFARFHKHLLLMGGLGYMFDAMDAAVLAFILPVLRTAWNLSSVQIGVLGSSTYIGFLFGALLAGTLGDLIGRRAVMMSALALYCAASIVSAMVDTWPSFFAARVVAGMGTGAESAIVAPYLAEFVARRYRGSFTGALAGFFSFGFVAAALLGYFIVPAYENGWRIVLVITAVPVVMLLWWRRALPESPRWLESRGREKEAEALLDTIEAGFARQGHVLPHPVVEAVAPQGATGTLLANFAALLAGRQARITIMTWIMWLAITFSYYSFFVWIPGLLVQNGMSITKSFAYSIAIYCAQIPGYFSAAYFNERIGRQATIATYMVLGGASALGLAFAQSDQQIMAAGIFLSLFMNGTYAGVYAYTAEVFPTPVRTTGAGLASAIGRIGAIVSPILVGYLYPNFGFAGVFGVTTTVLLLGAVTVVLMGVPTRGRSLEEIAAGEVA

SEQ ID NO: 11202 - protein, 460 aa, Bacteroides thetaiotaomicron VPI-5482
MKSYNKKFVYSICLVSAMGGLLFGYDWVVIGGAKPFYELYFGIADSPTMQGLAMSVALLGCLIGAMVAGMMADRYGRKPLLLISAFIFLSSAYATGAFSVFSWFLAARFLGGIGIGIASGLSPMYIAEVAPTSIRGKLVSLNQLTIVLGILGAQIANWLIAEPIPADFTPADICASWNGQMGWRWMFWGAAFPAAVFLLLACFIPESPRWLAMKGKREKAWSVLSRIGGNRYAEQELQMVEQTSASKSEGGLKLLFSRPFRKVLVLGVIVAVFQQWCGTNVIFNYAQEIFQSAGYSLGDVLFNIVVTGVANVIFTFVAIYTVERLGRRALMLLGAGGLAGIYLVLGTCYFFQVSGFFMVVLVVLAIACYAMSLGPITWVLLAEIFPNRVRGVAMATCTFALWVGSFTLTYTFPLLNTALGSYGTFWIYSAICVFGFLFFLRALPETKGKSLETLEKDLIK

SEQ ID NO: 11203 - protein, 484 aa, Bacteroides thetaiotaomicron VPI-5482
MNNTTNEGSKLYLYSITSVAILGGLLFGYDTAVISGAEKGLEAFFLSASDFQYNKVMHGITSSSALIGCVLGGALSGVFASRLGRRNSLRLAAVLFFLSALGSYYPEVLFFEYGKPNMDLLIAFNLYRVLGGIGVGLASAVCPMYIAEIAPSNIRGTLVSCNQFAIIFGMLVVYFVNYLIMGDHQNPIILKDAAGVLSVSAESDMWTVQEGWRYMFGSEAFPAAFFGLLLFFVPKTPRYLVLVQQEEKAYTILEKINGKKKAQEILNDIKATAQEKTEKLFTYGVTVIVIGILLSVFQQAIGINAVLYYAPRIFENAGAEGGGMMQTVIMGIVNIIFTLVAIFTVDRFGRKPLLIIGSIGMAVGAFAVAMCDSMAIKGVLPVLSIIVYAAFFMMSWGPICWVLISEIFPNTIRGKAVAIAVAFQWIFNYIVSSTFPALYDFSPMFAYSLYGIICVAAAIFVWRWVPETKGKTLEDMSKLWKKNK

SEQ ID NO: 11204 - protein, 399 aa, Bacillus cereus ATCC 14579
MGKVKEISKRKLLGIAGLGWLFDAMDVGMLSFVMVALQKDWGLSTQEMGWIGSINSIGMAVGALIFGILSDKIGRKSVFIITLLLFSIGSGLTALTTTLAMFLVLRFLIGMGLGGELPVASTLVSESVEAHERGKIVVLLESFWAGGWLIAALISYFVIPKYGWEVAMVLSAIPALYALYLRWNLPDSPRFQKVEKRPSVIENIKSVWSGEYRKATIMLWILWFCVVFSYYGMFLWLPSVMVLKGFSLIKSFQYVLIMTLAQLPGYFTAAWFIERLGRKFVLVTYLIGTACSAYLFGVADSLTVLIVAGMLLSFFNLGAWGALYAYTPEQYPTVIRGTGAGMAAAFGRIGGILGPLLVGYLVASEASLSLIFTIFCGSILIGVFAVIILGQETKQRELV

SEQ ID NO: 11205 - protein, 441 aa, Coxiella burnetii RSA 493
MTNQVQNPTLESLDEQKLNRLHWRMVITAGTGFFTDAYDLFVIGVVTALLMPLWHLSASQIALLNGASLASAAVGAVMFGWFADKFGRKKMYGIEVLILFIGALLSAVSPSFAWLLVSRIIVGIGIGGDYPTSAVVASEYANRKNRGFLVLLVFAMQAVGLIIGPLFASLLMAFHLPHALVWRLLLAFGALPAASVFYLRRRIAETPRFLLNKSPVEVSRVVSDLAGHSDTAVATPVQKLFSPKWLKCLIGTAGAWFLLDVALYGNGVSSVLIMKAISPHASLLKHTLLSALIFLCFAVPGYFSAATYVDKIGRKTLQIAGFVMMGLCYLLIAGIPHISDQLPLFVGIFGISFFFINFGPNATTFLIPSEIYPIHLRARAHGLSAAVGKAGAFIGAFFLPLLLKNMGLAYTMAVVAIASFLGIFATFLVPEMKGVSLEKPQ

SEQ ID NO: 11206 - protein, 442 aa, Coxiella burnetii RSA 493
MRWVIVVKDDESNIKAFHWRIVFTAGMGFFTDAYDLFIIGVVTTILTPIWHLTISQLALLNGAALAAAAVGAISFGVLSDKFGRKRLYGVEVLILFFGAILSAFPPSYGWLLFSRIVVGLGIGGDYPSSAIIASEYAPSQRRGFLVLLVFAMQALGLVVGPLLASLLLVTPLSHTLVWRILLGIGAIPAASVFYLRRQIEETPHYLLKKSPPVAVSRVVSDLTGFTKKIKAQQVPHPQHYLFEKKWLVRLIGTASAWFLLDVAFYGNSVSSVLILKWLNPQAQLVTNTLLTALTFFVFAVPGYLLAATYIDRIGRKFLQMFGFFMIAVAYGAIALIPHLTQHIPLFIAIFGISFFFVNFGPNTTTFLIPSEIYPTSLRARAHGISAAWGKVGAFVGAFFLPHILHTQGLRYTMALLAVVCLIGILVTLLLPEMKGKAIDVIE

SEQ ID NO: 11207 - protein, 443 aa, Coxiella burnetii RSA 493
MFHIRMSQKAHLTSQQKKVLFLTSLGGILEYYDFIIYIYLANVIEKLFFPSGTPFVATLETLIVFSIGYLFRPLGGILFSHFGDRYGRKVVFLLTVLFMAIPAFGIALLPTVSQIGITASVLLVLFRIMQGLALGGEIPGAITFVAEHVDNNRRGLATATLFFGINAGLLLGSFATMILTTMTTPATLYSYGWRVPFFVGGIFGILAVFLRRYLEETVAFSKLARSQLQRVPLITLLKHFRKNVVESALLVGLASVTIFLFLYWPHYLNQYLGFPLAATLKINTLGILIFSFTLFLTGWLADRFGYRTIYFIGVVLIILSAYPLFLLFTLHSLSLVIVSYVLFSIIFAFITGAYPVILTTLFPTTVRYTGIATAYNLGYAIWGGLSPLICTFLIFKLHSVLAPASYLIFMAVALLIHFPFRFRHPRPLVVPAQTHRRQLKGAR

SEQ ID NO: 11208 - protein, 471 aa, Sulfolobus solfataricus
MDKGISKTPFGSIDSLKLTFNHIKVWYTSGMGFFTDAYDLFIISAILDVLLQLHDPNFPLNSVTEGLLASSALWAAIIGQLVFGFLGDKIGRKAIYGVEAILMTVGALLSALSPNIYWLIIFRSIMGLGIGGDYPISATIMSEYANVKDRGKLIALVFANQGLGSLAAVSVGIGSVLAFPLDISWRVMAAIGAIPAATVIYLRRKTPETPRYSMLVKGNVQEAKKAAEFLGAKIEEKRAYSKPLSLSEFLSKYWLILIGTAVPWFILDIAFYGTGIYSGAITQLILGKPTSIANLILEQGLPYMVGFFGYFTAVALMDKLGRKIIQLQGFILMTIIYAVVSSFLIVSGTKVVGLTIPAGIGFLIYALSFFFIDFGPNTTTFILPAEAYPTRARTTGHGISAASGKLGAAITTYLFPSLLASMGIKNILLMLSALSLVGAIVTIIAVKETKGKSLEEISKEEVIVQEEQFST

SEQ ID NO: 11209 - protein, 423 aa, Sulfolobus solfataricus
MSYFDNIPLSVRIRTFIVTSAGFLLDGYDLNSISFAATIILKEFSLTTVKYGLLLAASLIGMIPGSIVFGWLSDKMGRSKIMGLDLFFFLVFGILTAISQNFVELFISRLLLGIGIGGDYPISSTLMSELSPSRSRGRYLTGSVAMYWVGVAISGIATLFLLPTGSYFWRYVFLIGALISVPIILLRLRLIESPRWLVSTGKANIKEINREIENKGVRGVVDLFKGKLLKITFFVTSVWFLFDVAAYGIGLYYPALLEEFAFPSKYEVVLGTLAIAAASVLGYIIAELLVDSLGRRVVLLVGLGFMTLLLYLGGIYKFTGGILVPYFMSFVALEQWAGAVTLFYPTELYPTPVRAIGQGFATAISRVGSVLGVFYFPILTKQMGFFNSLIMFGSVCLIAFIISILLSKETAKKPLEVTSEGVK

SEQ ID NO: 11210 - protein, 357 aa, Sulfolobus solfataricus
MNVKNVFKPLDEAKFGWFHAKSLITTGMGVFTDGYDLSSIGIVLLSVLASFGITKNSPDYVITTSLITGAALIGATIGAILFGFLSNMGRKKFYGIDVTLMTFGALLQAFVQNPLELIIVRFLLGLGIGADYVLSPTIMAEHSNAKDRGKTLVLGFGLFWGFGASTAAGLYLILQTMGLPTDLIWRIVLAAGSIPAASVIYLRRKIPETARYLGRIKGDLNELKNVIKEVTRLEVSNVKDIKDNVKLTEYFIANWKLILTAAILWFLFDIVAYAGILFGPSLIANSLGMNSGTFQLLIEGAFTIPGGLIALTLIDKLGRKPLQVIGVWASWDFMIFNINPQPLGFTEVADVHPSPPH

SEQ ID NO: 11211 - protein, 451 aa, Sulfolobus solfataricus
MGYNKPDFSSLEFKSVLTAGMGVFTDGYELYAISLVFYYIQKEFLLNGLEEGIVIASAYYGAAVSAILLGFLSDKLGRKFIYGLDVALMSLGILFQSISTNFAELVMSRIILGFGIGADYVLSPIITAENSNPKNRGKRMIVTFALLWGMGAVTAAFVEQILLLVNMENDLIWRIVLFMGILPAISVFYLRRKIPETYKFLTRIKPKPEELKKLEKEIKSKVAISPDEVPFSKRFVSAIGITIISSILWLLYDMYSSTFAIYGPITIAGNLGLNPIEFTYLAQFLAGLPGQIISIYLVDKIGRKPLIVIGYAGVAFWLFMYSILLMDPYYFGLKIHISNPLKAAESLTGEAALLGLSFYLMNYLSSAIGPASIIGSAMLTPELVPTKVRGTSQAISVAVDRLAAAFSITAFPLLLAKFGLPVLLGIYSIIALVSCSITLFLIPETKGVELS

SEQ ID NO: 11212 - protein, 476 aa, Thermoplasma acidophilum
MTENNGGLDAINEAINTSHGSFHLKTVLISGLGFFTDAYDLFIIGVVVSLLSLAGWTTVDTFYKGLISSTALISAVIGAIIFGRLLDYLGRKRVYGLELAILIVGALGSAFLTPYNNVIALIAWRFILGIGIGGDYATSSTIIAEYSNTKSRGKLIGSVFSMQSFGLVAGPLVALAFMLHGIPPAITWKALLAIGAIPAAIVIYFRLKMPEPPRYTAAAKGDVHKAAKDLKEYTGIHVEVSSKDKYVVKAKWTALFKDRTFLLTLIGTMGAWFMMDWALYGNSIMSSTILSALVPSTIKGLPALIRSTEYTLLIFAGAAFPGYWIATSVLDKIGRKTIQLIGFAVMALSYALIAIGYHSIIGNISMFLALYGLSYFFIEFGPNVTTFVYPPEVFPVTTRGLGTGMSAAGGKIGAFIGTFADAIILGTDASAHLPFLFSLLAVFAVIGFALTLVLLPETKGRNLEDTSGEKRYTVKA

SEQ ID NO: 11213 - protein, 476 aa, Thermoplasma acidophilum
MAQGLLQQLDNAKVGKFHLRAWVISGMGFFTDAYDLFIIGTVVSLLPLAGWNSLTTADISLISSVALLASVIGAFTFGRLLDLLGRSRVYGFELMLLIIGAVGSAFLVPVNGVLYLLIWRFILGLGIGGDYAGSSTIMAEFSNAKNRGQLIGMVFSMQGFGLVFGPVIALVMLRYIPSIDLVWRLLLFLGAIPAAIVLYGRRTIGETPRYSINVSGDISSAKKAIQEISGKSTVQANPDELIGEHISWKKMFTDRYFLMTLIGTAGAWFALDWAFYGNSIMSHQMLSAIVPASLGGVAKVKMTTFYALIIFAVSALPGYWIATFTVDRIGRKPLQILGFFMMALSYIILGVFRFISAPSYIIWFMIIYGLSYFFTEFGPNVTTFIYGPEMFPTSLRGMGSGLSSAGGKLGAFIGTALNVVIYAIFGESVLFIILAFISIAGALLTMFFLPETSGRSLEDISGERNYKRALSSGSKK

SEQ ID NO: 11214 - protein, 445 aa, Thermoplasma acidophilum
MGFFDEMDNMRMRPFHRKMEILASMGMFLDGYDLSVIAMAILLMPIQLKFSKPEYILVNVSALAGMIVGAPLLGRLSDRIGRKKIFDIDLILFVVFAITAGLATNFWMMFISRFMLGVGIGGDYPISSTIVSEFAPVKRRGTLLYAMVGMYWLGSLFSGIMNYTFAFTYYFWRYTFIIGGIVAIPIISLRMQIPESPRWLVSQGRADEASKVIENITGKEPDLNEGVIEGKEERSVRFRDLFSSGFLSKTVFVLSVWFLFDVASYGIGFYYPTMMREIGLSASALNTAGLRVIAEIGMIVAVGAIVGYAVAMMLADRVGRRVLTLVGVFVMFALLFLGSMVKIVSLIPLVSFFFSFVLFEQWVGAATLFYPTELYPTNYRSTIQGIATSVSRVGAIMGVVVFPLYPIFHSMFLFATLMFVAFVITVLFAPETKKKPLEKIWNAKA

SEQ ID NO: 11215 - protein, 459 aa, Thermoplasma acidophilum
MFEGLDSRRITFFQIKSVIVSGIGIFSDSYNLYAISLVYYLVSASLDLSPLQDSLMTSASFMGAAAGAFLFGFIADRIGRKPMYGIDLAFIALGSFLQLFTVNFYELVIFRSILGFGIGGDYVLSPVIMAENADTRDRGKLMIMTFPIMAAFGAMLVAFVDQISLLYLPSSAVWHVVLAFGGVPALLVIYLRRKIPETPRFEARVRGNSTELSKIETEIGSAVNVDIDRKPFISRLRASILMITVSAVLWILYDMYSTTFAIYGPITIAYNLGLTPITFTYYAELFAGIPGAIISALLIDRVGRRKLIVVGYAGVFVWLLMYSLLLAKASIFAGLASDITPAGLIGKAAILGFFFYIMNYLFSATGPASIIGGAMVTPEITPTKVRGTSQGITVGIDRTADAVGLTAFPILLSKFGLSAMVLAYAMIAVLSIIMIFMIPEAAGKSLEEVSKDYDTTTQI

SEQ ID NO: 11216 - protein, 449 aa, Burkholderia cepacia
MKAFETSQEWHGTVTSTESASGANTTESGSRRLFFASFLGTMVEWYDFFLYGFIAPLVFEELFFPKLNALSGTIAVYATFAVGYASRPLGGLVFGHFGDKIGRKSMMLVTLLMMGIGTAAIGLLPSVAQIGMSATCLLVALRFVQGFALGGESAAASLMVLESAQQRRRGLLGAALQAAGPLGVLLASLAVFVVSRLPHDALLAWGWRVPFLVSAVLVVIGLYIRLRVEETVAFRKQQSKHELTRIPAWETLRSYKWPVFVVLVVSIMESTFYYLTGVYSISYVTKTLHMPGSVAIGAIACANAFALVSVPLYGALSDRLGRKGVYLLGIVASAIYLNFFFTMLDGRSAMVVVLAVVAAVGVIHAPMYAMFGSFYGELFPTRVRFTGFSMGKAFGTVLGGGIAPMIAASLAARNHGDPSAIGLYYLCLAFVALCVVLRVRETRNDDITV

SEQ ID NO: 11217 - protein, 545 aa, Chlamydomonas reinhardtii
MGAHCTRSGTWSRFFLFLASFMIPGLGMFCEAYFVFAVGNLSALWKVEYKNCWKGIGCPVKLSESITYTQVCGIIFGQLFLGFFADRIGRKWGSVTTAATMVVGAILIISSAGNTERALWAMFTAVQFIFGIGVGGEYPVASTSANERAESSAALQKRRGETVVLVFSMQGWGNLVNTAVIIAIMAGYHQYGAPYSNHALEVTWRLSYAIGLIPLIGILLYRTFRLRESAVWTKKREALQAMGGSEAKGVQWRKFGLLMYYYWHRNFGTAMSWFVWDFAFYGNKLFQGTFIKIINPSASLIQVLEWTLLNSSVALVGYYFAAFTVDKPWMGRMRMQVMGFAWMFVLFLICAVHYDQLRTPKYIHTFQFLYYFSSFWGQFGPNATTWLLPAELAPTELRSMCHGFSAAVGKAGALVAGVVFGLVDGRTKFWISAFCGLAGVILTLITIPDVTGLDLREGDKRWLAILDGHHHLYHGDAIKPRHLSLIERLLGYGKNYQADSSSDVQYSATTTSSSAAMAKRAAEMSSPKQSFKKQNSGNAIIPVTN

SEQ ID NO: 11218 - protein, 560 aa, Chlamydomonas reinhardtii
MATPPQNTADPEKTQLQKLQNAEVTLLTMEKEEVVVYHNPLWRCLHFMGAFMLPGLGMFCEAYFVFAVGNLSAVWKAEYPDCWATHTTCPKKLSDSITYTQVCGIIFGQLVLGFFADRIGRKWGSVSTAATMVVGGILIVASAGPTDRALWAMFTAVQFIFGIGVGGEYPVASTSANERAESSVALSKRRGETVVLVFSMQGWGNLVNTAVIIAIMAGFNQYHPPYSSYALEVTWRLSYAIGLIPLISILLYRVFHLRESAVWQKKREALRAMGGAKASGVQWRKFSLLMRYYWHRNFGTAMSWFVWDFAFYGNKLFQSTFIKIINPHASVIQILEWTLLNSAVALVGYYFAAFTIDKPWMGRMRMQIMGFSWMFVLFLICAVHYDALSTPKWIHAFQFLYYFSSFWGQFGPNATTWLLPAELAPTEVRSMCHGFSAAVGKAGALVAGVVFGLVDNRTKFWISAFCGLAGVILTLITIPDVTTLDLREGDRRWLAILDGHHDMYHGEAVNPKNLSLIERLMGYGKLYKPHAGEQYAVDKSSDDSTPEGVKGMDGIEQPAK

SEQ ID NO: 11219 - protein, 573 aa, Chlamydomonas reinhardtii
MTDPKGQDLDAEKQHAATLHNAEDTLCSAVQDETAEDLRPRNVIVRFFQFLASFMIPGLGMFCEAYFVFAVGNLSALWKVEYKNCWKGIGCPVKLSESITYTQVCGIIFGQLFLGFFADRIGRKWGSVATAGTMVVGAILIISSAGPTENALWAMFTAVQFIFGIGVGGEYPVASASANERAESSAALQKRRGETVVLVFSMQGWGNVVNTAVIIAIMAGFGQYGAPYSNHALEVTWRLSYAIGLIPLISILLYRIFRLRESAVWTKKREALQAMGGSEAKGVQWRKFGLLMYYYWHRNFGTAMSWFVWDFAFYGNKLFQGTFIKIINPSASLIQVLEWTLLNSSVALVGYYFAAFTVDKPWMGRMRMQVMGFAWMFVLFLICAVHYDQLRTPKYIHTFQFLYYFSSFWGQFGPNATTWLLPAELAPTEVRSMCHGFSAAVGKAGALVAGVVFGLVDGRTKFWISAFCGLAGVILTLITIPDVTGLDLREGDKRWLAILDGHHHLYHGDAIKPRNLSLIERLLGYGKNYQADTSNDGAYSATTTSASAAMAMKGAEMVPPHKQQPTATIAIAK

SEQ ID NO: 11220 - protein, 444 aa, Amycolatopsis orientalis
MTMTRAVNEDGAGQDTTPTELRRVVGASVVGTALEWYDFFIYGFAVTLVFNELFFTTGDPAMGVIIGFATFGVGFAVRPIGGFLFGHLGDRIGRRSTLVLTTLVMGVSTGLIGLLPTYDSIGVAAPILLTVLRMCQGLGAGAEFGGASTLLAEHAPARRRGFFTSFAQTGVQIGLLSGVTVFLLIELLPRQTVLDWAWRIPFLFSFVLIAVALYVRLRVAESPVFQQMSERRTTVKMPVLDALRHYPRNFLIGIGAHICDTAVVYIYATYSLTYITKTLAMPRWVALTGVIIFSVIVIALQPVYGALSDRVGRRPLNLFSVVFTAAFAFPFFLLLDTREPVLIWIALVLATSLGFAPMIAVQPAFYAELFGARVRYTGFAASREIGAALGGFSPLIAAALVAQAGGKGWLVALWMIATAAISFVAFWLSKESKDVDITVIDATR

SEQ ID NO: 11221 - protein, 498 aa, Mesembryanthemum crystallinum
MTLDSIPGSSGYLDSYPERRITYFGNKFVLALTVTAGIGGLLFGYDTGVISGALLYIKDEFPAVKNSSFLQETIVSMALVGAMIGSATAGWINDVYGRKKATLLADFIFAIGAVVMAAAPDPYILIVGRFLVGLGVGLASVCAPVYIAEASPTEVRGGLVSTNVLMITFGQFVSYCVNLAFTEVPGTWRWMLGVSGVPAVLQFGFMLLLPESPRWLYLKHEKSKAAAVLAKIYDPFRLEDELDLLAAAEEEEKNKPAVHISDVFTKRELRYAFIAGGGLLAFQQLAGINTVMYYSPTIVQMAGFSSNQLALLISLIVAAMNAVGTVLGIYLIDHMGRRKLALTSLSGVFVALVMLTISFMLRSSGPTSALYSWLAVLGLALYIAFFAPGMGPVPWAINSEIYPQAYRGLCGGMGATICWIVNLFVSETFLSIADAIGTGPTFLIIAGIVIVAFVFVVCFVPETKALTFEEVDQMFMDRAYGTEENTQSLLESSNRSGN

SEQ ID NO: 11222 - protein, 539 aa, Lupinus albus
MARDELSVLTALDVAKTQWYHFTAIIVAGMGFFTDAYDLFSIANVTKLLGRIYYTHQGAPKPGTLPPNVSLAVNGVALCGTLTGQVFFGWLGDKMGRKKVYGLTLAIMVFASLASGLSFGHTAKGTVSTLCFFRFWLGFGIGGDYPLSATIMSEYANKKTRGAFIAAVFAMQGFGILFGGIVSLVISTIFDHAYSAPAYEVDAEASLVPQADYVWRIILMLGALPAALTYYSRMKMPETARYTALVARNAKQAAQDMSKVLQVEIEAEQDMVDKLSERDNNNFGLFTKEFAKRHGKHLIGTCTTWFLLDIAYYSSNLFQKDIYSSIGWLPPAKEMNAIHEVFRVSKAQVLIALCGTVPGYWFTVAFIDHLGRFFIQLMGFFFMTVFMFALAIPYDHWTKKDNRIGFLVMYALTFFFANFGPNSTTFVVPAEIFPARLRSTCHGISSAAGKAGAIVGAFGFLYASQSKDATKRDVGYPAGIGMKNTLIVLAVCNCLGMFFTFLVPESKGKSLEELSGENEDEGTNETSQQPAASNRTVPV

SEQ ID NO: 11223 - protein, 222 aa, Medicago sativa
HGLALFGTCSTWFLLDIAFYSQNLFQKDIFSAIGWIPPAKEMNAIHEVYKIARAQTLIALCSTVPGYWFTVAFIDYMGRFAIQMMGFFFMTVFMFALAIPYDHWSKKDNRIGFVVMYSLTFFFANFGPNATTFVVPAEIFPARLRSTCHGISAAAGKAGAIVGAFGFLYAAQSKDPTKTDKGYPTGIGIKNSLIMLGVINFVGMLCTLLVPESKGKSLEELS

SEQ ID NO: 11224 - protein, 533 aa, Medicago truncatula
MSGELGVLNALDVAKTQLYHFTTIVIAGMGFFTDAYDLFCISLVTKLLGRIYYTEPNPTRPGTLPPSAQSAVTGVALVGTLAGQLFFGWLGDKLGRKKVYGLTLILMVVCSVASGLSFGSSPKSVMATLCFFRFWLGFGIGGDYPLSATIMSEYANKKTRGAFIAAVFAMQGFGILGGGIVALTVASIFDHKYKVPTFEENPAASLLVPQFDYVWRLILMFGALPAALTYYWRMKMPETARYTALVAKNAKQAAADMSKVLQVELEVEEEKVEKMTSDKRNSYGLFSKQFAARHGLALFGTCSTWFLLDIAFYSQNLFQKDIFSAIGWIPPAKEMNAIHEVYKIARAQTLIALCSTVPGYWFTVAFIDHMGRFAIQMMGFFFMTVFMFALAIPYDHWSKEENRIGFVVIYSLTFFFANFGPNATTFVVPAEIFPARLRSTCHGISAAAGKAGAIVGAFGFLYAAQSKDPTKTDKGYPTGIGIKNSLIMLGVINFVGMLCTLLVPESKGKSLEELSGENEGEGAEATEQEGSRV

SEQ ID NO: 11225 - protein, 537 aa, Medicago truncatula
MSGELGVLNALDVAKTQLYHFTTIVIAGMGFFTDAYDLFCISLVTKLLGRIYYTEPNPTRPGTLPPSAQSAVTGVALVGTLAGQLFFGWLGDKLGRKKVYGLTLILMVVCSVGSGLSFGSSPKSVMATLCFFRFWLGFGIGGDYPLSATIMSEYANKKTRGAFIAAVFAMQGFGILGGGIVALIVASIFDHKYKVPTFEENPATSLLVPQFDYVWRLILMFGALPAALTYYWRMKMPETARYTALVAKNAKQAAADMSKVLQVELEVEEEKVQKMTSDKRNSYGLFSKQFAARHGLALFGTCSTWFLLDIAFYSQNLFQKDIFSAIGWIPPAKEMNAIHEVYKIARAQTLIALCSTVPGYWFTVAFIDHMGRFAIQMMGFFFMTVFMFGLAIPYDHWSKEENRIGFVVMYSLTFFFSNFGPNAATFVVPAEIFPARLRSTCHGISAAAGKAGAIVGAFGFLYAAQSKDPTKTDKGYPTGIGIKNSLIMLGVINFVGMLCTLLVPESKGKSLEELSGENEGEGAEATEQEGPRFENVA

SEQ ID NO: 11226 - protein, 528 aa, Medicago truncatula
MGLEVLEALDSARTQWYHVTAIVIAGMGFFTDAYDLFCISTVSKLLGRLYYFDPSTNKPGKLPPSVNNVVTGVALVGTLSGQLVFGWLGDKLGRKKVYGVTLIIMVACAICSGLSFGSSAKSVMITLCFFRFWLGFGIGGDYPLSATIMSEYANKRTRGAFIAAVFAMQGVGIIFAGLVSMVFSGIFKAYYQAPRFNEDPILSTQPEGDLLWRLILMIGAVPAAMTYYWRMKMPETGRYTAIVEGNAKQAAADMARVLDIEIIAEQDKLAEFKAANDYPLWSSEFFNRHGRHLIGTMSCWFLLDIAFYSQNLTQKDIYPAMGLIRQDKEMNAIDEVFQTSRAMFVVALFGTFPGYWFTVFFIEKLGRFKIQLVGFFMMSFFMFVIGVKYEYLKDENKNLFALLYGLTFFFANFGPNSTTFVLPAELFPTRVRSTCHAFSAASGKAGAMVGAFGIQYYTLDGTPRKIRRAMMILAFTNLIGFFCTFLVTETKGRSLEEISGEDGRESELTATPNDRAPGIRQDSRTEKM

SEQ ID NO: 11227 - protein, 536 aa, Sesbania rostrata
MAGELGVLNALDVAKTQWYHFTAIVIAGMGFFTDAYDLFCISLVTKLLGRIYYSDPKAPKPGTLPPNVQAAVTGVALCGTLAGQLFFGWLGDKLGRKKVYGITLILMVVCSLASGLSFGSSAKGVMATLCFFRFWLGFGIGGDYPLSATIMSEYANKKTRGAFIAAVFAMQGFGIMAGGIVALIVSAGFDHKYKVPSYQENPQASLVLPQFDYVWRIVLMFGALPAALTYYWRMKMPETARYTALVAKNAQQAATDMSKVLKVELEVEEEKVQKITEADTNKYGLFSKEFAKRHGLHLVGTTTTWFLLDIAFYSQNLFQKDIFSAIGWIPPAKEMNAIHEVYKIARAQTLIALCSTVPGYWFTVAFIDYMGRFAIQLMGFFFMTVFMFALAIPYDHWTKKENRIGFVVMYSLTFFFANFGPNATTFVVPAEIFPARLRSTCHGISAAAGKAGAIVGAFGFLYAAQSKDPTKTDKGYPTGIGIKNSLIMLGVINFAGMLFTLLVPESKGKSLEELSGENEDGAEGIELPASARTVPV

SEQ ID NO: 11228 - protein, 540 aa, Sesbania rostrata
MAGGGGQLGVLNALDVAKTQWYHFTAIVIAGMGFFTDAYDLFCISLVTKLLGRIYYTDYNKPKPGVLPPNVQAAVTGVALCGTLAGQLFFGWLGDKLGRKKVYGITLMLMVVCSIASGLSFGSSAKGVMATLCFFRFWLGFGIGGDYPLSATIMSEYANKKTRGAFIAAVFAMQGFGIMAGGIVALIVSSAFDHKYKVPAYQEDAKASMVLPAFDYVWRIILMFGAVPAALTYYWRMKMPETARYTALVAKNAKQAASDMSKVLQVEIEAEEDKVQHLIESQNQTFGLFSKEFAKRHGLHLVGTTTTWFLLDIAFYSQNLFQKDIFTAIGWIPPAKEMNAIHEVYRIARAQTLIALCSTVPGYWFTVAFIDYMGRFAIQLMGFFFMTVFMFALAIPYHHWTLKENRIGFVVMYSLTFFFANFGPNATTFVVPAEIFPARLRSTCHGISAAAGKAGAIVGAFGFLYAAQSTDPAKTDAGYPTGIGVKNSLIMLGVINFFGIIFTLLVPESKGKSLEELSGETEEDGVEAIEAAASSRTVPV

SEQ ID NO: 11229 - protein, 538 aa, Oryza sativa (indica cultivar-group)
MAGELKVLNALDSAKTQWYHFTAIVIAGMGFFTDAYDLFSISLVTKLLGRIYYFNPASKSPGSLPPNVSAAVNGVAFCGTLAGQLFFGWLGDKMGRKKVYGMTLMLMVICCLASGLSFGSSAKGVMATLCFFRFWLGFGIGGDYPLSATIMSEYANKRTRGAFIAAVFAMQGFGNLTGGIVAIIVSAAFKSRFDAPAYRDDRTGSTVPQADYAWRIVLMFGAIPALLTYYWRMKMPETARYTALVAKNAKQAAADMTQVLNVEIVEEQEKADEVARREQFGLFSRQFLRRHGRHLLGTTVCWFVLDIAFYSSNLFQKDIYTAVQWLPKADTMSALEEMFKISRAQTLVALCGTIPGYWFTVFFIDIIGRFVIQLGGFFFMTAFMLGLAVPYHHWTTPGNHIGFVVMYAFTFFFANFGPNSTTFIVPAEIFPARLRSTCHGISAAAGKAGAIVGSFGFLYAAQSTDASKTDAGYPPGIGVRNSLFFLAGCNVIGFFFTFLVPESKGKSLEELSGENEDDDDVPEAPATADHRTAPAPPA

SEQ ID NO: 11230 - protein, 538 aa, Oryza sativa (indica cultivar-group)
MAGELKVLNALDSAKTQWYHFTAIVIAGMGFFTDAYDLFSISLVTKLLGRIYYFNPASKSPGSLPPNVSAAVNGVAFCGTLAGQLFFGWLGDKMGRKKVYGMTLMLMVICCLASGLSFGSSAKGVMATLCFFRFWLGFGIGGDYPLSATIMSEYANKRTRGAFIAAVFAMQGFGNLTGGIVAIIVSAAFKARFDAPAYRDDRAGSTVPQADYAWRIVLMLGAIPALLTYYWRMKMPETARYTALVAKNAKQAAADMTQVLNVEIVEEQEKADEVARREQFGLFSRQFLRRHGRHLLGTTVCWFVLDIAFYSSNLFQKDIYTAVQWLPKADTMSALEEMFKISRAQTLVALCGTIPGYWFTVFFIDIIGRFVIQLGGFFFMTAFMLGLAVPYHHWTTPGTTSGFVVMYAFTFFFANFGPNSTTFIVPAEIFPARLRSTCHGISAAAGKAGAIVGSFGFLYAAQSTDASKTDAGYPPGIGVRNSLFFLAGCNVIGFFFTFLVPESKGKSLEELSGENEDDDDVPEAPSTADHRTAPAPPA

SEQ ID NO: 11231 - protein, 534 aa, Oryza sativa (indica cultivar-group)
MGGGGGEQQQLEVLHALNVAKTQWYHFTAIVVAGMGFFTDAYDLFCISLVTKLLGRIYYRVDGSPSPGTLPPHVSACVNGVAFVGTLSGQLFFGWLGDKLGRKRVYGITLMLMVLCSLASALSFGHTPTSVMATLCFFRFWLGFGIGGDYPLSATIMSEYANKKTRGAFIAAVFAMQGFGIITGGLVAILVSASFRAAFPAPPYGEDPVASTPPQADFVWRIILMLGALPAALTYYWRTKMPETARYTALVATNAKQAAADMSKVLQVVEMRNIGNNGGSRRPFGLFSGEFVRRHGLHLVGTSATWLLLDIAFYSQNLFQKDIFSAVGWIPKAATMSALEELFRIARAQTLIALCGTVPGYWFTVTLIEVVGRFKIQAVGFFMMTLFMLTLALPYHHWTAPGKNHVGFLLLYGLTFFFANFGPNSTTFIVPAEIFPARLRATCHGISAASGKLGAIVGSFGFLYLAQSPDRSKTEHGYPPGIGVRNSLFLLAACNLLGLLFTFLVPESKGKSLEEMSGDAEAQEEAPPPLQTVL

SEQ ID NO: 11232 - protein, 555 aa, Oryza sativa (indica cultivar-group)
MADADGGSNLAVLDALDSARTQMYHMKAIVIAGMGFFTDAYDLFCISTVSKLLGRLYYQPDGLTDSKPGALSKTANNMVIGVALVGTLMGQLVFGYFGDKLGRKRVYGVTLILMAACAIGFGLSFGSSRKAVIGTLCFFRFWLGFGIGGDYPLSATIMSEYSNKKTRGAFIAAVFAMQGVGIIFAGLVSMIVSSIFLTYNKAPSYKGNHDLSRQMPAADYVWRIVLMIGAFPALATFYWRMKMPETARYTAIIDGNAKQAANDMQKVLSIEIEAEQEKLAKFNAANNYPLLSMEFARRHGLHLIGTTTTWFLLDIAFYSQNLTQKDIFPAMGLISGAAEVNALTEMFQISKASFLVALLGTFPGYWVTVALIDKMGRYMIQLIGFFMMSMFMLAMGILYDYLKTHHFLFGLLYALTFFFANFGPNSTTFVLPAELFPTRVRSTCHAISAAAGKAGAIVAAFGIQKLTYNSQVKSIKKALIILSITNMLGFFFTFLVPETMGRSLEEISGEDGNTGAGGGGAPAAANAGVGVSASDVSRDEKFPASSTEWQTSMHA

SEQ ID NO: 11233 - protein, 541 aa, Oryza sativa (japonica cultivar-group)
MARQEQQQHLQVLSALDAAKTQWYHFTAIVVAGMGFFTDAYDLFCISLVTKLLGRIYYTDLAKENPGSLPPNVAAAVNGVAFCGTLAGQLFFGWLGDKLGRKSVYGMTLLMMVICSIASGLSFSHTPTSVMATLCFFRFWLGFGIGGDYPLSATIMSEYANKKTRGAFIAAVFAMQGFGILAGGIVTLIISSAFRAGFPAPAYQDDRAGSTVRQADYVWRIILMLGAMPALLTYYWRMKMPETARYTALVAKNAKQAAADMSKVLQVEIQEEQDKLEQMVTRNSSSFGLFSRQFARRHGLHLVGTATTWFLLDIAFYSQNLFQKDIFTSINWIPKAKTMSALEEVFRIARAQTLIALCGTVPGYWFTVFLIDIVGRFAIQLLGFFMMTVFMLGLAVPYHHWTTKGNHIGFVVMYAFTFFFANFGPNSTTFIVPAEIFPARLRSTCHGISAAAGKAGAIIGSFGFLYAAQDPHKPDAGYKPGIGVRNSLFVLAGCNLLGFICTFLVPESKGKSLEEMSGEAEDDDDEVAAAGGGAAVRPQTA

SEQ ID NO: 11234 - protein, 528 aa, Oryza sativa (japonica cultivar-group)
MAGSQLNVLVKLDQAKTQWYHFMAIVIAGMGFFTDAYDLFCIALVTKLLGRLYYTDITKPNPGTLPPNVSSAVTGVALCGTLAGQLFFGWLGDKLGRKSVYGFTLILMVVCSIASGLSFGHTPKSVIATLCFFRFWLGFGIGGDYPLSATIMSEYASKKTRGAFIAAVFAMQGFGILFGAIVALVVSAGFRHAYPAPSYAQNPAASLAPQADYTWRLILMFGTIPAGLTYYWRMKMPETARYTALVARNAKQAAADMSKVLHAEIEERPEVVESQVVAGETWGLFSRQFMKRHGMHLLATTSTWFLLDIAFYSQNLFQKDIFSKVGWIPPAKTMNALEELYRISRAQALIALCGTIPGYWFTVAFIDIVGRFWIQIMGFFMMTVFMLALGVPYDHWTHPAHHTGFVVLYALTFFFANFGPNSTTFIVPAEIFPARLRSTCHGISAASGKAGAIIGAFGFLYAAQDQHNPDAGYSRGIGIRNALFVLAGTNFLGMLMTLLVPESKGLSLEEMSKDNVVDETAQEAIAQA

SEQ ID NO: 11235 - protein, 526 aa, Oryza sativa (japonica cultivar-group)
  unsure (1)..(526): unsure at all Xaa locations
MADGQLKVLTTLDHARTQWYHFMAIVIAGMGFFTDAYDLFCISLVSKLLGRIYYTDLAGDNPGSLPPNVSAAVNGVALCGTLAGQLFFGWLGDKLGRKSVYGFTLVLMVVCSVASGLSFGRTAKGVVAXLCFFRFWLGFGIGGDYPLSATIMSEYANKRTRGAFIAAVFAMQGFGILFGAIVALVVSAGFRNAYPAPSYADGRAASLVPEADYVWRIILMFGTVPAALTYYWRMKMPETARYTALIARNAKQAAADMSKVLXTEIQEDXERAEAVAAGGAGNEWGLFSRQFVRRHGVHLVATTSTWFLLDIAFYSQNLFQKDIFSKVGWIPPARTMNAVEEVFRIARAQALIALCGTIPGYWFTVAFIDVAGRFAIQLMGFAMMTVFMLGLAAPYHHWTTPGNHTGFVVMYGFTFFFANFGPNATTFIVPAEIYPARLRSTCHGISAAAGKAGAIVGAFGFLYAAQDPHKPEAGYKPGIGIRNALFVLAGTXFLGMLMTLLVPESKGMSLEEVSKENVADDEEATA

SEQ ID NO: 11236 - protein, 527 aa, Oryza sativa (japonica cultivar-group)
MAGGQLNVLSTLDQAKTQWYHFMAIVIAGMGFFTDAYDLFCISLVTKLLGRIYYTDDSKDTPGALPPNVSAAVTGVALCGTLAGQLFFGWLGDKLGRKSVYGFTLILMVVCSVASGLSFGSSAKGVVSTLCFFRFWLGFGIGGDYPLSATIMSEYANKRTRGAFIAAVFAMQGFGILFGAIVALAVSAGFRHAYPAPSYSDNHAASLVPQADYVWRIILMFGTVPAALTYYWRMKMPETARYTALIARNAKQAAADMSKVLHTQIEESADRAETVAVGGESWGLFSRQFLRRHGLHLLATTSTWFLLDIAFYSQNLFQKDIFSKVGWIPPAKTMNALEELYRIARAQALIALCGTIPGYWFTVAFIEIMGRFWIQIMGFAMMTAFMLGLAIPYHHWTTPGHHTGFIVMYGFTFFFANFGPNSTTFIVPAEIYPARLRSTCHGISAAAGKAGAIIGAFGFLYAAQDQHKPEPGYPRGIGIKNALFVLAGTNFLGTIMTLLVPESKGMSLEVISQEVADGDDEEAAYPK

SEQ ID NO: 11237 - protein, 545 aa, Oryza sativa (japonica cultivar-group)
  unsure (1)..(545): unsure at all Xaa locations
MVQDRKVLDALDTAKTQWYHFTAVVIAGMGFFTDAYDLFSISLVTKLLGRIYYFNPASKSPGSLPPNVSAAVNGVAFCGTLAGQLFFGWLGDKMGRKKVYGMTLMLMVICCLASGLSFGSSAKGVMATLCFFRFWLGFGIGGDYPLSATIMSEYANKRTRGAFIAAVFAMQGFGNLTGGIVAIIVSAAFKLRFDAPAYRDDRAGXXADYAWRIVLMFGAIPALLTYYWRMKMPETARYTALVAKNDKKAAADMARVLNVELVDEQEKAAAATAAAAEEEAARREQYGLFSREFARRHGHHLLGTTVCWFVLDIAYYSQNLFQKDIYTAVQWLPKADTMSALEEMFKISRAQTLVALCGTIPGYWFTVLFIDIVGRFAIQLGGFFLMTAFMLGLAVPYHHWTTPGNHVGFVVMYAFTFFFANFGPNSTTFIVPAEIFPARLRSTCHGISSAAGKMGAIVGSFGFLYAAQSTDPSKTDAGYPRGIGVRNSLFLLAGCNVVGFLFTFLVPESKGKSLEELSGENEMEAEPAAATNSYRQTVPDSGQSE

SEQ ID NO: 11238 - protein, 541 aa, Oryza sativa (japonica cultivar-group)
  unsure (1)..(541): unsure at all Xaa locations
MGRQDQQLQVLNALDAAKTQWYHFTAIIVAGMGFFTDAYDLFCISLVTKLLGRIYYTDPASPXPGSLPPNIAAAVNGVALCGTLSGQLFFGWLGDKLGRKSVYGMTLLLMVICSIASGLSFSHTPTSVMATLCFFRFWLGFGIGGDYPLSATIMSEYANKKTRGAFIAAVFAMQGFGILAGGVVTLAMSAGFQAAFPAPAYEVNAAASTVPQADYVWRIILMLGALPAILTYYWRMKMPETARYTALVAKDAKQASSDMAKVLQVEIEVEEEKLQDITRGRDYGLFSARFAKRHGAHLLGTAATWFLVDVAYYSQNLFQKDIFTSIHWIPKARTMSELEEVFRISRAQTLIALCGTVPGYWFTVFLIDIIGRFKIQLLGFAGMTAFMLGLAIPYHHWTMPGNQVIFVFLYGFTFFFANFGPNATTFIVPAEIFPARLRSTCHGISAASGKAGAIIGAFGFLYAAQPQDKAHVDAGYKPGIGVRNALFVLAGCNLVGFLMTWMLVPESKGKSLEEMSGEADDEEASANGGATAVNSSGVEMV

SEQ ID NO: 11239 - protein, 541 aa, Oryza sativa (japonica cultivar-group)
MGRQDQQLQVLNALDAAKTQWYHFTAIIVAGMGFFTDAYDLFCISLVTKLLGRIYYTDPASPTPGSLPPNIAAAVNGVALCGTLSGQLFFGWLGDKLGRKSVYGMTLLLMVICSIASGLSFSHTPTSVMATLCFFRFWLGFGIGGDYPLSATIMSEYANKKTRGAFIAAVFAMQGFGILAGGVVTLAMSAGFQAAFPAPAYEVNAAASTVPQADYVWRIILMLGALPAILTYYWRMKMPETARYTALVAKDAKQASSDMAKVLQVEIEVEEEKLQDITRGRDYGLFSARFAKRHGAHLLGTAATWFLVDVAYYSQNLFQKDIFTSIHWIPKARTMSELEEVFRISRAQTLIALCGTVPGYWFTVFLIDIIGRFKIQLLGFAGMTAFMLGLAIPYHHWTMPGNQVIFVFLYGFTFFFANFGPNATTFIVPAEIFPARLRSTCHGISAASGKAGAIIGAFGFLYAAQPQDKAHVDAGYKPGIGVRNALFVLAGCNLVGFLMTWMLVPESKGKSLEEMSGEADDEEASANGGATAVNSSGVEMV

SEQ ID NO: 11240 - protein, 534 aa, Oryza sativa (japonica cultivar-group)
MGGGGGEQQQLEVLHALDVAKTQWYHFTAIVVAGMGFFTDAYDLFCISLVTKLLGRIYYRVDGSPSPGTLPPHVSASVNGVAFVGTLSGQLFFGWLGDKLGRKRVYGITLMLMVLCSLASALSFGHTPTSVMATLCFFRFWLGFGIGGDYPLSATIMSEYANKKTRGAFIAAVFAMQGFGIITGGLVAILVSASFRAAFPAPPYGEDPVASTPPQADFVWRIILMLGALPAALTYYWRTKMPETARYTALVANNAKQAAADMSKVLQVVEMRNIGNNGGSRRPFGLFSGEFVRRHGLHLVGTSATWLLLDIAFYSQNLFQKDIFSAVGWIPKAATMSALEELFRIARAQTLIALCGTVPGYWFTVALIDVVGRFKIQAVGFFMMTLFMLTLALPYHHWTAPGKNHVGFLLLYGLTFFFANFGPNSTTFIVPAEIFPARLRATCHGISAASGKLGAIVGSFGFLYLAQSPDRSKTEHGYPPGIGVRNSLFLLAACNLLGLLFTFLVPESKGKSLEEMSGDAEAQEEAPPPLQTVL

SEQ ID NO: 11241 - protein, 526 aa, Oryza sativa (japonica cultivar-group)
MAGDQMHVLSALDSAKTQWYHFTAIVIAGMGFFTDAYDLFCISLVTKLIGRVYYTADGASKPGSLPPNVSAAVNGVAFVGTLTGQLFFGWLGDRVGRKSVYGMTLLLMIICSVASGLSFGDTPTSVMATLCFFRFWLGFGIGGDYPLSATIMSEYANKRTRGAFIAAVFAMQGFGILAGGAVAIGITAIFRSRFPAPPFAADPAASTPPQADYVWRLILMFGALPAALTFYWRMRMPETARYTAIVAKNAERAAADMSKVLQVKITAEQAEMASPVDKPFTSKPFGLFSGEFARRHGFHLLGTTSTWLLLDIAYYSQNLFQKDIFSAIGWIPEAKTMSALDELYHIARAQTLIALCGTVPGYWFTVALIDVVGRFKIQAAGFFVMTAFMLALAVPYDHWTAAGNQIGFVVLYALTFFFANFGPNATTFIVPAEIYPARLRATCHGISAASGKVGAIVGSFGFLYLAQSPVPAKAAAHGYPPGIGVRNSLFALAGCSLLGFLLTFLVPEPKGKSLEEMSRENEVGQP

SEQ ID NO: 11242 - protein, 555 aa, Oryza sativa (japonica cultivar-group)
MADADGGSNLAVLDALDSARTQMYHMKAIVIAGMGFFTDAYDLFCISTVSKLLGRLYYQPDGSTDSKPGALSKTANNMVIGVALVGTLMGQLVFGYFGDKLGRKRVYGVTLILMAACAIGSGLSFGSSRKAVIGTLCFFRFWLGFGIGGDYPLSATIMSEYSNKKTRGAFIAAVFAMQGVGIIFAGLVSMIVSSIFLTYNKAPSYKGNHDLSRQMPAADYVWRIVLMIGAFPALATFYWRMKMPETARYTAIIDGNAKQAANDMQKVLSIEIEAEQEKLAKFNAANNYPLLSMEFARRHGLHLIGTTTTWFLLDIAFYSQNLTQKDIFPAMGLISGAAEVNALTEMFQISKASFLVALLGTFPGYWVTVALIDKMGRYMIQLIGFFMMSMFMLAMGILYDYLKTHHFLFGLLYALTFFFANFGPNSTTFVLPAELFPTRVRSTCHAISAAAGKAGAIVAAFGIQKLTYNSQVKSIKKALIILSITNMLGFFFTFLVPETMGRSLEEISGEDGNTGAGGGGAPAAANAGVGVSASDVSRDEKFPASSTEWQTSMHA

SEQ ID NO: 11243 - protein, 393 aa, Oryza sativa (japonica cultivar-group)
FFTDAYDLFCISLVSKLLGRIYYTDIASDTPGSLPPNVSAAVNGVALCGTLAGQLFFGWLGDKLGRKSVYGFTLVLMVVCSVASGLSFGRTAKGVVATLCFFRFWLGFGIGGDYPLSATIMSEYANKRTRGAFIAAVFAMQGFGILFGAIVALVVSAGFRNAYPAPSYADGRAASLVPEADYVWRIILMFGTVPAALTYYWRMKMPETARYTALIARNAKQAAADMSKVLDTEIQEDADRAEAVAAGGAGNEWGLFSRHFVRRHGVHLVATTSTWFLLDIAFYSQNLFQKDIFSKVGWIPPARTMNAVEEVFRIARAQALIALCGTIPGYWFTVAFIDVAGRFAIQLMGFAMMTVFMLGLAAPYHHWTTPGNHTGFVVMYGFTFFFANFGPNA

SEQ ID NO: 11244 - protein, 487 aa, Oryza sativa (japonica cultivar-group)
MAGNQQLRVLHALDIARTQLYHFIAIVIAGMGFFTDAYDLFSISLVADLLGHVYYHGELPRNIHAAVTGIALCGTVPGQLVFGWLGDKMGRKRVYGITLLLNGCLLSRLRTLLHIGGDYPLSATIMSEYANKRTRGAFIAAVFAMQGFGNLAAGIIGMIVSAAFKHSSASKIDYAWRIILMFGAIPAALTYHWRMKMPETARYTALISKNAKKAAKDMSAVLNVNITPDDEVINELARQDEYGLFSFEFLHRHGLHLLGTTVCWFVLDVTFYSLNIFMKNIFTEVGLLPRLDSEYHHTLQRMITMTAVHTFISLCGALPGYFFTVAFVDRIGRVKIQLIGFTMMTVFMLCLAIPYDQWLRHKNKYGFAVMYGLTFFFANFGPNTTTFIIPAEIFPARLRSTCHGISGAVGKIGAIVGVFGFLYTEYHIRIFLFVLIGCNLVGFIFTLLLPESKGKSLEDLTGEIEEFQEEDEGSEVALSRPIHTVPL

SEQ ID NO: 11245 - protein, 390 aa, Oryza sativa (japonica cultivar-group)
  unsure (1)..(390): unsure at all Xaa locations
FFTDAYDLFSISLVTKLLGRIYYFNPASKSPGSLPPNVSAAVNGVAFCGTLAGQLFFGWLGDKMGRKKVYGMTLMLMVICCLASGLSFGSSAKGVMATLCFFRFWLGFGIGGDYPLSATIMSEYANKRTRGAFIAAVFAMQGFGNLTGGIVAIIVSAAFKSRFDAPAYRDDRTGSTVPKPTTRGASCSCSAPIPALLTYYWRMKMPETARYTALVAKNAKQAAADMTQVLNVEIVEEQNKADEVARREQFGLFSRQFLRRHGRHLLGTTVCWFVLDIAFYSSNLFQKDIYTAVQWLPKADTMSALEEMFKISRAQTLVALCGTIPGYWFTVFFIDIIGRFVIQLGGFFFMTAFMLGLAVPYHHWTTPGNHIGFVVMYAFTFFFAXXGPXA

SEQ ID NO: 11246 - protein, 582 aa, Oryza sativa (japonica cultivar-group)
  unsure (1)..(582): unsure at all Xaa locations
MAPRIRVLAALDQARTQYYHFKAIVIAGMGLFTDSYDLFCISPVMKIFGRVYYAPSGSVDGSGSGPGVTPPAVVSATVGVALLGAVAGNVVFGALGDRVGRRRVYGACLLLMVCSSVGSGLSVCRXRRCALASLCFFRFLLGVGVGGDYPLSATIMSEFANRGTRGAFIAAVFSMQGFGILVSSAVTMAVAAAFDHYTGYPAPLDTPECADLAWRIILMAGAVPAALTYYWRMSMPETARYTALVERDVVKATNDIGRVLADLDLAAVAEEEVAAAALSPPPVTTPPPPRPSYGLFSRRFVRQHGRDLFACAAAWFLLDIPYYSSTLFQSQIYRPWFPPAAKVNAFQEAFNVAKFQAVIAVASTIPGYFAAMLLIERAGRRRLQMAGFLLMAVFLFALAGPYDGYWRDHAKTAGYIVLYSLTFFSANLGPNTTTFILPAELFPARFRSTCHGLSGAAGKLGALVGSIGFLWASQQKDGAAAGHLPGIGMMYALFVLGGICLLGLALTYAFTPETMTRSLEENESSVQAQSQVGDGGSDAGNGSDGLRFHELNVLMEAATKSPVSMASSHLSMSPILPHRMSL

SEQ ID NO: 11247 - protein, 549 aa, Oryza sativa (japonica cultivar-group)
MAPIGVLTALDQARTQYYHFKAIVIAGMGLFTDSYDLFCIAPVMKIVGRVYYSDGGARPGVTPPAVVSATVGVALLGAVIGNVVFGALGDRVGRRRVYGACLLLMLRRERLLRVPDAPVRARQPLLLPFLLGVGVGGDYPLSATIMSEFANRRTRGAFIAAVFSMQGFGILASSAVTMAVAAAFDHYTGYPAPLDTPECADLAWRIILMAGAVPAALTYYWRMSMPETARYTALVERDVVKATNDIGRVLADLDLGAVAEEEVAAALSRPPPPPRPSYGLLSRRFVRQHGRDLFACAAAWFLLDIPYYSSTLFQSQIYRPLFPAPGLINAFQEAFNVAKFQAVIAVASTIPGYFVAVLLIDRVGRRCLQMAGFLLMAVFLFALAGPYDGYWRDHGAHAGYIVLYSLTFFSANLGPNTTTFILPAELFPARFRSTCHGLSGAAGKLGALVGSIGFLWASQQKDGAAAGHLPGIGMMYALFVLGGICLLGLALTYVFTPETMMRSLEENESDRAQTQVGDGGSDTEAAKSPASMASSHLSMSPILPARVSV

SEQ ID NO: 11248 - protein, 118 aa, Oryza sativa (japonica cultivar-group)
MEVAVASSELDASRGRLDELTVVRPLLFLQRLLDLDDDNDNDDVVGAIIGSFGFLYLAQSPDPAKAAAHGYLPGIGVRNSLFTLAGCSLLGFLLTFLVPEPKGKSLEEMSRENEVGQP

SEQ ID NO: 11249 - protein, 535 aa, Solanum tuberosum
MAKNQLQVLNALDVAKTQLYHFTAIVIAGMGFFTDAYDLFCISLVTKLLGRIYYHHEGAPKPGILPPGISAAVNGVAFVGTLSGQLFFGWLGDKMGRKRVYGMTLMIMVICSIASGLSFGKTPSGVIATLCFFRFWLGFGIGGDYPLSATIMSEYANKKTRGAFIAAVFAMQGFGILAGGIVALVVSGAFKNAYPAPIYSVNNEGSTPQEADIVWRIILMFGAIPALLTYYWRMKMPETARYTALVAKNATKAASDMSKVLNVEIEAEDDKIEKIVAIQGNNFGLFSKEFLHRHGLHLLGTTSTWFLLDIAFYSQNLFQKDIFSKIGWIPHPETMNALDEVFKIAKAQTLIALCSTVPGYWFTVAFIDRMGRFAIQLMGFFFMTVFMFALAIPYNHWTKKENRFGFVVMYSLTFFFANFGPNATTFVVPAEIFPARLRSTCHGISAAAGKAGAIVGAFGFLYAAQSTDPSKVDAGYPTGIGVKNALIVLGCVNFLGMLFTLLVPESKGKSLEEMSKENEGEEEMTKVENAQTIPV

SEQ ID NO: 11250 - protein, 521 aa, Glomus versiforme
MSTSDRVTIDVDKRRAALKEIDDAKFGWQHIRACLVAGTGFFMDAYDLFAVNFASTMIGYVYYGGKTPANIDLGLKVTGSIGTLLGQLFFGYLADRLGRKRMYGVELMIIIVATVASALSGESRAVTVVGTIMFWRVIMGVGIGGDYPLSAIITSEFATKKRRGAMMASVFAMQGFGILGSAIVALAVLAGFRNEIIKDVSAVDYCWRIVLGCGAVPGLAALYFRLTIPETPRYTMDVEHDVNKATSDITSYLQKNDVNEDDTNTGNHVGVPKASWSDFVSYFGKWSNGKVLLGTSMSWFALDIAFYGIGLNNGIILSAIGYSETHEADLNLRAYNSLKNMAVGNIIITIMGTAPGYWVTAALVDSWGRKPIQLMGFGVLTALFIVMGAAFNPLKEHSIPAFIILFTLLQFFQNFGPNTTTFIVPGEVFPTRYRSTGHGISAASGKLGAIVAQVGFSKLKDIGGSNAFVGPLLLIFSAWMFIGGLFSILIPETKGLSLEELANEEHTYDVEERKERIKADA

SEQ ID NO: 11251 - protein, 525 aa, Hordeum vulgare
MATEQLNVLKALDVAKTQLYHFKAVVIAGMGFFTDAYDLFCIALVTKLLGRIYYTDPALNEPGHLPANVSAAVNGVALCGTLAGQLFFGWLGDKLGRKSVYGFTLILMVLCSIASGLSFGHEAKGVMGTLCFFRFWLGFGVGGDNPLSATIMSEYANKKTRGTFIAAVFAMQGFGILFGTIVTIIVSSAFRHAFPAPPFYIDAAASIGPEADYVWRIIVMFGTIPAALTYYWRMKMPETARYTALIAGNTKQATSDMSKVLNKEISEEAAQGERATGDTWGLFSRQFMKRHGVHLLATTSTWFLLDVAFYSQNLFQKDIFTKIGWIPPAKTMNALEELYRIARAQALIALCGTVPGYWFTVAFIDIIGRFWIQLMGFTMMTIFMLAIAIPYDYLVKPGHHTGFVVLYGLTFFFANFGPNSTTFIVPAEIFPARLRSTCHGISAATGKAGAIIGAFGFLYASQDQRKPETGYSRGIGMRNALFVLAGTNFLGLLFSLLVPESKGKSLEELSKENVGDDDAIAPTGV

SEQ ID NO: 11252 - protein, 333 aa, Oryza rufipogon
LFCISLVTKLLGRIYYFNPASKSPGSLPPNVSAAVNGVAFCGTLAGQLFFGWLGDKMGRKKVYGMTLMLMVICCLASGLSFGSSAKGVMATLCFFRFWLGFGIGGDYPLSATIMSEYANKRTRGAFIAAVFAMQGFGNLTGGIVAIIVSAAFKSRFDAPAYRDDRAGSTVPQADYAWRIVLMFGAIPALLTYYWRMKMPETARYTALVAKNDKKAAADMARVLNVELVDEQEKAAAATAAAAEEEAARREQYGLFSREFARRHGHHLLGTTVCWFVLDIAYYSQNLFQKDIFSAIGWIPEAKTMSALDELYHIARAQTLIALCGTVPGYWFTV

SEQ ID NO: 11253 - protein, 566 aa, Oryza sativa
  unsure (1)..(566): unsure at all Xaa locations
MAGVRTNTGGLVFFPELCEQSRSAMARQEQQQHLQVLSALDAAKTQWYHFTAIVVAGMGFFTDAYDLFCISLVTKLLGRIYYTDLAKENPGSLPPNVAAAVNGVAFCGTLAGQLFFGWLGDKLGRKSVYGMTLLMMVICSIASGLSFSHTPTSVMATLCFFRFWLGFGIGGDYPLSATIMSEYANKKTRGAFIAAVFAMQGFGILAGGIVTLIISSAFRAGFPAPAYQDDRAGSTVRQADYVWRIILMLGAMPALLTYYWRMKMPETARYTALVAKNAKQAAADMSKVLQVEIQEEQDKLEQMVTRNSSSFGLFSRQFARRHGLHLVGTATTWFLLDIAFYSQNLFQKDIFTSINWIPKAKTMSALEEVFRIARAQTLIALCGTVPGYWFTVFLIDIVGRFAIQLLGFFMMTVFMLGLAVPYHHWTTKGNHIGFVVMYAFTFFFANFGPNSTTFIVPAEIFPARLRSTCHGISAAAGKAGAIIGSFGFLYAAQDPHKPDAGYKPGIGVRNSLFVLAGCNLLGFICTFLVPESKGKSLEEMSGEAEDDDDEVAAXXAVAPPFSWISL

SEQ ID NO: 11254 - protein, 538 aa, Oryza sativa; identical to SEQ ID NO: 11230

SEQ ID NO: 11255 - protein, 528 aa, Oryza sativa
MAGGQLNVLSKLDQAKTQWYHFMAIVIAGMGFFTDAYDLFCIALVTKLLGRLYYTDITKPNPGTLPPNVSSAVTGVALCGTLAGQLFFGWLGDKLGRKSVYGFTLILMVVCSIASGLSFGHTPKSVIATLCFFRFWLGFGIGGDYPLSATIMSEYASKKTRGAFIAAVFAMQGFGILFGAIVALVVSAGFRHAYPAPSYAQNPAASLAPQADYTWRLILMFGTIPAGLTYYWRMKMPETARYTALVARNAKQAAADMSKVLHAEIEERPEVVESQVVAGETWGLFSRQFMKRHGMHLLATTSTWFLLDIAFYSQNLFQKDIFSKVGWIPPAKTMNALEELYRISRAQALIALCGTIPGYWFTVAFIDIVGRFWIQIMGFFMMTVFMLALGVPYDHWTHPAHHTGFVVLYALTFFFANFGPNSTTFIVPAEIFPARLRSTCHGISAASGKAGAIIGAFGFLYAAQDQHNPDAGYSRGIGIRNALFVLAGTNFLGMLMTLLVPESKGLSLEEMSKDNVVDETAQEAIAQA

SEQ ID NO: 11256 - protein, 545 aa, Oryza sativa
  unsure (1)..(545): unsure at all Xaa locations
MAGDQMHVLSALDSAKTQWYHFTAIVIAGMGFFTDAYDLFCISLVTKLIGRVYYTADGASKPGSLPPNVSAAVNGVAFVGTLTGQLFFGWLGDRVGRKSVYGMTLLLMIICSVASGLSFGDTPTSVMATLCFFRFWLGFGIGGDYPLSATIMSEYANKRTRGAFIAAVFAMQGFGILAGGAVAIGITAIFRSRFPAPPFAADPAASTPPQADYVWRLILMFGALPAALTFYWRMRMPETARYTAIVAKNAERAAADMSKVLQVKITAEQAEMASPVDKPSFGLFSGEFARRHGFHLLGTTSTWLLLDIAYYSQNLFQKDIFSAIGWIPEAKTMSALDELYHIARAQTLIALCGTVPGYWFTVALIDVVGRFKIQAAGFFVMTAFMLALAVPYDHWTAAGNQIGFVVLYALTFFFANFGPNATTFIVPAEIYPARLRATCHGISAASGKVGAIVGSFGFLYLAQSPVPAKAAAHGYPPGIGVRNSLFALAGCSLLGFLLTFLVPEPKGKSLEEMSRENEVGQPXSTRXFHRRPSACKIHAYAWLVH

SEQ ID NO: 11257 - protein, 424 aa, Oryza sativa
  unsure (1)..(424): unsure at all Xaa locations
MAGDQMHVLSVLDSAKTQWYHFTVIDIAGMGFFTDAYDLFCISLVSKLLGRVYYTAVAAATPGSLPPNVSAAVNGVALGGTLAGQLFFGWLGDRLGRKSVYGFTLLLMVVCSVASGLSFGRTPTGVVATLCFFRFWLGFGIGGDYPLSATIMSEYANKRTRGAFIAAVFAMQGFGILFGAIVALVVSAGFRNAYPAPSYADGRAASLVPEADYVWRIILMFGTVPAALTYYWRMKMPETARYTALIARNAKQAAADMSKVLDTEIQEDADRAEAVAAGGAGNEWGLFSRHFVRRHGVHLVATTSTWFLLDIAFYSQNLFQKDIFSKVGWIPPARTMNAVEEVFRIARAQALIALCGTIPGYWFTVAFIDVAGRFAIQLMGFAMMTVFMLGLAAPYHHWTTPGNHTGFVVMYGFTFFFANFGPNX

SEQ ID NO: 11258 - protein, 424 aa, Oryza sativa
  unsure (1)..(424): unsure at all Xaa locations
MAGGQLNVLSTLDQAKTQWYHFMAIVIAGMGFFTDAYDLFCISLVTKLLGRIYYTDDSKDTPGALPPNVSAAVTGVALCGTLAGQLFFGWLGDKLGRKSVYGFTLILMVVCSVASGLSFGSSAKGVVSTLCFFRFWLGFGIGGDYPLSATIMSEYANKRTRXAFIAAVFAMQGFGILFGAIVALAVSAGFRHAYPAPSYSDNHAASLVPQADYVWRIILMFGTVPAALTYYWRMKMPETARYTALIARNAKQAAADMSKVLHTQIEESADRAETVAVGGXXSWGLFSRQFLRRHGLHLLATTSTWFLLDIAFYGQXNLFQKDIFSKVGWIPPAKTMNALEELYRIARAQALIALCGTIPGYWFTVAFIGIMGRFWIQIMGFAIMTAFMLGLAISYHHXTTPGHHTGFIVMYGFTFFFANLGPNX

SEQ ID NO: 11259 - protein, 391 aa, Oryza sativa
  unsure (1)..(391): unsure at all Xaa locations
FFTDAYDLFCIALVTKLLGRLYYTDITKPNPGTLPPNVSSAVTGVALCGTLAGQLFFGWLGDKLGRKSVYGFTLILMVVCSIASGLSFGHTPKSVIATLCFFRFWLGFGIGGDYPLSATIMSEYASKKTRGAFIAAVFAMQGFGILFGAIVALVVSTGFRHTYPAPSYAQNPAASLAPQADYTWRLILMFGTIPAGLTYYWRMKMPETARYTALVARNAKQAAANMSKVLHAEIEERPEVVESQVVAGETWGLFSRQFMKRHGMHLLATTSTWFLLDIAFCNQNLFQKDIFSKIGWIPPAKTMNALEELYRISRAQALIALCGTIPGYWFTVAFIDIVGRFXIQIMGFFMMTVFMLALGVPYDHWTHPAHHTGFVVLYALTFFFANLGPNX

SEQ ID NO: 11260 - protein, 391 aa, Oryza sativa
  unsure (1)..(391): unsure at all Xaa locations
FFTDAYDLFCIALVTKLLGRLYYTDITKPNPGTLPPNVSSAVTGVALCGTLAGQLFFGWLGDKLGRKSVYGFTLILMVVCSIASGLSFGSTPKSVITTLCFFRFWLGFGIGGDYPLSATIMSEYASKKTRGAFIAAVFAMQGFEILFGAIVALVVSAGFRHAYPAPSYTQNPAASLAPQADYTWRLILMFGTIPAGLTYYWRMKMPETARYTALVARNAKQAAADMSRVLHAEIEERPEVVESQVVAGETWDLFSRQFMKRHGMHLLATTSTWFLLDIAFYSQNLFQKDIFSKVGWIPPAKTMNALEELYRISRAQALIALCGTIPGYWFTVAFIDIVGRFXIQIMGFFMMTVFMLALGVPYDHWTHPAHHTGFVVLYALTFFFAXLGPNX

SEQ ID NO: 11261 - protein, 393 aa, Oryza sativa
  unsure (1)..(393): unsure at all Xaa locations
FFTDAYDLFCIALVTKLLGRLYYTDITKPNPGTLPPNVSSAVTGVALCGTLAGQLFFGWLGDKLGRKSVYGFTLILMVVCSIASGLSFGHTPKSVIATLCFFRFWLGFGIGGDYPLSATIMSEYASKKTRGAFIAAVFAMQGFGILFGAIIALVVSAGFRHAYPAPSYAQNPAASLAPQADYTWRLILMFGTIPAGLTYYWXRMKMPEXTARYTALVARNAKQXAADMSKVLHAEIEERPEVVESQVVAGETWGLFSRQFIKRHGMHLLAITSTWFLLDIAFYSQNLFQKNIFSKVGWIPPAKTMNALEELYRISRAQALIALCGTIPGYWFTVAFIDIVGRFXIQIMGFFMMTVFMLALGVPYDHWTHPAHHTGFVVLYALTFFFANFGPNX

SEQ ID NO: 11262 - protein, 391 aa, Oryza sativa
  unsure (1)..(391): unsure at all Xaa locations
FFTDAYDLFCIALVTKLLGRLYYTDITKPNPGTLPPNVSSAVTGVALCGTLAGQLFFGWLGDKLGRKSVYGFTLILMVVCSIASGLSFGHTPKSVIVTLCFFRFWLGFGIGGDYPLSATIMSEYASKKTRGAFIAAVFAMXGFGILFGAIVALVVSAGFRHAYPAPSYAXNSAASLAPQADYTWWLILMFGTIPAGLTYYWRMKMPEMARYTALVARNAKQAAADMSKVLHAEIEERPEVVESQVVAGETWGLFSRQFMKRHGMHLLATTSTWFLLDIAFYSXNLFQKDIFSKVGWIPPAKTMNALEELYRISRAQALIALCGTIPGYWFTVAFIDIVGRFXIQIMGFFMMTVFMLALGVPYDHWTHPAHHTGFVVLYALTFFFANFGPNX

SEQ ID NO: 11263 - protein, 395 aa, Oryza sativa
  unsure (1)..(395): unsure at all Xaa locations
FFTDAYDLFCIALVTKLLGRLYYTDITKPNPGTLPPNVSSAVTGVALCGTLAGQLFFGWLGDKLGRKSVYGFTLILMVVCSIASGLSFGHTPKSVIATLCFFRFXLGFGIGGDYPLSATIMSKYASKKTRRAFIAAVFAMQGFGILFGAIVALVVSADFRHAYPAPSYNPSPPASLAPQAXDYTWRAXILQCSGTIPXAGLTYYWRIKMPETARYTTLVARNAKQAAADMSKVLHAEIEERPEVVESQVIAGETWGLFSRQLMKRHGMHLLATTSTWFLLDIAFYSQNLFQKNIFSKVGWIPPAKTMNALEELYRISRAQALIALCGTIPGYWFTVAFIDIVGRFWIQIVGFFMMTVFMLALGVPYDHXTHPAHHTGFVVLYALTFFFANFGPNX

SEQ ID NO: 11264 - protein, 390 aa, Oryza sativa
  unsure (1)..(390): unsure at all Xaa locations
FFTDAYDLFSISLVTKLLGRIYYFNPASKSPGSLPPNVSAAVNGVAFCGTLAGQLFFGWLGDKMGRKKVYGMTLMLMVICCLASGLSFGSSAKGVMATLCFFRFWLGFGIGGDYPLSATIMSEYANKRTRGAFIAAVFAMQGFGNLTGGIVAIIVSAAFKSRFDAPAYRDDRTGSTVPKPTTRGASCSCSAPIPALLTYYWRMKMPETARYTALVAKNAKQAAADMTQVLNVEIVEEQNKADEVARREQFGLFSRQFLRRHGRHLLGTTVCWFVLDIAFYSSNLFQKDIYTAVQWLPKADTMSALEEMFKISRAQTLVALCGTIPGYWFTVFFIDIIGRFVIQLGGFFFMTAFMLGLAVPYHHWTTPGNHIGFVVMYAFTFFFXXXXXXX

SEQ ID NO: 11265 - protein, 430 aa, Oryza sativa
  unsure (1)..(430): unsure at all Xaa locations
MADADGGSNLAVLDALDSARTQMYHMKAIVIAGMGFFTDAYDLFCISTVSKLLGRLYYQPDGSTDSKPGALSKTANNMVIGVALVGTLMGQLVFGYFGDKLGRKRVYGVTLILMAACAIGSGLSFGSSRKAVIGTLCFFRFWLGFGIGGDYPLSATIMSEYSNKKTRGAFIAAVFAMQGVGIIFAGLVSMIVSSIFLTYNKAPSYKGNHDLSRQMPXAADYVWRIVLMIGAFPAFGAFYWRKKMPEXTARYTAIIDGNAKQXAANDXMQKVLSIEIEAEQEKLAKFNAANNYPLLSMEFARRHGLHLIGTTTTWFLLDIAFYSQNLTQKDILPAMGLISGAAEVNALTEMFQISKASFLVALLGTFPGYWVTVALIDKMGRYMIQLIGFFMMSMFMLAMGILYDYLKTHHFLFGLLYALTFFFANLGPNX

SEQ ID NO: 11266 - protein, 506 aa, Oryza sativa
MGFFTDAYDLFCISLVTKLLGRIYYRVDGSPSPGTLPPHVSASVNGVAFVGTLSGQLFFGWLGDKLGRKRVYGITLMLMVLCSLASALSFGHTPTSVMATLCFFRFWLGFGIGGDYPLSATIMSEYANKKTRGAFIAAVFAMQGFGIITGGLVAILVSASFRAAFPAPPYGEDPVASTPPQADFVWRIILMLGALPAALTYYWRTKMPETARYTALVANNAKQAAADMSKVLQVVEMRNIGNNGGSRRAVRAVLRRVCPAARAAPGGHVGDVVAAGHCVLQPEPVPEGHIQRGGVDPQGGDDERAGGAVPHRAGADADRAVRDGARLLVHRHAHRSGGPFQDPGRWLLHDDPLHAHPRPAVPPLDGAGEEPRRLPAALRPHLLLRQLRPQLHHLHRAGGDFPGAAAGHVPRHLGGVGEAGRHRRILRVPVPGAEPRPEQDGARVPSGHRRPQLALPARRLQPAGPALHLPRAGVQGEVAGGDVRRRRGPGGGAAAPANCTVALSPS

SEQ ID NO: 11267 - protein, 323 aa, Oryza sativa
LFCISLVTKLLGRIYYRVDGSPSPGTLPPHVSASVNGVAFVGTLSGQLFFGWLGDKLGRKRVYGITLMLMVLCSLASALSFGHTPTSVMATLCFFRFWLGFGIGGDYPLSATIMSEYANKKTRGAFIAAVFAMQGFGIITGGLVAILVSASFRAAFPAPPYGEDPVASTPPQADFVWRIILMLGALPAALTYYWRTKMPETARYTALVANNAKQAAADMSKVLQVVEMRNIGNNGGSRRAVRAVLRRVCPAARAAPGGHVGDVVAAGHCVLQPEPVPEGHIQRGGVDPQGGDDERAGGAVPHRAGADADRAVRDGARLLVHGG

SEQ ID NO: 11268 - protein, 386 aa, Secale cereale
FFTDAYDLFCISLVTKLLGRIYYTDLSKPDPGTLPPGVAAAVNGVAFCGTLTGQLFFGWLGDKMGRKSVYGMTWCSWSLLHRLRPLLRAHPQERHGHPLFFRFWLGFGIGGDYPLSATIMSEYANKKTRGAFIAAVFAMQGFGILAGGIVTLIISSAFRAGFHEPSYQDDRVASTGTEADFVWRIILMIGALPALLTYYWRMKMPETARYTALVAKNAKLAAADMSKVLQVELEDETEKMDEMVSRGANDFGLFSPQFARRHGLHQVGTATTWFLLDIAFYSHNLFQKDIFTSINWIPKARTMSALDEVFRISRAQTLIALCGTVPGIWFTVFLIDVVGRFAIQLMGFFMMTVFMLGLAVPYHHWTQPGNQIGFVMYAFTFFFANF

SEQ ID NO: 11269 - protein, 539 aa, Triticum aestivum
  unsure (1)..(539): unsure at all Xaa locations
MARSEQQGLQVLSALDAAKTQWYHFTAIVVAGMGFFTDAYDLFCISLVTKLLGRIYYTGLRPPAPGTLPPGVAAAXNGVAFCGTLAGQLFFGWLGDKMGRKSVYGMTLILMVICSIGSGLSFAHTPGSVMATLCFFRFWLGFGIGGDYPLSATIMSEYANKKTRGGFIAAVFAMQGFGILTGGVVTLIVSAAFRAAFPTQAYQDAPLASTPAQADFVWRFILMFGAVPALMTYYWRMKMPETARYTALVAKNAKQAAADMSKVLQVDIGAEEEAKANDGGAGAADDRNSFGLFSGEFLRRHGLHLLGTATCWFLLDIAFYSQNLFQKDIFTAINWIPKAKTMSALEEVHRIARAQTLIALCGTVPGYWFTVALIDRIGRFWIQLGGFFFMAVFMLGLAFPYHHWTTPGNHIGFVVLYGLTFFFANFGPNSTTFIVPAEIFPARLRSTCHGISAAAGKLGAIVGSFGFLYLAQNQDPAKVDHGYKAGXIGVRNSLFILAACNFLGMGFTFCAPESNGLSLEELSRENEEEAPXXARTVPV

SEQ ID NO: 11270 - protein, 525 aa, Triticum aestivum; identical to SEQ ID NO: 11184

SEQ ID NO: 11271 - protein, 525 aa, Triticum aestivum; identical to SEQ ID NO: 11185

SEQ ID NO: 11272 - protein, 396 aa, Triticum aestivum
FFTDAYDLFCISLVTKLLGRIYYYREGADAPGSLPPNLAAAVNGVAFCGTLSGQLFFGWLGDRMGRKRVYGMTLMCMVLCSIASGLSFGSTPGSVMATLCFFRFWLGFGIGGDYPLSATIMSEYANKKTRGGFIAAVFAMQGFGILTGGVVTLIVSAAFRAAFPTQAYQDAPLASTPAQADFVWRFILMFGAVPALMTYYWRMKMPETARYTALVAKNAKQAAADMSKVLQVDIGAEEEDPKANDGVGAADDRNSFGLFSGEFLRRHGLHLLGTATCWFLLDIAFYSQNLFQKDIFTAINWIPKAKTMSALEEVHRIARAQTLIALCGTVPGYWFTVALIDRIGRFWIQLGGFFFMAVFMLGLAFPYHHWTTPGNHIGFVVLYALTFFFANFGPNA

SEQ ID NO: 11273 - protein, 396 aa, Triticum aestivum; identical to SEQ ID NO: 11272

SEQ ID NO: 11274 - protein, 335 aa, Triticum aestivum
MAHLAAALISAAFCGTFTRRLVCGLALMTYYWRMKMPETARYTALVAKNAKQAAADMSKVLQVDIGAEEEDPKANDGGAGAADDRNSFGLFSGEFLRRHGLHLLGTATCWFLLDIAFYSQNLFQKDIFTAINWIPKAKTMSALEEVHRIARAQTLIALCGTVPGYWFTVALIDRIGRFWIQLGGFFFMAVFMLGLAFPYHHWTTPGNHIGFVVLYGLTFFFANFGPNSTTFIVPAEIFPARLRSTCHGISAAAGKLGAIVGSFGFLYLAQNQDPAKVDHGYKAGIGVRNSLFILAACNFLGMGFTFCAPESNGLSLEELSRENEEEAPDARTVPV

SEQ ID NO: 11275 - protein, 370 aa, Triticum aestivum; identical to SEQ ID NO: 11187

SEQ ID NO: 11276 - protein, 370 aa, Triticum aestivum; identical to SEQ ID NO: 11188

SEQ ID NO: 11277 - protein, 121 aa, Triticum aestivum
RHGRHLLGTTVCWFVLDIAFYSQNLFQKDIYTAVEWLPRADTMNALQEMFKISRAQTLVALCGTIPGYWFTVFLIDVVGRFAIQLGGFFFMTAFMLGLAVPYHHWTTPGNHVGFVVMYAFT

SEQ ID NO: 11278 - protein, 106 aa, Triticum aestivum
  unsure (1)..(106): unsure at all Xaa locations
MAREQLEVLTALDAAKTQWYHFTAIVIAGMGFFTDAYDLFCISLVTKLLGRIYYYREGADAPGSLPPNVAAAVNGVAFCGTLSGQLFFGWLGDRMGRKRVYGMTLX

SEQ ID NO: 11279 - protein, 50 aa, Triticum aestivum; identical to SEQ ID NO: 11190

SEQ ID NO: 11280 - protein, 548 aa, Zea mays
  unsure (1)..(548): unsure at all Xaa locations
PPPPDETGXGGAAMAAGDLEVLTALDTAKTQWYHFTAIVVAGMGFFTDAYDLFCISLVTKLLGRIYYTVEGSATPGTLPPHVSASVNGVAFVGTLSGQLFFGWLGDKLGRKKVYGMTLMLMVLCSVASGLSFGHTPASVMATLCFFRFWLGFGIGGDYPLSATIMSEYANKKTRGAFIAAVFAMQGFGIMAGGLVAIVVSASFKARFPAPAYAVDPAGSTPPQADFVWRIILMLGAMPAALTYYWRTKMPETARYTALVAKNAKQAAADMSKVLQVEISAGAAEEDGRRRXFGLFSGEFLRRHGLHLLGTSSTWFLLDIAFYSQNLFQKDIFSAVGWIPKAATMNALEELFSIARAQSLIALCGTVPGYWFTVALIDVLGRFAIQVTGFLMMTVFMLGLAVPYEHWTTPGHHIGFIVMYGLTFFFANFGPNATTFIVPAEIFPARLRSTCHGISAASGKLGAIIGSFGFLYLAQNRDPAKTDHGYPAGIGVRNSLFLLAGCNLLGLAFTFLVPESKGKSLEEMSGENXXRRPPPPPRRTTTTAQCPCK

SEQ ID NO: 11281 - protein, 537 aa, Zea mays
  unsure (1)..(537): unsure at all Xaa locations
MAGGQLNVLTTLDQAKTQWYHFMAIVIAGMGFFTDAYDLFCIALVTKLLGRIYYSDPTSKDPGSLPPNVSAAVTGVALCGTLAGQLFFGWLGDKLGRKSVYGFTLILMVLCSVASGLSFGHTPKGVIATLCFFRFWLGFGIGGDYPLSATIMSEYANKKTRGAFIAAVFAMQGFGILFGTIVALAVSAAFRNAFPAPPYFVDAQASLVPEADYVWRVILMFGTVPAALTYYWRMKMPETARYTALIARNTKQATADMAKVLKKEIEKEDEQVERQVVGADTWGLFSAQFLRRHGLHLLATSSTWFLLDIAFYSQNLFQKDIFTKVGWIPPARTMNAIEEVYRISRAQALIALCGTIPGYWFTVGLIDIVGRFWIQIMGFFMMTVFMLALGVPYEHWTKASNHTGFVVLYGLTFFFANFGPNSTTFIVPAEIFPARLRSTCHGISAAAGKAGAIIGAFGFLYAAQDPKKPDHGYSPGIGIRNTLFVLAGTNFLGMLMSVFVPESKGMSLEEISKENVDDEAEAEVXRDRLHLCVQMHM

SEQ ID NO: 11282 - protein, 538 aa, Zea mays
  unsure (1)..(538): unsure at all Xaa locations
MAGXSQLNVLTTLDQAKTQWYHFMAIVIAGMGFFTDAYDLFCIALVTKLLGRIYYSDPTSKDPGSLPPNVSAAVTGVALCGTLAGQLFFGWLGDKLGRKSVYGFTLILMVLCSVASGLSFGHTPKGVIATLCFFRFWLGFGIGGDYPLSATIMSEYANKKTRGAFIAAVFAMQGFGILFGTIVALAVSAAFRNAFPAPPYFVDAQASLVPEADYVWRVILMFGTVPAALTYYWRMKMPETARYTALIARNTKQATADMAKVLKKEIEKEDEQVERQVVGADTWGLFSAQFLRRHGLHLLATSSTWFLLDIAFYSQNLFQKDIFTKVGWIPPARTMNAIEEVYRISRAQALIALCGTIPGYWFTVGLIDIVGRFWIQIMGFFMMTVFMLALGVPYEHWTKASNHTGFVVLYGLTFFFANFGPNSTTFIVPAEIFPARLRSTCHGISAAAGKAGAIIGAFGFLYAAQDPKKPDHGYSPGIGIRNTLFVLAGTNFLGMLMSVFVPESKGMSLEEISKENVDDEAEAEVXRDRLHLCVQMHM

SEQ ID NO: 11283 - protein, 550 aa, Zea mays
  unsure (1)..(550): unsure at all Xaa locations
LTSAMARGGDGLQVLSALDAAXKTQWYHFTAIIVAGMGFFTDAYDLFCISLVTKLLGRIYYTDTSKDSPXGSLPPNVAAAVNGVAFCGTLAGQLFFGWLGDKLGRKSVYGMTLMVMVICSVASGLSFGHTPTGXVMATLCFFRFWLGFGIGGDYPLSATIMSEYANKRTRGAFIAAVFAMQGFGILAGGIVTLVISAAFRAAYPAPAYRDDHFTSTVPQADFVWRVIXLMLGXAAPALLTYYWRMKMPETARYTALVAKNAKQAAADMSKVLQTEIVDEQEKLXXAAEGANSFGLFSREFARRHGLHLVGTATTWFLLDIAFYSQNLFQKDIFTSINWIPKANTMSALEEVYRISRAQTLIALCGTVPGYWFTVALIDVVGRFAIQLLGFFMMTVFMLGLAIPYHHWTTPGNHIGFVVMYAFTFFFANFGXPNSTTFIVPAEIFPARLRSTCHGISAASGKAGAIIGAFGFLYAAQNQDKSKTDAGYPAGIGVRNSLFVLAASNMLGFVLTFLVPESKGKSLEEMSGEAEDSEEEPVGARAVRPSETQMV

SEQ ID NO: 11284 - protein, 549 aa, Zea mays
  unsure (1)..(549): unsure at all Xaa locations
MARGXXRRACRSLSALDAAKTQWYHFTAIIVAGMGFFTDAYDLFCISLVTKLLGRIYYTDTSKDSPGSLPPNVAAAVNGXVAFCGTLAGQLFFGWLGDKLGRKSVYGMTLMVMVICSVASGLSFGHTPTGVMATLCFFRFWLGFGIGGDYPXLSATIMSEYANKRTRGXAFIAAVFAMQGLXGILAXGGIVTLVISAAFRAAYPAPAYRDDHFTSTVPXQADIVWRVIVMLGAAPALLTYYWRMKMPXETARYTALVAKNAKQAAADMSKVLHTEIVDEQEKLXXAAEGANSFGLFSREFARRHGLHLVGTATTWFLLDIAFYSQNLFQKDIFTSINWIPKANTMSALEEVYRISRAQTLIALCGTVPGYWFTVALIDVVGRFAIQLLGFFMMTVFMLGLAIPYHHWTTPGNHIGFVVMYAFTFFFANFGPNSTTFIVPAEIFPARLRSTCHGISAASGKAGAIIGAFGFLYAAQNQDRSKTDAGYPAGIGVRNSLFVLAASNMLGFVLTFLVPESKGKSLEEMSGEAEDSEEEPVGARAVRPSETQMV

SEQ ID NO: 11285 - protein, 552 aa, Zea mays
  unsure (1)..(552): unsure at all Xaa locations
MARARGRXLQVLSALDAAKTQWYHFTAIIVAGMGFFTDAYDLFCISLVTKLLGRIYYTDTSKDNPGSLPPNVXAAAVNGVAFCGTLAGQLFFGWLGDKLGRKSVYGMTLMLMVICSVASGXLSFGHTPTGXVMATLCFFRFWLGFXASGGDYPLSATIMSEYANKKTRGAFIAAVFAMQGFGILAXGGIVTLVISARXFRAGYPAPAXYRDDHFNSTVPQADYVWRIILILGARXPAMLTYYWRMKMPETARYTALVAKNAKQAAADMSRVLQTEIVDEQEKLDEMVTAESNTFGLFSREFARRHGLHLVGTSTTWFLLDIAFYSQNLFQKDIFTSINWXIPKANTMSALEEVFRISRAQTLIALCGTVPGYWFTVALIDVVGRFAIQLLGFFMMTVFMLGLAIPYHHWTTPGNHIGFVVMYAFTFFFANFGPNSTTFIVPAEIFPARLRSTCHGISAASGKAGAIIGAFGFLYAAQNQDKSKADAGYPAGIGVRNSLFVLAASNLLGFILTFLVPESKGKSLEEMSGEADDAEDXXAVGTRAVRPSGTQMV

SEQ ID NO: 11286 - protein, 577 aa, Zea mays
  unsure (1)..(577): unsure at all Xaa locations
MPSEYLLVSAEPSASMTAKEVKFSEAMSSMPRRWRPRVRGRVGGRVGGAAMAAGDLEVLTALDTAKTQWYHFTAIVVAGMGFFTDAYDLFCISLVTKLLGRIYYTVEGSATPGTLPPHVSASVNGVAFVGTLSGQLFFGWLGDKLGRKKVYGMTLMLMVLCSVASGLSFGHTPASVMATLCFFRFWLGFGIGGDYPLSATIMSEYANKKTRGAFIAAVFAMQGFGIMAGGLVAIVVSAWFKASFPAPAYAVDPAASTPPQADFVWRIILMLGAMPAALTYYWRTKMPETVEISAGAAEEGAAAATATAXLSLRXASASASFGLFSGEFLRRHGLHLLGTSSTWFLLDIAFYSQNLFQKDIFSAVGWIPKAATMNALEELFSIARAQSLIALCGTVPGYWFTVALVDVLGRFAIQVTGFLMMTVFMLGLAVPYEHWTTPGHHIGFIVMYGLTFFFANFGPNATTFIVPAEIFPARLRSTCHGISAASGKLGAIIGSFGFLYLAQNRDPAKTDHGYPAGIGVRNSLFLLAGCNLLGLAFTFLVPESKGKSLEEMSGDDEAAALEDPSLRTRACDVIALL

SEQ ID NO: 11287 - protein, 531 aa, Zea mays
  unsure (1)..(531): unsure at all Xaa locations
MAMAGGQNMQVLSALDGAKTQRYHFTAIVVAGMGFFTDAYDLFCISLVTKLIGRIYYTVDGSPRPGSLPPHVSAAVNGVAFVGTLSGQLFFGWLGDRVGRKSVYGMTLLTMVVCSVASGLSFGRSPACVMATLCFFRFWLGFGIGGDYPLSATIMSEYANKRTRGAFVAAVFAMQGFGILAGGAVAIGVTALFRSRFPAPPYDVDPAASTPAEADLVWRIILMFGAVPAALTFYSRMKMPETARYTALVARNAERAAADMSRVLQVDITGTEARLRGEQEEATTGPPFGLFSREFAHRHGLHLVGTASTWLLLDIAYYSQNLFQKDIFSAVGWIPAAETISALDELFHIARAQTLIALCGTVPGYWFTVAFIDIVGRFAIQAVGFLMMTAFMLGLAVPYRQWTRPGNQTGFVVMYALTFFFANFGPNATTFIVPAEIYPARLRATCHGISAASGKVGAIIGSFGFLYLAQSQDPAKXXAHGYAPGIGVRNSLLLLAGCSFLGFLLTFLVPEPKGKSLEEMSRETEPGAAEP

SEQ ID NO: 11288 - protein, 550 aa, Zea mays
  unsure (1)..(550): unsure at all Xaa locations
MALEKLQVLHALDVADTQRYHVRAVVIAGMGFFADAYDLFCITLVTKLLGRIYYHVPGREEPGRLPPRLEAAINGVTFCGMIVGQLLFGWLGDKVGRKKFYGKTIMLMIMGSFLSGLSFGNSADGVMATLCFFRFWLGVGIGGDYPLSATIMSEYANKRTRGSFVAAVFAMEGFGVLAGCIVTLVVSATFQARFSAPAYEEDPAASTPPQADYAWRIVLMVGAIPACFTYHWRMRMPETARYTALVARDADKAARDMSRVLQVDITGEPDKVENITRDRGDYGAFSRRFARRHGAHLAGAVACWFVLDVVFYSQNILQEGIFSDVNWVPRARTMSALEETYRVGRAHAIIALCGTLPGYWFTIAFVDVVGRKAIQFLGFAMMMGFMLLIAAFYDSLISPGRRIWLVLMYTFTFFFANFGPNSTTFILPAEIFPAHLRTTCHGISAAAGKVGAIVGTFGFMYAAQKADGSEAAAGYPSGIGVRASLFVLAASNALGILFTCFLPEPKGRSLEEVCGEGAXXPTIRDDTDVGDSKILPLXMSIFIFVTGAHG

SEQ ID NO: 11289 - protein, 579 aa, Zea mays
VCTGSHATRTPALHCRRACVTGRGEMTAPGGSNLAVLDALDSARTQMYHMKAIVIAGMGFFTDAYDLFCISTVSKLLGRIYYPDDNLYIDKPKPGTLPVSVNNMVTGVALVGTLMGQLVFGYFGDKLGRKRVYGITLVLMAACAIGSGLSFGSSAHAVIGTLCFFRFWLGFGIGGDYPLSATIMSEYSNKKTRGAFIAAVFAMQGVGIIFAGLVSMIVSGILLHYHPAPAWKENHDRSWQDQMPAADYMWRIVLMIGAFPALATFYWRMKMPETARYTALIEGNAKQAANDMQKVMDVEIQAEQDKLARYKAANDYPLLSREFARRHGLHLIGTATTWFLLDIAFYSQNLTQKDIFPAIKLTSPVDDINALKEVFEISKAMFLVALLGTFPGYWVTVALIDKMGRYLIQLIGFFMMSVFMLLMGVMYNDLKNKHTTLFALFYALTFFFANFGPNSTTFVLPAELFPTRVRSTCHAISAASGKAGAIVAAFGVQSLTLKGDVGHIKKALIILSVTNILGFFFTFLVPETMGRSLEEISGEDGNVENGPGAPAGVAMGVADVSKDDKMPVSSTEWQSSMHA

SEQ ID NO: 11290 - protein, 423 aa, Zea mays
  unsure (1)..(423): unsure at all Xaa locations
XGLSFGHTPKGVIATLCFFRFWLGFGIGGDYPLSATIMSEYANKKTRGAFIAAVFAMQGFGILFGTIVAIVVSAAFRNAFPAPPYFVDAQASLVPEADYVWRVILMFGTVPAALTYYWRMKMPETARYTALIARNTKQATADMAKVLKKEIEAEEEQVERQVVGADTWGLFSAQFLRRHGLHLLATSSTWFLLDIAFYSQNLFQKDIFTKVGWIPPARTMNAIEEVYRISRAQALIALCGTIPGYWFTVGLIDIVGRFWIQIMGFFMMTVFMLALGVPYEHWTKASNHTGFVVLYGLTFFFANFGPNSTTFIVPAEIFPARLRSTCHGISAAAGKAGAIIGAFGFLYAAQDPKKPDHGYSPGIGIRNTLFVLAGTNFLGMLMSVFVPESKGMSLEEISKENVDDEADAEVXRDRLHLCVQMHM

SEQ ID NO: 11291 - protein, 470 aa, Zea mays
  unsure (1)..(470): unsure at all Xaa locations
LGQQLRVLHALDVARTQLYHFMATAIAGMGFFTDAYDFFAISLVMDLISYLYYEEQIDRGVKATINGIALCGAVPGQLVFGWLGDKMGRKRIYGVTLLLMPLLLPLLAWLRHXGGDYPLSATIMSEYANKRRRGAFIAAVFAMQGFGNLAAGIVAVVVSASFLKTNPRRNDFVWRIVLMLGAVPAIFTYYWRMKMPETARYTALVAKDARKAASEMSSVLNMEIGQEDEAVRELVRQDEYGLFSVQFLRCHGTHLLATSVCWLAVDITFYSLNLYMKDIFVDVGLIDPXXEKSDLFKRMTVSTLLHMAIAFGGTLPGYFFTVAFVDRIGRVRIQLLGFTMMAALTASLAATYDPYWKQQNKIGFAVLYGLTNFFTNFGPNTTTFIVPAEIFPTRMRATCHGIAGAFGKIGAIIGVFGFMFTMEEHHVAPRALWALFASNLVGLVFTFLLPDSKGKSLEEMTGETEEQQGX

SEQ ID NO: 11292 - protein, 361 aa, Zea mays
  unsure (1)..(361): unsure at all Xaa locations
XSIEAVAAAAGYDLFCISLVAIVVSASFKARFPAPAYAVDPAGSTPPQADFVWRIILMLGAMPAALTYYWRTKMPETARYTALVAKNAKQAAADMSKVLQVVSRRRRGGRRGCDCDXAXRRPFGLFSGEFLRRHGLHLLGTSSTWFLLDIAFYSQNLFQKDIFSAVGWIPKAATMNALEELFSIARAQSLIALCGTVPGYWFTVALIDVLGRFAIQVTGFLMMTVFMLGLAVPYEHWTTPGHHIGFIVMYGLTFFFANFGPNATTFIVPAEIFPARLRSTCHGISAASGKLGAIIGSFGFLYLAQNRDPAKTDHGYPAGIGVRNSLFLLAGCNLLGLAFTFLVPESKGKSLEEMSGENDEX

SEQ ID NO: 11293 - protein, 360 aa, Zea mays
  unsure (1)..(360): unsure at all Xaa locations
XVISAAFRAAYPSPAYRDDHFTSTVPQADFVWRVILMLGAAPALLTYYWRMKMPETARYTALVAKNAKQAAADMSKVLHTEILDEQEKLDGMVAAEGANSFGLFSREFARRHGLHLVGTATTWFLLDIAFYSQNLFQKDIFTSINWIPKANTMSALEEVYRISRAQTLIALCGTVPGYWFTVALIDVVGRFAIQLLGFFMMTVFMLGLAIPYHHWTTPGNHIGFVVMYAFTFFFANFGXPNSTTFIVPAEIFPARLRSTCHGISAAXSGKAGAIIGAFGFLYAAQNQDKSKTDAGYPAGXIGVRNSLFVLAATTWLGFVLTFLVPESKGKSLEEMSGEAEDSEEEPVGARAVRPSETQMV

SEQ ID NO: 11294 - protein, 305 aa, Zea mays
  unsure (1)..(305): unsure at all Xaa locations
XAGLLMPGAMPAALTYYWXRTKMPETARYTALVAKNAKQAAADMSKVLQVEISAGAPEEDGRRRXFGLFSGEFLRRHGLHLLGTSSTWFLLDIAFYSQNLFQKDIFSAVGWIPKAATMNALEELFSIARAQSLIALCGTVPGYWFTVALIDVLGRFAIQVTGFLMMTVFMLGLAVPYEHWTTPGHHIGFIVMYGLTFFFANFGPNATTFIVPAEIFPARLRSTCHGISAASGKLGAIVGSFGFLYLAQNRDPAKTDHGYPAGIGVRNSLFLLAGCNLLGLAFTFLVPESKGKSLEEMSGENDEAA

SEQ ID NO: 11295 - protein, 50 aa, Thinopyrum elongatum
MALIDRIGRFWIQLGGFFFMAVFMLGLAFPYHHWTTPGNHIGFVVLYVLT

SEQ ID NO: 11296 - protein, 466 aa, Acinetobacter calcoaceticus
MSREINVNQMIDDSKLTPFHWRVIILSTLIIIFDGYDLVIYGVALPLLMKEWAIDPVTAGFIGSIALFGMMFGALIFGTIADKLEHLGVSRKKVIAVCIILFSLCTVLCGFSETTTQFSIFRFLAGVGIGGVMPNVIALVSEYAPKKFKSFFVTLMFSGYAIGGMTAAFLGSILVPLYGWKIMFMIAGIPLVLLLPLMEVLPESIDYLVRKKKDETVRFIMTKMVPSYQYQPDHVFVLNSSNQNQAQAPVKMIFQEQRAFSTMMFWCSIFMTLIMVYALGNWLPKLMIEAGYNLSKSLIFLFSLNVGGMIGSILGGYLADRYNVKFVTMGLLLLGAISLSLLSFQFSSVILYILIACAGAASIGAQIMLLAYMAKFYAPNVRSTGIGWGLGMGRVGAILGPILTGWLLSLQLPHFYNFLALSIPAVLGIVTVFLINDRRMYQPEPISPIANQNDTTTVKVNEAVSH

SEQ ID NO: 11297 - protein, 465 aa, Pseudomonas straminea
MTSQTSKQNTDPTVVNVQTVLNESPFSGFQWGIFFLCFLIVLLDGFDTAAIGFIAPSLLGEWGIDKSHLGPVLSAALFGLAFGALGAGPLADRVGRKTVLIIAAVVMGGASIASGLVHDLQGLTIWRFITGLGLGAAMPNAITLMNEYCPDSKRSFITNCMFCGFPIGSAFGGFIAAWMIPHFGWRSLLIVGGVVPLILAVLMIVMLPESVRFMVLKNYSADRVRKVMVRIAAGTRNAARFVLNDGGAAAAQAQQGPQGLRLVFSQKYLVGTLALWVTYFMGLVIVYGLVNWMPVLFKEAGVPASQAAVIAALFQLGGVGAIFVGLLMDRWNANLIIAAGYFLTSLGVAFIGQVLGGGVGMLVASVFIAGLLMNAAQSSMQALAAEYYPTECRASGVSWMLGIGRFGGIAGSFLVAELSRRHLELPQVFMVVAIPGVIAALALLVKNRYAGGAPRTSMLGLGGAH

SEQ ID NO: 11298 - protein, 521 aa, Glomus intraradices
MSTSDRVTIDVDKRRAALKEIDDAKFGWQHIRACLVAGTGFFMDAYDLFAINFASTMIGYVYYGGKTPANIDLGLKVSGSIGTLLGQLFFGYLADRLGRKKMYGVELMIIIVATVASSLAGQSRAVTVVGIIMFWRVVMGVGIGGDYPLSAIITSEFATKKRRGAMMASVFAMQGFGILGSAIVALIVLAAFRSAIIADVSAVDYCWRIVLGCGAIPGIAALYFRLTIPETPRYTMDVEHDVNKATSDVANYLQKTDTTDENDGPGNHVGVPKASWSDFTSYFGKWKNGKVLLGTSMSWFALDIAFYGIGLNNGIILSAIGYADTHDADFNLRAYNSLKNMALGNIIITIMGTVPGYWVTVAFVDKWGRKPIQIMGFAVLTVLFIVMGAAFNPLKEHSIPAFIVLFTLLQFFQNFGPNTTTFIVPGEVFPTRYRSTGHGISAASGKLGAIVAQVGFSKLKDIGGPNAFVGQLLLIFAAWMFIGGLFSILIPETKGLSLEELANEDHDFNVEERKERVKAEA

SEQ ID NO: 11299 - protein, 396 aa, Glomus intraradices
VTVVGIIMFWRVVMGVGIGGDYPLSAIITSEFATKKRRGAMMASVFAMQGFGILGSAIVALIVLAAFRSAIIADVSAVDYCWRIVLGCGAIPGIAALYFRLTIPETPRYTMDVEHDVNKATSDVANYLQKTDTTDENDGPGNHVGVPKASWSDFTSYFGKWKNGKVLLGTSMSWFALDIAFYGIGLNNGIILSAIGYADTHDADFNLRAYNSLKNMALGNIIITIMGTVPGYWVTVAFVDKWGRKPIQIMGFAVLTVLFIVMGAAFNPLKEHSIPAFIVLFTLLQFFQNFGPNTTTFIVPGEVFPTRYRSTGHGISAASGKLGAIVAQVGFSKLKDIGGPNAFVGQLLLIFAAWMFIGGLFSILIPETKGLSLEELANEDHDFNVEERKERVKAEA

SEQ ID NO: 11300 - protein, 544 aa, Novosphingobium aromaticivorans
MCVNASVTKNDAAKPSASDIRLVIAASSAGTVFEWYDFFIYGTLASIIGRTFFPSDNATLQVLLVWAGFAVGFGFRPLGAVLFGYLGDKLGRKYTFLVTVTLMGVATAGVGLIPSAATIGLAAPAIVILLRVLQGLALGGEYGGAAIYVAEHAPGGRRGYYTSYIQASVVGGFVLSLIVVLSSKALMSDAVWNDWGWRVPFLVSLALLAISLWMRMKLSESPVFQAMKEEGELAGNPFVESFTYPGNKRRIFIALFGIAAGLTVIWYTAMFSGLSFLKSAMRMEDTLAEVVVGIGATLGMGFFIYFGSLSDRIGRKKPIIIGYAVTLLMLFPTFWLMGAAANPQLAEAAERNPVVVAGPDCNYSPFASEQVSNCGKLLADLAASGVSYSLRDDAVFGMTAGGSAVDLASYPWTDKAAARAKALQSELSAHGYDFAKVQPSLGRIVAVIGALLALMAMSGATYGPVAALLSEMFPPRIRYSSMSIPYHLGTGYFGGFLPLISSYIVARTGDPYAGLWYTWVVVLVALLVAAWGLRPGLPADFTDD

SEQ ID NO: 11301 - protein, 572 aa, Schizosaccharomyces pombe
MAFGSKILNIGSKSDEYNDDAVPLDQVEEGAQERRYYLGLTKREFKLMMLAGVGFFLDSYDLFIINLVTPIFEYLYWGGIEKGPTGKGHYPSGIRGLVNASANIGNIFGQLLFGFMGDFFGRKFVYGKEMVIVIIATVLVIAMPKSIHSPLSKMMWVFCWRWLLGVGIGGDYPMSAAITSERSKIKRRGTLISLIFAFQGFGTLAGAIVTIILLGCFEHPLNREGHYHKLEGVWRLQFGLALVPAIGVLIPRLIMKESKSYENSKALNSAEGKDPKAFFNTDDEDNMKKSSSHGDSEVVEASDRYANQADAADAEVDNIEKQFAAVTTPENSSGFITYFRQWRHFKHLLGTSVCWFLLDIAFYGVNLNQSVILKNIGFSTGTNEYRTLMKNAIGNLIIAVAGYVPGYWFNVFLVEILGRKWIQLQGFVITGLMFAILAGRWNEISTGGRFACFVIAQLFSNFGPNSTTFIYPAEVFPARVRGTAHGVSAALGKCGAILASLLFNFLTGVIGYGNVMWIFCGCMWGGILFTLLLPETKGRDADEIDRLELFYGKDGKVQCDSKWKSWYFNGIF

SEQ ID NO: 11302 - protein, 573 aa, Schizosaccharomyces pombe
MKLNIFKSHGDSNTAEERPVPLEQVEAEDQQHENRFWLGLTAKEFRLMMLAGVGFFLDSYDLFIINLVTPIFEYLYWGGIEKGPNGKGHYPSGIRGLVNAASNIGNIFGQLMFGFMGDFFGRKFVYGKEMIIVIIATILLIAMPKSIHSPLSKMMWVFCWRWLLGVGIGGDYPMSAAITSERSKLNRRGTLISLIFAFQGFGTLAGAIVTIILLGCFEHPLNREGHYRKLEGVWRLQFGLALVPAIGVLIPRLMMEETQKFKNSQQLNSGDNRDPKTSLNFEDDELVKNPSVTKGHPEIHESSENYLSRSNTVENEPENIEKQFESVSAPANRSGFIQYFRQWHHFKHLLGTSVCWFLLDIAFYGVNLNQSVILKNIGFSSGTNEYRTLMKNAIGNLIIAVAGYVPGYWFNVFLVEILGRKWIQLQGFVITGLMFAILAGRWNEISTGGRFACFVIAQLFSNFGPNSTTFIYPAEVFPARVRGTAHGISAALGKCGAILASLLFNFLTSIIGYGNVMWIFCGCMWGGILFTLLLPETKGRDADEIDRVELFYGGDGKVECNSKWKSWYVNGIF

SEQ ID NO: 11303 - protein, 559 aa, Schizosaccharomyces pombe
MNRLNPFSKSHSKNSNENNEVSLADVAESDTRRHWLGLTKREFKLMGFAGAGFFLDSYDLFIINLVSPIYEYLYWGGLEGKKPHYPSGIHGLVNAAANIGNVFGQILFGFMGDFFGRKFVYGKEMIVVIIATVLVIALPKSIPTPLGKMMWIFAWRWLLGLGIGGDYPMSATITSERSLLSRRGTLLSIVFSFQGFGTLAGAIVTIILLACFEKPLNQRGEYTKLEGVWRLQMGLALVPALLVLIPRLTMKESKSYEQSKALNKYTDNDTYIADDDEPKKDNQNVVEEKQINLTTSSDSHPTSTEDFGDKRASTVPTSENTSGFIEYFSQWHHFKHLLATAVSWFLLDIAFYGVNLNQSVILKAIGFSSGKNEYHTLMRGAIGNLIIAIAGYVPGYWFTVFLVEKLGRKWIQLQGLFITGLMFAILAGSWDTISTGGRFACFVIAQFFSNFGPNATTFLYPAEVFPARVRGTAHGLSAALGKCGAILASLLFNFLTSVIGYGNVMWIFCGCMWGAIFFTLLLPETKMRDADEIDREEVLRGGNGKTHQGRWSWYFNGIF

SEQ ID NO: 11304 - protein, 583 aa, Schizosaccharomyces pombe
MGFKLNPFSKKPKDEEPLPLEQYEASEQKILGLVTKKEAKLLAIAGTGFLLDSYDLFIINLVSPILAYLYWGGLTGHQDYPSGIRGVVNAATNIGNIMGQLLFGFLGDFFGRKFVYGKEMMVVIIATILIICLPDRIPTPTAKMMWLFAFRVMLGIGIGGDYPMSASITSEQSLINRRGALLAWIFSNQGWGTLAGCVATLIILACFEKPLNDRGEYTKLNGVWRIQFGIALFPAVIVLIPRLRMQESEQFKNSKNMKSPGEGDLDSASQIELHDFKKKESLTAEFTTSSPSTASLSDKKNPGSVHIRPNNEVAPSSAPSRAPSTTSVESNTEGKESDIQTGSSFVSYFKEWRHAKLLIGSALSWFLLDIAFYGINLNQSVILQEMGFNKGVNEYHILQKNAIGNLIIAVAGYIPGYWVSVVLIEVMGRKWIQIQGFLICCLLFGVLAGTWETISTGGRFACVALAQFFFNFGPNTTCFVIPAEVFPSRVRAFSHGICAACGKAGAILSALLFNKLTEVIGFGNVLWIFFGCMVAGAVVTLILPETANRDADLIDRLEIAAMQQGRTSIIDRSEKWAWWKHGI

SEQ ID NO: 11305 - protein, 274 aa, Schizosaccharomyces pombe
MAFGSKILNIGSKSDEYNDDAVPLDQVEEGAQERRYYLGLTKREFKLMMLAGVGFFLDSYDLFIINLVTPIFEYLYWGGIEKGPTGKGHYPSGIRGLVNASANIGNIFGQLLFGFMGDFFGRKFVYGKEMVIVIIATVLVIAMPKSIHSPLSKMMWVFCWRWLLGVGIGGDYPMSAAITSERSKIKRRGTLISLIFAFQGFGTLAGAIVTIILLGCFEHPLNREGHYHKLEGVWRLQFGLALVPAIGVLIPRLIMKESKSYENSKALNSAEGKD

SEQ ID NO: 11306 - protein, 543 aa, Schizosaccharomyces pombe
MSGGWDESKYVDNGEDEVVRQVSEPSVEEPIEASVTRYRSDEEKLDDKSSGAHVTEKEAEFDIEGGSRETSQWKHFLNVAVAGVALMSDGYCSNSIGTVITILRKLYPEETTHNKSLQDIGMIAYVGTIVGQLSFGWYSDRFGRKNGMITATIILIVSTALCTGAYGYKGSINGMLSALIAYRFFLGIGIGAEYPCGSVAASESSNELKSGLRHAAFIVVTDGAIDFGFVVGALVPYILVCIFGEHHLRIVWRLSIGLGLVIPCVLLPFRIAMKDPKTYVKHKVPLTKIPWLLVLKMYGFRLFILCLIWFVYDLSAFAFGLYSSTIVDGVLPADASTARSFGWNVLINTFYLPGALLGGVFSDLLGPKYCLITGLVLQSIFGFFMSGFYNQLVHKIAGFCVIYGIFLTLGEFGPGGNIGLLASKTSPTAIRGVYYGIAAAIGKCGAIAGVYAFGGDQVRNYFYAASAMAIFVAVLALLFVPKLKQTCIEDEDKRFIQACIDAGYGNPYNYEKNEPEQLEEPDRPPAFNPFLSATFSFHHIILC

SEQ ID NO: 11307 - protein, 208 aa, Schizosaccharomyces pombe
LGTPIFEYLYWGGIEKGPNGKGHYPSGIRGLVNAASNIGNIFGQLMFGFMGDFFGRKFVYGKEMIIVIIATILLIAMPKSIHSPLSKMMWVFCWRWLLGVGIGGDYPMSAAITSERSKLNRRGTLISLIFAFQGFGTLAGAIVTIILLGCFEHPLNREGHYRKLEGVWRLQFGLALVPAIGVLIPRLMMEETQKFKNSQQLNSGDNRD

SEQ ID NO: 11308 - protein, 195 aa, Schizosaccharomyces pombe
NQRGEYTKLEGVWRLQMGLALVPALLVLIPRLTMKESKSYEQSKALNKYTDNDTYIADDDEPKKDNQNVVEEKQINLTTSSDSHPTSTEDFGDKRASTVPTSENTSGFIEYFSQWHHFKHLLATAVSWFLLDIAFYGVNLNQSVILKAIGFSSGKNEYHTLMRGAIGNLIIAIAGYVPGYWFTVFLVEKLGRKWI

SEQ ID NO: 11309 - protein, 554 aa, Schizosaccharomyces pombe
MSSSIPPRLYDMSPTESKKQEDVSETELVYPVELADATIQPSKSDDDLFDSNDFSKTYLAKSRILSNAMNEIGFGRYQWYLFFVAGFGWMSDNIWPVCTSLILMRLDEVDGPHPPAEGRAPYLTLSQNLGLLVGAMVWSLSADTIGRRWAFNLTFLFTGVFAVIAGASPNFASICVFDALWSFGVGGNLPVDSAIFLEALPSSHQWLLTVMSFWWAIGQVIANLVSWGLISNFSCPDDESVCHRADNKGWRYFLFTMGGMTLLMFAARFLVSVYESPKFYLAKGDDYKAVETIHKIARINGKTCTLTVEELYAIDRQEQEESDLDDSKSSDAKSVTQGTTNLIVEKLRKYNFEHIRQCFGSRKLAISSILVILSWAVIGLAFPLYNAFLPYYLETRGNANEPLSVAKTYRNSLIVSAIGVPGSLIAGVLVEFRIGRKGTLCLSLILTGVFLFASTTAKTSNAYLGWNCTFSFFSDIMYGVLYAYTPEVFPSKVRGTAVGLAASANRILGIFSPVIAMRANLTTSAPIFVSGALFIFAGILVVFFPYEPRGKSSF

SEQ ID NO: 11310 - protein, 587 aa, Saccharomyces cerevisiae
MSSVNKDTIHVAERSLHKEHLTEGGNMAFHNHLNDFAHIEDPLERRRLALESIDDEGFGWQQVKTISIAGVGFLTDSYDIFAINLGITMMSYVYWHGSMPGPSQTLLKVSTSVGTVIGQFGFGTLADIVGRKRIYGMELIIMIVCTILQTTVAHSPAINFVAVLTFYRIVMGIGIGGDYPLSSIITSEFATTKWRGAIMGAVFANQAWGQISGGIIALILVAAYKGELEYANSGAECDARCQKACDQMWRILIGLGTVLGLACLYFRLTIPESPRYQLDVNAKLELAAAAQEQDGEKKIHDTSDEDMAINGLERASTAVESLDNHPPKASFKDFCRHFGQWKYGKILLGTAGSWFTLDVAFYGLSLNSAVILQTIGYAGSKNVYKKLYDTAVGNLILICAGSLPGYWVSVFTVDIIGRKPIQLAGFIILTALFCVIGFAYHKLGDHGLLALYVICQFFQNFGPNTTTFIVPGECFPTRYRSTAHGISAASGKVGAIIAQTALGTLIDHNCARDGKPTNCWLPHVMEIFALFMLLGIFTTLLIPETKRKTLEEINELYHDEIDPATLNFRNKNNDIESSSPSQLQHEA

SEQ ID NO: 11311 - protein, 596 aa, Saccharomyces cerevisiae
MSSVNKDTIHVAERSLHKEHLTEGGNMAFHNHLNDFAHIEDPLERRRLALESIDDEGFGWQQVKTISIAGVGFLTDSYDIFAINLGITMMSYVYWHGSMPGPSQTLLKVSTSVGTVIGQFGFGTLADIVGRKRIYGMELIIMIVCTILQTTVAHSPAINFVAHSPAINFVAVLTFYRIVMGIGIGGDYPLSSIITSEFATTKWRGAIMGAVFANQAWGQISGGIIALILVAAYKGELEYANSGAECDARCQKACDQMWRILIGLGTVLGLACLYFRLTIPESPRYQLDVNAKLELAAAAQEQDGEKKIHDTSDEDMAINGLERASTAVESLDNHPPKASFKDFCRHFGQWKYGKILLGTAGYWFTLDVAFYGLSLNSAVILQTIGYAGSKNVYKKLYDTAVGNLILICAGSLPGYWVSVFTVDIIGRKPIQLAGFIILTALFCVIGFAYHKLGDHGLLALYVICQFFQNFGPNTTTFIVPGECFPTRYRSTAHGISAASGKVGAIIAQTALGTLIDHNCARDGKPTNCWLPHVMEIFALFMLLGIFTTLLIPETKRKTLEEINELYHDEIDPATLNFRNKNNDIESSSPSQLQHEA

SEQ ID NO: 11312 - protein, 518 aa, Saccharomyces cerevisiae
MEDKDITSVNEKEVNENTNPRIIKYDAERRATRTETSKKDKWKNIVTIIASGFALISDGYVNGSMSMLNKVFVMEYGKKNYSSKVSTRVSNAALVGIIFGQFFMGIAADYYSRKSCILVATAILVIGSALCAASHGTTVPGMFWMLTVMRGLVGIGVGAEYPTSTLSANESANEYTTTKRGGILVMVTNLPLAFGGPFATIIFLIVYKICSGTKHLEAIWRTVFAIGCFWPLSVFYFRWKTATTEVYEKGRIKRNIPYFLALKFYWKRLLGTCGTWFMYDFVTFPNGIFSSTIISSVIKDQNDLVKVAEWNLLLGVLAVLGVPIGAYLSDRIGRKYTLMFGFSGYIIFGLIIGCAYDQLKKITPLFIIFYAFMNMLGNAGPGDMLGVISSEASATAVRGVFYGLSAVTGKIGSVVGVECFQPIRDNLGARWTFIIAAICGLIGIIITYFFVPHSLESDLMKQDVEFHNYLVSNGWTGKMGFDETDEESMVRTIEVEENGTNCSKKNAEIISVRQVDQS

SEQ ID NO: 11313 - protein, 546 aa, Thermoplasma volcanium
MESEFPGKTIINHIIKINLWRYPFIILVLPQVKQRLESYLLHLIIYNIYRQYIHIYTTIYYLYNVYLKFNNLSFDMTTESKPELIESINDAKTSGFHYKTWIVSGLGFFTDAYDLFIIGVVTSILVLSGWNKFTTLQSSLLDSTALLSAVIGALIFGRLIDKLGRKTVYGLELIILIVGALGSAFLTPLNGVYVLIIWRFILGIGIGGDYATSSTIMAEYSNTAHRGKLVGMVFSMQSLGLLAGPLITLGLLYSGMSLSLVWKLLLAFGAIPALIVVYFRRKMPETPRYLLRVKGDAEAAVKNWEKYTGIEASADAQAEVIKKSWTQIIKQKEFLITLVGTAGAWFLMDWALYGNSIMSSSMLGVLVPSSVTGLDHLIRTTIYSAMIFGFAAFPGYWLATFTIDRIGRKTIQSIGFAAMALSFGILGVFHQLLSPSYIVQFLLLYGMSYFFINFGPNVTTFIYPPEVFPTKVRGLGAGASAAGGKIGAFVGTFLNAIILRSSIGESGLFMILALLAAFGLIITLVLLPEPKKLDLDESSGEKALLV

SEQ ID NO: 11314 - protein, 471 aa, Thermoplasma volcanium
MTTESKPELIESINDAKTSGFHYKTWIVSGLGFFTDAYDLFIIGVVTSILVLSGWNKFTTLQSSLLDSTALLSAVIGALIFGRLIDKLGRKTVYGLELIILIVGALGSAFLTPLNGVYVLIIWRFILGIGIGGDYATSSTIMAEYSNTAHRGKLVGMVFSMQSLGLLAGPLITLGLLYSGMSLSLVWKLLLAFGAIPALIVVYFRRKMPETPRYLLRVKGDAEAAVKNWEKYTGIEASADAQAEVIKKSWTQIIKQKEFLITLVGTAGAWFLMDWALYGNSIMSSSMLGVLVPSSVTGLDHLIRTTIYSAMIFGFAAFPGYWLATFTIDRIGRKTIQSIGFAAMALSFGILGVFHQLLSPSYIVQFLLLYGMSYFFINFGPNVTTFIYPPEVFPTKVRGLGAGASAAGGKIGAFVGTFLNAIILRSSIGESGLFMILALLAAFGLIITLVLLPEPKKLDLDESSGEKALLV

SEQ ID NO: 11315 - protein, 476 aa, Thermoplasma volcanium
MAKGIIEELDNSKINSFHLRTWLIAGMGFFTDAYDLFVIGTVISILPLAGWDKLNTYDISILSSISLLASVIGAVIFGRLLDALGRKRVYGFELMLLILGALGSAFVVPVNGINYLIAWRFILGLGIGGDYAGSSTIMTEFSNTKNRGQLVGMVFSLQGVGLIAGPLITLGLLSFIHNLDLVWRVLFFIGAVPAFIVLYGRRAIGETPRYALRVKGDASSAMQSVEKISGDSKVSVSREDLEMSNIKWTDLFKNRYFMLSLIGTAGTWFLLDWAFYGNSIMSHEMLSALIPSSMSGLNKLKLSTFYTLIIFAVSAFPAYWIATFTVDRIGRKRMQVIGFLIMGITFGILGIFRYLMSPTFVTYFLLVYGISYFFTEFGPNVTTFIYAPEMFPTAIRGLGSGISSAGGKTGAFIGTALNVIIFTLYGEGELFLILAGISMLGMLMTLVLLPETSRRKLEDISGEGRYIVRTASGFKK

SEQ ID NO: 11316 - protein, 465 aa, Thermoplasma volcanium
MFSDFDSKLTRFQIKTVIVSGIGIFSDSYNLYAIALVYYIAAFYLNLTPPESALMTSGAFIGAAIGAILFGLIADKIGRKPVYGLDLALITLGSFLQFFAVNFTLLLIFRIILGLGIGGDYVLSPIITAENANSRDRGKLMIMTFPIMAAFGAMLAAFVDQVSTILLPSSLVWKIVLAFGGVPALFVIYFRRKITETARYSAIVKGSSVDIMSIEKETGTKIEITRDTKTYSYRLKTSLVLVLISSVLWILYDMYSSTFAIYGPITIAKNLGLTPISFTYYAEIFAGIPGAIVSAMLIDKIGRKRLITIGYLGVFFWLLLYGLLLMKSPIFGSKILSGILPTGLVGEAAFAGFSFYIMNYLFSAMGPASIIGGAMVTPEITPTKARGTSQAITVGLDRTADALGLTAFPLLLARLGLPFLILGFSAIAILSIIIMNVGIPEARGKSLEEITGETADTGIRGSIGK

SEQ ID NO: 11317 - protein, 469 aa, Thermoplasma volcanium
MYIRLVQYPSTGSGTGCTNIGGIWMGFFDDMDRMGIRPFHRKIEILASMGMFLDGYDLSVITMAILLMPTQLHFGKLDYILVNVSAFIGMIIGAPLLGRLSDRIGRKKIFGIDLLLFVVFAITAGLATNFAMLFISRLMLGIGIGGDYPISSTMVSEFSPVSKRGTLLYGMVGMYWLGSFFSAVMNYTFAFTPYFWRYTFIVGGVIAIPIIFLRMRIPESPRWLIGHGMTKSAESVVEDLTGRKPDVEEGKAEAEQEESVKFSSLFSSKFLASTIFVLSVWFLFDVASYGIGFYYPTLIDKLGLASHVLNTAGLRAIAESSMIVAVGAILGYLVAMPLADRIGRRILTISGLFVMFLLLLLGSVVKISTLLPVVAFFFSFVLFEQWVGAATLFYPTELFPTNYRSTIQGIATSVSRVGAIMGIVVFPLYPVFHSIFIFAILMALALIISVIFAPETKKTPLEKIWKSKA

SEQ ID NO: 11318 - protein, 445 aa, Thermoplasma volcanium
MGFFDDMDRMGIRPFHRKIEILASMGMFLDGYDLSVITMAILLMPTQLHFGKLDYILVNVSAFIGMIIGAPLLGRLSDRIGRKKIFGIDLLLFVVFAITAGLATNFAMLFISRLMLGIGIGGDYPISSTMVSEFSPVSKRGTLLYGMVGMYWLGSFFSAVMNYTFAFTPYFWRYTFIVGGVIAIPIIFLRMRIPESPRWLIGHGMTKSAESVVEDLTGRKPDVEEGKAEAEQEESVKFSSLFSSKFLASTIFVLSVWFLFDVASYGIGFYYPTLIDKLGLASHVLNTAGLRAIAESSMIVAVGAILGYLVAMPLADRIGRRILTISGLFVMFLLLLLGSVVKISTLLPVVAFFFSFVLFEQWVGAATLFYPTELFPTNYRSTIQGIATSVSRVGAIMGIVVFPLYPVFHSIFIFAILMALALIISVIFAPETKKTPLEKIWKSKA

SEQ ID NO: 11319 - protein, 441 aa, Thermoplasma volcanium
MDYKTGYVQFDQIRITPIFVAVTVLSSMGVFMDGFALSIFSAALPYLKNYILVKSILVSLAASAIYIGMFVGSFVIGHLSDTIGRKRMYTYDLAITSLFLVLTGISRNFAEFFIFELLAGIGIGADYPLSSSIEAEFSPRVSRGRFLVFNIFMWTIGSIVFYLISIPLVGYFGSSSWRWMYFVGAIIPIAVIISRHALPESPYWLVKAGRKEAKKVAENIGKEAGTPNVDVPSVESGSSSIKSVFSGSYLPLIMFASIAWFAYDVSSYGVWNYTPSIFVSTGISVVSSIVSTLLEDLPVIAGFIVCLILIDRIGRRVLQAAGFGLAGISLLTFGLYSMHHTLPFILIFIAFAMMHLFHNIGPTNLTYVYPVEIFPTRVRGTAMGIATSASRIGAILGVFAFPLLIGTFSLSAGLLFFAIFEFLGFIVTVILAPETKATALK

SEQ ID NO: 11320 - protein, 487 aa, Gibberella fujikuroi
IVYYPGKGKLATSSDNAIKLSTSAGTVIGQLGFGMLADIVGRKRMYGLELIVIIFATLAQALTAGSPSTSLVGLIIFWRVVMGVGIGGDYPLSSIITSEFATTKWRGAMMAAVFAMQGIGQLVAALVMMFLTLGFKSSLEGAPDTKHCTGDCQVAVDKMWRTLVGFGAVPACIALYYRLTIPETPRYTFDVARDVEQADEDVKAYINGKREGDTDEVARAQVHASAKSNLQVPKASWSDFCQHYSKWKNLSILIGTAGSWFCLDVAFYGLSLNNGTILKVIGYSTKDANNMYEYLHNTAVGNIIIVLAGAVPGYWVSVATIDTLGRKTIQLGGFIILTILFIVMGFAYNHISSNGLLAIYVLAQFFFNFGPNTTTFIVPGEVFPTRYRSTSHGISAASGKIGSIIGQGAISILRTHGATDKNEAPWMDHVLEIYALFMLLGIFTTLLIPETARKTLEELSGEDDYANNPETTIDTEAHAGKNERTSG

SEQ ID NO: 11321 - protein, 527 aa, Neurospora crassa
MSTPQKTAGGNNAYHNFYNDFLHIKDPNERRRLALAEVDRAPFGWYHVRAVAVAGVGFFTDSYDIFTVSLLTLMLGILATSAGTVIGQVGFGAAADVFGRLGLRVTFHQHHRYHYLLACSYDYPLSSIITSEFATTKWRGAMMGAVFAMQGLGQLAAAFVMLFVTLGFKKSLEAAPTLASCTGDCAVAVDKMWRTVIGVGAVPGCIALYYRLTIPETPRYTFDVKRDVEQASDDIEAFKTGKPKGQPDEATRIVAKQEAEKEMEIPKASWGDFFRHYSKRKNAMLLAGTALSWCFLDIAYYGVSLNNATILNVIGYSTTGAKNTYEILYNTAVGNLIIVLAGAVPGYWVTVFTVDTVGRKPIQFMGFGILTILFVVMGFAYKHLSPHALLAIFVLAQFFFNFGPNATTFIVPGEVFPTRYRSTSHGLSAAMGKIGSIIGQGAIAPLRTRGAVKGGNPNPWMNHVLEIYALFMLLGVGTTFLIPETKRKTLEELSGEFDMSGEEEAQRDTTLTEHKTEAPTSSAAVNA

SEQ ID NO: 11322 - protein, 569 aa, Neurospora crassa
MSTPQKTAGGNNAYHNFYNDFLHIKDPNERRRLALAEVDRAPFGWYHVRAVAVAGVGFFTDSYDIFTVSLLTLMLGIVYFQAKARCLQPPTQPSSSQHRPARSLGRSASAPLLMSLVVRACTDWNCCSSSLPLSLRPWLRVTFHQHHRYHYLLACSYGGRYRWRLSSFQYITSEFATTKWRGAMMGAVFAMQGLGQLAAAFVMLFVTLGFKKSLEAAPTLASCTGDCAVAVDKMWRTVIGVGAVPGCIALYYRLTIPETPRYTFDVKRDVEQASDDIEAFKTGKPKGQPDEATRIVAKQEAEKEMEIPKASWGDFFRHYSKRKNAMLLAGTALSWCFLDIAYYGVSLNNATILNVIGYSTTGAKNTYEILYNTAVGNLIIVLAGAVPGYWVTVFTVDTVGRKPIQFMGFGILTILFVVMGFAYKHLSPHALLAIFVLAQFFFNFGPNATTFIVPGEVFPTRYRSTSHGLSAAMGKIGSIIGQGAIAPLRTRGAVKGGNPNPWMNHVLEIYALFMLLGVGTTFLIPETKRKTLEELSGEFDMSGEEEAQRDTTLTEHKTEAPTSSAAVNA

SEQ ID NO: 11323 - protein, 693 aa, Neurospora crassa
MDDDVMRPDTHHDPTPGLIPVPHGPATGDEALQLPFGHTPDPDHEKAIFGYLTQPDDIYTKDGTYWADLPLRERIAFVNKVQNEEAKQELKAIGRMMKKDPLSPVSWYFRNAVLPGAGLGLEGYVLFSIGNIEPLFKATWPQCWGHNATECSSNWIAAVTYLEVIGIMVGQLVVGVIGDWIGRRWGLIQDAAIMFVGLLMLTASWGFGVGGEYPITATSSMENSVASGKLSTRNDRLHRGRKVTTAFLMQGWGQLINQALLIILLLIFHAGSGSPPYGLATVQWTFRLSFAIPAVGTLWLVYYRTYKMPHASRQLIAAKKKTNVTGYDFDSLAMTTRHFGGRLLATAGCWFCNDVFFYGNKLFQAQFIAVISGGSSSVLTGWIWNLYNVIISLVGYYLASLLMDNRFYGRKMMQQVGFLMCFIMFVVPAFKLEYYTSPAGIKSFQAMYFLSSFFNQFGPNSVTFLVAGEVFPTPIRASAHGFSACCGKAGALLASVLYNYIDTQTKFYVVPWFGLAGMILTWLFLPDTTGLDLKEQERRWSYIRAGKPEDYHGIAIHPMHLSLWERLRGVGKHYNPELDHKQKIEDMREEWAGKERMRREKEVNGQNSMGDDLEVDDFNDQVHHYFRNTTDQGMFVNDGSAGPSTHSRSRNNSEPPFASGANSKEVTQEKIRPDSPSTTQTPSSTRPVSEKEQ

SEQ ID NO: 11324 - protein, 513 aa, Neurospora crassa
MFGFGQRKAEVKTTAQPVDQQRDANVDTLVNEGATVGKTNWKNLIPVIACGAGLFSDGYINNVIGSVVTILDREYQEVWRNSNAKKYVGDIAFAGTVVGMLLFGYLSDKWSRTNSLLVSTIILIIFAALAAGSYYKGDAVGMFNILTAWRFFVGLGIGGEYPAGSVGCAENTGELKSGQRNMWFILFTNSMIDWGFVIGAFVPYVVSAACHNGHLSTIWRTSLGIGVAFPLVLFVLRLFVSEPEEFQKNSMKNARTPYLLVLRFYGFRLFIVSLIWFIYDFSAYSFGIYSPKIVANIYPADSPLTTIFGWNTVINLFYIPGTMLGAPVSDLLGPRYALALGVFLQAIVGFIMAACYSSLAQPGRVAAFAVVYGIFQSLGELGPGNNIGLIAAKTCATGIRGQYYGLAAAVGKIGAFVGTWVFPYIEAAGGGDERLAAQYPFWVSSSLCVLSAVLVLFCLPHIGQDTIQAEDARFRAFLEENGYDTRQLGLRKGEEIGELGEAEGAEEVSIEKK

SEQ ID NO: 11325 - protein, 474 aa, Tetragenococcus halophilus
MKSHPLTLTQNIMNNKGLNRYVITITLIATLGGLLFGYDTAVISGAEQSIQNNLVNGVGLGSFAHGLTVSSALIGCVFGGLLSGIFSNNLGRRNSLKLAGSLFLISALGSAYPEFLFFQAGDASVGLLIVFNLYRVLGGIGVGMASGISPTYIGEIAPGKVRGSLVSWYQFAIIFGQLVVYFVNWGIATGQSPEWVNDIGWRFMFASEAIPAILFFALLFYVPETPRYLVLKNNEEKAFDVLSKINNSKEEAKDILTDIKGSLNTTETSGKLFSYGKTVVIVGVLLSIFQQFIGINVALYYAPRIFESMGAGQNASMVQTIIMGIVNVTFTYVAIRTVDKWGRRPLLLVGSIGMAIGMFAVALLAKNGVLGIWTLVFIIVYTASYMMSWGPIVWVLLSEIFPNKIRGQAMAFAVAAQWLSNFFISSTYPAMIDFSGPLTYGFYGLMCVISAIFVWKMVPETKGKTLEQLENTWL

SEQ ID NO: 11326 - protein, 479 aa, Zymomonas mobilis
MNNNSEIENDTQTNVRNTVSDFIGSQLYLLGTVLVTAIAGFLYGYDTGIISGALMNIAHDFKLDAHQQEIITSILLFGAVIGSLVCGRLSAFVGRRHMIMIVTAIFGFSVIAADAPTAFWLGAARLVLGFAVGGSSQIVPVYIAELAPADQRGRMVTFYNISIGLGILAAGIVGAFLQEEWTWRTMFSVAAIPAAVLFCSMMMLPESPRWLVRQERVEEARDMLDTVRETDHEVTKELRSIKKNQQPDEGSGSRWLESLAQPWVRPALIAGLGVAAFTQLSGIEMMIYYTPTFLRDSGFTEKMAYYSALGVALIYVIMTTIGKLLVDHVGRRKLALCMMPLAALSLFALGIAFNLPGGASEHRWLILACLFAFMVFNAGGIQVIGWLIGSEVYPLCIRARATSLHAATLWGSNLILTSTALTMTSLLGIGGSMWFYGGLNALGFVFVYFMVPETKGRSLEEIESSLKDGSFLPSKKASA

SEQ ID NO: 11327 - protein, 487 aa, Fusarium oxysporum
IVYYPGKGKLATSSDNAIKLSTSAGTVIGQLGFGMLADIVGRKRMYGLELIVIIFATLAQALTAGSPSTSLVGLIIFWRVVMGVGIGGDYPLSSIITSEFATTKWRGAMMAAVFAMQGIGQLVAALVMMFLTLGFKSSLESAPDTKHCTGDCQVAVDKMWRTLVGFGAVPACIALYYRLTIPETPRYTFDVARDVEQADEDVKAYMTGKREGDTDEIARAQVHASAKSNLQVPKASWSDFCQHYSKWKNLSILIGTAGSWFCLDVAFYGLSLNNGTILKVIGYSSKDANNMYEFLYNTAVGNIIIVLAGAVPGYWVSVATIDTLGRKTIQLGGFIILTILFIVMGFAYNHISSNGLLAIYVLAQFFFNFGPNTTTFIVPGEVFPTRYRSTSHGIFAASGKIGSIIGQGAISILRTHGATDKNEAPWMDHVLEIYALFMLLGIFTTLLIPETARKTLEELSGEDDYANNPETTIDSEAHAGKNEGTSV

SEQ ID NO: 11328 - protein, 150 aa, Fusarium culmorum
WRVIMGVGIGGDYPLSSIITSEFATTKWRGAMMAAVFAMQGIGQLVAALVMMFLTLGFKSSLEQAADTKSCTGDCQIAVDKMWRTLVGFGAVPACIALYYRLTIPETPRYTFDVARDVEQADEDVKAYINGKSEGNTDEVSRAQNLQSAK

SEQ ID NO: 11329 - protein, 568 aa, Gibberella zeae
MAQEARPVAKTSGGNNAFHNFHNDFAHIADPNERRRLALAEIDKAPFGWYHVRACIVAGVGFFTDSYDIFCVSMLTIMLGIVYYPGKGKLPTSSDNAIKLSTSAGTVIGQFGFGMLADIVGRKRMYGLELIVTIFATLAQALTAGSPSTSLVGLIIFWRVIMGVGIGGDYPLSSIITSEFATTKWRGAMMAAVFAMQGIGQLVAALVMMFLTLGFKSSLEQAADTKSCTGDCQIAVDKMWRTLVGFGAVPACIALYYRLTIPETPRYTFDVARDVEQADEDVKAYINGKSEGNTDEVTRAQNLQSAKTNLEVPKASWRDFFQHYSKWKNASLLLGTAGSWFCLDVAFYGLSLNNGTILKVIGYSTKDATNVYEFLHNTAVGNIIIVLAGAVPGYWVSVATIDTLGRKTIQLGGFIILTILFIVMGFAYNHIPSNGLLAIYVLAQFFFNFGPNTTTFIVPGEVFPTRYRSTSHGISAASGKIGSIIGQGAISILRTHGATDKNEAPWMDHVLEIYALFMLLGIFTTLLIPETARKTLEELSGEDDYANHDHALESETQASHDKARRTSV

SEQ ID NO: 11330 - protein, 150 aa, Gibberella zeae
WRVIMGVGIGGDYPLSSIITSEFATTKWRGAMMAAVFAMQGIGQLVAALVMMFLTIGFKSSLEQAADTKSCTGDCQIAVDKMWRTLVGFGAVPACIALYYRLTIPETPRYTFDVARDVEQADEDVKAYINGKSEGNTDEVTRAQNLQSAK

SEQ ID NO: 11331 - protein, 150 aa, Gibberella zeae
WRVIMGVGIGGDYPLSSIITSEFATTKWRGAMMAAVFAMQGIGQLVAALVMMFLTLGFKSSLEQAADTKSCTGDCQIAVDKMWRTLVGFGAVPACIALYYRLTIPETPRYTFDVARDVEQADEDVKAYINGKSEGNTDEVTRAQNLQSAK

SEQ ID NO: 11332 - protein, 150 aa, Gibberella zeae
WRVIMGVGIGGDYPLSSIITSEFATTKWRGAMMAAVFAMQGIGQLVAALVMMFLTLGFKSSLEQAADTKSCTGDCQIAVDKMWRTLVGFGAVPACIALYYRLTIPETPRYTFDVARDVEQADEDVKAYINGRSEGNTDEVTRAQNLQSAK

SEQ ID NO: 11333 - protein, 149 aa, Gibberella zeae
RVIMGVGIGGDYPLSSIITSEFATTKWRGAMMAAVFAMQGIGQLVAALVMMFLTLGFKSSLEQAADTKSCTGDCQIAVDKMWRTLVGFGAVPACIALYYRLTIPETPRYTFDVARDVEQADEDVKAYINGKSEGNTDEVTRAQNLQSAK

SEQ ID NO: 11334 - protein, 95 aa, Gibberella zeae
TAGSWFCLDVAFYGLSLNNGTILKVIGYSTKDATNVYEFLHNTAVGNIIIVLAGAVPGYWVSVATIDTLGRKTIQLGGFIILTILFIAMGFAYNH

SEQ ID NO: 11335 - protein, 95 aa, Gibberella zeae
TAGSWFCLDVAFYGLSLNNGTILKVIGYSTKDATNVYEFLHNTAVGNIIIVLAGAVPGYWVSVATIDTLGRKTIQLGGFIILTILFIVMGFAYNH

SEQ ID NO: 11336 - protein, 94 aa, Gibberella zeae
TAGSWFCLDVAFYGLSLNNGTILKVIGYSTKDATNVYEFLHNTAVGNIIIVLAGAVPGYWVSVATIDTLGRKTIQLGGFIILTILFIVMGFAYN

SEQ ID NO: 11337 - protein, 498 aa, Erwinia chrysanthemi
MKLKRKRVKPIALDDVTIIDDGRLRKAITAAALGNAMEWFDFGVYGFVAYALGQVFFPGDPGVQSIAALATFSVPFLMPLGGVFFGALGDKYGRQKILAITIIIMSISTFCIGLIPSYERIGIWAPILLLLAKMAQGFSVGGEYTGASIFVAEYSPDRKRGFMGSWLDFGSIAGFVLGAGVVVLISTLIGEQAFLAWGWRLPFFLALPLGLIGLYLATLEETPAFRQHVEKLEQNDRDGLKAGPGVSFREIATHHWKSLLVCIGLVIATNVTYYMLLTYMPSYLSHSLHYSENHGVLIIIAIMIGMLFVQPVMGLLSDRFGRKPFVVIGSVAMFFLAVPSFMLINSDIIGLIFLGLLMLAVILNAFTGVMASTLPALFPTHIRYSALASAFNISVLIAGLTPTVAAWLVESSQNLYMPAYYLMVIAVIGLLTGLFMKETANKPLKGATPAASDLSEAKEILQEHHDNIEHKIEDITQQIAELEAKRQLLVAQHPRIND

SEQ ID NO: 11338 - protein, 150 aa, Fusarium cerealis
WRVIMGVGIGGDYPLSSIITSEFATTKWRGAMMAAVFAMQGIGQLVAALVMMFLTLGFKPSLEQAADTKSCTGDCQIAVDKMWRTLVGFGAVPACIALYYRLTIPETPRYTFDVARDVEQADEDVKAYINGKSEGNTDEVSRAQNLQSAK

SEQ ID NO: 11339 - protein, 551 aa, Pholiota nameko
MASYQEKSSDRDSHEKVVPANSGYVLGERRRAALAEVDNAKFSWFHAKVCIVAGVGFFTDAYDIFAINIASTMLGYVYGSGKPGALKALNKQQDLGVKVATPVGTLVGQLLFGWLADLLGRKKMYGVELMIIIIATFAQALSENAPAVHIIGVLVVWRFIMGVGIGGDYPLSAVISSEFASTKIRGRMMTAVFASQGWGNFTAALVGFIITAAYKSSILKEASITNLHSVDVMWRLLIGLGAVPGVVALYFRLTIPETPRFTMDIERNIDQAATDIQAVLAGRKSHVDDDAFIQRIEAPKASWADFREHFGKFENFKILFGTAYSWFALDIAFYGLGLNSGIILQAIGFGNPTSTGTQAIYDNLKNICVGNLILSAAGLIPGYWVSFLFIDKWGRKPIQLMGFIALTILFVILGFGYDKLISTPSSKKAFVFLYCLADFFQNFGPNTTTFVIPGEIFPTRYRSTAHGISAASGKLGAIVAQVGFSQLKDIGGPSAWVKHILEIFAFFMLTGIGSTLLLPETKNRTLEDLSNENQEGFVRGTSNKTAVITDA

SEQ ID NO: 11340 - protein, 486 aa, Pholiota nameko
MSTKLSLKERIKSVSLIFACGTALFSDGYANGVIGNVNTLLTRVYGADKLDQHNYSRTLSSFGFAGTVVGMLVFGYLSDKIGRKFGMMTAAGIVTLFSGLSAASSGAHGSVGGLLSMLSAMRFLLGIGVGAEYPCGSVSASEQSEEPGISKGAQNRWFALATNSMIDFGFVVSSFVPLVLFWIFGNDHLRAVWRLSLGLGVVPAAAVFIWRINMKEPIRYQKDSMKHARIPYMLVLRRYGGRLAAISATWFLYDIIVYPFGIYSSIIVDRITGGKSDLAVVFGWNVIINLFYMPGTLGGAFVVDRLGPKNTMITGLLLQAVIGFIMSGAYVRLTNSIAAFAVVYGIFLSFGELGPGNCLGLLASKSSPTAIRGQFYGTAAAIGKIGAFIGTWIFPPIIDAFGGPKSNKGNTGPFWIGSGLAVLSAIITFMWIKPLTTDGMIEEDRKFREYLEANGYDTSVMGLPETQSEVETESVSVDEKHEKVDV

SEQ ID NO: 11341 - protein, 478 aa, Penicillium paxilli
MDAMSTNQDGENYEVKKDAIVTGKETSDEPKGSYRPKKWQSNVTIFSCYVANFSDGFQNSLANPTNVIFKKLLGSAGYSADMKTRISDSLIVGAILGVVVLGYTSDMFSRRSGLLFTSSLVAIGTLMSTVALSVHPSKNMLWYFVIARGIAGFGVGGEYPPSAAAGIEESDTIMRSYRGPLFVSFTTLMATLAGPILQIIYLICLIASDNNLTITFHAIYSIATILPLIIIVLRIFMIDSALFHDSNLTKQRRSLKLYLVLARRYWWRILTTSVAFFLYDFINFPNSIMSSTIIASLVQDSDIRKTAIWQVILAVLPVPGVMIGAWLTNAIGRRNTGILGFAGYMVLGFIIGGTYDKLSKNIAAFVVLYGLLQAFGHMGPGATIGLISSEAFPTAMRGMGYGIATAFGRTGAAVGTECFTPLQTAAGNSSTFYLAGGVAILGILAYCLLPESSKLNLEEEDRALESFLAEKGYTISQK

SEQ ID NO: 11342 - protein, 502 aa, Mycobacterium tuberculosis H37Rv
MTTLWQPHRNDYSPIPGRGVHARRGARRPRPRGGRAERPGTGQLTRSGRRALLVGLTAASVGVLYGYDLSAIAGALLSLSEEFELTTREQELLTTTAVLGQIAGALGGGILANAIGRKKSVVLIVAGYAVFALLGATSVSVPMLVVARLLLGVTIGLSVVVVPVYVAESAPAAVRGSLVTAYQLATLSGIVVGYLVGYLLAGSHGWRAMFGLAAAPATLLLPLLWRMPDTARWYLLKGRIADARSALRRIQPEADIDAELADMAAAVDERGGGIGEMVRRPYLRATLFVIALGFLVQITGINAIIYYSPRLFAAMGFAGYFAMLALPAMVQVAGLAAVCASLFLVDRLGRRPILLSGIATMITADAVLITVFANDSDGGTGLVLGFAGVLLFIIGFNFGFGSLVWVYAAESFPSRLRSMGSSPMLTSTLTANAIVAAFSLTMLRVLGGAGVFAVFGTFAVVAFVVVYRFAPETKGRKLEEIRHFWENGGRWPAERSPAADEP

SEQ ID NO: 11343 - protein, 425 aa, Mycobacterium tuberculosis H37Rv
MKRVALACLVGSAIEFYDFLIYGTAAALVFPTVFFPHLDPTVAAVASMGTFAVAFLSRPFGAAVFGYFGDRLGRKKTLVATLLIMGLATVTVGLVPTTVAIGAAAPLILTTMRLLQGFAVGGEWAGSALLSAEYAPASKRGWYGMFTVVGGGIALVLTSLTFLGVNYTIGESSPTFMQWGWRIPFLVSAALIAVALYVRFNIDETPVFARERADEKTRLGPAETPIAQVLRRQRREIVLAAGSAVCCFGFVYLASTYLASYAQTRLGYSRGSILFDSVLGGLLCIVFTALSSALCDQLGRRRVLLAGWAVALPWSLLVMPLIDSGSPSLFAVAVVGMYAIGGFGFGPTASFIPELFATSYRYTGSALAANLAGVAGGALPPVIAGALVATYGSWAIGVMLAILALISLVCTYRLPETAGSALVSR

SEQ ID NO: 11344 - protein, 452 aa, Escherichia coli O157:H7
MTQRRDLQALIDAAPVGKMQWRVIICCFLVVMLDGFDTAAIGFIAPDIRTHWQLTAGDLAPLFGAGLLGLTAGALLCGPLSDRFGRKRVIELCVFLFGALSLASAFSPDLQTLVFLRFLTGLGLGGAMPNTITMTSEYLPARRRGALVTLMFCGFTLGSAFGGIVSAQLVPVIGWHGILVLGGVLPLMLFVALLVVLPESPRWQVRRQLPQAVIAKTVSAITRERYVDTHFYLIESASVTKGSIRQLFMGRQLPITLMLWVVFFMSLLIIYLLSSWMPTLLNHRGIDLQHASWVTAAFQIGGTLGALALGVLMDKFNPFRVLTLSYAIGAICIVMIGLSQDGLWLMALAIFGTGIGISGSQVGLNALTATLYPTQSRATGVSWSNAIGRCGAIVGSLSGGVMMAMNFSFDTLFFIIAVPAAISAVMLTLLITVVRQSTSVPDSLPRAGVVNE

SEQ ID NO: 11345 - protein, 125 aa, Thinopyrum intermedium
DLFCIALVTKLLGRIYYTDPALNEPGHLPANVSAAVNGVALCGTLAGQLFFGWLGDKLGRKSVYGFTLILMVLCSIASGLSFGHEAKGVMGTLCFFRFWLGFGVGGDYPLSATIMSEYANKKTRG

SEQ ID NO: 11346 - protein, 77 aa, Thinopyrum intermedium
ALEELYLIARAQALIALCGTVPGYWFTVAFIDIIGRFWIQLMGFTMMTIFVLAIAIPYDYLVKPGHHTGSFVLYGLT

SEQ ID NO: 11347 - protein, 50 aa, Thinopyrum intermedium
VFLIDVVGRFAIQLGGFFFMTAFMLGLAVPYHHWTTAGNHVGFVVMFSLT

SEQ ID NO: 11348 - protein, 50 aa, Thinopyrum intermedium
VALIDRIGRFWIQLGGFFFMAVFMLGLAFPYHHWTTPGNHIGFVVLYALT

SEQ ID NO: 11349 - protein, 50 aa, Thinopyrum intermedium
VALIDQVGRFWIQLGGFFFMAAFMLGLAVPYHHWTTPGNHVGFVVLYRLT

SEQ ID NO: 11350 - protein, 50 aa, Thinopyrum intermedium
VFLIDVIGRFWIQLVGFAMMTVFMLGLAVPYHHWTTPGNHVGFVVMYGLT

SEQ ID NO: 11351 - protein, 471 aa, Ferroplasma acidarmanus
MDNKNEGNISAINQALDNATGKFHFRTFLTAGMGFFTDAYDLFIIGTVLAILPMIGWHLTKTEIALIGSVSLIAAVLGALAFGRLLDYLGRKAIYGLELVLLVIGALGSAFLSFKNPYALMAWRFLLGVGIGGDYATSSVIMAEYSNMKTRGKYVGMVFSMQSIGLVVSSLLALTFLLSTKIIPLADAWKIMLSVGAIPAAIVIYYRRKMPEPPRYTVAKGRAAEASKNLKSYTGIDVAVSKNKEEVNAPWYTLFKDRKFLITLIGTAGAWFLMDWAFYGNSIMASRIFATIITQTGLSGLIRSTEYSAIVFIGFALPGYWLATFTLDKLGRKPIQITGFIMLAVTYGILALFPILDTPSFVVEFIAVYGISYFFMMFGPNVTTFVFPSEVFPVTTRGFGTGISAAGGKTGAFIGTFVDVFIIAAGLSSLMTVLAIFSVLGVIVTILCLPEPKGRAMEEISREKEYTKTIN

SEQ ID NO: 11352 - protein, 467 aa, Ferroplasma acidarmanus
MSSAIDRSMDEAKTSKFHYKVLFISGLGFFTDAYDLFIIGVVILLLPYAGWHNISIFYKGLVTSTALLAAVIGSVVFGRLLDYSGRKAIYGFELVALIAGSLGSAFLTPVNNIFMLLFWRFLLGVGIGGDYATSSTIMTEYSSTMNRGKFVGMIFSMQSFGLIAGPLISIAFLSNYVSPYITWRLLLAIGAIPAIIVIYFRRTMPEPPRYTADVRGDYKLAAKNLKTFAGLDSTGSKGKTINAPWYVLFRDRKFLLTLIGTAGAWFLMDWAFYGNSIMSNSILSFLVPSTVSGIHSIIMTNEYSAIIFGVAAFPGYWIAAFTIDRIGRKPVQITGFAMMAISFGIISAFSFLTTYRFLDYFLLLYGISYFFIMFGPNVTTFVYPPEVFPISTRGLGTGISAAGGKTGAFIGTLADTIILSITGLHFLMGMLAIIAAIGLILTIVLLPETKRRDLGETSGEARYAEWK

SEQ ID NO: 11353 - protein, 477 aa, Ferroplasma acidarmanus
MTENETGSQIKIPGRSVITTLSAMGYFLDGYDLSVISVFTLVLVTFKPFHYDPFTESFVTGAALLGAFVGAVIFGHFADNIGRRYLYIFDLIFFAVFAILSALSTNIYEMIIFRFFVGWGVGADYALSPVYTTEMYPDKKRGAGYGWVWTFWSIGAGAAFAIGYVFYMINPLVGWRYTLAIGAIPAIVTVVLRTRMPESVRWDILEPGKSKLSAKDLDSIAERVGITKEDIKAIIAEREKEENIAAGSFTALFKGEYGKRTAIIWFQWILYDIAGYGIGLYSPIILTTLGISHSSSLLFSLIFNMPVGFLGAFGAVMLNDRLGRRPLQALGFGGMAIAMAMFFIASSAIASIGIIIGIAAFVIDYGIGNLGPGDTMGLYAIELLPTKLRSSSMGGATGITRIASFLAAFMFPLISASLGKSSFFFILLGLMVLAFVFTIFFTPETKGLTLEEIALASYKHVHGVPKLILPEAKKEQS

SEQ ID NO: 11354 - protein, 446 aa, Salmonella typhimurium LT2
MQQPRNFDDLKFSSIHRRIMLWGSGGPFLDGYVLVIIGVALEQLTPLLHLDAEWIGALGAATLAGLFIGTSLFGYICDKVGRRKMFLLDIIAIGVISVATMFVSTPLELLVMRVLIGIVIGADYPIATSMITEFSNTRQRAFSIGFIAAMWYVGATCANLVGYWLYDMEGGWRWMLGSAFIPCLIILIGRFDLPESPRWLLRKGRVKECEQMMIKLFGEPVCFDDELPQETRFLQLFNRRHFPFVLFVAAIWTCQVIPMFAIYTFGPQIVGLLGWEQGRNAALGNVVISLFFMLGCIPAMFWLNSIGRRPLLIGSFAMMTIALALLGLVSNLGIILVVVAFAVYAFFSGGPGILQWLYPNELFPTDIRASAVGVIMSLSRIGTIVSTWALPIFITRYGINNVMLIGALISLVGLGVSVMFAPETRGLTLTQTGNMTLRGTPSDNPR

SEQ ID NO: 11355 - protein, 500 aa, Salmonella typhimurium LT2
MLKRKKIKPITLGDVTIIDDGKLRKAITAASLGNAMEWFDFGVYGFVAYALGKVFFPGADPSVQMIAALATFSVPFLIRPLGGLFFGMLGDKYGRQKILAITIVIMSISTFCIGLIPSYATIGIWAPILLLLCKMAQGFSVGGEYTGASIFVAEYSPDRKRGFMGSWLDFGSIAGFVLGAGVVVLISTIVGEENFLEWGWRIPFFIALPLGIIGLYLRHALEETPAFQQHVDKLEQGDREGLQDGPKVSFKEIATKHWRSLLSCIGLVIATNVTYYMLLTYMPSYLSHNLHYSEDHGVLIIIAIMIGMLFVQPVMGLLSDRFGRRPFVIMGSIALFALAIPAFILINSNVIGLIFAGLLMLAVILNCFTGVMASTLPAMFPTHIRYSALAAAFNISVLIAGLTPTLAAWLVESSQDLMMPAYYLMVIAVIGLITGISMKETANRPLKGATPAASDIQEAKEILGEHYDNIEQKIDDIDQEIAELQVKRSRLVQQHPRIDE

SEQ ID NO: 11356 - protein, 450 aa, Rhodococcus sp. RHA1
MNPSTTPESWASPRHRSAVTWVVAIATIAIIFDGYDLVVYGTILPTLMNDPGELGEISAQQAGALGSYALIGVMVGALTAGAVGDYLGRRRMMLVNIVWFSIGMGLAALATNVTMFGLLRFFTGIGVGGLVATAGAMVAEFAPPGKRNLYNAIVYSGVPAGGVLASLLAIVLRDTIGWRGLFWIGALPIVILLPLALVKLPESPKWLVARGHEDKARRISERTGIPMPDADEIAAERASVEKVGFAALATRRYAWGTALLGMMSFSGLLLTYGLNTWLPKIMEDAGFNAKGSLSFLLVLNGGAILGGLIASKVADGIGPQRVVATTFGLAALALILLTLGFPLPVLLASVAVAGVGTIGTQVLIYGFVSNYYSTSARGAGVAWCAGFGRLGGIFGPLIGGALISAGISSQVAFYVFAGIAVLGGIVTFFVPRARVTRAAPAAAYSTVQVS

SEQ ID NO: 11357 - protein, 383 aa, Oenococcus oeni MCW
MLYHSWKRTGIYTIVPVSLAGLPRVMFGAIFGGALAGQLADRLGRRKMILISAIIFAVFSVLSAIAPNNGSYYLIIMRIFLGLAVGAASALVPAYISELAPAAIRGRLSGLNQTMIVSGMLISYIVDYILKGLPNQIAWRLMLGFACIPAIILYLGVMKLPESPRYLIKNGRLDEARKVMSYVRSSEGEINNEINQIKETAHKEQEAQKTSWSALFSGKYRYLVIAGVGVAAFQQFQCANAIFYYIPLIVQKATGQAATSALMWPIIQGVILVIGSLVFMWIAEKFNRRTLLMFAGTIMGLSFILPAIIRWIDPHASQMMIVVFLCLYVAFYSATWAPLTWVLVGEIFPLAIRGRAAGLASSFNWIGSWAVGLLFPIMTASMS

SEQ ID NO: 11358 - protein, 50 aa, Triticum aestivum/Thinopyrum intermedium alien addition line
VFLIDVVGRFAIQLMGFFMMTVFMLGLAVPYHHWTTPGNQIGFVVMYAFT

SEQ ID NO: 11359 - protein, 50 aa, Triticum aestivum/Thinopyrum intermedium alien addition line
VALIDRIGRFWIQLGGFFFMAVFMLGLAFPYHHWTTPGNHIGFVVLYGLT

SEQ ID NO: 11360 - protein, 58 aa, Triticum aestivum/Thinopyrum intermedium alien addition line
VFFIDRIGRFTIQLMGFFFMTVFMFALAIPYNHWRGTKCGDSFCDGNHVAFVVLYSFT

SEQ ID NO: 11361 - protein, 486 aa, Thermoplasma acidophilum
MAWPFMNRLICRHRYYRFQIRCIWHIIFCILKKYISWSCIIGIMVEFKSSHAAFDQMRITPTFIEITILSSMGVFMDGFSLSIFSAALTYLKSYILVRAIFVSLAASAIYIGMFLGSFTMGHLSDRIGRKRMYTYDLAITSVFLVLTALSTSFYEFFIFELLAGIGIGADYPLSSSIEAEFSPRRSRGRFLVFNIFMWTIGSIVFYVISIPLIFRFGSESWRWMYGVGAIVPVVVILARRALPESPYWLVKAGKDSEAKTVADSMGREAGYTDVDLPNVEKGSSSFRSVFSGSYLPLIIFASLAWFSYDVSSYGVWNYTPSIFVSVGVSAVSSILSTLLEDLPVIVGFIICLLLIERVGRKILQSVGFGLAGVSLLSFALYADHRTLPFIMLFTAFAMMHLFHNIGPTNLTYVYPVEIFPTRIRGTAMGIATAASRIGAILGVFAFPLITASMGMSASLMFFAIFEFVGFIVTVVLAPETKSRPIT

SEQ ID NO: 11362 - protein, 440 aa, Thermoplasma acidophilum
MPNIFEDLDRKKFGWFHLRSILTTGMGVFTDGYDLSSIGIVLAIVLSSYGITKITPGYTLYTSLIAGSALIGAAIGALIFGELAKRGRKKFYGVDVLILGIFAFLQIFAVNVYALIIIRLILGIGVGADYVMSPMIMGEHANSKDRGKTIAFGFGMMWGFGALLAAFAYMIFGPILGLPDAVVWRIVLAFGAVPALAVVYLRRKMPETPRFLARIAGDKASFEEEVKYVANREIMIEGNIRDDHGFGYYFKRYRREFIAAMLLWFLYDQIAYAGILFGPMLIASKLGLGPVSWTYLMEVFTLIGGIIMLSLIDRKGRKVLQILGFIGMGASLLLFDALKSAGIVAATTGGGNARVRHRNGVLQSARARIGDCVWHVRCGACPNKDKIANTVLHRGIRKDRRIDCVICLSGCIRSTRRISGILLSLGTGNNCCGHHACVHS

SEQ ID NO: 11363 - protein, 465 aa, Comamonas testosteroni
MTSQTSKQNTDPTVVNVQTVLNESPFSGFQWGIFFLCFLIVLLDGFDTAAIGFIAPSLLGEWGIDKSHLGPVLSAALFGLAFGALGAGPLADRVGRKTVLIIAAVVMGGASIASGLVHDLQGLTIWRFITGLGLGAAMPNAITLMNEYCPDSKRSFITNCMFCGFPIGSAFGGFIAAWMIPHFGWRSLLIVGGVVPLILAVLMIVMLPESVRFMVLKNYSADRVRKVMVRIAAGTRNAARFVLNDGGEAAAQAQQGPQGLRLVFSQKYLVGTLALWVTYFMGLVIVYGLVNWMPVLFKEAGVPASQAAVIAALFQLGGVGAIFVGLLMDRWNANLIIATGYFLTSLGVAFIGQVLGGGVGMLVASVFIAGLLMNAAQSSMQALAAEYYPTECRASGVSWMLGIGRFGGIAGSFLVAELSRRHLELPLVFMVVAIPGVIAALALLVKNRYAGGAPRTSMLGLGGAH

SEQ ID NO: 11364 - protein, 534 aa, Arabidopsis thaliana
MAREQLQVLNALDVAKTQWYHFTAIIIAGMGFFTDAYDLFCISLVTKLLGRIYYHVEGAQKPGTLPPNVAAAVNGVAFCGTLAGQLFFGWLGDKLGRKKVYGMTLMVMVLCSIASGLSFGHEPKAVMATLCFFRFWLGFGIGGDYPLSATIMSEYANKKTRGAFVSAVFAMQGFGIMAGGIFAIIISSAFEAKFPSPAYADDALGSTIPQADLVWRIILMAGAIPAAMTYYSRSKMPETARYTALVAKDAKQAASDMSKVLQVEIEPEQQKLEEISKEKSKAFGLFSKEFMSRHGLHLLGTTSTWFLLDIAFYSQNLFQKDIFSAIGWIPPAQSMNAIQEVFKIARAQTLIALCSTVPGYWFTVAFIDVIGRFAIQMMGFFFMTVFMFALAIPYNHWTHKENRIGFVIMYSLTFFFANFGPNATTFVVPAEIFPARFRSTCHGISAASGKLGAMVGAFGFLYLAQNPDKDKTDAGYPPGIGVRNSLIVLGVVNFLGILFTFLVPESKGKSLEEMSGENEDNENSNNDSRTVPIV

SEQ ID NO: 11365 - protein, 535 aa, Arabidopsis thaliana
MAGDQLNVLNALDVAKTQWYHFTAIIIAGMGFFTDAYDLFCISLVTKLLGRIYYHVDGSEKPGTLPPNVSAAVNGVAFCGTLAGQLFFGWLGDKLGRKKVYGMTLMVMVLCSIASGLSFGSNPKTVMTTLCFFRFWLGFGIGGDYPLSATIMSEYANKKTRGAFIAAVFAMQGFGILTGGIFAIIVSAAFEAKFPAPTYQIDALASTVPQADYVWRIILMVGALPAAMTYYSRSKMPETARYTALVAKDAKLAASNMSKVLQVEIEAEQQGTEDKSNSFGLFSKEFMKRHGLHLLGTTSTWFLLDIAFYSQNLFQKDIFSAIGWIPPAQTMNAIQEVFKIARAQTLIALCSTVPGYWFTVAFIDVIGRFAIQMMGFFFMTVFMFALAIPYDHWTHKENRIGFVAMYSLTFFFANFGPNATTFVVPAEIFPARFRSTCHGISAASGKLGAMVGAFGFLYLAQSPDKTKTEHGYPPGIGVKNSLIVLGVVNLLGMVFTLLVPESKGKSLEEMSGENEQNDESSSSSNNNSNNAVSTA

SEQ ID NO: 11366 - protein, 542 aa, Arabidopsis thaliana
MAKKGKEVLNALDAAKTQMYHFTAIVIAGMGFFTDAYDLFSISLVTKLLGRIYYHVDSSKKPGTLPPNVAAAVNGVAFCGTLAGQLFFGWLGDKLGRKKVYGITLMLMVLCSLGSGLSFGHSANGVMATLCFFRFWLGFGIGGDYPLSATIMSEYANKKTRGAFIAAVFAMQGFGILAGGIVSLIVSSTFDHAFKAPTYEVDPVGSTVPQADYVWRIVLMFGAIPALLTYYWRMKMPETARYTALVARNTKQAASDMSKVLQVDLIAEEEAQSNSNSSNPNFTFGLFTREFARRHGLHLLGTTTTWFLLDIAYYSSNLFQKDIYTAIGWIPAAETMNAIHEVFTVSKAQTLIALCGTVPGYWFTVAFIDILGRFFIQLMGFIFMTIFMFALAIPYDHWRHRENRIGFLIMYSLTMFFANFGPNATTFVVPAEIFPARLRSTCHGISAASGKAGAIVGAFGFLYAAQSSDSEKTDAGYPPGIGVRNSLLMLACVNFLGIVFTLLVPESKGKSLEEISREDEEQSGGDTVVEMTVANSGRKVPV

SEQ ID NO: 11367 - protein, 521 aa, Arabidopsis thaliana
MADQQLGVLKALDVAKTQLYHFTAIVIAGMGFFTDAYDLFCVSLVTKLLGRLYYFNPTSAKPGSLPPHVAAAVNGVALCGTLAGQLFFGWLGDKLGRKKVYGITLIMMILCSVASGLSLGNSAKGVMTTLCFFRFWLGFGIGGDYPLSATIMSEYANKKTRGAFIAAVFAMQGVGILAGGFVALAVSSIFDKKFPSPTYEQDRFLSTPPQADYIWRIIVMFGALPAALTYYWRMKMPETARYTALVAKNIKQATADMSKVLQTDLELEERVEDDVKDPKKNYGLFSKEFLRRHGLHLLGTTSTWFLLDIAFYSQNLFQKDIFSAIGWIPKAATMNAIHEVFKIARAQTLIALCSTVPGYWFTVAFIDIIGRFAIQLMGFFMMTVFMFAIAFPYNHWILPDNRIGFVVMYSLTFFFANFGPNATTFIVPAEIFPARLRSTCHGISAATGKAGAIVGAFGFLYAAQPQDKTKTDAGYPPGIGVKNSLIMLGVINFVGMLFTFLVPEPKGKSLEELSGEAEVDK

SEQ ID NO: 11368 - protein, 521 aa, Arabidopsis thaliana
MADQQLGVLKALDVAKTQLYHFTAIVIAGMGFFTDAYDLFCVSLVTKLLGRLYYFNPTSAKPGSLPPHVAAAVNGVALCGTLAGQLFFGWLGDKLGRKKVYGITLIMMILCSVASGLSLGNSAKGVMTTLCFFRFWLGFGIGGDYPLSATIMSEYANKKTRGAFIAAVFAMQGVRILAGGFVALAVSSIFDKKFPSPTYEQDRFLSTPPQADYIWRIIVMFGALPAALTYYWRMKMPETARYTALVAKNIKQATADMSKVLQTDLELEERVEDDVKDPKKNYGLFSKEFLRRHGLHLLGTTSTWFLLDIAFYSQNLFQKDIFSAIGWIPKAATMNAIHEVFKIARAQTLIALCSTVPGYWFTVAFIDIIGRFAIQLMGFFMMTVFMFAIAFPYNHWILPDNRIGFVVMYSLTFFFANFGPNATTFIVPAEIFPARLRSTCHGISAATGKAGAIVGAFGFLYAAQPQDKTKTDAGYPPGIGVKNSLIMLGVINFVGMLFTFLVPEPKGKSLEELSGEAEVDK

SEQ ID NO: 11369 - protein, 524 aa, Arabidopsis thaliana
MAEQQLGVLKALDVAKTQLYHFTAIVIAGMGFFTDAYDLFCVSLVTKLLGRIYYFNPESAKPGSLPPHVAAAVNGVALCGTLSGQLFFGWLGDKLGRKKVYGLTLIMMILCSVASGLSFGNEAKGVMTTLCFFRFWLGFGIGGDYPLSATIMSEYANKKTRGAFIAAVFAMQGVGILAGGFVALAVSSIFDKKFPAPTYAVNRALSTPPQVDYIWRIIVMFGALPAALTYYWRMKMPETARYTALVAKNIKQATADMSKVLQTDIELEERVEDDVKDPRQNYGLFSKEFLRRHGLHLLGTTSTWFLLDIAFYSQNLFQKDIFSAIGWIPKAATMNATHEVFRIARAQTLIALCSTVPGYWFTVAFIDTIGRFKIQLNGFFMMTVFMFAIAFPYNHWIKPENRIGFVVMYSLTFFFANFGPNATTFIVPAEIFPARLRSTCHGISAAAGKAGAIIGAFGFLYAAQNQDKAKVDAGYPPGIGVKNSLIVLGVLNFIGMLFTFLVPEPKGKSLEELSGEAEVSHDEK

SEQ ID NO: 11370 - protein, 524 aa, Arabidopsis thaliana
MAEQQLGVLKALDVAKTQLYHFTAIVIAGMGFFTDAYDLFCVSLVTKLLGRIYYFNPESAKPGSLPPHVAAAVNGVALCGTLSGQLFFGWLGDKLGRKKVYGLTLVMMILCSVASGLSFGHEAKGVMTTLCFFRFWLGFGIGGDYPLSATIMSEYANKKTRGAFIAAVFAMQGVGILAGGFVALTVSSIFDKKFPAPTYAVNRALSTPPQVDYIWRIIVMFGALPAALTYYWRMKMPETARYTALVAKNIKQATADMSKVLQTDIELEERVEDDVKDPKQNYGLFSKEFLRRHGLHLLGTTSTWFLLDIAFYSQNLFQKDIFSAIGWIPKAATMNATHEVFRIARAQTLIALCSTVPGYWFTVAFIDTIGRFKIQLNGFFMMTVFMFAIAFPYNHWIKPENRIGFVVMYSLTFFFANFGPNATTFIVPAEIFPARLRSTCHGISAAAGKAGAIVGAFGFLYAAQSQDKAKVDAGYPPGIGVKNSLIMLGVLNFIGMLFTFLVPEPKGKSLEELSGEAEVSHDEK

SEQ ID NO: 11371 - protein, 524 aa, Arabidopsis thaliana
MAEQQLGVLKALDVAKTQLYHFTAIVIAGMGFFTDAYDLFCVSLVTKLLGRIYYFNPESAKPGSLPPHVAAAVNGVALCGTLSGQLFFGWLGDKLGRKKVYGLTLVMMILCSVASGLSFGHEAKGVMTTLCFFRFWLGFGIGGDYPLSATIMSEYANKKTRGAFIAAVFAMQGVGILAGGFVALAVSSIFDKKFPAPTYAVNRALSTPPQVDYIWRIIVMFGALPAALTYYWRMKMPETARYTALVAKNIKQATADMSKVLQTDIELEERVEDDVKDPKQNYGLFSKEFLRRHGLHLLGTTSTWFLLDIAFYSQNLFQKDIFSAIGWIPKAATMNATHEVFRIARAQTLIALCSTVPGYWFTVAFIDTIGRFKIQLNGFFMMTVFMFAIAFPYNHWIKPENRIGFVVMYSLTFFFANFGPNATTFIVPAEIFPARLRSTCHGISAAAGKAGAIVGAFGFLYAAQSQDKAKVDAGYPPGIGVKNSLIMLGVLNFIGMLFTFLVPEPKGKSLEELSGEAEVSHDEK

SEQ ID NO: 11372 - protein, 524 aa, Arabidopsis thaliana
MAEQQLGVLKALDVAKTQLYHFTAIVIAGMGFFTDAYDLFCVSLVTKLLGRIYYFNPESAKPGSLPPHVAAAVNGVALCGTLSGQLFFGWLGDKLGRKKVYGLTLVMMILCSVASGLSFGHEAKGVMTTLCFFRFWLGFGIGGDYPLSATIMSEYANKKTRGAFIAAVFAMQGVGILAGGFVALAVSSIFDKKFPAPTYAVNRALSTPPQVDYIWRIIVMFGALPAALTYYWRMKMPETARYTALVAKNIKQATADMSKVLQTDIELEERVEDDVKDPKQNYGLFSKEFLRRHGLHLLGTTSTWFLLDIAFYSQNLFQKDIFSAIGWIPKAATMNATHEVFRIARAQTLIALCSTVPGYWFTVAFIDTIGRFKIQLNGFFMMTVFMFAIAFPYNHWIKPENRIGFVVMYSLTFFFANFGPNATTFIVPAEIFPARLRSTCHGISAAAGKAGAIVGAFGFLYAAQSQDKPKVDAGYPPGIGVKNSLIMLGVLNFIGMLFTFLVPEPKGKSLEELSGEAEVSHDEK

SEQ ID NO: 11373 - protein, 524 aa, Arabidopsis thaliana
MAEQQLGVLKALDVAKTQLYHFTAIVIAGMGFFTDAYDLFCVSLVTKLLGRIYYFNPESAKPGSLPPHVAAAVNGVALCGTLSGQLFFGWLGDKLGRKKVYGLTLIMMILCSVASGLSFGNEAKGVMTTLCFFRFWLGFGIGGDYPLSATIMSEYANKKTRGAFIAAVFAMQGVGILAGGFVALAVSSIFDKKFPAPTYAVNRALSTPPQVDYIWRIIVMFGALPAALTYYWRMKMPETARYTALVAKNIKQATADMSKVLQTDIELEERVEDDVKDPRQNYGLFSKEFLRRHGLHLLGTTSTWFLLDIAFYSQNLFQKDIFSAIGWIPKAATMNATHEVFRIARAQTLIALCSTVPGYWFTVAFIDTIGRFKIQLNGFFMMTVFMFAIAFPYNHWIKPENRIGFVVMYSLTFFFANLGPNATTFIVPAEIFPARLRSTCHGISAAAGKAGAIIGAFGFLYAAQNQDKAKVDAGYPPGIGVKNSLIVLGVLNFIGMLFTFLVPEPKGKSLEELSGEAEVSHDEK

SEQ ID NO: 11374 - protein, 516 aa, Arabidopsis thaliana
MANEEQGSILKALDVAKTQWYHVTAVVVSGMGFFTDSYDLFVISLITKLLGRIYYQVPGSSSPGSLPDGISAAVSGVAFAGTFIGQIFFGCLGDKLGRKRVYGLTLLIMTICSICSGLSLGRDPKTVMVTLCFFRFWLGFGIGGDYPLSATIMSEYSNKRTRGAFIAAVFGMQGIGILAAGAVSLLVSAVFESKFPSRAYILDGAASTVPQADYVWRIILMVGALPALLTYYWRMKMPETARYTALVSKNAEQAALDMTKVLNVDIEASAAKNDQARVSSDEFGLFSMKFLRRHGLHLLGTASTWFLLDIAFYSQNLFQKDIFTTIGWLPSAKTMNAIQELYMIAKAQTIIACCSTVPGYFFTVGFIDYMGRKKIQIMGFAMMTIFMLSLAIPYHHWTLPANRIGFVVLYSFTFFFSNFGPNATTFIVPAEIFPARIRSTCHGISAASGKAGAMVGSFGFSALVKALGMSNTLYIMAGINLLGLLLTFTIPETNGKSLEELSGETEPEKIKEKIVV

SEQ ID NO: 11375 - protein, 394 aa, Arabidopsis thaliana
MAKKGKEVLNALDAAKTQMYHFTAIVIAGMGFFTDAYDLFSISLVTKLLGRIYYHVDSSKKPGTLPPNVAAAVNGVAFCGTLAGQLFFGWLGDKLGRKKVYGITLMLMVLCSLGSGLSFGHSANGVMATLCFFRFWLGFGIGGDYPLSATIMSEYANKKTRGAFIAAVFAMQGFGILAGGIVSLIVSSTFDHAFKAPTYEVDPVGSTVPQADYVWRIVLMFGAIPALLTYYWRMKMPETARYTALVARNTKQAASDMSKVLQVDLIAEEEAQSNSNSSNPNFTFGLFTREFARRHGLHLLGTTTTWFLLDIAYYSSNLFQRHLHSNRMDSRRRNNERNPRSLHRLKSSNPNRSLRHRPWLLVHRRIHRYTRSILHPVDGIYLHDDLYVRFSDSL

SEQ ID NO: 11376 - protein, 543 aa, Glycine max
  unsure (1)..(543): unsure at all Xaa locations
MAREQIQVLNALDVAKTQWYHFTAIIIAGMGFFTDAYDLFCISLVTKLLGRIYYHVDGAAKPGTLPPNVSAAVNGVAFCGTLSGQLFFGWLGDKMGRKKVYGMTLMLMVICSIGSGLSFGHSAKSVIATLCFFRFWLGFGIGGDYPLSATIMSEYSNKKTRGAFIAAVFAMQGFGILAGGIFAIIISVAFKERFDAPPYELDPAGSTVPQADYIWRIIRPXVMVGALPAALTYYWRMKMPETARYTALVAKNTKQAAADMSKVLQVEIQAEPQKEEQKAXXSYGLFSKEFLRRHGLHLLGTASTWFLLDIAFYSQNLFQKDIFSAIGWIPPAKTMNAIEEVYRIARAQTLIALCSTVPGYWFTVALIDKIGRFAIQLMGFFFMTVFMFALAIPYDHWTHKDNRIGFVVIYSLTFFFANFGPNATTFVVPAEIFPARFRSTCHGISSASGKLGAIVGAFGFLYLAQNKDKSKADAGYPAGIGVKNALIVLGVVNILGFFFTFLVPEANGKSLEEMSGENDEDVGTQEESEQSHSQNNNRTVPYV

SEQ ID NO: 11377 - protein, 534 aa, Glycine max
  unsure (1)..(534): unsure at all Xaa locations
MAGELGVLNALDVAKTQWYHFTAIVIAGKGFFTDAYDLFCICLVTKLLGWLYYTEPGAPKPGSLPPRVQASVTGVALCGTLAGQLFFGWLGDKMGRKRVYGLTLILMVVCSLASGLSFGSTPEGVMASLCFFRFWLGFGIGGDYPLSATIMSEYANKKTRGAFIAAVFAMQGFGILAGGVVALIVSYAYDQKYKLPSYEQNPEASLXXPAFDYVWRIVLMFGAVPAALTYYWRMKMPETARYTALVAKNAKQAAADMSKVLQVELEAEEEKVKKLTENESNKYGLFTKEFVKRHGLHLLGTTTTWFLLDIAFYSQNLFQKDIFSAIGWIPPAKEMNAIHEVYKIARAQTLIALCSTVPGYWFTVALIDYMGRFAIQLLGFFFMTVFMFALAIPYDHWSEKENRIGFVVMYSFTFFFANFGPNSTTFVVPAEIFPARLRSTCHGISAAAGKAGAIVGAFGFLYAAQSKDPSKTDAGYPTGIGIKNSLIMLGVINFIGMLFTLLVPESKGKSLEELSGENGENDAEHAVSARTVPV

SEQ ID NO: 11378 - protein, 548 aa, Glycine max
  unsure (1)..(548): unsure at all Xaa locations
MGKEQVQVLNALDVAKTQWYHFTAIIIAGMGFFTDAYDLFCISLVTKLLGRIYYHVDGAAKPGSLPPNVSAAVNGVAFVGTLSGQLFFGWLGDKMGRKKVYGMTLALMVIASIASGLSFGHDAKTVMTTLCFFRFWLGFGIGGDYPLSATIMSEYSNKKTRGAFIAAVFAMQGFGILAGGVFAIIIASVFKSKFDSPPYEVDPLGSTVPQADYVWRIILMFGAIPAAMTYYSRSKMPETARYTALVAKNMEKAAADMSKVMNMEIQAEPKKEEEAQAKSYGLFSKEFMSRHGLHLLGTTSTWFLLDIAFYSQNLFQKDIFSAIGWIPPAKTMNALEEVFFIARAQTLIALCSTVPGYWFTVAFIDRIGRFAIQLMGFFFMTIFMFALAIPYDHWTLRENRIGFVVIYSLTFFFANFGPNATTFVVPAEIFPARFRSTCHGISSASGKLGAMVGAFGFLYLAQNQDPSKADAGYPAGIGVRNSLLVLGVINILGFMFTFLVPEAKGRSLEEISGEQEEETKVXXKXWQQNNSVSFSSLLVICYXNKAVP

SEQ ID NO: 11379 - protein, 538 aa, Glycine max
  unsure (1)..(538): unsure at all Xaa locations
MAGELGVLNALDVAKTQWYHFTAIVIAGMGFFTDAYDLFCISLVTKLLGRLYYTEPGAPKPGSLPPRVQASVTGVALCGTLAGQLFFGWLGDKMGRKRVYGLTLILMVVCSLASGLSFGSTPEGVMATLCFFRFWLGFGIGGDYPLSATIMSEYANKKTRGAFIAAVFAMQGFGILAGGVVALIVSYAYDQKXYKLSSYEQNSKASXLDPAFDFVWRIGLMLGAVPAALTYYWRMKMPETARYTALVAKTAKQAAADMSKVXLQVELEAEEEKVMKLTENESNKYGLFTKEFAKRHGLHLLGTTTTWFLLDIAFYSQNLFQKDIFSAIGWIPPAKEMNAIHEVYRIARAQTLIALCSTVPGYWFTVAFIDIMGRFAIQLMGFFFMTVFMFALAIPYNHWKNHNNIGFVVMYSFTFFFSNFGPNATTFVVPAEIFPARLRSTCHGISAAAGKAGAIVGAFGFLYAAQSTNPNKVDHGYPTGIGVKNSLIVLGVINFFGMVFTLLVPESKGKSLEELSGENEDDGAEAIEMAGSARTVPV

SEQ ID NO: 11380 - protein, 341 aa, Glycine max
  unsure (1)..(341): unsure at all Xaa locations
XVMAGGQLGVLNALDVAKTQWYHFTAIVIAGMGFFTDAYDLFCISLVTKLLGRLYYTDITNPKPGVLPPNVQAAVTGVALCGTLAGQLFFGWLGDKLGRKRVYGLTLMLMVLCSIASGLSFGDTPKGVMATLCFFRFWLGFGIGGDYPLSATIMSEYANKKTRGSFIAAVFAMQGFGIMAGGIVALIVSSAYDHKYDLPSYKDNPAGSKVDSLDYVWRIILMFGAVPAALTYYWRMKMPETARYTALVAKNAKQAASDMSKVLQVEVEAEEDKLQHMVESENQKYGLXFSKEFAKRHGLHLVGPTXTWFLLDIAFYXQNLFQXDIXTAIGWISSAXDMNAX

SEQ ID NO: 11381 - protein, 371 aa, Glycine max
  unsure (1)..(371): unsure at all Xaa locations
IRLITFGVSTFDPAGXXPCNXEDPAGSKVDSLDYVWRIILMFGAVPAALTYYWRMKMPETARYTALVAKNAKQAASDMSKVLQVEVEAEEDKLQHMVESENQKYGLFSKEFAKRHGLHLVGTTVTWFLLDIAFYSQNLFQKDIFTAIGWIPPAQDMNAIHEVYRIARAQTLIALCSTVPGYWFTVAFIDIIGRFAIQLMGFFFMTVFMFALAIPYNHWKNHNNXLGFVVMNSFTFFFSNFGPNATTFVVPAEIFPARLRSTCHGISAAAGKAGAIVGAFGFLYAAQSTNPNKVDHGYPTGIGVKNSLIVLGVINFFGMVFTLLVPESKGKSLEELSGENEDXXGAEAIEMAGSARTVPVXPKSLINKVLSS

SEQ ID NO: 11382 - protein, 280 aa, Glycine max
  unsure (1)..(280): unsure at all Xaa locations
XPADMSKVLQVEIEAEQEKVEQLDTRRGNEFGLFTKQFLRRHGLHLVGTATTWFLLDIAYYSQNLFQKDIFSTIGWIPEXXXMNAVEEVFKIARAQTLIALCSTVPGYWFTVALIDKMGRFTIQLMGXXFMTVFMFALAIPYHHWTMKGNQIGFVVLYSLTFFFANFGPNATTFVVPAEIFPARLRSTCHGISAAAGKAGAMVGAFGYLYTQNAIGLRNTLIVLGVVSFLGLLFTFLVPESKGKSLEEMSGEAEAETAAAPRASAMEAGLGVRSSVKLHG

SEQ ID NO: 11383 - protein, 257 aa, Glycine max
  unsure (1)..(257): unsure at all Xaa locations
QDGEKKSLWTNSYAYALNLVGTTVTWFLLDIAFYSQNLFQKDIFTAIGWIPPAQDMNAIHEVYRIARAQTLIALCTVPGYWFTXAFIDIIGRFAIQLMGFFFMTVFMFALAIPYNHWXXNHNNIXFVVMYSFTFFFSNFGPNATTFVVPAEIFPARLRSTCHGISAAAGKAGAIVGAFGFLYAAQSTNPNKVDHGYPTGIGVKNSLIVLGVINFFGMVFTLLVPESKGKSLEELSGENEDDGAEAIEMAGSARTVPV

SEQ ID NO: 11384 - protein, 543 aa, Lupinus albus
MAREHIHVLNALDVAKTQWYHFTAIIIAGMGFFTDAYDLFCISLVTKLLGRIYYHVDGAGKPGTLPPNVSAAVNGVAFCGTLSGQLFFGWLGDKMGRKKVYGMTLMIMVICSIGSGLSFGHSPNSVLATLCFFRFWLGFGIGGDYPLSATIMSEYSNKKTRGSFIAAVFAMQGFGILGGGIFAIIISAAFKARFDAPAYEVDPVGSTVPQADYIWRIIVMVGALPAALTYYWRMKMPETARYTALVAKNAQQAAADMSKVLQVEIQSETNKEEAQGKPSFGLFSKEFLRRHGLHLLGTAGTWFLLDIAFYSQNLFQKDIFSAIGWIPPAKTMNALDEVYRIARAQTLIALCSTVPGYWFTVALIDRIGRFAIQLMGFFFMTVFMFALAIPYDHWTHKDNRIGFVVIYSLTFFFANFGPNATTFVVPAEIFPARFRSTCHGISSASGKLGAIVGAFGFLYLAQNKDKSKTDAGYPAGIGVKNSLIVLGVVNILGFCFTFLVPEPNGKSLEEMSGENEEEEPTKEGSYNNNNNNNNNNNRTVPYV

SEQ ID NO: 11385 - protein, 540 aa, Lupinus albus
MAREHIHVLNALDVAKTQWYHSLQIIIAGMGFFTDAYDLFCISLVTKLLGRIYYHVDGAGKPGTLPPNVSAAVNGVAFCGTLSGQLFFGWLGDKMGRKKVYGMTLMIMVICSIGSGLSFGHSPNSVLATLCFFRFWLGFGIGGDYPLSATIMSEYSNKKTRGSFIAAVFAMQGFGILGGGIFAIIISAAFKARFDAPAYEVDPVGSTVPQADYIWRIIVMVGALPAALTYYWRMKMPETARYTALVAKNAQQAAADMSKVLQVEIQSETNKEEAQGKPSFGLFSKEFLRRHGLHLLGTASTWFLLDIAFYSQNLFQKDIFSAIGWIPPAKTMNALDEVYRIARAQTLIALCSTVPGYWFTVALIDRIGRFAIQLMGFFFMTVFMFALAIPYDHWTHKDNRIGFVVIYSLTFFFANFGPNATTFVVPAEIFPARFRSTCHGISSASGKLGAIVGAFGFLYLAQNKDKSKTDAGYPAGIGVKNSLIVLGVVNILGFCFTFLVPEPNGKSLEEMSGENEEEEPTKEGSYNNNNNNNNRTVPYV

SEQ ID NO: 11386 - protein, 542 aa, Catharanthus roseus
MAKEQLQVLNALDVAKTQWYHFTAIVIAGMGFFTDAYDLFCISLVTKLLGRIYYHVDGAVKPGTLPPNVSAAVNGVAFCGTLAGQLFFGWLGDKMGRKRVYGMTLMLMVIASIASGLSFGDKPKAVMATLCFFRFWLGFGIGGDYPLSATIMSEYANKKTRGAFIAAVFAMQGFGILAGGMVAIIVSASFKAGFPAPAYQDGAVASTVPEADYVWRIILMFGAIPAALTYYWRMKMPETARYTALVAKNAKQAANDMSKVLQVELEAEQEKVEKFAQEPANTFGLFTKEFLKRHGLHLLGTATTWFLLDIAFYSQNLFQKDIFSAIGWIPPAQTMNAIEEVFRIARAQTLIALCSTVPGYWFTVFLIDRIGRFIIQWMGFFFMTVFMFALAIPYNHWTHKDNRIGFVIMYSLTFFFANFGPNATTFVVPAEIFPARLRSTCHGISAAAGKAGAIIGAFGFLYAAQPSDPSKTDKGYPPGIGVKNALIVLGCVNFLGMVFTFLVPEAKGKSLEEVSKENEEEVENGTELRQQSGHDTRTVPVL

SEQ ID NO: 11387 - protein, 538 aa, Lycopersicon esculentum
MANDLQVLNALDVAKTQLYHFTAIVIAGMGFFTDAYDLFCISMVTKLLGRLYYHHDGALKPGSLPPNVSAAVNGVAFCGTLAGQLFFGWLGDKMGRKKVYGMTLMIMVICSIASGLSFGHTPKGVMTTLCFFRFWLGFGIGGDYPLSATIMSEYANKKTRGAFIAAVFAMQGFGILAGGMVAIIVSAAFKGAFPAPAYEVDAIGSTVPQADFVWRIILMFGAIPAGLTYYWRMKMPETARYTALVAKNLKQAANDMSKVLQVEIEAEPEKVTAISEAKGANDFGLFTKEFLRRHGLHLLGTASTWFLLDIAFYSQNLFQKDIFSAIGWIPPAQTMNALEEVYKIARAQTLIALCSTVPGYWFTVAFIDKIGRFAIQLMGFFFMTVFMFALAIPYHHWTLKDHRIGFVVMYSFTFFFANFGPNATTFVVPAEIFPARLRSTCHGISAAAGKAGAMVGAFGFLYAAQPTDPTKTDAGYPPGIGVRNSLIVLGCVNFLGMLFTFLVPESNGKSLEDLSRENEGEEETVAEIRATSGRTVPV

SEQ ID NO: 11388 - protein, 538 aa, Lycopersicon esculentum
MANDLQVLNALYVAKTQLYHFTAIVIAGMGFFTDAYDLFCISMVTKLLGRLYYHHDGALKPGSLPPNVSAAVNGVAFCGTLAGQLFFGWLGDKMGRKKVYGMTLMIMVICSIASGLSFGHTPKGVMTTLCFFRFWLGFGIGGDYPLSATIMSEYANKKTRGAFIAAVFAMQGFGILAGGMVAIIVSAAFKGAFPAPAYEVDAIGSTVPQADFVWRIILMFGAIPAGLTYYWRMKMPETARYTALVAKNLKQAANDMSKVLQVEIEAEPEKVTAILKQKGANDFGLFTKEFLRRHGLHLLGTASTWFLLDIAFYSQNLFQKDIFSAIGWIPPAQTMNALEEVYKIARAQTLIALCSTVPGYWFTVAFIDKIGRFAIQLMGFFFMTVFMFALAIPYHHWTLKDHRIGFVVMYSFTFFFANFGPNATTFVVPAEIFPARLRSTCHGISAAAGKAGAMVGAFGFLYAAQPTDPTKTDAGYPPGIGVRNSLIVLGCVNFLGMLFTFLVPESNGKSLEDLSRENEGEEETVAEIRATSGRTVPV

SEQ ID NO: 11389 - protein, 538 aa, Lycopersicon esculentum
MANDLQVLNALDVAKTQLYHFTAIVIAGMGFFTDAYDLFCISMVTKLLGRLYYHHDGALKPGSLPPNVSAAVNGVAFCGTLAGQLFFGWLGDKMGRKKVYGMTLMIMVICSIASGLSFGHTPKGVMTTLCFFRFWLGFGIGGDYPLSATIMSEYANKKTRGAFIAAVFAMQGFGILAGGMVAIIVSAAFKGAFPAPAYEVDAIGSTVPQADFVWRIILMFGAIPAGLTYYWRMKMPETARYTALVAKNLKQAANDMSKVLQVEIEAEPEKVTAISEAKGANDFGLFTKEFLRRHGLHLLGTASTWFLLDIAFYSQNLFQKDIFSAIGWIPPAQTMNALEEVYKIARAQTLIALCSTVPGYWFTVAFIDKIGRFAIQLMGFFFMTVFMFALAIPYHHWTLKDHRIGFVVMYSFTFFFANFGPNATTFVVPAEIFPARLRSTCHGISAAAGKAGAMVGAFGFLYAAQPTDPTKTDAGYPPGHWCEELVDRPWLCNFLGMLFTFLVPESNGKSLEDLSRENEGEEETVAEIRATSGRTVPV

SEQ ID NO: 11390 - protein, 528 aa, Lycopersicon esculentum
MAVGDNDNNNLQVLNALDLAKTQLYHFTAIVIAGMGFFTDAYDLFSISLVTKLLGRLYYTKPDLLKPGTLPPAVSASVTGVALVGTLAGQLFFGWLGDKMGRKKVYGMTLVLMVVCSVASGLSFGSTPKGVMTTLCFFRFWLGFGIGGDYPLSATIMSEYANKKTRGAFIAAVFAMQGFGILFSGIVALITAAGFDHAYRSPTFEENAALSTVPQSDYIWRIILMFGSLPAALTYYWRMKMPETARYTALVAKDAKRAAQDMGKVLQVEIESEEAKIEQISRNETNQFGLFSWEFVRRHGLHLFGTCSTWFLLDIAFYSQNLFQKDVFSAVGWIPKAPTMNAVQEVYKIARAQTLIALCSTVPGYWFTVAFIDIIGRFAIQLMGFFFMTVFMFAIAIPYHHWTLEANRIGFIVMYSLTFFFANFGPNATTFVVPAEIFPARLRSTCHGISAAAGKAGAIVGAYGFLYAAQSKDPNKTDAGYPAGIGIKNSLIVLGCINALGMLCTFCVPEPKGKSLEEASQETITGEA

SEQ ID NO: 11391 - protein, 536 aa, Nicotiana tabacum
MAKDLQVLNALDVAKTQLYHFTAIVIAGMGFFTDAYDLFCISLVTKLLGRIYYHRDGALKPGSLPPNVSAAVNGVAFCGTLAGQLFFGWLGDKMGRKKVYGMTLMMMVICSIASGLSFGHTPKGVMTTLCFFRFWLGFGIGGDYPLSATIMSEYANKKTRGAFIAAVFAMQGFGILAGGMVAIIVSAAFKGAFPAPTYHADALASTVSQADFVWRIILMFGAIPAAMTYYWRMKMPETARYTALVAKNLKQAANDMSKVLQVEIEEEQEKVENVSQNTGNEFGLFSKEFLRRHGLHLLGTASTWFLLDIAFYSQNLFQKDIFSAIGWIPPAETMNALEEVYRIARAQTLIALCSTVPGYWFTVFFIDRIGRFAIQLMGFFFMTVFMFALAIPYHHWTLKDNRIGFVIMYSLTFFFANFGPNATTFVVPAEIFPARLRSTCHGISAAAGKAGAMIGAFGFLYAAQPTDPKKVDAGYPAGIGVRNSLIVLGCVNFLGMVFTFLVPESKGKSLEEMSRENEGEEESGTEMKNSGRTVPV

SEQ ID NO: 11392 - protein, 537 aa, Nicotiana tabacum
MAKDQLQVLNALDVAKTQLYHFTAIVIAGMGFFTDAYDLFCISLVTKLLGRIYYHHDGAPKPGTLPPNVSAAVNGVAFCGTLAGQLFFGWLGDKMGRKRVYGMTLMMMVICSIASGLSFGHTPKSVMTTLCFFRFWLGFGIGGDYPLSATIMSEYANKKTRGAFIAAVFAMQGFGILAGGMVAIIVSAAFKGAFPAQTYQTDPLGSTVSQADFVWRIILMFGAIPAAMTYYWRMKMPETARYTALVAKNLKQAANDMSKVLQVDIEEEQEKVENVSQNTRNEFGLFSKEFLRRHGLHLLGTASTWFLLDIAFYSQNLFQKDIFSAIGWIPPAQTMNALEEVYKIARAQTLIALCSTVPGYWFTVFFIDKIGRFAIQLMGFFFMTVFMFALAIPYHHWTLKDNRIGFVIMYSLTFFFANFGPNATTFVVPAEIFPARLRSTCHGISAAAGKAGAMIGAFGFLYAAQPTDRKKADAGYPAGIGVRNSLIVLGCVNFLGMVFTFLVPESKGKSLEEMSRENEGEEESGTEMKNSGRTVPV

SEQ ID NO: 11393 - protein, 537 aa, Nicotiana tabacum
MAKDQLQVLNALDVAKTQLYHFTAIVIAGMGFFTDAYDLFCISLVTKLLGRIYYHHDGAPKPGTLPPNVSAAVNGVAFCGTLAGQLFFGWLGDKMGRKRVYGMTLMMMVICSIASGLSFGHTPKSVMTTLCFFRFWLGFGIGGDYPLSATIMSEYANKKTRGAFIAAVFAMQGFGILAGGMVAIIVSAAFKGAFPAQTYQTDPLGSTISQADFVWRIILMFGAIPAAMTYYWRMKMPETARYTALVAKNLKQAANDMSKVLQVDIEEEQEKVENVSQNTRNEFGLFSKEFLRRHGLHLLGTASTWFLLDIAFYSQNLFQKDIFSAIGWIPPAQTMNALEEVYKIARAQTLIALCSTVPGYWFTVFFIDKIGRFAFQLMGFFFMTVFMFALAIPYHHWTLKDNRIGFVIMYSLTFFFANFGPNATTFVVPAEIFPARLRSTCHGISAAAGKAGAMIGAFGFLYAAQPTDRKKADAGYPAGIGVRNSLIVLGCVNFLGMVFTFLVPESKGKSLEEMSRENEGEEESGTEMKNSGRTVPV

SEQ ID NO: 11394 - protein, 523 aa, Nicotiana tabacum
MSADNNLQVLNALDVAKTQLYHFTTIVIAGMGFFTDAYDLFSISLVTKLLGRLYYTKPELLKPGTLPPTVSASVTGVALVGTLAGQLFFGWLGDKMGRKTVYGMTLIIMVLCSVASGLSFGSTPKGVMATLCFFRFWLGFGIGGDYPLSATIMSEYANKKTRGAFIAAVFAMQGFGILFSGIIALIVSAGFDHAYNVPSFQENPALSTVPQADYIWRIILMFGALPAGLTYYWRMKMPETARYTALVAKDAKRAAQDMGRVLQVEIDPEDAKIEQMSRDKTNKFGLFSWEFVRRHGLHLFGTTSTWFLLDIAFYSQNLFQKDVFSAIGWIPPAKTMNAVQEVYKIARAQTLIALLSTVPGYWFTVAFIDIVGRFAIQLMGFFFMTVFMFAIAIPYDHWTKKDNHIGFVAMYALTFFFANFGPNATTFVVPAEIFPARLRSTCHGISAAAGKAGAIVGAYGFLYAAQSKDPTKTDAGYPAGIGIKNSLIALGAINALGMVCTFCVPESKGKSLEEASQETITEE

SEQ ID NO: 11395 - protein, 523 aa, Nicotiana tabacum
MSADNNLQVLNALDVAKTQLYHFTTIVIAGMGFFTDAYDLFSISLVTKLLGRLYYTKSDLLKPGTLPPTVSASVTGVALVGTLAGQLFFGWLGDKMGRKTVYGMTLIIMVLCSVASGLSFGSTPKGVMATLCFFRFWLGFGIGGDYPLSATIMSEYANKKTRGAFIAAVFAMQGFGILFSGIIALIVSAGFDHAYNVPSFQENAALSTVPQADYIWRIILMFGALPAFLTYYWRMKMPETARYTALVAKDAKRAAQDMGRVLQVEIDPEDAKIEQMSRDETNKFGLFSWEFVCRHGLHLFGTCSTWFLLDIAFYSQNLFQKDVFSAVGWIPAAKTMNAVQEVYKIARAQTLIALLSTVPGYWFTVAFIDIVGRFAIQLMGFFFMTVFMFAIAIPYEHWTKKDNHIGFVAMYALTFFFANFGPNATTFVVPAEIFPARLRSTCHGISAAAGKAGAIVGAYGFLYAAQSKDPTKTDAGYPAGIGIKNSLLALGAINALGMVCTFCVPESKGKSLEEASQETITEE

SEQ ID NO: 11396 - protein, 540 aa, Solanum tuberosum
MANDLQVLNALDVAKTQLYHFTAIVIAGMGFFTDAYDLFCISMVTKLLGRIYYHHDNALKPGSLPPNVSAAVNGVAFCGTLAGQLFFGWLGDKMGRKKVYGMTLMIMVICSIASGLSFGHTPKSVMTTLCFFRFWLGFGIGGDYPLSATIMSEYANKKTRGAFIAAVFAMQGFGILAGGMVAIIVSSAFKGAFPAPAYEVDALASTVSQADFVWRIILMFGAIPAGLTYYWRMKMPETARYTALVAKNLKQAANDMSKVLQVEIEAEPEKVAAISVANGANEFGLFSKEFLRRHGLHLLGTASTWFLLDIAFYSQNLFQKDIFSAIGWIPPAQTMNALEEVYKIARAQTLIALCSTVPGYWFTVAFIDRIGRFAIQLMGFFFMTVFMFALALPYHHWTLKDNRIGFVVMYSLTFFFANFGPNATTFVVPAEIFPARLRSTCHGISAAAGKAGAMVGAFGFLYAAQPTDPKKTDAGYPAGIGVRNSLIVLGCVNFLGMLFTFLVPESKGKSLEEMSRENEGEEETVAEMRATSGRTVLFKF

SEQ ID NO: 11397 - protein, 540 aa, Solanum tuberosum
MANDLQVLNALDVAKTQLYHFTAIVIAGMGFFTDAYDLFCISMVTKLLGRIYYHHDNALKPGSLPPNVSAAVNGVAFCGTLAGQLFFGWLGDKMGRKKVYGMTLMIMVICSIASGLSFGHTPKSVMTTLCFFRFWLGFGIGGDYPLSATIMSEYANKKTRGAFIAAVFAMQGFGILAGGMVAIIVSSAFKGAFPAPAYEVDALASTVSQADFVWRIILMFGAIPAGLTYYWRMKMPETARYTALVAKNLKQAANDMSKVLQVEIEAEPEKVGAISEAKGANEFGLFSKEFLRRHGLHLLGTASTWFLLDIAFYSQNLFQKDIFSAIGWIPPAQTMNALEEVYKIARAQTLIALCSTVPGYWFTVAFIDRIGRFAIQLMGFFFMTVFMFALALPYHHWTLKDNRIGFVVMYSLTFFFANFGPNATTFVVPAEIFPARLRSTCHGISAAAGKAGAMVGAFGFLYAAQPTDPKKTDAGYPPGIGVRNSLIVLGCVNFLGMLFTFLVPESNGKSLEEMSRENEGEEETVAEMRATSGRTVLFKF

SEQ ID NO: 11398 - protein, 527 aa, Solanum tuberosum
MAVEDNNLQVLNALDLAKTQLYHFTAIIIAGMGFFTDAYDLFSISLVTKLLGRLYYTKPDLLKPGTLPPARVGLRHGCALVGTLAGQLFFGCARLAKMGRKKVYGMTLVLMVVCSVASGLSLGNTPKVVMTTLCFFRFWLGFGIGGDYPLSATIMSEYANKKTRGAFIAAVFAMQGFGILFSGIVALITAAGFDHAYKAPTFAENAAVSTVPQADYIWRIILMFGSLPAALTYYWRMKMPETARYTALVAKDAKRAAQDMGRVLQVEIESEEAKIEQISRDETNQFGLFSWEFVRRHGLHLFGTCSTWFLLDIAFYSQNLFQKDVFSAVGWIPKAPTMNAVQELYKIARAQTLIALCSTVPGYWFTVAFIDIIGRFAIQLMGFFFMTVFMFAIAIPYHHWTLEANRIGFIVMYSLTFFFANFGPNATTFVVPAEIFPARLRSTCHGISAAAGKAGAIVGAYGFLYAAQSKDPMKTDAGYPAGIGIKNSLIVLGFINALGMVCTFCVPESKGKSLEEASQETISTGEA

SEQ ID NO: 11399 - protein, 520 aa, Amanita muscaria
MPPAATGNGGIDPKNKFTGIAMTAFSAFGGILYGYDTGIISGILAMDDFKRTFGQQASDGTCSLPLSSQSLFVSILSAGTFVGALFGAPMGDIIGRKWGIVIAAAIFSIGIALQTASVTAAPFVVGRVFAGLGVGLVSCLVPMYQSECSPKWIRGAVVSLYQWAITIGILLAAVINNATQGRSNHSAYQIPISIQFVWAFILGFGMMLLPESPRFLVRQGRDEDAALSLSRLTRLSPDDPVVRNELAEIRTNFEAELALGESSYLDCFRPSHNKILLRTLTGIFIQAWQQLTGINFIFYYGTQYFQNAGINQAFLITIATGIVNVFMTLPGLYGVERYGRRSLLLIGALGMTICEFIVAIVGVTIPASNLAGQRVLIAFVCIYIAFFASTWGPMLWVIVGEIFPLQVRAKGISLSVASNWLWNFGIAFATPYLVNTQAGSAGLGSKVFFIWGTTCACCLVFTYFCVPETKGLSLEQIDEMYQEVMPLKSYQYRRRLAIEGGFRTEKADIIHEETAEKESG

SEQ ID NO: 11400 - protein, 50 aa, Thinopyrum elongatum
VAFIDIIGRFWIQLMGFTMMTIFMLAIAIPYDYLVKPGHHTGFVVLYGLT

SEQ ID NO: 11401 - protein, 50 aa, Thinopyrum elongatum
VAFIDIIGRFWIQLIGFTMMTIFMLAIAIPYDYLVKPGHHTGFVVLYGLT

SEQ ID NO: 11402 - protein, 448 aa, Acinetobacter sp. ADP1
MQRDILSEINQNNMSRYQWFVIVVCVCLNIIDGFDVMVMAFTAPSVSAEWSLSGAQIGLLLSAGLFGMAAGSIFLAPLADKIGRRLLILICLAIAGISMLACGLVHSHSMLAALRFVTGIGVGGILASSNVLASEYANLRWRSLAVSLMSTGYGIGATLGGILSLLLIEHLGWRSIFLAGGVTTVVMLLVSLWLLPESLDYLLAKKPKQALEKINLTVQRIGLVRLNALPQHEKNTQQHSSDIAKLFQGKQGFQTLCLWFAFFLVMFGFYFVMSWTPKILIAMGMSPSQGVTTGILISIGGVFGAAIIGLLASRIKIFHALSLFLGLTAVCVWLFVAVSSQVSIALMVGLLLGTLINGCVAGLYSISPTIYDADIRSRGVGYAIGFGRIGAILSPTVAGIFLDKGLAPSTLYAYYGIVFILAIFLILSLSKAFYRQKEGLGSSIKTVA

SEQ ID NO: 11403 - protein, 460 aa, Ferroplasma acidarmanus
MGYNALDNARINSLHKKITALSVGGTFLDGYDISIISVALIVMSKTAFGLDTDFGKAMIAASTTIGMLVGAILFGYITDLYGRRTMYMYDMALFIVLTAAEAFSWSFASLFIMRFILGLGLGADYAIGTTIIGEFSPVKYRGKLLVTNVLSWFLGAAVAAVTGYLLLPLGNESWRYMFLLGIIPAAIILVLRRDVPESPRWLSNKGNASEAEDIERRLTGTSDNLTAIKRDNKNPLKELLSRKYIKSLLFVGIFWFTFDAAFYGISIFSPTILELLGLKARLAVLGSAVFDTFAIIGSLIAILLIDRIGRKGITIIGFSGMVISLLSLGIITFYVPDRSAFITDGILIFALFLIFYITEAIGPGSTDFVYPVELFPTEDRASAQGFGTSVSRIGAILGITTFPFIVSIYGFSTSLFFFTGLSVIGLLATIFLATETKGKTLEQVNEIEEGKISKFKAGAK

SEQ ID NO: 11404 - protein, 447 aa, Ferroplasma acidarmanus
MLSVHKRIDELPVSPILLKITLLSSMGIFMDGYVLSIYSIAILYMRDYFHLVSGTPFYVYYIAFMGSSLFIGMFFGSIILGNLSDKYGRKKIYEYDLIITMVFLIMSGISTNILEFIIFEILAGVGIGADYPISSSIQAEFSPKNKRGKFLVFNIFSWTIGGIVLLLVAIPVILYIPAAINWRILYLTGAIIPFFVILSRRNLPESPFWLTGKGRDSEALKSSNYLGKSAGMEVDELPVVESGNSKIRDLFSKKYLYYTIFVSVAWFSYDVSSYGVWEYTPSAFAYSNSNIVMVVLATLLEELPVFIGFLICMYYVEKTGRKSLELIGFGGAAVSLIIFAAVSNFIALGILLTFFSFATMHLFHNMGPTNLTYDYPVEIFPTRIRGTAMGFATSVSRIGAIVGTIAFPIILFTLPFTFVLIFLVVFEVIGFSITFLLAPETKGKSLN

SEQ ID NO: 11405 - protein, 442 aa, Ferroplasma acidarmanus
MNSYKTISDAPSSPFLRKITVLSSMGVMMDGYTLTVFSYALLYLINVMSLKSYEISIMGISSIGGVLIGSFISGYIADIYGRRFIYIYDLFLVSIFIFLTGLATNYINFSILELIVGIGIGADYPVSSSIQAEFSPTKSRGKFMFFNIFSFSIGSLIFLGFAVPLVLFTGVNAWRYMYMIGAVFPILVLYSRKKIPESPYWVQHKYGKVAGEEAKDKFEASTGYSIENLPEISPGKTRLRDVFKGKYAAYIIFISIAWFSYDIVSYGIWTYSPLIFSTEITSYYADLYVVFTGMAESIPVVIGFLIAIYYVDRIGRRFLLIIGFLGSFAVLILFFFVNQYMVVGLLMTFSAFGFVHFFHNVGPSPITYTYPVEIFPTRIRGTAMGFATSVSRIGSIVAVFSFPIIDALYGLKAIIIFFAIFEFIGLALTLKYAPETKGKALT

SEQ ID NO: 11406 - protein, 112 aa, Bartonella sp. MM5136CA
ANEACLKMLQEIGSIERIPEFIARAKDKNDPFRLMGFGHRVYKNYDPRAKIMQKTCHEVLKELNIQDDPLLDIAIELEKIALSDEYFIEKKLYPNVDFYSGITLKALGFPTE

SEQ ID NO: 11407 - protein, 112 aa, Bartonella sp. RN10149MD
ANEACLKMLQEIGSIKRIPEFIARAKDKNDPFRLMGFGHRVYKNYDPRAKILQKTCHEVLKELNIQDDPLLDIAIELEKIALNDEYFIEKKLYPNVDFYSGITLKALGFPTE

SEQ ID NO: 11408 - protein, 112 aa, Bartonella sp. RN10616LA
ANEACLKMLQEIGSIQRIPEFIARAKDKNDPFRLMGFGHRVYKNYDPRAKIMQKTCHEVLKELNIQDDPLLDIAIELEKIALSDEYFIEKKLYPNVDFYSGIILKALGFPTE

SEQ ID NO: 11409 - protein, 112 aa, Bartonella sp. RN10627LA
ANEACLKMLQEIGSIKRIPEFIARAKDKNDPCRLMGFGHRVYKNYDPRAKIMQKTCHEVLKELNIQDDPLLDIAIELEKIALSDEYFIEKKLYPNVDFYSGITLKALGFPTE

SEQ ID NO: 11410 - protein, 429 aa, Streptomyces coelicolor A3(2)
MSDNSVVLRYGDGEYTYPVIDSTVGDKGFDIGKLRAQTGLVTLDSGYGNTAAYKSAITYLDGEAGILRYRGYPIEQLAERSSFVEVAYLLINGELPTVDELSAFKGEITQHTLLHEDVKNFYKGFPRDAHPMAMLSSVVSALSTFYQDSHNPFDERQRNLSTIRLLAKLPTIAAYAYKKSIGHPFVYPANNLGYVENFLRMTFSVPAQEYELDPTVVAALDKLLILHADHEQNCSTSTVRLVGSSQANMFASISAGINALWGPLHGGANQSVLEMLEGIRDAGGDVDSFIRKVKNKEDGVRLMGFGHRVYKNFDPRAKIIKAAAHDVLSALGKSDELLDIALKLEEHALSDDYFVSRSLYPNVDFYTGLIYRAMGFPTEMFTVLFALGRLPGWIAQWHEMIKEPGSRIGRPRQIYTGVVERDFVPVEER

SEQ ID NO: 11411 - protein, 390 aa, Streptomyces coelicolor A3(2)
MSVNRTAAAATPVEVPRGLAGVVVADTEVGDVRGLEGFYHYRQYSAVELARSRGFEDVWHLLVHGELPDARTGAAFAAETAALRRLPDAVRAALPAIAEAGAGSGPLAGMRTGLSLLGAALGFRPVYDLSVDQRRQDTLVAAAAVPTLLTALHRLGRGLEPVEPREDLSYAANYLYMLTGQEPDEACTRAIEQYLISTIDHGFNASTFTARVIASTGADVAACLAGAVSALSGPLHGGAPSRALDTLDAIGTPDRIDAWIRERVLAGDRIMGFGHAVYRTEDPRSRMLREVAQSFGGPRVEFAVEVERQVEAILAELKPGRELHTNVEFYAGVVMELCGLPREMFTPTFAAARVVGWSANILEQASDSKIIRPAARYVGPGAPVGVPAVA

SEQ ID NO: 11412 - protein, 387 aa, Streptomyces coelicolor A3(2)
MEAPHRLRTGRRTPLITRSRLMSDFVPGLEGVVAFETEIAEPDKEGGALRYRGVDIEDLVGHVSFGNVWGLLVDGAFNPGLPPAEPFPIPVHSGDIRVDVQSALAMLAPAWGLKPLLDIDAAQARDDLARAAVMALSYVAQSARGQSLPMVPQREIDKAQSVVERFMIRWRGEPDPKHVAAVDAYWTSAAEHGMNASTFTARVIASTGADVAAALSGAVGAMSGPLHGGAPSRVLHMIEEIERTGDAEAYVKKTLDAGERLMGFGHRVYRAEDPRARVLRRTARELGAPRYEVAEALEKAALAELHARRPDRVLATNVEFWAAIMLDFAEVPAPMFTSMFTCARTAGWSAHILEQKRTGRLVRPSARYTGPGTRDPREIEGYADIAG

SEQ ID NO: 11413 - protein, 421 aa, Streptomyces coelicolor A3(2)
MRDHEPDHPADSERRLTTREAAELLGVKPETVYAYVSRGQLGSRRAPGSRGSTFDADEVRALARRNRRDGGINPAPAAGQELTVRTRLTLIENDRFSYRGVDAVELAARHTYEEVAEWLWTGELRPGAAFSAPESSVAVARRAVDALPEHAGPADRLRVAAIAAAVTDPLRFDLSEEAVLGTARVLIPTLVAALPPVLRDGHDRDPIARRLWTRLSGQEPDEPTLQALDTALGLLVDHDLAASTLAVRVAASARAHAYAAVSAGLGVIEGPLHGAAGGLAHRMLLEVLELGSAAPVVAEELRAGRRIPGLGHRLYPGEDPRARALFALLEDVPRAAPAIAAARDVQATAARHTPLHANVDLALAVLTVSSGMASTAAETIFAVARTAGWIAHALEEYGERPLRMRPSGLYSGPRPPRPLPE

SEQ ID NO: 11414 - protein, 464 aa, Mus musculus
MALLTAATRLLGAKNSSCLVLAARHASASSTNLKDVLSNLIPKEQARIKTFKQQHGKTVVGQITVDMMYGGMRGMKGLVYETSVLDPDEGIRFRGYSIPECQKMLPKAKGGEEPLPEGLFWLLVTGQMPTEEQVSWLSREWAKRAALPSHVVTMLDNFPTNLHPMSQLSAAITALNSESNFARAYAEGMNRAKYWELIYEDCMDLIAKLPCVAAKIYRNLYREGSSIGAIDSRLDWSHNFTNMLGYTDPQFTELMRLYLTIHSDHEGGNVSAHTSHLVGSALSDPYLSFAAAMNGLAGPLHGLANQEVLVWLTQLQKEVGKDVSDEKLRDYIWNTLNSGRVVPGYGHAVLRKTDPRYSCQREFALKHLPKDPMFKLVAQLYKIVPNILLEQGKAKNPWPNVDAHSGVLLQYYGMTEMNYYTVLFGVSRALGVLAQLIWSRALGFPLERPKSMSTDGLMKFVDSK

SEQ ID NO: 11415 - protein, 466 aa, Mus musculus
MALLTAAAWFLGTKNPPCLVLAARHASASSTNLKDVLRNLIPKEQARIKTFRKKHGKTVVGQITVDMMYGGMRGMKGLVYETSVLDPDEGIRFRGYSIPECQKLLPKAKGGKEPLPEGLFWLLVTGQMPTEEQVSWLSQEWVKRAALPSHVVTMLDNFPTKLHPMSQLSAAITVLNNESNFARAYAQGMNRTKYWELTYEDCMDLLAKLPCVAAKIYRNLYREDRNIEAIDSKLDWSHNFTNMLGYTDPQFTELMRLYLTIHSDHEGGNVSAHTSHLVGSALSDPYLSFAAALNGLAGPLHGLANQEVLVWLTQLQKEVGEDASDEKLKNYIWNTLNSGRVVPGYGHAVLRKTDPRYSCQREFALKHLPKDPMFKLVGQLYKIVPDILLEQGKVKNPWPNVDAHSGVLLQYYGMREMNYYTVLFGVSRALGVLSQLIWSRALGFPLERPKSMSTDALMKFVNSESG

SEQ ID NO: 11416 - protein, 466 aa, Mus musculus
MALLTAAAWFLGTKNPPCLVLAARHASASSTNLKDVLRNLIPKEQARIKTFRKKHGKTVVGQITVDMMYGGMRGMKGLVYETSVLDPDEGIRFRGYSIPECQKLLPKAKGGKEPLPEGLFWLLVTGQMPTEEQVSWLSQEWVKRAALPSHVVTMLDNFPTKLHPMSQLSAAITVLNNESNFARAYAQGMNRTKYWELTYEDCMDLLAKLPCVAAKIYRNLYREDRNIEAIDSKLDWSHNFTNMLGYTDPQFTELMRLYLTIHSDHEGGNVSAHTSHLVGSALSDPYLSFAAALNGLAGPLHGLANQEVLVWLTQLQKEVGEDASDEKLKNYIWNTLNSGRVVPGYGHAVLRKTDPRYSCQREFALKHLPKDPMFKLVGQLYKIVPDILLEQGKAKNPWPNVDAHSGVLLQYYGMREMNYYTVLFGVSRALGVLSQLIWSRALGFPLERPKSMSTDALMKFVNSESG

SEQ ID NO: 11417 - protein, 466 aa, Rattus norvegicus
MALLTAAARLLGAKNSSCLVLAARHASASSTNLKDILSNLIPKEQARVKTFRQQHGKTVVGQITVDMMYGGMRGMKGLVYETSVLDPDEGIRFRGYSIPECQKLLPKAKGGEEPLPEGLFWLLVTGQMPTEEQVSWLSQEWAKRAALPSHVVTMLDNFPTNLHPMSQLSAAITALNSESNFARAYAEGINRTKYWELIYEDCMDLIAKLPCVAAKIYRNLYREGSSIGAIDSKLDWSHNFTNMLCYTEPQFTELMRLYLTIHSDHDGGNVSAHTSHLVGSALSDTYLSFAAAMNGLAGPLHGLANQEVLVWLTQLQKEVGKDVSDEKLRDYIWNTLNSGRVVPGYGHAVLRKTDPRYSCQREFALKHLPKDPMFKLVAQLYKIVPNILLEQGKAKNPWPNVDAHSGVLLQYYGMTEMNYYTVLFGVSRALGVLAQLIWSRALGFPLERPKSMSTDGLMKFVDSKSG

SEQ ID NO: 11418 - protein, 378 aa, Nostoc sp. PCC 7120
MMVCEYKPGLEGIPAAQSSISYVDGQKGILEYRGIRIEDLAQQSTFLETAYLLIWGELPTKEELQVFEEEVRLHRRIKYRIRDMMKCFPESGHPMDALQASAAALGLFYSRRDLHNPAYIRDAVVRLIATIPTMVAAFQLMRKGNDPVKPRDDLDYSANFLYMLNEKEPDALAAKIFDICLILHVEHTMNASTFSARVTASTLTDPYAVVASAVGTLGGPLHGGANEEVIQMLEEIGSVENVRSYVEERLQRKDKLMGFGHRVYKVKDPRATILQGLAEQLFAKFGADKYYDIAQEMERVVEEKLGHKGIYPNVDFYSGLVYRKMGIPTDLFTPIFAIARVAGWLAHWKEQLEENRIFRPTQVYNGKHSVTYTPIDQR

SEQ ID NO: 11419 - protein, 378 aa, Nostoc sp. PCC 7120
MMVCEYKPGLEGIPAAQSSISYVDGQKGILEYRGIRIEDLAQQSTFLETAYLLIWGELPTKEELQVFEEEVRLHRRIKYRIRDMMKCFPESGHPMDALQASAAALGLFYSRRDLHNRCYIRDAVVRLIATIPTMVAAFQLMRKGNDPVKPRDDLDYSANFLYMLNEKEPDALAAKIFDICLILHVEHTMNASTFSARVTASTLTDPYAVVASAVGTLGGPLHGGANEEVIQMLEEIGSVENVRSYVEERLQRKDKLMGFGHRVYKVKDPRATILQGLAEQLFAKFGADKYYDIAQEMERVVEEKLGHKGIYPNVDFYSGLVYRKMGIPTDLFTPIFAIARVAGWLAHWKEQLEENRIFRPTQVYNGKHSVTYTPIDQR

SEQ ID NO: 11420 - protein, 469 aa, Rhodobacter sphaeroides
MPRRPEPPPSPSVRAPVRRGTGTYRPRAIPCGAGPNERGSSMTKSAKLTIGEKVIDLPIHSPTLGPDVVDIRKLYAEADVFTYDPGFTSTAACESTITYIDGDKGELFYRGYPIEQLADRSHYLEVCYLLLYGELPNAAQQADFEYRITRHTMLHEQIHYFFRGFRRDSHPMATMVGVVGAMSAFYHDSLDINDPWQREVAAIRMIAKLPTIAAMAYKYSIGQPFNYPQNHLDYAGNFLHMCFAVPAEPYTVNPVLAKAMDRIMMLHADHEQNASTSTVRLAGSSGANPFACIAAGIACLWGPAHGGANRACLEMLREIGTVDRIPEYIRRAKDKDDPFRLMGFGHRVYKNFDPRAKVMKESADEVLGLLGIENNPTLQVAKELERIALEDDYFVAKKLYPNVDFYSGIILDAMGFPTSMFTPIFAISRTVGWISQWKEMIGDPTQKIGRPRQLYKGETRRDYVDLRHR

SEQ ID NO: 11421 - protein, 434 aa, Rhodopseudomonas palustris
MDATTNNKTATLTVGNKNFDLPVLTGTVGPDVIDIGKLYAQTGMFTYDPGFTSTASCQSKITYIDGDAGVLEYRGYPIEQLAEKGDFLETCYLLLYGELPTKAQKEDFDYRVTRHNMVHEQMARFFQGFRRDAHPMAVMVASVGALAAFYHDSTDINDPTQRMVASIRMIAKVPTLAAMAYKYSVGQPFIYPKNTLSYAANFLRMCFATPCEEYVVNPVLANALDKIFTLHADHEQNASTSTVRIAGSSGANPFACIAAGIACLWGPAHGGANEAALAMLKEIGTVENIPDFIAKVKDKSSSVRLMGFGHRVYKNYDPRAKIMQQVCHEVLAETGHHGDPLLKVAMELEKIALSDQYFIDRKLYPNVDFYSGITLKAMGFPTDMFTVLFAVARTVGWISQWSEMIEDPQQKIGRPRQLFTGATTRNYVEIGKRG

SEQ ID NO: 11422 - protein, 291 aa, Rhodopseudomonas palustris
MDVMRSGVSSLGCVLPEAGDLNHPGARDIADRLLASFGSMLLYWYHFAHTGRRIEVETDDDSIGGHFLHLLHRIKPRESHVRAMHTSLNLYAEHEFNASTFTARCIAGTGADFYSAIAGAIGALRGPKHGGANEAAFEIQKRYATAEEAEADIRRRVAAKEVVIGFGHPVYTIADPRNRVIKEVARRLSVEAGSVKMFEIADRIEAVMHESKKMFANLDWFSAVSYHAMGVPTSLFTPLFVISRTAGWSAHIIEQRQDNKIIRPTANYVGPENRLFVPIEQRGHVPSSRHA

SEQ ID NO: 11423 - protein, 424 aa, Acinetobacter calcoaceticus subsp. anitratus
MSEATGKKAVLHLDGKEIELPIYSGTLGPDVIDVKDVLASGHFTFDPGFMATASCESKITFIDGDKGILLHRGYPIDQLATQADYLETCYLLLNGELPTAEQKVEFDAKVRAHTMVHDQVSRFFNGFRRDAHPMAIMVGVVGALSAFYHNNLDIEDINHREITAIRLIAKIPTLAAWSYKYTVGQPFIYPRNDLNYAENFLHMMFATPADRDYKVNPVLARAMDRIFTLHADHEQNASTSTVRLAGSTGANPYACISAGISALWGPAHGGANEAVLKMLDEIGSVENVAEFMEKVKRKEVKLMGFGHRVYKNFDPRAKVMKQTCDEVLEALGINDPQLALAMELERIALNDPYFVERKLYPNVDFYSGIILKAIGIPTEMFTVIFALARTVGWISHWLEMHSGPYKIGRPRQLYTGEVQRDIKR

SEQ ID NO: 11424 - protein, 433 aa, Rhodospirillum rubrum
MTDSKQTVTLVDNRSGKSYEFPILSGSTGPDVVDIRKFYTETGMFTYDPGYTSTGSCSSAVTYIDGDAGILLHRGYAIEDLAMHCDFTEVAYLLLRGELPTAPKKTEFEKIITYHTMVHEQLHKFYDGFRRDAHPMAVMCGVVGALSAFYHDSIDITDPIQRMIAQHRLVAKMPTIAAWAYKYSQGQPFMYPRNNLTYAENFLHMMFATPCEEYKVSPVLARAMDRILILHADHEQNASTSTVRLAGSSGANPFACIAAGIASLWGPAHGGANEAVLKMLTEIGSPDRVDDFVKKAKDKNDPFRLMGFGHRVYKNYDPRAKIMAATCHEVLDELGIVDEPLLEIAMRLEKIALEDEYFIEKKLYPNVDFYSGIIFRAIGIPTSMFTCLFALARTVGWISQWKEMIEDPDQKIGRPRQLYNGATKRDFLPMDKR

SEQ ID NO: 11425 - protein, 148 aa, Rhodospirillum rubrum
PDRVDDFVKKAKDKNDPFRLMGFGHRVYKNYDPRAKIMAATCHEVLDELGIVDEPLLEIAMRLEKIALEDEYFIEKKLYPNVDFYSGIIFRAIGIPTSMFTCLFALARTVGWISQWKEMIEDPDQKIGRPRQLYNGATKRDFLPMDKR

SEQ ID NO: 11426 - protein, 386 aa, Rhodospirillum rubrum
MTETTFKPKKSVALSGIAAGNTALCTVGRSGNDLHYRGYNILDIAETCEFEEIAHLLIHGGLPTAAQYASYKAKLKVSRGLPRSVKEALETIPAAAHPMDVMRSGVSALGCALPEAYDHHPVDARDIADRLIASLGSMLLYWYHYAHHGRRIEVETDEDSIGGHFLRLLHGKPPSDDFVQAMHTSLILYAEHEFNASTFTARVIAGTGSDMYSCISGAIGALRGPKHGGANEVAFGIQKRYASLQHAEEDIRRRVEAKEVVIGFGHPVYTTADPRNAVIKRVAKGLADEVRSHLQYDVAERIEQVMWDTKAMFPNLDWYSAVSYHLMGVPTSMFTPLFVIARTCGWAAHVIEQRQDNKIIRPSANYTGPENLAFVPMSARSDHVSM

SEQ ID NO: 11427 - protein, 113 aa, Rickettsia monacensis
ANEAVINMLKEIGSSENIPKYIAKAKDKNDPFRLMGFGHRVYKNYDPRAAVLKETCKEVLKELEQLENNPLLQIAIELEAIALKDEYFIERKLYPNVDFYSGIIYKAMGIPSQ

SEQ ID NO: 11428 - protein, 326 aa, Bartonella henselae subsp. arupensis
DGDKGILLYRGYPIEQLAEKGDFLESCYLLLYGELPTKQEKSDFDRCIMQHTMVHEQFARFFHGFRRDSHPMAVMVACLGAMSAFYHDSIDITDPQQRMIASVRLISKVPTLAAMAYKYSIGQAFVYPRNDLSYAANFLRMCFSVPCEEYKTNPVLTRAMDRIFILHADHEQNASTSTVRLAGSSGANPFACIAAGVACLWGPAHGGANEACLKMLQEIGSVKRIPEFIARAKDKNDPFRLMGFGHRVYKNYDPRAKIMQKTCHEVLKELNIQDDPLLDIAIELEKIALNDEYFVEKKLYPNVDFYSGITLKALGFPTEMFTVLFE

SEQ ID NO: 11429 - protein, 430 aa, Chloroflexus aurantiacus
MAMTRNTLTVTDNRTGKTYEIPIENNTIRATDLRQIKVSEDDFGLMSYDPAYLNTASCKSSITYIDGDKGILEYRGYPIEQLAEQSSYLEVAYLLLYGELPSKERLAWWEYRISRHLFLHNSLVELIQAFRYDAHPMGILISSVAAMSTLYPEAKNIHDPAVREKQIWRIIGQIPTIAAFAYRHRIGRPFNLPDSSLSYTANLLYMMDYMNQREYEVNPVLAKALDVLFILHADHEQNCSTSVMRSVGSSHADPYNALAAAAAALYGPLHGGANEAVLRMLQQIGHPKNVPAFIERVKKGEMRLMGFGHRVYKNYDPRAKIIRKIAHEVFAATAANPLLDVAMELERTALEDEYFISRKLYPNVDFYSGLIYQALRFPIEYFPFLFAIPRASGWLAQWIEMLEDPEQKITRPRQVYVGPQRRDYVPIDQR

SEQ ID NO: 11430 - protein, 95 aa, uncultured Bartonella wbs089
TSQTCSYSGMDRIFILHADHEQNASTSTVRLAGSSGANPFACIAAGVACLWGPAHGGANEACLKMLQEIGSVERIPEFIARAKDKNDPFRLMGFG

SEQ ID NO: 11431 - protein, 114 aa, Bartonella birtlesii
GGANEACLKMLQEIGSVKRIPEFIARAKDKNDPFRLMGFGHRVYKNYDPRAKIMQKTCHKVLKELNIQDDPLLDIAIELEKIALNDEYFVEKKLYPNVDFYSGITLKALGFQPK

SEQ ID NO: 11432 - protein, 373 aa, Sulfolobus tokodaii
MEIKKGLEDVYVKETEITYIDGELGRLYYRGYSIYDLAEFSNFEEVSYLILYGKLPNREELNWFQEKLREERYLPDFIIKFLREVRKDAQPMDILRTAVSLLGIEDSKNDERTDIKGIKLISKFPTIVANYARLRKGLDIIEPDPKLSHSENFLYMLYGDRPNEIKSKAMDVTLILHIDHEMNASTFASLVVASTFSDLYSSIVAGISALKGPLHGGANYEALKMFKEIGSPEKVNDYILNRLSNKQRIMGFGHRVYKTYDPRARILKQYAKLLAEKEGGEIYTLYQIAEKVEEIGIKYLGPKGIYPNVDFFSSIVFYSLGFEPDFFPAVFASARVVGWVAHIMEYIKDNKIIRPKAYYKGEIGKKYIPIDSR

SEQ ID NO: 11433 - protein, 378 aa, Sulfolobus tokodaii
MSVEVSRGLENVIIKTTGLTYIDGINGILRYRGYDINDLVNYASYEELIHLMLYGELPNRQQLNQIKGIINESFEVPEQVISTIFSMPRNCDAIGMMETAFGILASIYDPKWNRATNKELAVQIIAKTATITANIYRAKEGLKPKIPEPSESYAESFLAATFGKKPTQEEIKAMDASLILYTDHEVPASTTAALVASSTLSDMYSCIVAALAALKGPLHGGAAEEAFKQFVEIGSVENADKWFEEKIIKGKSRLMGFGHRVYKTYDPRAKIFKTLAKSFAEKNENVKKYYEIAERIEKLGVDTFGSKHIYPNTDFYSGIVFYALGFPIYMFTSLFALSRVLGWLAHIIEYVEEQHRLIRPRALYIGPEKREFKPIELR

SEQ ID NO: 11434 - protein, 113 aa, Rickettsia sp. 'midichlorii'
ANEAVINMLKEIGSSENIPKYIAKAKDKNDPFRLMGFGHRVYKNYDPRAAVLKETCKEVLKELGQLENNPLLQIAIELEAIALKDEYFIERKLYPNVDFYSGIIYKAMGIPSQ

SEQ ID NO: 11435 - protein, 410 aa, Rickettsia sp. IRS3
DSEFAELKIRGKIFKLPILKASIGEDVIDISRVSAEADCFTYDPGFMSTASCQSTITYIDGDKGILRHRGYDIKDLAEKSDFLEVAYLLIYGELPSSEQYNNFTKQVAHHSLVNERLHYLFQTFCSSSHPMAIMLAAVGSLSAFYPDLLNFKEADYELTAIRMIAKIPTIAAMSYKYSIGQPFIYPDNSLDFTENFLHMMFTTHCTKYKVNPIIKNALNKIFILHADHEQNASTSTVRIAGSSGANPFACISTGIASLWGPAHGGANEAVINMLKEIGSSENIPKYIAKAKDKNDPFRLMGFGHRVYKNYDPRAAVLKETCKEVLKELEQLENNPLLQIAIELEAIALKDEYFIERKLYPNVDFYSGIIYKAMGIPSQMFTVLFAIARTVGWMAQWKEMHEDPEQKISRP

SEQ ID NO: 11436 - protein, 411 aa, Rickettsia sp. DnS14
DSEFAELKIRGKIFKLPILKASIGEDVIDISRVSAEADCFTYDPGFMSTASCQSTITYIDGDKGILRHRGYDIKDLAEKSDFLEVAYLLIYGELPSGEQYNNFTKQVAHHSLVNERLHYLFQTFCSSSHPMAIMLAAVGSLSAFYPDLLNFKEADYELIAIRMIAKIPTIAAMSYKYSIGQPFIYPDNSLDFTENFLHMMFATPCTKYKVNPIIKNALNKIFILHADHEQNASTSTVRIAGSSGANPFACISTGIASLWGPAHGGANEAVINMLKEIGSSEYIPKYIAKAKDKNDPFRLMGFGHRVYKNYDPRAAVLKETCKEVLKELGQLDNNPLLQIAIELEAIALKDEYFIERKLYPNVDFYSGIIYKAMGIPSQMFTVLFAIARTIGWMAQWKEMHEDPEQKISRPR

SEQ ID NO: 11437 - protein, 411 aa, Rickettsia sp. DnS28
DSEFAELKIRGKIFKLPILKASIGEDVIDISRVSAEADCFTYDPGFMSTASCQSTITYIDGDKGILRHRGYDIKDLAEKSDFLEVAYLLIYGKLPSGEQYNNFTKQVAHHSLVNERLHYLFQTFCSSSHPMAIMLAAVGSLSAFYPDLLNFKEADYELIAIRMIAKIPTIAAMSYKYSIGQPFIYPDNSLDFTENFLHMMFATPCTKYKVNPIIKNALNKIFILHADHEQNASTSTVRIAGSSGANPFACISTGIASLWGPAHGGANEAVINMLKEIGSSKYIPKYIAKAKDKNDPFRLMGFGHRVYKNYDPRAAVLKETCKEVLKELGQLDNNPLLQIAIELEAIALKDEYFIERKLYPNVDFYSGIIYKAMGIPSQMFTVLFAIARTIGWMAQWKEMHEDPEQKISRPR

SEQ ID NO: 11438 - protein, 397 aa, Synechocystis sp. PCC 6803
MNYMMTDNEVFKEGLAGVPAAKSRVSHVDGTDGILEYRGIRIEELAKSSSFIEVAYLLIWGKLPTQAEIEEFEYEIRTHRRIKYHIRDMMKCFPETGHPMDALQTSAAALGLFYARRALDDPKYIRAAVVRLLAKIPTMVAAFHMIREGNDPIQPNDKLDYASNFLYMLTEKEPDPFAAKVFDVCLTLHAEHTMNASTFSARVTASTLTDPYAVVASAVGTLAGPLHGGANEEVLNMLEEIGSVENVRPYVEKCLANKQRIMGFGHRVYKVKDPRAIILQDLAEQLFAKMGHDEYYEIAVELEKVVEEYVGQKGIYPNVDFYSGLVYRKLDIPADLFTPLFAIARVAGWLAHWKEQLSVNKIYRPTQIYIGDHNLSYVPMTERVVSVARNEDPNAII

SEQ ID NO: 11439 - protein, 433 aa, Ralstonia metallidurans
MTPSDVKATLSFSDGSPSVELPIYKGTVGPDVIDIRKLYGQTGKFTYDPGFMSTASCNSKITYIDGDKGELLYRGYPIEQLAQKCDHLETCYLLLKGELPNAKQKEEFVNSVMNHTMVHEQLQFFLRGFRRDAHPMAVLTGLVGAMSAFYHDAMDIDDPHQREISAIRLIAKMPTLVAMAYKYTMGQPYIYPQNDLSYSGNFMRMMFATPCAPYTVNPVLERALDRIFILHADHEQNASTSTVRLAGSSGTNPFAAIAAGVACLWGPAHGGANEAALKMLEEIGSVDNIGEFIKQVKDKNSGVRLMGFGHRVYKNYDPRAKLMRETCYEVLNELGLHNDPLFKLAMELEKIALEDEYFVSRKLYPNVDFYSGIVQRALGIPTSLFTCIFALARTPGWISQWEEMITDPEYKIGRPRQLFNGAAAREVPDLAKR

SEQ ID NO: 11440 - protein, 453 aa, Ralstonia metallidurans
MSSRRSAARAPRRTWSTRCRRAPNCTIASATMTSSRSSTRSSHKARAADPAPTAMTARKHTKLNQETQMSEAQPLATPKPKKSVALSGIAAGNTALCTVGRSGNDLHYRGYDILDIADTCEFEEIAHLLVHGKLPTKSELAAYKVKLKALRGLPANVKAALEWVPASAHPMDVMRTGVSVLGTVLPEKDDHNTPGARDIADRLMASLGSMLLYWYHYSHNGRRIEVETDDDSIAAHFLHLLHGEAPSKLWERAMQTSLILYAEHEFNASTFACRVVAGTGSDMYSAICGGIGALRGPKHGGANEVAFEIQKRYDTPDEAEADIRRRVENKEVVIGFGHPVYTISDPRNVVIKEVARKLSKDAGSMKMFNIAERLETVMADAKKMFPNLDWFSAVSYHMMGVPTAMFTPLFVIARTSGWAAHVIEQRVDNKIIRPTANYTGPENLKFVPIEKRA

SEQ ID NO: 11441 - protein, 355 aa, male-killing Rickettsia from Adalia decempunctata
GFMSTASCRSTITYIDGDKGILRYRGYDIKDLAEKSDFLEVAYLLIYGELPSSEQYNNFTKKVAVHSLVNERLHYLFQTFCSSSHPMAIMLAAVGSLSAFYPDLLNFKEADYELTAIRMIAKIPTIAAMSYKYSIGQPFIYPDNSLDFTENFLHMMFATPCEKYKVNPIIKNALNKIFILHADHEQNASTSTVRIAGSSGANPFACVSTGIASLWGPAHGGANEAVINMLKEIGSSENIPKYIAKAKDKNDPFRLMGFGHRVYKNYDLRAAVLKETCKEVLKELGQLDGNPLLQIAIELEAIALKDEYFIERKLYPNVDFYSGIIYKAMGIPSQMFTVLFAIARTVGWMAQWKEM

SEQ ID NO: 11442 - protein, 412 aa, Rickettsia hulinii
ELKIRGKIFKLPILKASIGEDVIDISRVSAEADCFTYDPGFMSTASCQSTITYIDGDKGILRHRGYDIKDLAEKSDFLEVAYLLIYGELPSGEQYNNFTKQVAHHSLVNERLHYLFQTFCSSSHPMAIMLAAVGSLSAFYPDLLNFKEADYELTAIRMIAKIPTIAAMSYKYSIGQPFIYPDNSLDFTENFLHMMFATPYTKYTVNPIIKNALNKIFILHADHEQNASTSTVRIAGSSGANPFACISTGIASLWGPAHGGANEAVINMLKEIGSSEYIPKYIAKAKDKNDPFRLMGFGHRVYKNYDPRAAVLKETCKEVLKELGQLDNNPLLQIAIELEAIALKDEYFIERKLYPNVDFYSGIIYKAMGIPSQMFTVLFAIARTVGWMAQWKEMHEDPEQKISRPRQLYTGG

SEQ ID NO: 11443 - protein, 91 aa, Bartonella sp. 'cattle-1'
STEKIPEFIERAKDKNDPFRLMGFGHRVYKNYDPRAKLMQKTCHEVLKELNIQDDPLLDIAMELEKIALNDEYFIEKKLYPNVDFYSGITL

SEQ ID NO: 11444 - protein, 91 aa, Bartonella sp. 'deer-1'
SIEKIPEFIARAKNKNDPFRLMGFGHRVYKNYDPRAKLMQKTCHEVLKELNIQDDPLLDIAMELEKIALNDEYFIEKKLYPNVDFYSGITL

SEQ ID NO: 11445 - protein, 91 aa, Bartonella sp. 'deer-4'
SIEKIPEFIARAKDKNDSFRLMGFGHRVYKNYDPRAKLMQKTCHEVLKELNIQDDPLLDIAMELEKIALNDEYFIEKKLYPNVDFYSGITL

SEQ ID NO: 11446 - protein, 91 aa, Bartonella sp. 'deer-6'
SIEKIPEFIARAKDKNDPFRLMGFGHRVYKNYDPRAKLMQKTCHEVLKELNIKDDPLLDIAMELEKIALSDKYFIEKKLYPNVDFYSGITL

SEQ ID NO: 11447 - protein, 91 aa, Bartonella sp. 'elk-3'
SIEKIPEFIARAKDKNDSFRLMGFGHRVYKNYDPRAKLMQKTCHEVLKELNIKDDPLLDIAMELEKIALSDEYFIEKKLYPNVDFYSGITL

SEQ ID NO: 11448 - protein, 427 aa, Neisseria meningitidis MC58
MSKSIKLNVPGQAGLELPVLEASIGHDVVDIRGLTKNTGLFSFDPGFVSTASCESKITYIDGDQGLLYYRGYPIEQLAEKSDYLEVCYLLIYGELPTPEQKAEFDNTVRRHTMVHEQLTWFFRGFRRDAHPMAMMVGVVGALSAFYQDSLDISNPEHRKIAIYRLISKIPTIAAMCYRYSNGLPFNYPKNNLSYSENFLHMMFATPCEDYKPNPVLARALDRIFILHADHEQNASTSTVRLAGSSGANPFACIAAGIACLWGASHGGANEAVLKMLDEIGDVSNVAAYMEGVKQRKYRLMGFGHRVYRNMDPRASIMRETCYEVLKELGLEDSPKFKLAMELEQIALKDPFFIERKLYPNVDFYSGIVLSALGIPTEMFTVIFALSRSVGWISHWHEMISDPSLKIGRPRQLYTGSERRDYVPPGER

SEQ ID NO: 11449 - protein, 384 aa, Neisseria meningitidis MC58
MTETTQTPTLKPKKSVALSGVAAGNTALCTVGRTGNDLSYRGYDILDLAQKCEFEEVAHLLIHGHLPNKFELAAYKTKLKSMRGLPIRVIKVLESLPAHTHPMDVMRTGVSMLGCVHPERESHPESEARDIADKLIASLGSILLYWYQYSHNGKRIEVESDEETIGGHFLQLLHGKRPSESHIKAMHVSLILYAEHEFNASTFTARVIAGTGSDMYSSITGAIGALKGPKHGGANEVAYDIQKRYRNADEAEADIRERIGRKEIVIGFGHPVYTISDPRNVVIKEVARGLSKETGDMRLFDIAERLESVMWEEKKMFPNLDWFSAVSYQKLGVPTAMFTPLFVISRTTGWSAHVLEQRKDGKIIRPSANYTGPEDLAFVEIEER

SEQ ID NO: 11450 - protein, 411 aa, Deinococcus radiodurans
MCPARSHLFVTPAGTFDRPFFAPWKKGRCYPLLTMSNIAKGLEGVLFTESKLTFINGSEGILTHLGIPIQEWAEKSTFEELSLALLDAKLPTAEELAKFDAELKANRAIPDQLVGIIRDMPKGVHPMQALRTAVSYLGLLDPQAEDITPEARRAISTRMIAQFSTIIAAINRAQEGQDIVAPRADLTHAGNFLYMLTGNEPTPEQARLFDIALVLHADHGMNASTFTAIATSSTLSDMYSCMVSAIGALKGPLHGGANEAVMTMLDEIGTVDKAEAYITGKLDNKEKIMGVGHRVYKYFDPRSRVLRDYAEHVANKEGKSNYYQILEAIEKIIVDRMGAKGIYPNVDFYSGTVYSDLGIKKEYFTPIFALARISGWCASVIEYSQDNRLLRPDAEYTGARDQHYVDIKDRQ

SEQ ID NO: 11451 - protein, 372 aa, Streptococcus mutans
MAETNGLKDMIACDTRISAIKDNKLSYAGYDIADLMDNKTRFEEVIYLLWNLHLPTAIELKQFEEKLRKNYAISDAIEQCILIQSRQHLHPMSVLRSTVSLLGVYNLKAEERSVEATYDQSIQLMAKIPTIIATFARLRQGLSPIAPRKDLGFAANFLYMLNGRLPSELEILAMNRALVLHAEHELNASTFAARVCASTLSDIYSCVTTAIGTLKGPLHGGANERVFDMLREIREYGDVDSYLQEKLNSKEKIMGFGHRVYQTQDPREKYLREMARELTKGTEHDIWYQLSKKVEMCMKQKKNLIPNVDFYSATVYHVLGIDSSIFTLIFAMSRVSGWIAHIQEQQKNNKLIRPRSHYTGMRKLRYIPIERR

SEQ ID NO: 11452 - protein, 413 aa, Rickettsia heilongjiangii
IAELKIRGKIFKLPILKASIGEDVIDISRVSAEADCFTYDPGFMSTASCQSTITYIDGDKGILRHRGYDIKDLAEKSDFLKVAYLLIYGELPSGEQYNNFTKQVAHHSLVNERLHYLFQTFCSSSHPMAIMLAAVGSLSAFYPDLLNFKEADYELTAIRMIAKIPTIAAMSYKYSIGQPFIYPDNSLDFTENFLHMMFATPYTKYTVNPIIKNALNKIFILHADHEQNASTSTVRIAGSSGANPFACISTGIASLWGPAHGGANEAVINMLKEIGSSEYIPKYIAKAKDKNDPFRLMGFGHRVYKNYDPRAAVLKETCKEVLKELGQLDNNPLLQIAIELEAIALKDEYFIERKLYPNVDFYSGIIYKAMGIPSQMFTVLFAIARTVGWMAQWKEMHEDPEQKISRPRQLYTG

SEQ ID NO: 11453 - protein, 413 aa, Rickettsia sp. BJ-90
IAELKIRGKIFKLPILKASIGEDVIDISRVSAEADCFTYDPGFMSTASCQSTITYIDGDKGILRHRGYDIKDLAEKSDFLEVAYLLIYGELPSGEQYNNFTKQVAHHSLVNERLHYLFQTFCSSSHPMAIMLAAVGSLSAFYPDLLNFKEADYELTAIRMIAKIPTIAAMSYKYSIGQPFIYPDNSLDFTENFLHMMFATPCTKYTVNPIIKNALNKIFILHADHEQNASTSTVRIAGSSGANPFACISTGIASLWGPAHGGANEAVINMLKEIGSSEYIPKYIAKAKDKNDPFRLMGFGHRVYKNYDPRAAVLKETCKEVLKELGQLDNNPLLQIAIELEAIALKDEYFIERKLYPNVDFYSGIIYKAMGIPSQMFTVLFAIARTVGWMAQWKEMHEDPEQKISRPRQLYTG

SEQ ID NO: 11454 - protein, 433 aa, Burkholderia fungorum
MTPSDVKATLSFSDNSPSVEMPIYKGTLGPDVIDIRKLYGQTGKFTYDPGFMSTAACNSAITYIDGDKGELLYRGYPIDNLAENADFLETCYLLLKGELPNAQQNAEFVKTVTNHTMVHEQMHFFFRGFRRDAHPMAILVAAVGALSAFYHDSLDINNPRHREVSAIRMIAKLPTLVAMAYKYSIGQPFAYPKNDLSYSANFMHMMFSNPCEEYKVNDVLVRALDRILILHADHEQNASTSTVRLAGSSGANPFACIAAGIACLWGPAHGGANEAALNMLEEIGSVDNIPEFIKQVKDKNSGVKLMGFGHRVYKNYDPRAKLMRETCHEVLEELGLHDDPLFKLAMALEKIALEDEYFVSRKLYPNVDFYSGIVQRALGIPTSMFTCIFAMARTVGWIAQWNEMIADPEQKIGRPRQLFIGDTQREAKPIAQR

SEQ ID NO: 11455 - protein, 432 aa, Burkholderia fungorum
MNSKTHATLSFSDSDQTIDLPIYQGALGPDVIDIRKLYGQTGKFTYDPGFMSTAACNSAITYIDGDKGELLYRGYPIDNLAQNADFLETCYLLLKGELPNAQQKEEFVKTVTQHTMVHDQMHFFFRGFRRDAHPMAILVAAVGALSAFYHDSLDISNPEHREISAIRMIAKLPTLVAMAYKYTVGQPFVYPKNDLSYSANFMRMMFANPAEEYKVNDVLVRALDRILILHADHEQNASTSTVRLAGSSGANPFACIAAGIACLWGPAHGGANEAALNMLEEIGSVDNIPEFIAQVKDKNSGVKLMGFGHRVYKNYDPRAKLMRETCHEVLEELGLHDDPLFKLAMALEKIALEDDYFVSRKLYPNVDFYSGIVQRALGIPTAMFTCIFAMARTVGWIAQWNEMIADPEQKIGRPRQLFVGETQREAKPLAKR

SEQ ID NO: 11456 - protein, 519 aa, Burkholderia fungorum
MKRSPRPPKSCWPRSPPNGVPRAITTRCMTARVIAITGLCYAARKPLAALFRKTRRRFSRKWALTCKPHHEHGRASGNRHGGAERRICTPSCNRSTESSDAADPPHRTCRSTRSNEQAQRRLREMSETTQTAGTPGGNEPKSGFKPKKSVALSGVTAGNTALCTVGKTGNDLHYRGYDILDIASACEFEEIAYLLVHEKLPTQAELTAYKTKLKALRGLPANVKAALEWIPAAAHPMDVMRTGVSVLGTVLPEKDDHNLPGARDIADRLMASLGSMLLYWYHYSHNGKRIEVETDDDSIGGHFLHLLHGVEPSNAWVDAMHVSLNLYAEHEFNASTFTGRVIAGTGSDIYSALTGAIGALRGPKHGGANEVAFEIQSRYQTPDEAEADIRRRVENKEVVIGFGHPVYTISDPRNKVIKEVAKKLSKEAGNTRLFSIAERLESVMWDAKKMFPNLDWFSAVSYHMMGVPTAMFTPLFVIARTAGWSAHIIEQRIDNKIIRPSANYTGPENLKYLPLNRRK

SEQ ID NO: 11457 - protein, 389 aa, Burkholderia fungorum
MSEADNSTPNTGAFKPKKSVALSGVTAGNTALCTVGKTGNDLHYRGYDILDIASACEFEEIAYLLVHEKLPTQAELTAYKTKLKALRGLPANVKAALEWIPAAAHPMDVMRTGVSVLGTVLPEKDDHNLPGARDIADRLMASLGSMLLYWYHYSHNGKRIEVETDDDSIGGHFLHLLHGVEPSNAWVDAMHVSLNLYAEHEFNASTFTGRVIAGTGSDIYSALTGAIGALRGPKHGGANEVAFEIQSRYQTPDEAEADIRRRVENKEVVIGFGHPVYTISDPRNKVIKEVAKKLSKEAGNTRLFSIAERLESVMWDAKKMFPNLDWFSAVSYHMMGVPTAMFTPLFVIARTAGWSAHIIEQRIDNKIIRPSANYTGPDDLPFVPLAKRV

SEQ ID NO: 11458 - protein, 545 aa, Burkholderia fungorum
MSTSNSLTAAEAAAALGISLPTLYAYVSRGMLSSSPDAQGKHRLYDAGEVRRLARRKEDGKRAGKVAQKVLDWGVPVLESSITLVAEGRLLYRGHDAMDLAQSASLEEIAALLWECSARRIADAPAVPFATAQWAAWLKLWSDSTPLDRALVLLPAAAAQMPRVWALGRDAQLDTACAVMRLLAAAMISAAPSNEPLHRQLASTWRVRNRQQANVLRAALVACADHELNASTFTVRCITSTGAHLFGAVAGGLAALSGPRHGGETVRVGALLEEASRAPDLDRYLANRLARHEHGAHGPILSGFGHPLYQEGDPRARLLLGMLADCAPARSPLAEVLGLARAVRDTTGAEPTVDFALAAIERVLALPAGAAFTLFAVGRTVGWIAHAMEQTRDGRLIRPRARYIGEYEATGRAWGTAQTRHRFGERSGHTQPARQPAQRRHARRRLRGATQGAASQRKTRPGLSRTDPRHRAARQFDRLAGSEPVILAVAFDRQPDFARDHLEDGRTRDTPGRRGLAMFQFENPHFTHRLSPSKNFSVVPIIDVR

SEQ ID NO: 11459 - protein, 441 aa, Lactococcus lactis subsp. lactis
MNLLSKEEKMIKNSQIPSEFYKKYNVKKGLRDINGKGVLAGLTNISAIHSFDKEGNQIPGILEYRAYNIKDIINDLRKENRFGFEEMTYLLLFGELPTANELQEFQNLLASRRTLPEFFIRETILTNPSSDVMNSMSRCILALASYDEKVSDISIENVLEQSFGLIADFPLLAIYSYQSYVHYFKKESLYIHYPDPKMTTAENILRMLRPDCHYTEVEAKVLDIALILHMEHGGGNNSTFTTHVVTSSGTDTYATIAAALSSLKGPKHGGANIKAAKMLENIKENISNYEDDAEIEKYLHKILNKEVFDKQGLIYGIGHAIYSLSDPRFEVFKSYVETLVKEKGLEEEFKLYEKVARLAPKVISENRKIYKTICPNVDFYSGFVYRILEIPQELFTPLFAIARIVGWLAHRIEELINMNKIIRPAYESVLESKNYIKLGER

SEQ ID NO: 11460 - protein, 441 aa, Lactococcus lactis subsp. lactis
MNLMNKEEKMIKNSQIPSEFYKKYNVKKGLRDINGKGVLAGLTNISAIHSFDKEGNQIPGVLEYRAYNIKDIVSDLRSKNRFGFEEMTYLLLFGELPSAKELQEFQILLASKRTLPEFFVRETILTNPSSDVMNSMSRCLLALASYDKKASDISIENVLEQSLALIADFPLLAIYSYQAYIHYFKKESLYIHFPDPELTTAENILRMLRPDCHYSDMEAKVLDIALILHMEHGGGNNSTFTTHVVTSSGTDTYATIAAALSSLKGPKHGGANIKAAKMLENIKENISDYNNDEEIKKYLHQILNKEVFDKQGLIYGIGHAIYSVSDPRFEVFKSYVESLAKEKGLEEEFKLYEKVAFLAPKVISENRKIYKTICPNVDFYSGFVYKILEIPQELFTPLFAIARIVGWLAHRMEELINMNKIIRPAYESILESKAYTRLEER

SEQ ID NO: 11461 - protein, 373 aa, Bacillus coagulans
MVNTNQFIPGLEGVIASETKISFLDTVNSEIVIKGYDLLALSKTKGYLDIVHLLLEGTIPNEAEKQHLEETLKQEYDVPDEIIQVLSLLPKTAHPMDALRTGVSVLASFDTELLNREHSTNLKRAYQLLGKIPNIVANSYHILHSEEPVQPLQDLSYSANFLYMITGKKPTELEEKIFDRSLVLYSEHELPNSTFTARVIASTLSDLYGALTGAVASLKGHLHGGANEAVMEMLQDAQTVEGFKHLLHDKLSKKEKIMGFGHRVYMKKMDPRAAMMKEALKELSAVNGDDLLLQMCEAGEQIMREEKGLFPNLDYYAAPVYWKLGIPIPLYTPIFFSSRTVGLCAHVMEQHENNRIFRPRVLYTGARNLRVED

SEQ ID NO: 11462 - protein, 411 aa, Rickettsia sp. A-167
DSEFAELKIRGKIFKLPILKASIGEDVIDISRVSAEADCFTYDPGFMSTASCQSTITYIDGDKGILRHRGYDIKDLAEKSDFLEVAYLLIYGELPSGEQYNNFTKQVAHHSLVNERLHYLFQTFCSSSHPMAIMLAAVGSLSAFYPDLLNFKEADYELTAIRMIAKIPTIAAMSYKYSIGQPFIYPDNPLDFTENFLHMMFATPCTKYTVNPIIKNALNKIFILHADHEQNASTSTVRIAGSSGANPFACISTGIASLWGPAHGGANEAVINMLKEIGSSEYIPKYIAKAKDKNDPFRLMGFGHRVYKNYDPRAAVLKETCKEVLKALGQLDNNPLLQIAIELEAIALKDEYFIERKLYPNVDFYSGIIYKAMGIPSQMFTVLFAIARTVGWMAQWKEMHEDPEQKISRPR

SEQ ID NO: 11463 - protein, 372 aa, Bacillus subtilis
MTATRGLEGVVATTSSVSSIIDDTLTYVGYDIDDLTENRSFEEIIYLLWHLRLPNKKELEELKQQLAKEAAVPQEIIEHFKSYSLENVHPMAALRTAISLLGLLDSEADTMNPEANYRKAIRLQAKVPGLVAAFSRIRKGLEPVEPREDYGIAENFLYTLNGEEPSPIEVEAFNKALILHADHELNASTFTARVCVATLSDIYSGITAAIGALKGPLHGGANEGVMKMLTEIGEVENAEPYIRAKLEKKEKIMGFGHRVYKHGDPRANDLKEMSKRLTNLTGESKWYEMSIRIEDIVTSEKKLPPNVDFYSASVYHSLGIDHDLFTPIFAVRRMSGWLAHILEQYDNNRLIRPRADYTGPDKQKFVPIEERA

SEQ ID NO: 11464 - protein, 372 aa, Bacillus methanolicus
MTVTRGLEGVVATTSSISSIIDDTLTYVGYNIDDLADNASFEEVIFLLWHRKLPTKSELEELKILLAENAELPKEILDHFKMYPIDKVHPMAALRSAVSLLGLYDEEADLMDEEANYRKAIRLQAKIPSIVAAFARVRKGLEPVAPRKDLSFAANFLYMLKGKEPEDIAVEAFNKVLVLHADHELNASTFTARVCVATLSDIYSGVTAAIGALKGPLHGGANEAVMKMLTEIGSLENVEPYIREKLAKKEKIMGFGHRVYRKGDPRAKHLREMSKKLTELTGEPHWYEMSTKIEAIVTGEKGLPPNVDFYSASIYHSLGIDHDLFTPIFAVSRISGWLAHILEQYENNRLIRPRADYIGPGMQKFIPIEQRG

SEQ ID NO: 11465 - protein, 404 aa, Rickettsia sp. California 2
KIRGKIFRLPILKASIGEDVIDISRVSSEADCFTYDPGFMSTASCQSTITYIDGDKGILRHRGYDIKDLAEKSDFLEVAYLLIYGELPSIEQYNNFTKQVAHHSLVNERLHYLFQTFCSSSHPMAIMLAAVGSLSAFYPDLLNFKEADYELTAIRMIAKIPTIAAMSYKYSIGQPFIYPDNSLDFTENFLHMMFATPCTKYKVNPIIKNALNKIFILHADHEQNASTSTVRIAGSSGANPFACVSTGIASLWGPAHGGANEAVINMLKEIGSSENIPKYIAKAKDKNDPFRLMGFGHRVYKNYDPRAAVLKETCKEVLKELGQLENNPLLQIAIELEAIALKDEYFIERKLYPNVDFYSGIIYKAMGIPSQMFTVLFAIARTVGWMAQWKEMHEDPEQKISRPR

SEQ ID NO: 11466 - protein, 105 aa, Rickettsia sp. RAv1
GQPFIYPNNSLDFTENFLHMMFATPCTKYTVNPIIKNALNKIFILHADHEQNASTSTVRIAGSTGANPFACISTGIASLWGPAHGGANEAVINMLKEIGSSEYIP

SEQ ID NO: 11467 - protein, 105 aa, Rickettsia sp. RAv3
GQPFIYPNNSLDFTENFLHMMFATPCTKYTVNPIIKNALNKIFILHADHEQNASTSTVRIAGSSGANPFACISTGIASLWGPAHGGANEAVINMLKEIGSSEYIP

SEQ ID NO: 11468 - protein, 105 aa, Rickettsia sp. RAv9
GQPFIYPNNSLDFTENFLHMMFATPCTKYTVNPIIKNALNKIFILHADHEQNASTSTVRIAGSSGANPFASISTGIASLWGPAHGGANEAVINMLKEIGSSEYIP

SEQ ID NO: 11469 - protein, 396 aa, Ehrlichia sp. EHt224
KVKLPVLCDTNGNKVVDITSLYKSTGILTYDPGFMSTAACESKITFIDGSKGILCYRGYNIADLVNSNKSFIEIVYLLFYGSFPSVDDFKDFMLQISQEYMPPKMICDVIKSFSQDAHPMTILMACFSGLASYYNNQQHCENELKYARLAVSQIAGIIAMIYRHITDQDFIQANTELSYSENFIHMMFDISSYEFTKIVSKALDIIFILHADHEQNASTATVRLTGSTGANLFACLAAGAATLWGPAHGGANEAVINMLMEIEQPSNVKQFVQKVKDKNNGIRLMGFGHRVYKNYDPRAKIICEICKEVLKDLKVSHPLLEIALELENIALQDSYFIERNLYPNVDFYSGIVLKAIGIPVSMFTTLFALARTSGWSAQWYEMIKDKNYKICRPRQL

SEQ ID NO: 11470 - protein, 380 aa, Ehrlichia sp. ERm58
VDITCLYKDTGILTYDPGFMSTAACESRITFIDGNKGILRYRGYNIADLVNSNKSFIEIVYLLFYGVLPDANDLQNFVLQVSQEYMPIKIVNDIIKSFPRNSHPMAILISCFSGLASYYNNQRHNEDELKYARLAVSQIAGIVAMIYRHITDQDFIQANTELSYSENFIHMMFDISSYEFTKVVSKALDVIFILHADHEQNASTATVRLTGSTGANLFACLAAGAATLWGPAHGGANEAVINMLMEIEKPSNVKQFVQKVKDKNNGIRLMGFGHRVYKNYDPRAKIICEICKEVLNDLKTSHPLLEVALELESIALQDSYFIERSLYPNVDFYSGIVLKAIGIPVSMFTTLFALARTSGWSAQWYEMIKGRDYKICRPRQ

SEQ ID NO: 11471 - protein, 107 aa, Bartonella capreoli
GGANEACLKMLQEIGSIEKIPEFIARAKDKNDPFRLMGFGHRVYKNYDPRAKLMQKTCHEVLKELNIKDDPLLDIAMELEKIALSDEYFIEKKLYPNVDFYSGITLK

SEQ ID NO: 11472 - protein, 109 aa, Bartonella bovis
ANEACLKMLQEIGSTEKIPEFIERAKDKNDPFRLMGFGHRVYKNYDPRAKLMQKTCHEVLKELNIQDDPLLDIAMELEKIALNDEYFIEKKLYPNVDFYSGITLKALGF

SEQ ID NO: 11473 - protein, 112 aa, Bartonella sp. Rf1570yn
ANEACLKMLQEIGSIKRIPEFIARAKDKNDPFRLMGFGHRVYKNYDPRAKIMQKTCHEVLKELNIQDDPLLDIAIELEKIALNDEYFIEKKLYPNVDFYSGITLKALGFPTE

SEQ ID NO: 11474 - protein, 112 aa, Bartonella sp. Rf1554yn
ANEACLKMLQEIGSIKRIPEFIARAKDKNDPFRLIGFGHRVYKNYDPRAKIMQKTCHKVLKELNIQNDPLLDIAIELEKIALSDEYFIEKKLYPNVDFYSGIILKALGFPTE

SEQ ID NO: 11475 - protein, 112 aa, Bartonella sp. Rf1561yn
ANEACLKMLQEIGSIKRIPEFIARAKDKNDPFRLIGFGHRVYKNYDPRAKIMQKTCHKVLKELNIQDDPLLDIAIELEKIALSDEYFIEKKLYPNVDFYSGIILKALGFPTE

SEQ ID NO: 11476 - protein, 427 aa, Escherichia coli O157:H7 EDL933
  unsure (1)..(427): unsure at all Xaa locations
MADTKAKLTLNGDTAVELDVLKGTLGXDVIDIRTLGSKGVFTFDPGFTSTASCESKITFIDGDEGILLHRGFPIDQLATDSNYLEVCYILLNGEKPTQEQYDEFKTTVTRHTMIHEQITRLFHAFRRDSHPMAVMCGITGALAAFYHDSLDVNNPRHREIAAFRLLSKMPTMAAMCYKYSIGQPFVYPRNDLSYAGNFLNMMFSTPCEPYEVNPILERAMDRILILHADHEQNASTSTVRTAGSSGANPFACIAAGIASLWGPAHGGANEAALKMLEEISSVKHIPEFVRRAKDKNDSFRLMGFGHRVYKNYDPRATVMRETCHEVLKELGTKDDLLEVAMELENIALNDPYFIEKKLYPNVDFYSGIILKAMGIPSSMFTVIFAMARTVGWIAHWSEMHSDGMKIARPRQLYTGYEKRDFKSDVKH

SEQ ID NO: 11477 - protein, 389 aa, Escherichia coli O157:H7 EDL933
MSDTTILQNSTHVIKPKKSVALSGVPAGNTALCTVGKSGNDLHYRGYDILDLAEHCEFEEVAHLLIHGKLPTRDELAAYKTKLKALRGLPANVRTVLEALPAASHPMDVMRTGVSALGCTLPEKEGHTVSGARDIADKLLASLSSILLYWYHYSHNGERIQPETDDDSIGGHFLHLLHGEKPSQSWEKAMHISLVLYAEHEFNASTFTSRVIAGTGSDMYSAIIGAIGALRGPKHGGANEVSLEIQQRYETPDEAEADIRKRVESKEVVIGFGHPVYTIADPRHQVIKRVAKQLSQEGGSLKMYNIADRLETVMWESKKMFPNLDWFSAVSYNMMGVPTEMFTPLFVIARVTGWAAHIIEQRQDNKIIRPSANYVGPEDRQFVALDKRQ

SEQ ID NO: 11478 - protein, 429 aa, Xylella fastidiosa Dixon
MSDLDKVTLNAGETSLVLPVLKPTLGNGCVDIAKLTKETGLFTYDSGFTATASCKSAITYIDGEKGVLLYRGYPIEQLAEHSSFLEVAYLLMNGELPRKDEFAKFDDEITHHTMMHESLKNFLGGFHYDAHPMAMLAASVASLSAFYHDTLDLNDLEQRRLAAIRLIAKVPTLAAAVHRYSIGWPIRYPRNNLGYVERFLHMMFEVPSEPLQLNPVVTKALDLLFILHADHEQNASTSTVRLVGSTGANPYASVAAGITALWGPAHGGANEAVLKMLEEIGDAKNVDLVIAKAKTKDKNSPFRLMGFGHRVYKHFDPRAKIIRETAHTVLGELGVNDPLLEVALKLEEVALKDDYFVQRKLYPNVDFYSGIIYKAINIPLEMFTVMFAIARTAGWVSHWLEQQVDPEMKISRPRQIYTGHSERDYKDAR

SEQ ID NO: 11479 - protein, 429 aa, Xylella fastidiosa Ann-1
MSDLDKVTLNAGETSLVLPVLKPTLGNGCVDIAKLTKETGLFTYDSGFTATASCKSAITYIDGEKGVLLYRGYPIEQLAEHSSFLEVAYLLMNGELPRKDEFAKFDDEITHHTMMHESLKNFLGGFHYDAHPMAMLAASVASLSAFYHDTLDLNDLEQRRLAAIRLIAKVPTLAAAAHRYSIGWPIRYPRNNLGYVERFLHMMFEVPSEPLQLNPVVTKALDLLFILHADHEQNASTSTVRLVGSTGANPYASVAAGITALWGPAHGGANEAVLKMLEEIGDAKNVDLVIAKAKTKDKNSPFRLMGFGHRVYKHFDPRAKIIREMAHTVLGELGVNDPLLEVALKLEEAALKDDYFVQRKLYPNVDFYSGIIYKAINIPLEMFTVMFAIARTAGWVSHWLEQQVDPEMKISRPRQIYTGHRERDYKDAR

SEQ ID NO: 11480 - protein, 433 aa, Magnetococcus sp. MC-1
MSKETITIRDNRTGKEVELPIQQGTAGPPVVDVTKFYKDFGLFTLDPGFRSTGSCRSTITFIDGDKGVLLHRGYPIEQLAAKSSFLEVCYLLLNEKLPTKAEFDDFDDKITHHTMVHEQLLRFFAGYRRDAHPMAIMVGVVGALSAFYHDALDISDPKHREISAHRLIAKIPTIAACSYKYHYGQPFVYPNNKMSYAENFLNMTFRTPCDDDFKIDPRLVSAMDKIFILHADHEQNASTSTVRLAGSSRANPFAAVSAGISALWGPAHGGANEAVLKMLGEIGSVERIDEYIAKAKDPNDPFRLMGFGHRVYKNYDPRAAVLKGACQEVLDAVGKHDEPLFKIAMKLEEIALNDDYFISKKLFPNVDFYSGIILSAMGFPTNMFTVIFALARTVGWVSQWKEMIEEEGQAIGRPRQLYMGAPQRDYVPMDQRG

SEQ ID NO: 11481 - protein, 113 aa, Bartonella sp. Rn1691yn
ANEACLKMLQEIDSVKRIPKFIARAKDKNDPFRLMGFGHRVYKNYDPRAKIMQQTCHEVLKELNIQDDPLLDIAIELEKIALNDEYFVEKKLYPNVDFYSGITLKALGFPTEM

SEQ ID NO: 11482 - protein, 373 aa, Staphylococcus aureus subsp. aureus Mu50
MAELQRGLEGVIAAETKISSIIESQLTYAGYDIDDLAENAQFEEVIFLLWNYRLPNEEELAHLKGKLNQYMTLNPRVYTHFEEYVTDHVHPMTALRTSLSYIAHFDPDAENESDENRYERAMRIQAKVASLVTAFARVRQDKEPLKPNPDLSYAANFLYMLRGELPTDIEVEAFNKALILHADHELNASAFTARCAVSSLSDMYSGIVAAVGSLKGPLHGGANEQVMTMLSEIGSIENVDAYLDEKFANKDKVMGFGHRVYKDGDPRAKYLREMSRQITKDAGREELFEMSVKMEKRMAEEKGLIPNVDFYSASVYHCMEIPHDLFTPIFAVSRSAGWIAHILEQYKDNRIMRPRAKYIGETNRKYIPLEERK

SEQ ID NO: 11483 - protein, 388 aa, Burkholderia sacchari
MSETDNTTQAAGAIKPKKSVALSGVCAGNTALCTVGRTGNDLHYRGYDILDLATACEFEEVAYLLVHGKLPNIAELAAYKTKLKALRGLPANVKAALEWVPASAHPMDVMRTGVSVLGTVLPEKDDHNLPGARDIADRLMASLGSMLLYWYHNSHNGKRIEVETDDDSIGGHFLHLLHGREPSKSWVDAMHVSLNLYAEHEFNASTFTGRVIAGTGSDMYSAITGAIGALRGPKHGGANEVAFEIQSRYDTPDQAESDIRRRVEAKAVVIGFGHPVYTISDPRNKVIKEVAKKLSKEQSNLKLFDIAERLESTMWEIKKMFPNLDWFSAVSYHMMGVPTAMFTPLFVISRTAGWSAHIIEQRIDNKIIRPSANYTGPENLKFTLIGKR

SEQ ID NO: 11484 - protein, 429 aa, Pseudomonas putida KT2440
MADKKAQLVIEGAAPVELPILTGTVGPDVIDVRGLGATGHFTFDPGFMATASCESKITYIDGDKGILLHRGYPIEQLAEQSDYLETCYLLLNGELPNAEQKAQFVSTVKNHTMVHEQLKSFFNGFRRDAHPMAVMCGVVGALSAFYHDSLDINNPQHREISAVRLVAKMPTLAAMVYKYSMGQPMMYPRNDLSYAENFLHMMFNTPCEIKPISPVLAKAMDRIFILHADHEQNASTSTVRLAGSSGANPFACIAAGIAALWGPAHGGANEAVLTMLDEIGDVSNIDKFIAKAKDKNDPFKLMGFGHRVYKNRDPRATVMKQTCDEVLRELGIKNDPQLELAMRLEEIALTDPYFIERSLYPNVDFYSGIILKAIGIPTSMFTVIFALARTVGWISHWKEMLSSPYKIGRPRQLYTGEQKRDIVALKDRK

SEQ ID NO: 11485 - protein, 375 aa, Pseudomonas putida KT2440
MAEAKVLSGAGLRGQVAGQTALSTVGQAGAGLTYRGYDVRDLAAGAEFEEVAYLLLYGELPTQAELADYKRKLKGLRDLPQALKEVLERIPRDAHPMDVMRTGCSVLGTLEPELTFEAQRDKTDRLLALFPAVMCYWYRFTHHGVRIDCTTDEDTLGGHFLHLLHGKKPSELHVKVMNVSLILYAEHEFNASTFTARVCASTLSDLYSCVTAAIGSLRGPLHGGANEAAMELIERFQSPQEATAELLRMLERKDKIMGFGHAIYKESDPRNEVIKGWSKQLADEVGDKVLYPVSEAIDKTMWEQKRLFPNADFYHASAYHFMGIPTKLFTPIFVCSRLTGWAAHVFEQRANNRIIRPSAEYVGVEQRQFVPIEQR

SEQ ID NO: 11486 - protein, 429 aa, Xylella fastidiosa 9a5c; identical to SEQ ID NO: 478

SEQ ID NO: 11487 - protein, 437 aa, Beta vulgaris
SSNLDLRSELQELIPEQQERLKKIKKEFGSFQLGNINVDMVLGGMRGMTGLLWETSLLDPEEGIRFRGFSIPECQKLLPAASAGAEPLPEGLLWLLLTGKVPSKEQVDALSADLRKRASIPDHVYKTIDALPITAHPMTQFCTGVMALQTRSEFQKAYEKGIHKSKFWEPTYEDCLSLIAQVPVVAAYVYRRMYKNGQVIPLDDSLDYGGNFAHMLGFDSPQMLELMRLYVTIHSDHEGGNVSAHTGHLVGSPLSDPYLSFAAALNGLAGPLHGLANQEVLLWIKSVVDECGENISTEQLKDYVWKTLNSGKVVPGFGLGVLRKTDPRYTCQREFALKHLPDDPFFQLVSKLYEVVPPILLELGKVKNPWPNVDAHSGVLLNHYGLTEARYYTVLFGVSRSLGICSQLIWDRALGLPLERPKSVTMEWLEKFCKRRA

SEQ ID NO: 11488 - protein, 474 aa, Aspergillus nidulans
MASTLRLSTSALRSSTLAGKPVVQSVAFNGLRCYSTGKTKSLKETFADKLPGELEKVKKLRKEHGNKVIGELTLDQAYGGARGVKCLVWEGSVLDSEEGIRFRGLTIPECQKLLPKAPGGEEPLPEGLFWLLLTGEVPSEQQVRDLSAEWAARSDLPKFIEELIDRVPSTLHPMAQFSLAVTALEHESAFAKATAKGINKKEYWHYTFEDSMDLIAKLPTIAAKIYRNVFKDGKVAPIQKDKDYSYNLANQLGFADNKDFVELMRLYLTIHSDHEGGNVSAHTTHLVGSALSSPMLSLAAGLNGLAGPLHGLANQEVLNWLTEMKKVVGNDLSDQSIKDYLWSTLNAGRVVPGYGHAVLRKTDPRYTSQREFALRKLPDDPMFKLVSQVYKIAPGVLTEHGKTKNPYPNVDAHSGVLLQYYGLTEANYYTVLFGVSRALGVLPQLIIDRAFGAPIERPKSFSTEAYAKLVGAKL

SEQ ID NO: 11489 - protein, 474 aa, Aspergillus nidulans
MASTLRLSTSALRSSTLAAKPVVQSVAFNGLRCYSTGKTKSLKETFADKLPGELEKVKKLRKEHGNKVIGELTLDQAYGGARGVKCLVWEGSVLDSEEGIRFRGLTIPECQKLLPKAPGGEEPLPEGLFWLLLTGEVPSEQQVRDLSAEWAARSDLPKFIEELIDRVPSTLHPMAQFSLAVTALEHESAFAKATAKGINKKDYWNYTFEDSMDLIAKLPTIAAKIYRNVFKDGKVAPIQKDKDYSYNLANQLGFADNKDFVELMRLYLTIHSDHEGGNVSAHTTHLVGSALSSPMLSLAAGLNGLAGPLHGLANQEVLNWLTEMKKVVGNDLSDQSIKDYLWSTLNAGRVVPGYGHAVLRKTDPRYTSQREFALRKLPDDPMFKLVSQVYKIAPGVLTEHGKTKNPYPNVDAHSGVLLQYYGLTERNYYTVLFGVSRALGVLPQLIIDRAFGAPIERPKSFSTEAYAKLVGAKL

SEQ ID NO: 11490 - protein, 460 aa, Aspergillus nidulans
MALPLRTARHASRLAQTIGRRGYATAEPDLKSALKAVIPAKRELLAEVKKQGDEVIGEVKVSNVIGGMRGLKSMLWEGSVLDADEGIRFHGKTIKDCQKELPKGPTGTEMLPEAMFWLLLTGEVPSTSQVRAFSKQLAEESHLPDHILDLAKSFPKHMHPMTQISIITAALNTESKFAKLYEKGINKADYWEPTFDDAISLLAKIPRVAALVFRPNEIDVVGRQKLDPAQDWSYNFAELLGKGGANNADFHDLLRLYLALHGDHEGGNVSAHATHLVGSALSDPFLSYSAGLLGLAGPLHGLAAQEVLRWILAMQEKIGTKFTDEDVRAYLWDTLKSGRVVPGYGHGVLRKPDPRFQALMDFAATRKDVLANPVFQLVKKNSEIAPGVLTEHGKTKNPHPNVDAASGVLFYHYGFQQPLYYTVTFGVSRALGPLVQLIWDRALGLPIERPKSINLLGLKK

SEQ ID NO: 11491 - protein, 373 aa, Listeria innocua
MTLSKGLENVYVAETSISSIIDDMLTYVGYGIDDLMENNASFEEVIYLLWHLRLPNKEEFKKFKLEIQENMAVSETIITSLRMQNHQKLHPMSVLRTTVSMLGVFDTEAELDDGEAVYRKGLRLQAKMPTIVAAFSRIRRGLDPIPPREDLNMAANFLYMITGEEADELSVEAMNKALVLHADHEFNASTFTARVCVATLSDVYSGVTSAIGALKGPLHGGANERVFDMLEEIDAAGDVRNYIQEKIDTKQKIMGFGHRVYRGGDPRAKHLREMSRKLTAEKGEEKWFDISLQVEEAVWELKHLKPNVDFYSASVYHALGIDRDLFTLVFSVSRVSGWLAHIFEQYRDNRLIRPRAIYVGPENRSYLPVEERI

SEQ ID NO: 11492 - protein, 344 aa, Bartonella schoenbuchensis
DPGFTSTASCESKITYIDGDKGVLLYHGYSIDQLAENGDFLEVCYLLLYGELPTQQEKADFDRRIMHHTMVHEQFSRFFHGFRRDSHPMAVMVACLGAMSAFYHDSIDITDAKQRMIASIRLIAKVPTLAAMAYKYSIGQPFVYPRNDLGYAANFLHMCFSVPCEEYKVNPVLARAMDRIFTLHADHEQNASTSTVRLAGSSGANPFACIAAGVACLWGPAHGGANEACLKMLQEIGSIEKIPEFIARAKDKNDPFRLMGFGHRVYKNYDPRAKLMQKTCHEVLKELNIKDDPLLDIAMELEKIALSDEYFIEKKLYPNVDFYSGITLKALGFPTEMFTVLFHL

SEQ ID NO: 11493 - protein, 342 aa, Bartonella schoenbuchensis
DPGFTSTASCESKITYIDGDEGVLLYHGYSIDQLAENGDFLEVCYLLLYGELPTKQEKDDFDRRIMHHTMVHEQFSRFFHGFRRDSHPMAVMVACLGAMSAFYHDSIDITDAKQRMIASIRLIAKVPTLAAMAYKYSIGQPFVYPRNDLSYAANFLHMCFSVPCEEYKVNPVLARAMDRIFTLHADHEQNASTSTVRLAGSSGANPFACIAAGVACLWGPAHGGANEACLKMLQEIGSIEKIPEFIARAKDKNDPFRLMGFGHRVYKNYDPRAKLMQKTCHEVLKELNIKDDPLLDIAMELEKIALSDEYFIEKKLYPNVDFYSGITLKALGFPTEMFTVLL

SEQ ID NO: 11494 - protein, 341 aa, Bartonella schoenbuchensis
DPGFTSTASCESKITYIDGDEGVLLYHGYSIDQLAENGDFLEVCYLLLYGELPTKQEKDDFDRRIMHHTMVHEQFSRFFHGFRRDSHPMAVMVACLGAMSAFYHDSIDITDAKQRMIASIRLIAKVPTLAAMAYKYSIGQPFVYPRNDLSYAANFLHMCFSVPCEEYKVNPVLARAMDRIFTLHADHEQNASTSTVRLAGSSGANPFACIAAGVACLWGPAHGGANEACLKMLQEIGSIEKIPEFIARAKDKNDPFRLMGFGHRVYKNYDPRAKLMQKTCHEVLKELNIKDDPLLDIAMELEKIALSDEYFIEKKLYPNVDFYSGITLKALGFPTEMFTVL

SEQ ID NO: 11495 - protein, 337 aa, Bartonella schoenbuchensis
STASCESKITYIDGDEGVLLYHGYSIDQLAENGDFLEVCYLLLYGELPTKQEKDDFDRRIMHHTMVHEQFSRFFHGFRRDSHPMAVMVACLGAMSAFYHDSIDITDAKQRMIASIRLIAKVPTLAAMAYKYSIGQPFVYPRNDLGYAANFLHMCFSVPCEEYKVNPVLARAMDRIFTLHADHEQNASTSTVRLAGSSGANPFACIAAGVACLWGPAHGGANEACLKMLQEIGSIEKIPEFIARAKDKNDPFRLMGFGHRVYKNYDPRAKLMQKTCHEVLKELNIKDDPLLDIAMELEKIALSDEYFIEKKLYPNVDFYSGITLKALGFPTEMFTVLL

SEQ ID NO: 11496 - protein, 409 aa, Ehrlichia sp. Yamaguchi
MIKEATLELDGQKIKLPVLYDTNGDKAVDITSLYKNTGILTYDPGFMSTAACESKITFIDGNKGILCYRGHNIVDLVNKNKSFVEIIYLLFYGVFPSAEDLQNFTLQISQEYMPPQVVYDVIKSFSQDSHPMSILMACFSALASYYHDQEADKDELKYAKLAVAKIASMVALIYRYITNQDFITADTKLSYSKNFVHMMFDISSYKFTQVVAKALDIIFILHADHEQNASTATVRLAGSSGADLFACLVAGTATLWGPAHGGANEAVINMLMTIEKPSNVKQFIQKVKDGSKTTRLMGFGHRVYKNYDPRAKIMCKICREVLNDLGIDDPLLEVAQELENIALQDSYFIERNLYPNVDFYSGIILKAIGIPVRMFTTLFALARTTGWSAQWYEMVANKNYKICRPRQLY

SEQ ID NO: 11497 - protein, 113 aa, Bartonella sp. Ac1692yn
ANEACLKMLQEIGSIKRIPEFIARAKDKNDPFRLMGFGHRVYKNYDPRAKIMQKTCHEVLKELNIQDDPLLDIAIELEKIALSDEYFIEKKLYPNVDFYSGITLKALGFPTEM

SEQ ID NO: 11498 - protein, 112 aa, Bartonella sp. Ac1693yn
NEACLKMLQEIGSVERIPEFIARAKDKNDPFRLMGFGHRVYKNYDPRAKIMQKTCHEVLKELNIQDDPLLDIAMELEKIALNDEYFVEKKLYPNVDFYSGITLKALGFPTEM

SEQ ID NO: 11499 - protein, 112 aa, Bartonella sp. Ac1825yn
NEACLKMLQEIGSIKRIPEFIARAKDKNDPFRLMGFGHRVYKNYDPRAKIMQKTCHEVLKELNIKNDPLLDIAMELEKIALNDKYFIEKKLYPNVDFYSGITLKALGFPTEM

SEQ ID NO: 11500 - protein, 112 aa, Bartonella sp. Ac1826yn
NEACLKMLQEIGSVKRIPEFIARAKDKNDPFRLMGFGHRVYKNYDPRAKIMQQTCHEVLKELNIQDDPLLDIAIELENIALNDEYFVEKRLYPNVDFYSGITLKALGFPTEM

SEQ ID NO: 11501 - protein, 112 aa, Bartonella sp. Ap1707yn
NEACLKMLQEIGSIKRIPEFIARAKDKNDPFRLMGFGHRVYKNYDPRAKIMQKTCHEVLKELNIQDDPLLDIAIELERIALSDEYFIEKKLYPNVDFYSGITLKALGFPTEM

SEQ ID NO: 11502 - protein, 112 aa, Bartonella sp. Ac1723yn
NEACLKMLQEIDSVKRIPKFIARAKDKNDPFRLMGFGHRVYKNYDPRAKIMQQTCHEVLKELNIQDDPLLDIAIELEKIALNDEYFVEKKLYPNVDFYSGITLKALGFPTEM

SEQ ID NO: 11503 - protein, 112 aa, Bartonella sp. Ac1727yn
NEACLKMLQEIGSIKRIPEFIARAKDKNDPFRLMGFGHRVYKNYDPRAKIMQKTCHEVLKELNIKDDPLLDIAMELEKIALNDEYFIEKKLYPNVDFYSGITLKALGFPTEM

SEQ ID NO: 11504 - protein, 112 aa, Bartonella sp. Ad1734yn
NEACLKMLQEIGSIKRIPEFIARAKDKNDPFRLMGFGHRVYKNYDPRAKIMQKTCHEVLKELNIQDDPLLDIAIELEKIALSDEYFIEKKLYPNVDFYSGITLKALGFPTEM

SEQ ID NO: 11505 - protein, 112 aa, Bartonella sp. Em1531yn
NEACLKMLQEIGSVERIPEFIARAKDKNDPFRLMGFGHRVYKNYDPRAKIMQKTCHEVLKELNIQDDPLLDIAIELEKIALNDEYFVEKKLYPNVDFYSGITLKALGFPTEM

SEQ ID NO: 11506 - protein, 373 aa, Listeria monocytogenes EGD-e
MTLSKGLENVYVAETSISSIIDDMLTYVGYGIDDLMENNASFEEVIYLLWHLRLPNKDEFKKFKREIQENMAVSETIITSLRMQNHQKLHPMSVLRTTVSMLGVFDTEAELDDGEAVYRKGLRLQAKMPTIVAAFSRIRRGLDPIPPREDLNMAANFLYMITGEEADELSVEAMNKALVLHADHEFNASTFTARVCVATLSDVYSGVTAAIGALKGPLHGGANERVFDMLEEIDQAGDVRNYIQEKIDTKQKIMGFGHRVYRGGDPRAQHLREMSRKLTAEKGEEKWFDISLQVEESVWELKHLKPNVDFYSASVYHALGIDRDLFTLVFSVSRVSGWLAHIFEQYRDNRLIRPRAIYVGPENRSYLPVEERI

SEQ ID NO: 11507 - protein, 410 aa, Rickettsia sp. AT1
DSEFAELKIRGKIFKLPIFKASIGEDVIDISRVSAEADCFTYDPGFMSTASCQSTITYIDGDKGILRHRGYDIKDLAEKSDFLEVAYLLIYGELPNSEQYNNFTKQVAHHSLVNERLHYLFQTFCSSSHPMAIMLAAVGSLSAFYPDLLNFKEADYELTAIRMIAKIPTIAAMSYRYSIGQPFIYPDNSLDFTENFLHMMFATHCTKYKVNPIIKNALNKIFILHADHEQNASTSTVRIAGSSGANPFACISTGIASLWGPAHGGANEAVINMLKEIGSSENIPKYIAKAKDKNDPFRLMGFGHRVYKNYDPRAAVLKETCKEVLKELGQLENNPLLQIAIELEAIALKDEYFIERKLYPNVDFYSGIIYKAMGIPSQMFTVLFAIARTVGWMAQWKEMHEDPEQKISRP

SEQ ID NO: 11508 - protein, 373 aa, Staphylococcus epidermidis ATCC 12228
MAELKRGLEGVIAAETKISSIIDSQLTYAGYDIDDLAENAQFEEIIFLLWNYRLPNENELSELKEKLFDYMTLNNRVYKHFEEYVTDHVHPMTALRTSVSYVAHFDPEAENESDENKYDRAIRIQAKIASLVTAFARVRDGKEPVKPNSELSYAANFLYMLRGELPTEVEVEAFNKALILHADHELNASAFTARCAVSSLSDMYSGVVAAIGSLKGPLHGGANERVMSMLKEIGSIDNVDHYLDERFANKDKIMGFGHRVYKDGDPRAKYLREMSRKITEETGQSELFEMSLAIEKRMKEEKGLIPNVDFFSATVFHSMNIPHDLFTPIFAVSRTSGWIAHILEQYRDNRIMRPRAKYIGEQNRKYVPIEERP

SEQ ID NO: 11509 - protein, 431 aa, Mycobacterium leprae
MADTDDTVTLKYPGGEIDLQIVRATEGNDGIAIVPVLAKTGYTTFDVGYGNTASTKSSITYIDGDAGILRYRGYPIEQLAEKSTFIEVCYLLIYGELPATDQLAEFTHRIQRHTMLHEDLKRFYDGFPRNAHPMPVLSSVVNALSAYYQDALDPMDNGQVELSTIRLLAKLPTIAAYAYKKSVGQPFLYPDNAFSLVENFLRMTFGLPAEPYEPDPEVVRALDMLFILHADHEQNCSTSTVRLVGSSRANLFTSISGGINALWGPLHGGANQAVLEMLEGIRESGDDVGGFVQKVKNCQAGVKLMGFGHRVYKNYDPRARIVKEQADKILVKLGGDDDLLNIAKGLEEAALTDDYFIERKLYPNVDFYTGLIYRALGFPTRMFTVLFALGRLPGWIAHWREMHDEGDSKIGRPRQIYTGYTERDYTAIETR

SEQ ID NO: 11510 - protein, 441 aa, Mycobacterium smegmatis
MCMLKQSQPTRRPTRPQRTFTYPGGKLELPILKATEGTDSVALGKFLAETNLTTFDSGFMNTASTKSAITYIDGEQGILRYRGIPIEQLAEKSTFIEVSYLLIYGELPTPTQLEEFTTKIQRHTLLHEDLKRFFDGFPRNAHPMPVLSSAVNALSAYYQDSLDPKDDEQVELSTIRLLAKLPTIAAYAYKKSAGQPFLYPDNSLSLVENFLRMTFGFPAEPYEVNPDVAKALDMLFILHADHEQNCSTSTVRLVGSSQANLFTSISGGINALWGPLHGGANQAVLEMLDAIKADGGDTKKFMERVKNKEAGVKLMGFGHRVYKNYDPRAAIVKKTADQILETLGVQDDLLEIAKGLEEVALNDDYFIERKLYPNVDFYTGVIYRAMGFPTRMFTVLFALGRLPGWIAHWREMHEDPTTKIGRPRQLYTGYTERDYVPMSDR

SEQ ID NO: 11511 - protein, 375 aa, Mycobacterium smegmatis
MTTATESEAPRIHKGLAGVVVDTTAISKVVPETNSLTYRGYPVQDLAAQCSFEQVAYLLWHGELPTDQLALFSQRERASRRIDRSMQALLAKLPDNCHPMDVVRTAISYLGAEDLEEDVDTAEANYAKSLRMFAVLPTIVATDIRRRQGLTPIPPHSQLGYAQNFLNMCFGEVPEPVVVRAFEQSMVLYAEHSFNASTFAARVVTSTQSDIYSAVTAAIGALKGSLHGGANEAVMHDMLEIGSAEKAPEWLHGKLSRKEKVMGFGHRVYKNGDSRVPTMKVALEQVAQVRDGQRWLDIYNTLESAMFAATRIKPNLDFPTGPAYYLMDFPIESFTPLFVMSRITGWTAHIMEQAASNALIRPLSEYSGQPQRSLV

SEQ ID NO: 11512 - protein, 409 aa, Pyrobaculum aerophilum str. IM2
MSEQTVQVKTTGKILQSPCGPIIHGLEDVLIKSTSISDIDGEKGILWYRGYRIEELARLSTYEEVSYLILYGRLPTKRELEDYINRMKKYRELHPATVEVIRNLAKAHPMFALEAAVAAEGAYDEDNQKLIEALSVGRYKAEEKELAYRIAEKLVAKMPTIVAYHYRFSRGLEVVRPRDDLGHAANFLYMMFGREPDPLASRGIDLYLILHADHEVPASTFAAHVVASTLSDLYSSVAAAIAALKGPLHGGANEMAVRNYLEIGTPAKAKEIVEAATKPGGPKLMGVGHRVYKAYDPRAKIFKEFSRDYVAKFGDPQNLFAIASAIEQEVLSHPYFQQRKLYPNVDFWSGIAFYYMGIPYEYFTPIFAMSRVVGWVAHVLEYWENNRIFRPRACYIGPHDLQYIPLEQR

SEQ ID NO: 11513 - protein, 342 aa, Pyrobaculum aerophilum str. IM2
MRIFKTPGPIKYINCLLTAAMYFPGLEGVVVKETKICHIDLENSKIYYRGYDLEELAQYSTFEEVAYLLWFGKLPAGAELERFKAELMMYRKPPEHVDEAVKIAPKNAEPIDVLRTAVSAMALGEDLSDRSPEAELVRGLKITAAMPYIVASFDRLRRGSQPLHPGEAKSHAEYFLWALRGERPGEREVRALDVMLIIYAEHSMNNSAFTAVTVASTLSDMYAAITAAIASLKGPLHGGANVDAAKMLEEIGDAKRVESWVDQQLSRGRRIPGFGHRLYKKGPDPRLRVLRKLARDLASEKGDFKWVELAERLEEYVTAHLSQKGIYPNTDLYAAVIFKYLG

SEQ ID NO: 11514 - protein, 484 aa, Anopheles gambiae str. PEST
SAAKRQQLPAAPAAAPATMALSRIYASKLACAANKNSLPVIATFVRNASDSTDLKAVLTEKIPKEQERVKNFRKQHGNTKVGEVTVDMMYGGMRGIKGLVCETSVLDPDEGIRFRGLSIPECQQVLPKAPGGQEPLPEGLFWLLITGDVPSKAQVDALSREWANRAALPSHVVTMLNNMPTSLHPMSQLSCAVTALNHESKFAKAYSEGVHKSKYWEYVYEDSMDLIAKLPVIAATIYRNTYRDGKGIGAIDPKKDWSANFTKMLGYEDEKFTELMRLYLTIHSDHEGGNVSAHTVHLVGSALSDPYLSFAAGMNGLAGPLHGLANQEVLVWLQKLRKELGDNASEDKVKEFIWKTLKSGQVVPGYGHAVLRKTDPRYTCQREFALKHLPNDPLFGLVSNIYKVVPPILTELGKVKNPWPNVDAHSGVLLQYYGLKEMNYYTVLFGVSRALGVLASLVWDRALGLPIERPKSMSTDGLMKATSK

SEQ ID NO: 11515 - protein, 342 aa, Agrobacterium tumefaciens str. C58 (U. Washington)
MLSHVDGQAGELVVRGHHLAELADWSFEQVLELLWSGQTATKITAEDIRSQLGKARLRAFELMQLLFPGLAALTSVEALRLLLSWLPDDETTPHHLVAVAAVPVFATAIIRNRQGFAPIAPDASLTHSADFLRMLSGTLPSTEKVRALDTYLTTVADHGLNASTFTARVIASTGAGLFSSVVGALCALKGPLHGGAPGPVLDMLDAIGAEAEIEPWLLDALGRGERLMGFGHRIYRVRDPRADVLKHAVSTLKEGSDRIAFAGKVEEAALALLKEKKPLRPLQTNVEFYTALVLEAVGFPRDSFTNVFAAGRMAGWTAHVLEQERTGRLIRPQSHYIGPHPR

SEQ ID NO: 11516 - protein, 335 aa, Agrobacterium tumefaciens str. C58 (U. Washington)
MQKVRGETATKPKGFPASTMPPSMRCWPDRKRRSKRRSGPGVLILANESLEDVARLLWDCGEVDPFDDLKAAPTPWPQPVLDYVRDLPLTERCQALLPLLEAGRVTTWRRDNRRLWPGAAALLRGIAGACISSQPKTQAVHLSLADAWQTDAAGADLIRRALVLQADHELNTSAFAVRVVASTGASLGACLNAGLSALSGPLHGGMTSLVEILFDELDRYGDVERVIDERLRRGEAIPGFRHPLYPDGDPRATGLLLYLPPDAQRDELLQMMNDTTGQLPTCDVALVSLRRSLKLPRGAALALFAVARTVGWVAHALEQKLDDKLIRPRARYMGQ

SEQ ID NO: 11517 - protein, 434 aa, Agrobacterium tumefaciens str. C58 (U. Washington)
MPTRAGVADMVNLLIQRETCLRMLWYTYMVNLDLYNQYEIIMRHSDKFMTADRAAAELGISRATLYAYVSRGMIHTSDAADDPRRRLYSAHDIEALKKRKNVGRRPRQVAAAALDWGLPVLESAITEIAEGQLRYRGQDALALSQAASLEDVARLLWDCGEVDPFDDLKAAPTPWPQPVLDYVRDLPLTERCQALLPLLEAGRVTTWRRDNRRLWPGAAALLRGIAGACISSQPKTQAVHLSLADAWQTDAAGADLIRRALVLQADHELNTSAFAVRVVASTGASLGACLNAGLSALSGPLHGGMTSLVEILFDELDRYGDVERVIDERLRRGEAIPGFRHPLYPDGDPRATGLLLYLPPDAQRDELLQMMNDTTGQLPTCDVALVSLRRSLKLPRGAALALFAVARTVGWVAHALEQKLDDKLIRPRARYIGR

SEQ ID NO: 11518 - protein, 113 aa, Bartonella sp. Tm918nv
ANEACLKMLQEIGSVKRIPEFIARAKDKNDPFRLMGFGHRVYKNYDPRAKIMQQTCHEVLKELNIQDDPLLDIAIELENIALNDEYFVEKRLYPNVDFYSGITLKALGFPTEM

SEQ ID NO: 11519 - protein, 112 aa, Bartonella sp. Tm1794nv
NEACLKMLQEMGSVKRIPEFIARAKDKNDPFRLMGFGHRVYKNYDPRAKIMQQTCHEVLKELNIQDDPLLDIAIELENIALNDEYFVEKRLYPNVDFYSGITLKALGFPTEM

SEQ ID NO: 11520 - protein, 429 aa, Agrobacterium tumefaciens str. C58 (Cereon)
MTEKSATVTLGEKQVELPVREGTIGPSVVDIATLYKHTGSFTYDPGFTSTASCESKITYIDGDEGVLLHRGFPIEQLAEQGDFLETCYLLLYGELPTAAQKKDFDTRVTRHTMVHEQMSRFFTGYRRDAHPMAVMCGTVGALSAFYHDSTDITDPHQRMVASLRMIAKMPTIAAMAYKYHIGQPFVYPKNDLDYASNFLHMCFAVPCEDYKVDPVLARAMDRIFILHADHEQNASTSTVRLAGSSGANPFACIAAGIACLWGPAHGGANEAALNMLNEIGSVDRIPEYIARAKDKNDPFRLMGFGHRVYKNYDPRAKIMQKTMYEVLEATGNSDDPIMQVALELEKIALSDPYFVEKKLYPNVDFYSGITLKALGFPTTMFTVLFALARTVGWIAQWNEMIEDPQQRIGRPRQLYTGAGKRDYVPVSKR

SEQ ID NO: 11521 - protein, 313 aa, Agrobacterium tumefaciens str. C58 (Cereon)
MLELLWSGQTATKITAEDIRSQLGKARLRAFELMQLLFPGLAALTSVEALRLLLSWLPDDETTPHHLVAVAAVPVFATAIIRNRQGFAPIAPDASLTHSADFLRMLSGTLPSTEKVRALDTYLTTVADHGLNASTFTARVIASTGAGLFSSVVGALCALKGPLHGGAPGPVLDMLDAIGAEAEIEPWLLDALGRGERLMGFGHRIYRVRDPRADVLKHAVSTLKEGSDRIAFAGKVEEAALALLKEKKPLRPLQTNVEFYTALVLEAVGFPRDSFTNVFAAGRMAGWTAHVLEQERTGRLIRPQSHYIGPHPR

SEQ ID NO: 11522 - protein, 425 aa, Agrobacterium tumefaciens str. C58 (Cereon)
MVNLLIQRETCLRMLWYTYMVNLDLYNQYEIIMRHSDKFMTADRAAAELGISRATLYAYVSRGMIHTSDAADDPRRRLYSAHDIEALKKRKNVGRRPRQVAAAALDWGLPVLESAITEIAEGQLRYRGQDALALSQAASLEDVARLLWDCGEVDPFDDLKAAPTPWPQPVLDYVRDLPLTERCQALLPLLEAGRVTTWRRDNRRLWPGAAALLRGIAGACISSQPKTQAVHLSLADAWQTDAAGADLIRRALVLQADHELNTSAFAVRVVASTGASLGACLNAGLSALSGPLHGGMTSLVEILFDELDRYGDVERVIDERLRRGEAIPGFRHPLYPDGDPRATGLLLYLPPDAQRDELLQMMNDTTGQLPTCDVALVSLRRSLKLPRGAALALFAVARTVGWVAHALEQKLDDKLIRPRARYIGR

SEQ ID NO: 11523 - protein, 294 aa, Agrobacterium tumefaciens str. C58 (Cereon)
MLILANESLEDVARLLWDCGEVDPFDDLKAAPTPWPQPVLDYVRDLPLTERCQALLPLLEAGRVTTWRRDNRRLWPGAAALLRGIAGACISSQPKTQAVHLSLADAWQTDAAGADLIRRALVLQADHELNTSAFAVRVVASTGASLGACLNAGLSALSGPLHGGMTSLVEILFDELDRYGDVERVIDERLRRGEAIPGFRHPLYPDGDPRATGLLLYLPPDAQRDELLQMMNDTTGQLPTCDVALVSLRRSLKLPRGAALALFAVARTVGWVAHALEQKLDDKLIRPRARYMGQ

SEQ ID NO: 11524 - protein, 113 aa, Bartonella sp. Pm1780nv
ANEACLKMLQEIGSVKRIPEFIARAKDKNDPFRLMGFGHRVYKNYDPRAKIMQKTCHEVLKELNIQDDPLLDIAIELEKIALNDEYFVEKKLYPNVDFYSGITLKALGFPTEM

SEQ ID NO: 11525 - protein, 112 aa, Bartonella sp. Pm1783nv
NEACLKMLQEIGSVKRIPEFIARAKDKNDPFRLMGFGHRVYKNYDPRAKIMQKTCHEVLKELNIQDDPLLDIAIELEKIALNDEYFVEKKLYPNVDFYSGITLKALGFPTEM

SEQ ID NO: 11526 - protein, 112 aa, Bartonella sp. Sb1859nv
NEACLKMLQEIGSVKRIPEFIARAKDKNDPFRLMGFGHRVYKNYDPRAKIMQKTCHEVLKELNIQDDPLLDIAIELENIALNDEYFVEKRLYPNVDFYSGITLKALGFPTEM

SEQ ID NO: 11527 - protein, 429 aa, Xylella fastidiosa Temecula1
MSDLDKVTLNAGETSLVLPVLKPTLGNGCVDIAKLTKETGLFTYDSGFTATASCKSAITYIDGEKGVLLYRGYPIEQLAEHSSFLEVAYLLMNGELPRKDEFAKFDDEITHHTMMHESLKNFLGGFHYDAHPMAMLAASVASLSAFYHDTLDLNDLEQRRLAAIRLIAKVPTLAAAAHRYSIGWPIRYPRNNLGYVERFLHMMFEVPSEPLQLNPVVIKALDLLFILHADHEQNASTSTVRLVGSTGANPYASVAAGITALWGPAHGGANEAVLKMLEEIGDAKNVDLVIAKAKTKDKNSPFRLMGFGHRVYKHFDPRAKIIREMAHTVLGELGVNDPLLEVALKLEEAALKDDYFVQRKLYPNVDFYSGIIYKAINIPLEMFTVMFAIARTAGWVSHWLEQQVDPEMKISRPRQIYTGHRERDYKDAR

SEQ ID NO: 11528 - protein, 112 aa, Bartonella sp. af170up
ANEACLKMLQEIGSVERIPEFIARAKDKNDPFRLMGFGHRVYKNYDPRAKIMQKTCHEVLKELNIQDDPLLDIAIELETIALNDEYFVEKKLYPNVDFYSGITLKALGFPTE

SEQ ID NO: 11529 - protein, 112 aa, Bartonella sp. af82up
AYETCLKMLQEIGAVQKIPEFIARAKNKNDRFRLMGFGHRVYKNYDPRAKIMQQTCHEVLKELNIQDDPLLDIAMELEKIALNDEYFIEKKLYPNVDFYSGITLKALGFPTE

SEQ ID NO: 11530 - protein, 112 aa, Bartonella sp. ma106up
LNEACLKMLQEIGSIERIPEFIARAKDKNDPFRLMGFGHRVYKNYDPRAKIMQKTCHEVLKELNIQDDPLLDIAIELEKIALSDEYFIEKKLYPNVDFYSGITLKALGFPTE

SEQ ID NO: 11531 - protein, 112 aa, Bartonella sp. sa192up
ANEACLKMLQEIGSVERIPEFIARAKDKNDPFRLMGFGHRVYKNYDPRAKIMQKTCHEVLKELNIQDDPLLDIAIELEKIALSDEYFVEKKLYPNVDFYSGITLKALGFPTE

SEQ ID NO: 11532 - protein, 411 aa, Rickettsia sp. DT1
DSEFAELKIRGKIFKLPILKASIGEDVIDISRVSAEADCFTYDPGFMSTASCQSTVTYIDGDKGILRHRGYDIKDLAEKSDFLEVAYLLIYGELPSGEQYNNFTKQVAHHSLVNDRLHYLFQTFCSSSHPMAIMLAAVGSLSAFYPDLLNFKEADYELTAIRMIAKIPTIAAMSYKYSIGQPFIYPDNSLDFTENFLHMMFATPYTKYTVNPIIKNALNKIFILHADHEQNASTSTVRIAGSSGANPFACISTGIASLWGPAHGGANEAVINMLKEIGSSEYIPKYIAKAKDKNDPFRLMGFGHRVYKNYDPRAAVLKETCKEVLKELGQLDNNPLLQIAIELEAIALKDEYFIERKLYPNVDFYSGIIYKAMGIPSLMFTVLFAIARTVGWMAQWKEMHEDPEQKISRPR

SEQ ID NO: 11533 - protein, 411 aa, Rickettsia sp. IO1
DSKFAELKIRGKIFKLPILKASIGEDVIDISRVSAEADCFTYDPGFMSTASCQSTITYIDGDKGILRHRGYDIKDLAEKSDFLEVAYLLIYGELPSSEQYNNFTKQVAHHSLVNERLHYLFQTFCSSSHPMAIMLAAVGSLSAFYPDLLNCKEADYKLTAIRMIAKIPTIAAMSYKYSIGQPFIYPDNSLDFTENFLHMMFAMPCTKYKVNPIIKNALNKIFILHADHEQNASTSTVRIAGSSGANPFACISTGIASLWGPAHGGANEAVINMLKEIGSSENIPKYIAKAKDKNDPFRLIGFGHRVYKNYDPRAAVLKETCKEVLKELGQLENNPLLQIAIELEAIALKDEYFIERKLYPNVDFYSGIIYKAMGIPSQMFTVLFAIARTIGWMAQWKEMHGDPEQKISRPR

SEQ ID NO: 11534 - protein, 377 aa, Pyrococcus furiosus DSM 3638
MNTEKYLAKGLEDVYIDQTNICYIDGKEGKLYYRGYSVEELAELSTFEEVVYLLWWGKLPSLSELENFKKELAKSRGLPKEVIEIMEALPKNTHPMGALRTIISYLGNIDDSGDIPVTPEEVYRIGISVTAKIPTIVANWYRIKNGLEYVPPKEKLSHAANFLYMLHGEEPPKEWEKAMDVALILYAEHEINASTLAVMTVGSTLSDYYSAILAGIGALKGPIHGGAVEEAIKQFMEIGSPEKVEEWFFKALQQKRKIMGAGHRVYKTYDPRARIFKKYASKLGDKKLFEIAERLERLVEEYLSKKGISINVDYWSGLVFYGMKIPIELYTTIFAMGRIAGWTAHLAEYVSHNRIIRPRLQYVGEIGKKYLPIELRR

SEQ ID NO: 11535 - protein, 438 aa, Magnetospirillum magnetotacticum
MTNENKTPKESVTLINNSTGKTTEFPLLAGSIGPKVADIRSLYASQDIFTYDPGYMSTGSCKSAITYIDGDAGVLLHRGFAIADLAENCSFLEVAYLILKGELPNAEQKTKFEFDIAHHSMVHEQINFFFRGFRRDSHPMAVLCGVVGAMAAFYHDSIDINDPHHRMVASYRLVAKMPTIVAWAYKYAQGQPFMFPQNKLSYSENFLHMMYATPCEEYKVSPVLARAMDRILILHADHEQNASTSTVRLAGSSGANPFACIAAGIASLWGPAHGGANEAVLQMLHEIGSVERIPEFIKKAKDKDDPFRLMGFGHRVYKNYDPRAKIMQKTCHEVLSELGVHDEPLLKLAMELERIALEDPYFVERKLFPNVDFYSGIIFRAMGIPTQVFTCLFALARTVGWIAQWNEMLTDPDQKIGRPRQLYVGPAQRDFVPLHKRG

SEQ ID NO: 11536 - protein, 456 aa, Magnetospirillum magnetotacticum
GHCAGEAGYGRPRGNGASSSRKGTMNTTQQAKVRLLVDDQAQDLPVVAATEGNDGIVVSSLLKSTGLVTVDPGFMNTASCESSITYIDGEAGILRYRGYPIEQLAERSSFLEVAYLLIHGELPDAATLDAFVERVNRHTLVHEDFRTFMGTFPRNAHPMAVLSSAINALSTFYPESLDPFDDETVELATVLLLAKSRTITSYLHRRRVGEPLLYPDYSRGYVDDFLRMTFATPYQQYEADPVVVDALDKLLILHADHEQNCSTSTVRVVGSSHANLYASVAAGVNALSGPLHGGANESVLTMLDKIAGAEYDVDTFMKKVKNKEDGVRLMGFGHRVYKNYDPRAAIVKKSADAVLSTLGKKDQLLDIAMGLEEIALNDDYFIERKLYPNVDFYTGLIYKAMGFSPAMFTPLFALGRMPGWIAQWREMMKDPQTKIGRPRQVYVGETERDYVAVSDR

SEQ ID NO: 11537 - protein, 196 aa, Magnetospirillum magnetotacticum
MWAGTLFAAVPSGCRPPPSLVPRHRCLWGPAHGGANEAALKMLMEIGHPENVSKYVAKAKDKNDPFRLMGFGHRVYKNYDPRARIMQKTTHEVLNELGLKDDLLEVAVQLEKIALEDEYFIEKKLYPNIDFYSGITLKALGFPTSMFTVLFAVARTVGWIAQWAEMIEDPSQKIGRPRQLYVGPDRRDYVAIGQRS

SEQ ID NO: 11538 - protein, 146 aa, Magnetospirillum magnetotacticum
MLFPSRERVRDPMSASASTIIVGDNHVELPIKTGTIGPDVVDIGKLYAKTGKFTFDPGFTSTASCESKITYIDGDEGVLLYRGYPIEQLAEQGASSKPLTDAFGECELRQKRFRYGSAPLVPTITVSRSRSPVGFALGPAFPEAAP

SEQ ID NO: 11539 - protein, 355 aa, Methanosarcina acetivorans C2A
MSKNICFIDGLEGVLKYREVDINELVKLPYDAVSYLLIRGRLPGEQELAEYSARLHAERRINKEVIDVIRMCNFNIDAMAALRTVISFISQFDPDLNDSSPEGNMRKAIRLIAIVPTIVATYYRMANGKEPLPPDPSLSHGANFLYMIKGSKPDPLDAEVMEKDFILSAEHELNASTFSSRVTASTMSDLYSAVVSGLCTLKGPLHGGARAEVMTMLDEVASPENAEKFVLEKISQREKIMGFGHRVYKTYDPRGVIFKQLSKKLAESKGDMHWYTTAEAVENVVVRELVEKRGKPIYPNVDFYSGVIYKYMEIPPQLATSIFAIGRVSGWIAHCFDQYERKKIIRPRAFMLDEC

SEQ ID NO: 11540 - protein, 101 aa, Rickettsia sp. Bar29-like
GSSEYIPKYIAKAKDKNDPFRLMGFGHRIYKNYDPRAAVLKETCKEVLKELGQLDNNPLLQIAIELEAIALKDEYFIERKLYPNVDFYSGIIYKAMGIPSQ

SEQ ID NO: 11541 - protein, 429 aa, Leptospira interrogans serovar lai str. 56601
MAEVAILKIDGKEYELPIVIGTEKEKAIDISKLRQQTGYVTLDNGYLNTGACTSAVTFLDGELGILRYRGIPIEQLAENSTFTEVAYLLIYGKIPSDSELKKWNDELTMHTLIHEDLKRLYNGFPKDGHPMAIMSSMIGSLSTYYQDSYDPENAEHRHISMIRLLAKFPTIAAFAYKKSIGQPTIHPLNSLDYCANFMNMMFSVPSEDYKIDPEIVKALNLLLILHADHEQNCSTSTVRLVGSSLANLYGAISAGICALWGPRHGGANQEVLEMLQEIQASGLPVKKIVEKAKDKNDSFRLSGFGHRVYKNFDPRAKIIKKACDSVLKRLGVQDSLLDIAKELEETALHDPYFVERKLYPNVDFYSGIIYRALGIPVNMFTVMFAMGRLPGWIAQWKEMIESPDMKIGRPRQIYTGSTETSYKEAKKKA

SEQ ID NO: 11542 - protein, 426 aa, Leptospira interrogans serovar lai str. 56601
MSEFIEIKVGEKSYQFPLISGTDGKKGIDIRELHQKTGLISYDPGFFNTAYAVSRISRRDPNSGELNYRGYDIADLVQHSTFVETSYLLIYGKLPTEQQLKDFSLKLSKHSLIHEDMINLFDGFPGKGHPLAVLSVMVTSLSSYYPEEYEESLDKGIDHSARLLAKIRTIAAFSYKKIVGQPFVYPLDKHPYCTNFLYMLFSIPSKDYIPTEDIDRILNQLWILYADHEQNVSNTTVQVIGSTQANLFASISSAINALWGSREGGRQVAAVGLIEDILKSRKSVPEYFEKFKGDSEKLFGNGFGHKAYEAKSRRAIIASKLFHDFYKKNPIGPIAEVALKIEEYMQNDEYYINQNLYPNLEFYSAVIFNSLGIPKELFTAMQVIGKLPGWLAHWREQRVSGNYSKARPKQIYSGEMGRKYIPLSER

SEQ ID NO: 11543 - protein, 112 aa, Bartonella sp. strain Pm650nm
GANEACLKMLQEIGSVKRIPEFIARAKDKNDPFRLMGFGHRVYKNYDPRAKIMQKTCHEVLKELNIQDDPLLDIAIELEKIALNDEYFVEKKLYPNVDFYSGITLKALGFPT

SEQ ID NO: 11544 - protein, 429 aa, Xanthomonas campestris pv. campestris str. ATCC 33913
MSDLDQVTLNAGDTSVVLPVLKPTLGNDCVDISKLTKETGLFTYDSGFTATASCKSAITYIDGDNGVLLYRGYPIEQLAEKSSFLEVSYLLMNGELPTADEFKKFDHEVTHHTMMHESLKNFLGGFRHDAHPMAMLAGSVASLSAFYHDTLDLNDPEQRRQAAIRLIAKVPTLAAAAYRYSIGWPIRYPRNNLNYVDRFLHMMFEVPSEPLEINPVVAKALDLLFILHADHEQNASTSTVRLVGSTGANPYASVAAGITALWGPAHGGANEAVLKMLEEIGTADNVESAVAKAKDKNSSFRLMGFGHRVYKNFDPRAKIIREMTHKVLGELGVNDPLLEVALKLEEAALKDDYFVQRKLYPNVDFYSGLIYKALNIPVEMFTVMFAIARTAGWVSHWLEQQVDPEMKIGRPRQIYTGYDKRDYTDAGKR

SEQ ID NO: 11545 - protein, 384 aa, Xanthomonas campestris pv. campestris str. ATCC 33913
MNDTVIPGFKPKKSVALSGTAAGNTALCTVGRSGNDLHYRGYDILDLATSSEFEEIAYLLVHGKLPNSGELRGYKAKLRSLRGVPAAVKTALEQLPPSAHPMDVMRTGVSVLGCLQPEKDDHNHPGARDIADKLMASLGSMLLYWYHYSHNGKRIEVETDDDSIGGHFLHLLHGFAPKESWVRAMHTSLILYAEHEFNASTFASRVIAGTGSDMYSAIAGGIGALRGPKHGGANEVAFEVQKRYDTPDEAEADIKARVERKEVVIGFGHPVYTVSDPRNKVIKDVARELSDEQGSRKMYDIAERLETVMWDIKKMFPNLDWFSAVSYHMMGVPTAMFTPLFVLARTAGWSAHIIEQRVDGKIIRPSANYTGPEDQAFVPLDQRA

SEQ ID NO: 11546 - protein, 429 aa, Xanthomonas axonopodis pv. citri str. 306
MSDLDQVTLNAGDKSVVLPVLKPTLGNDCVDISKLTKETGLFTYDSGFTATASCKSAITYIDGDNGVLLYRGYPIEQLAEKSSFLEVSYLLMNGELPTADEFKKFDHEVTHHTMMHESLKNFLGGFRHDAHPMAMLAGSVASLSAFYHDTLDLNDPEQRRQAAIRLIAKVPTLAAAAYRYSIGWPIRYPRNNLNYVDRFLHMMFEVPSEPLEINPVVAKALDLLFILHADHEQNASTSTVRLVGSTGANPYASVAAGITALWGPAHGGANEAVLKMLEEIGTADNVESAVAKAKDKNSSFRLMGFGHRVYKNFDPRAKIIREMTHKVLGELGVNDPLLEVALKLEEAALKDDYFVQRKLYPNVDFYSGIIYKALNIPVEMFTVMFAIARTAGWVSHWLEQQVDPEMKIGRPRQIYTGYDKRDYTDSAKR

SEQ ID NO: 11547 - protein, 384 aa, Xanthomonas axonopodis pv. citri str. 306
MNDTATPGFKPKKSVALSGTAAGNTALCTVGRSGNDLHYRGYDILDLATTSEFEEIAYLLVHGKLPNRGELRGYKAKLRSLRGVPAAVKTALEQLPPSAHPMDVMRTGVSVLGCLQPEKDDHNHPGARDIADKLMASLGSMLLYWYHYSHNGKRIEVETEDDSIGGHFLHLLHGFAPKDSWVRAMHTSLILYAEHEFNASTFASRVIAGTGSDMYSAIAGGIGALRGPKHGGANEVAFEVQKRYDTPDEAEADIKARVERKEVVIGFGHPVYTVSDPRNKVIKVVARELSDEQGSRKMYDIAERLESVMWDIKKMFPNLDWFSAVSYHMMGVPTAMFTPLFVLARTAGWSAHIIEQRVDGKIIRPSANYTGPEDQVFVPLDQRS

SEQ ID NO: 11548 - protein, 426 aa, Caulobacter crescentus CB15
MTDKATLTIGDKSYELPILKGSTGPDVIDVRKIYGESDHFTFDPGFTSTASCESKITYIDGDAGILLHRGYPIDQLAEKSSFLEVCYLLLNGELPKADEFAKFEHNITYHTMLHAQFDRFFEGFRRDAHPMAVMTGAVGALSAFYSDSINVDDAREREISAHRLIAKMPTIAARAYKYTVGQPFVSPRNDLSYSENFLRMCFAVPAEDWKPNPVLTRAMDRIFILHADHEQNASTSTVRLAGSSGAHPFACIAAGIACLWGPSHGGANQEALEMLETIGSVDNIKDYVQGVKDRKYKLMGFGHRVYKNFDPRAKVMQKTAHEVLAELGHNNDPLLQVAQELEKVALNDPYFVDRKLYPNIDFYSGITLRAMGFPTNMFTVLFALARTVGWISQWKEMFEDPTRKIGRPRQLYTGATHRDYVTLDKR

SEQ ID NO: 11549 - protein, 361 aa, Caulobacter crescentus CB15
MSDGLEGVIAAQTVLSDVDGAHGRLVIRGYAVEDLAGRTRFEDAAHLLLDGFFDDAPSDLSSALGEARVGVFAEVAALDEGLARRDPVEALRALLARIPDGDDLKTALRLIAAPAVFTPAVLRVANGDAPIAPDPALSHAADILRMIRGVPATDAEAAALDAYLVTVCDHGLNASTFAARVVASTRAGLTSAVLAGLSALKGPLHGGAPGPVIDMLDAIGTPENARPWLERALARGDRLMGFGHRIYRVRDPRADALKAAVRRLSSASGGLPGRLAFAEAVERAALEILREHKPDRPLDTNVEFYTALLLEALGLPPSSFTCVFAMGRVAGWLAHAREQLAGGRLIRPQSVYVGPEVRVAA

SEQ ID NO: 11550 - protein, 388 aa, Caulobacter crescentus CB15
MDAEQVLERLGIRPQTLYAYVSRGRIEAAAHPSDPRRSLYRASDVTALARKKARGRRVADVAAEAIAWGEPVLPSAITTVSGGKLWYRGEDAAGLADQGLTLENVARLLRGGHGAALKASSRPPPPATDSARSRMFLTLAERAGREPPARGRAPLALAMEAADLLDAIVDAATGQAGDGPAHQRFAHAWNLTADGADLVRRALVLMADHELNASTFAARVAASTGASLSAACLAGLSALSGPLHGGMAARVEALVEEADRRDAARAVSSRLEQGASLPGFDHPLYPGGDPRAAALLARFEPPEPLTALWQATRAATGLAPNIDFALVALARGLALPQDAPFILFATARSAGWTAHAIEQLQTGRLIRPRARYIGTVPSAAGYSPSSSS

SEQ ID NO: 11551 - protein, 371 aa, Bacillus anthracis str. A2012
MTVIRGLEGVVATTSSVSSIIDDTLTYAGYNIDDLAENATFEEVVYLLWHRKLPNEQELAKFNEIVSEYYKVPGEILAYLKQVDLKIAHPMSVLRTAISMLSLYDESAEIMDEKSNYLKAVKLQAQVGTLVAAYARIRKGLDVVEPRNDLSLAANFLYMLNDREPNEVEIEAFDKALVLHADHELNASTFTARVCVATLSDVYSGITAAIGALKGPLHGGANENVMKMLTEIGEEENVESYIHNALQNKVKIMGFGHRVYEQGDPRAKHLREMSKRLCVLLGEEKWYNMSIKIEDIVTKEKGLPPNVDFYSASVYHCLGIDHDLFTPIFAISRMSGWLAHILEQYENNRLIRPRADYNGPTHQVYVPIAQR

SEQ ID NO: 11552 - protein, 372 aa, Bacillus anthracis str. A2012
MKAEEKFSPGLDGIVAAETKISFLDTVKGEIVIQGYDLIELSKTKEYLDIVHLLLEEHLPNEDEKATLEKKLKEEYAVPEGVFNVLKALPKETHPMDGLRTGVSALAGYDNDIENRSLEVNKSRGYKLLSKVPNIVANSYHILNNEEPIEPLKELSYSANFFYMLTGKKPTELEEKIFDRSLVLYSEHEMPNSTFTARVIASTQSDLYGALTGAVASLKGSLHGGANEAVMYMLLEAGNVEKFEELLQKKLYNKEKIMGFGHRVYMKKMDPRALMMKEALKQLCDVKGDYTLYEMCEAGEKIMEKEKGIYPNLDYYAAPVYWMLGIPIQLYTPIFFSSRTVGLCAHVIEQHTNNRLFRPRVNYIGERHVLSK

SEQ ID NO: 11553 - protein, 110 aa, Bartonella sp. SC12uk
ANEACLKMLQEIGSVRRIPEFITRAKDKNDPFRLMGFGHRVYKNYDPRAKIMQQTCHEVLKELNIQDDPLLDIAIELEKIALNDQYFGEKKLYPNVDFYSGITLKALGFP

SEQ ID NO: 11554 - protein, 110 aa, Bartonella sp. SV06uk
ANEACLKMLQEIGSVKRIPEFIARAKNKNDPFRLMGFGHRVYKNYDPRAKIMQKTCHEVLKELNIQDDPLLDIAIELEKIALNDEYFVEKKLYPNVDFYSGITLKALGFP

SEQ ID NO: 11555 - protein, 422 aa, Campylobacter jejuni subsp. jejuni NCTC 11168
MSNSVTITDNRNGKSYEFPIYDGTTGPSVVDMSSFYKQTGMFSYDEGLTSTATCKSKITYIDGENGILMHRGYPIEWLAENKLYLDVVHLLLYKELPDATRLEAFRYEMKKRSFIHEGMHRLFDSFPDNAHPMAVLQGAVSSLSAFYPDHLNMNVKEEYMEMAARIVAKIPTIVATAYRYKHGFPMAYPNLDRGFTENFLYMLRTYPYDHVELKPIEVKALDTVFMLHADHEQNASTSTVRAVGSTHAHPYACIAAGIGALWGHAHGGANEGVIRMLEQIGSVDRVDEFIKRAKDKNDPFRLMGFGHRVYKNFDPRAKVLKKLRDQLIDELGIDTNLIKVATRIEEIALSDDYFVQRGLYPNVDFHSGLILKALGIPNEMFATLFVIGRTPGWIAQWIEQKEQESLKIVRPRQLYLGETSKI

SEQ ID NO: 11556 - protein, 355 aa, Methanosarcina mazei Goe1
MNKNICFIDGLEGILKYRDVDINELIDLPYDAVSYLLIKGELSEEKELAEYSARLHAERGINREVMDVIRMCNLNIDSMEALLTVVSFISQFDPDLYDNSLEGNMRKAIRLIAVVPTIVAAYYRTANGKEPVPPDPSLAHGANFLYMIKGSKPDPLEAEVMEKDFILSAEHELNASTFSSRVTASTMSDLYSAVVSGLCTLKGPLHGGARSEVMTMIETIGSPENAEKFVLEKIEKREKIMGFGHRVYKTYDPRGTIFKQLSRRLAEAKGDMHWYETAEAIENAVIRELVEKRGKPIYPNIDFYSGVIYKYMEIPPQLATSIFAIGRISGWIAHCFDQYEKKKIIRPRIFMLDEC

SEQ ID NO: 11557 - protein, 447 aa, Chlorobium tepidum TLS
MSDSDHRNSLTIIDNRTGKSYELPIENGTIRTMDLRKIKESEDDFGLLGYDPAFLNTCSCKSTITFIDGDKGILRYRGYPIEQLAEKSSFLETAYLLIKGELPDKERLAVWTYNIRHHTMTHANLTKFMDGFRYDAHPMGILVGTLGALSTFYPDAKNVGEEESRKLQVRRLIGKMPTLAAMSFRHSLGFPYVLPDNDLSYAGNFLSMMFRMTEKNYKPNPVLEHALDVLFILHADHEQNCSTNAVRSVSSSMVDPYSAIAAGCAALYGPLHGGANEAVIHMLKQIGSVDKIPEFIKLVKSGEGRLMGFGHRVYKNYDPRARIIKKIAFDVFEETGRNPLLDIAIELERIALEDDYFIQRKLYPNVDFYSGLIYQAMGFPTEMFPVLFAIGRTPGWLAQWIEHVKDPEQKIARPRQIYLGEKCRDYVPIDERPRKGDDEQKFGICRL

SEQ ID NO: 11558 - protein, 470 aa, Corynebacterium efficiens YS-314
METFVSRNNILAARDASDLVIESGDLPQPGGTDKKFEREIVASDNNKAVLHYPGGEFEMGIKQATEGNSGVILGKMLSETGLVTFDPGYVSTGSTESKITYIDGDAGILRYRGYDIADLAENATFNEVSYLLIKGELPTPEELHKFNDEIRHHTLLDEDFKSQFNVFPRDAHPMATLASSVNILSTYYQDQLDPLDEAQLDKATVRLMAKVPMLAAYAHRARKGAPYMYPDNSLNARENFLRMMFGYPTEPYEVDPIMVKALDKLLILHADHEQNCSTSTVRMIGSAQANMFVSIAGGINALSGPLHGGANQAVLEMLEEIAANGGDATDFMNRVKNKEKGVRLMGFGHRVYKNYDPRAAIVKDTAHEILEHLGGDPLLDLALKLEEIALNDDYFISRKLYPNVDFYTGLIYRAMGFPTDFFTVLFAIGRLPGWIAHYREQLADPGAKINRPRQIYTGETARKIIPREER

SEQ ID NO: 11559 - protein, 382 aa, Corynebacterium efficiens YS-314
MNDKNVEVRRGLYGVVSDYTAISKVMPETNSLTYRGYPVQDLVEHCSFEEVIYLLWNGELPTAEQLREFNTRGRSYRVLDAGLIALIHSLPMGCHPMDVLRTAVSYMGTKDPEPFTTGADHVLRIGHNLLAQLPMVVAMDIRRRSGADIIAPDPDKGIAENFLSMVFGTASASVATNPEDVRDFEKSLILYAEHSFNASTFTSRVITSTRSDAYSAIAGAIGALKGPLHGGANEFVMHTMLDIDDPDNAAAWVHRALDNKDLIMGFGHRVYKSGDSRVPSMEKSMRALAQRHDAEKWVRMYEQMQQVMEDRTGIKPNLDFPAGPAYHILGFPVDFFTPLFVLARLAGWTAHIVEQYENNSLIRPLAAYNGVEQREVVPIDQR

SEQ ID NO: 11560 - protein, 437 aa, Corynebacterium glutamicum ATCC 13032 [sequence omitted]

SEQ ID NO: 11561 - protein, 383 aa, Corynebacterium glutamicum ATCC 13032
MSSATTTDVRKGLYGVIADYTAVSKVMPETNSLTYRGYAVEDLVENCSFEEVFYLLWHGELPTAQQLAEFNERGRSYRSLDAGLISLIHSLPKEAHPMDVMRTAVSYMGTKDSEYFTTDSEHIRKVGHTLLAQLPMVLAMDIRRRKGLDIIAPDSSKSVAENLLSMVFGTGPESPASNPADVRDFEKSLILYAEHSFNASTFTARVITSTKSDVYSAITGAIGALKGPLHGGANEFVMHTMLAIDDPNKAAAWINNALDNKNVVMGFGHRVYKRGDSRVPSMEKSFRELAARHDGEKWVAMYENMRDAMDARTGIKPNLDFPAGPAYHLLGFPVDFFTPLFVIARVAGWTAHIVEQYENNSLIRPLSEYNGEEQREVAPIEKR

SEQ ID NO: 11562 - protein, 381 aa, Corynebacterium glutamicum ATCC 13032
MSDSQVRKGLNGVISDYTSISKVMPESNSLTYRGYAVEDLVENCSFEEVIYLLWFGELPTTEQLRTFNTTGRSYRSLDAGLISLIHSLPNTCHPMDVLRTAVSYMGTFDPDPFTRDADHIRSIGHNLLAQLPMVVAMDIRRRSGEEIIAPDHNKGIASNFLSMVFGNDDGSVANSADDIRDFERSLILYAEHSFNASTFSARVISSTRSDTYSAITGAIGALKGPLHGGANEFVMHTMLDIDDPNNAADWMGKALDRKERIMGFGHRVYKNGDSRVPSMEKSMRSLAARHRGQKWVHMYESMQEVMEARTGIKPNLDFPAGPAYYMLGFPVDFFTPLFVLARVSGWTAHIVEQFENNALIRPLSAYNGVEEREVVPISERT

SEQ ID NO: 11563 - protein, 394 aa, Corynebacterium glutamicum ATCC 13032
MTSTFSPTEKEKTMSDSQVRKGLNGVISDYTSISKVMPESNSLTYRGYAVEDLVENCSFEEVIYLLWFGELPTTEQLRTFNTTGRSYRSLDAGLISLIHSLPNTCHPMDVLRTAVSYMGTFDPDPFTRDADHIRSIGHNLLAQLPMVVAMDIRRRSGEEIIAPDHNKGIASNFLSMVFGNDDGSVANSADDIRDFERSLILYAEHSFNASTFSARVISSTRSDTYSAITGAIGALKGPLHGGANEFVMHTMLDIDDPNNAADWMGKALDRKERIMGFGHRVYKNGDSRVPSMEKSMRSLAARHRGQKWVHMYESMQEVMEARTGIKPNLDFPAGPAYYMLGFPVDFFTPLFVLARVSGWTAHIVEQFENNALIRPLSAYNGVEEREVVPISERT

SEQ ID NO: 11564 - protein, 382 aa, Thermosynechococcus elongatus BP-1
MVACEFSPGLDGIPVAQSAISYVDGQAGILEYRGVPIQELAEKSTFLETAFLLIWGYWPNREELAAFEHDITYHRRVKYRIRDMMKCFPESGHPMDALQASAGALGLFYSRRALEDPEYIRAAVIRLLAKIPTMVAAFQLIRKGNDPVMPCDELDYAANFLYMLNERRPDPFAARVFDICLILHAEHTMNASTFSARVTASTLTDPYAVVASAVGTLAGPLHGGANEDVINMLEEIGSVENVRPYVEKCIQNKIKIAGFGHRVYKVKDPRATILQKLAEQLFDKFGGDRYYDIALKLEEVVGEYLSYKGIYPNVDFYSGLVYRRLGIPSDLFTPVFAIARVAGWLAHWKEQLEANRIYRPTQVYTGAHNQPYVPMEERNHRP

SEQ ID NO: 11565 - protein, 427 aa, Shigella flexneri 2a str. 301
MADTKAKLNLNGDTAVELDVLKGTLGQDVIDIRTLGSKGVFTFDPGFTSTASCESKITFIDGDEGILLHRGFPIDQLATDSNYLEVCYILLNGEKPTQEQYDEFKTTVTRHTMIHEQITRLFHAFRRDSHPMAVMCGITGALAAFYHDSLDVNNPRHREIAAFRLLSKMPTMAAMCYKYSIGQPFVYPRNDLSYAGNFLNMMFSTPCEPYEVNPILERAMDRILILHADHEQNASTSTVRTAGSSGANPFACIAAGIASLWGPAHGGANEAALKMLEEISSVKHIPEFVRRAKDKNDSFRLMGFGHRVYKNYDPRATVMRETCHEVLKELGTKDDLLEVAMELENIALNDPYFIEKKLYPNVDFYSGIILKAMGIPSSMFTVIFAMARTVGWIAHWSEMHSYGMKIARPRQLYTGYEKRDFKSDIKR

SEQ ID NO: 11566 - protein, 389 aa, Escherichia coli CFT073
MSDTTILQNSTHVIKPKKSVALSGVPAGNTALCTVGKSGNDLHYRGYDILDLAEHCEFEEVAHLLIHGKLPTRDELAAYKTKLKALRGLPANVRTVLEALPAASHPMDVMRTGVSALGCTLPEKEGHTVSGARDIADKLLASLSSILLYWYHYSHNGERIQPETDDDSIGGHFLHLLHGEKPSQSWEKAMHISLVLYAEHEFNASTFTSRVIAGTGSDMYSAIIGAIGALRGPKHGGANEVSLEIQQRYETPGEAEADIRKRVENKEVVIGFGHPVYTIADPRHQVIKRVAKQLSQEGGSLKMYNIADRLETVMWESKKMFPNLDWFSAVSYNMMGVPTEMFTPLFVIARVTGWAAHIIEQRQDNKIIRPSANYVGPEDRQFVALDKRQ

SEQ ID NO: 11567 - protein, 113 aa, Rickettsia sp. ATT
VNEAVINMLKEIGSSEYIPKYIAKAKDKNDPFRLMGFGHRVYKNYDPRAAVPKETCKEVLKELGQLDNNPLLQIAIELEAIALKDEYFIERKLYPNVDFYSGIIYKAMGIPSQ

SEQ ID NO: 11568 - protein, 113 aa, Rickettsia sp. HOT1
ANEAVINMLKEIGSSEYIPKYIAKAKDKNDPVRLMGFGHRVYKNYDPRAAILKETCKEVLKELRQLDNNPLLQIAIELEAIALKDEYFIERKLYPNVDFYSGIIYKAMGIPSQ

SEQ ID NO: 11569 - protein, 113 aa, Rickettsia sp. HOT2
ANEAVINMLKEIGSSEYIPKYIAKAKDKNDPFRLMGFGHRVYKNYDPRAAVLKETCKEVLKELRQLDNNPLLQIAIELEAIALKDEYFIERKLYPNVDFYSGIIYKAMGIPSQ

SEQ ID NO: 11570 - protein, 401 aa, Thermobifida fusca
MGGPLTAPRMSAKDPRTVQWITNPRTEETEEAGMSDFKPGLEGVVAFETEIAEPDKEGGALRYRGVDIEQLVGHVTFGRVWGLLVDNSFNPGLPFADPIDLPVSTGDVRVDVQSALATLAPRWGFKPLLDIDEAEARDNVARAASAALSIIAQSARGDQPKVPQSRVDEGKTIVERFMIQLRGEPDPLHVKAVDAYWTSAAEHGMNASTFTARVIASTGADVAAALSGAVGAMSGPLHGGAPARVLHMLDETERLGDARKYVTQALDRGERLMGFGHRVYRAEDPRARVLRRTAKELNAPRFEVASALEKAALEELQARKPDRVLATNVEYWAAVVLDFAQIPASMFTSMFTCARTAGWSAHILEQKRTGRLVRPSARYVGPAVRDIKSVEGADEALAQGI

SEQ ID NO: 11571 - protein, 456 aa, Clostridium thermocellum ATCC 27405
MMNANFMEFEKNKLEELTELATKCSYIDPELFVKYQVKRGLRDLDGKGVLVGLTEIGEVHSYIIDENEIVPVPGRLIYRGIDIFDLVDGFISEGRFGFEETTYLLLFGDLPTREQLNEFEKLLSSYRELPEEFLNDMILNLPGKDIMNVLARSVLAYYTYDSNPDDTSVKNVLRQCMRLIGSMPTIAVYAYQAMAHYYDRKSLVIHPPRPELSTAENILHMLRPDSKYTDLEARLLDLALVLHAEHGGGNNSTFVTHVVTSTGTDTYSVIAAALGSLKGPRHGGANIKVCQMFEDLKQNVRDWKDDEEIENYLMKLLNKEAFDRAGLIYGIGHAVYSISDPRCILLKEQAEKLAKEKGLEDEFELYDRVERLAPQIIGRVRKMYKGVSANVDFYSGFVYKMLNLPLELYTPIFAISRMSGWAAHRIEEIVNAGKIIRPAYKSVAERRDYVAMKDRK

SEQ ID NO: 11572 - protein, 454 aa, Microbulbifer degradans 2-40
MADVISYNLFILLQESVMTDKKATLTVDGLDDSIELPVYSGSVGPDVIDVRALTGKGYFTYDPGFVSTASCESKITYIDGDKGVLMHRGYPIETLAEKSDYLETCYLLLHGELPSAAEYEEFKGIITHHTMVHESIARFFRGFHYDSHPMAMMCGIVGALSAFYHDSLDISNPEHRLISAHRLIAKMPTLAAMCYKHSQGQPFMYPDNNLGYAENFLHMMFGTPCDDPKVNPVIARAMDRIFLLHADHEQNASTSTVRLAGSSGANPFACIAAGIATLWGPAHGGANEAVLSMLEEIGDEKNIDAYVAKAKDKNDPFRLMGFGHRVYKNFDPRAKVMKETCDEVLTELGLENDPLLKIAKRLEQIALEDEYFIQKKLYPNVDFYSGIIMKAIGIPTDMFTVIFATGRTVGWIAHWHEMISEGFKIGRPRQLYTGSVLREFEERDSRPKANPAKF

SEQ ID NO: 11573 - protein, 383 aa, Trichodesmium erythraeum IMS101
MSVVCIEFKPGLEGVPATQSSVSYVDGQKGILEYRGINIEELAKKSSFLEAAYLLIWGNLPTQEELQSFEQEICLNRRIKYRIRDMMKCFPETGHPMDALQTSAAALGLFYSRRALDNPEYIRKAVVRLLANIPTMVAAFELMRKGNDPVKPRDDLGYAANFLYMLNEREPDPLAAKVFDICLTLHAEHTINASTFSAMVTASTLTDPYGVIASAVGTLAGPLHGGANEDVISMLSEIGSVENVKPYLKRCFETKAKIAGFGHRVYKVKDPRAIILQELAVDLFEKFGDDKYYQIALEMEKVVEEKLGHKGIYPNVDFYSGLVYRKLGIPSDLFTPVFAIARVAGWLAHWKEQLAANRIFRPTQIYSGDHNIAYTSLEERALI

SEQ ID NO: 11574 - protein, 362 aa, Rickettsia sp. RDa420
WQDVIDISKVYSEADCFTYDPGFMSTASCRSTITYIDGDQGILRHRGYDIKDLAEKSDFLEVAYLLIYGELPNSKQYNDFTKKVAHHALVNERLHYLFQTFCSSSHPMAIMLAAVGSLSAFYPDLLNFFKEADYELTAIRMIAKIPTIAAMSYKYSIGQPFVYPDNSIDFTENFLHMMFATPCEKYKVNPVIKNALNKIFILHADHEQNASTSTVRIAGSSGANPFACVSTGIASLWGPAHGGANEAVINMLKEIGSVENIPKYIAKAKDKNDNFRLMGFGHRVYKNYDPRAAVLKETCKEVLKELGQLDNNPLLQIAIELEAIALKDEYFIERKLYPNVDFYSGIIYKAMGIPPQMFTVLF

SEQ ID NO: 11575 - protein, 369 aa, Rickettsia sp. RDla440
DSEFAELKIRGKIFKLPILKASIGEDVIDISRVSAEADCFTYDPGFMSTASCQSTITYIDGDKGILRHRGYDIKDLAEKSDFLEVAYLLIYGELPSGEQYNNFTKQVAHHSLVNERLHYLFQTFCSSSHPMAIMLAAVGSLSAFYPDLLNFKEADYELTAIRMIAKIPTIAAMSYKYSIGQPFIYPDNSLDFTENFLHMMFATPCTKYKVNPIIKNALNKIFILHADHEQNASTSTVRIAGSSGANPFACISTGIASLWGPAHGGANEAVINMLKEIGSFEYIPKYIAKAKDKNDPFRLMGFGHRVYKNYDPRAAVLKETCKEVLKELGQLDNNPLLQIAIELEAIALKDEYFIERKLYPNVDFYSGII

SEQ ID NO: 11576 - protein, 430 aa, Brucella suis 1330
MSDKTASFTLDGKTFDLPVRKGTVGPDVVDIGPLYKNSHAFTYDPGFTSTASCESKITYIDGDEGVLLYRGYPIDQLAEHGDFLETCYLLLYGELPTATQKADFDYRVTRHTMLHEQMTKFFTGFRRDAHPMAVMVGCLGAMSAFYHDSTDITDPHQRMVASIRLIAKVPTLAAMAYKYHIGQPFVYPKNDLDFASNFLHMCFTVPCEEYKVNPVLARAMDRIFILHADHEQNASTSTVRLAGSSGANPFACIAAGVACLWGPAHGGANEAALNMLSEIGSVDRIPEYIARAKDKNDPFRLMGFGHRVYKNYDPRAKIMQKTCHEVLGELGIKDDPLLDVAMELERIALTDEYFIEKKLYPNIDFYSGITLKALGFPTEMFTVLFALARTVGWVAQWKEMIEDPQQKIGRPRQLYTGATERDYVPLAKRK

SEQ ID NO: 11577 - protein, 439 aa, Bifidobacterium longum DJO10A
MVHEEEGARMATAQLDVDSNKFNLPVVKASAGPDGIVVSKLRNDGWVTLDPGFLTTAQCESKITYIDGKHSILRYCGYPIEQLCENSDFLEVAWLLRHGELPSRAEYEQFCADINHKTMVGEDFRTFMGSFPRSAHPMSVLASAINALATFYPDTTDISDTDQLDEAAKIIMAKARTIVSYIFRRRRDEPMLYPDYARGYVDDFLRMCFAVPYEPFESDPLYVHALGRLLIIHADHEQNCSTSVVRIAGSAHANLYSAVAAGVNALSGPLHGGANEAVLRQLKAIRDSGKSVAEFVRDAKENGQKISGLGHRVYKSYDPRAAIARKYLEKIMEREDTQKLPSDERALFAVATELEDIALNDEYFVSRNLYPNVDFYTGLIYRAIGFDPAMFTTLFALGRIPGWIAQYREMLADPNTKIGRPRQVYTGPVERDFVPMDER

SEQ ID NO: 11578 - protein, 427 aa, Haemophilus somnus 129PT
MSKLTAKLTLSDGREFDLNVQQGTLGYDAVDVQPLVKNKLFTFDPGFMSTASCVSEITYIDGDNGILLHRGYPIADLAKNADYLEVAHLLLFGERPNKEEYANFIKLVKNHTLVHEQISRFFHGFRRDSHPMAIMCGVSGALAAFYHDSLDINDIEHRELTAIRLLAKMPTLAAMCYKYSIGQPFMFPLNKLSYAGNFLYMMFATPCEPYEVNPVLEKAMDRIFILHADHEQNASTSTVRTAASSGANPFACIAAGIASLWGPAHGGANEACINMLEEIGSVDRIPEYIARAKDKNDPFRLMGFGHRVYKNYDPRAKVMRQTCHEVLKELNIQTPLFDVAMELERIALNDPYFIDHKLYPNVDFYSGIILKAIGIPTSMFTVIFALARTVGWIAHWKEMFKPGNMKIVRPRQLYKGHTERNFDAIEK

SEQ ID NO: 11579 - protein, 429 aa, Pseudomonas syringae pv. syringae B728a
MADKKAQLIIEGAAPVELPILTGTVGPDVIDVRGLTATGRFTFDPGFMSTASCDSKITYIDGDNGILLHRGYPIEQLAEQSDYLETCYLLLNGELPTAEQKAQFVAVVKNHTMVHEQLKTFFNGFRRDAHPMAVMCGVVGALSAFYHDSLDINNPQHREISAVRLVAKMPTLAAMVYKYSMGQPMMYPRNDLSYAENFLHMMFNTPCEIKPISPVLAKAMDKIFILHADHEQNASTSTVRMAGSSGANPFACIAAGIAALWGPAHGGANEAVLTMLDEIGDVSNIDTFIAKAKDKNDPFKLMGFGHRVYKNRDPRATVMKQTCDEVLKELGITNDPQLELAMRLEEIALTDPYFIERSLYPNVDFYSGIILKAIGIPTSMFTVIFALARTVGWISHWKEMLSSPYKIGRPRQLYTGNVQRDIVALQDRK

SEQ ID NO: 11580 - protein, 375 aa, Pseudomonas syringae pv. syringae B728a
MAEAKVLSGAGLRGQVAGQTALSTVGMAGAGLTYRGYDVRDLAAEARFEEVAYLLLYGELPNQAELSAYMDKLKRLRDLPQALKEVLERIPADTHPMDVMRTGASMLGTLEPERSFDQQRDSTGRLLAAFPAIMCYWYRFSHDGRRIDCTSAEDSIGGHFLHLLLDKAPSELHRKVMDVSLILYAEHEFNASTFTARVCASTLSDLYSCVTAAIGTLRGPLHGGANEAAMEMIQRFASAEEATKGTLGMLERKEKIMGFGHAIYKESDPRNEVIKGWSKKLADEVGDTVLFPVSEAIDKVMWEQKKLFPNADFYHASAYHFMGIPTKLFTPIFVCSRLTGWAAHVFEQRANNRIIRPSAEYIGVEQRAFVPLEQR

SEQ ID NO: 11581 - protein, 429 aa, Pseudomonas fluorescens PfO-1
MADKKAQLIIEGAAPVELPILTGTVGPDVIDVRGLTATGRFTFDPGFMSTASCESKITYIDGDNGILLHRGYPIEQLAEKSDYLETCYLLLNGELPTAEQKAQFVGTVKNHTMVHEQLKTFFNGFRRDAHPMAVMCGVVGALSAFYHDSLDINNPQHREISAIRLVAKMPTLAAMVYKYSMGQPMMYPRNDLSYAENFLHMMFNTPCEIKPISPVLAKAMDRIFILHADHEQNASTSTVRLAGSSGANPFACIAAGIAALWGPAHGGANEAVLTMLDEIGDVSNIDKFIAKAKDKNDPFKLMGFGHRVYKNRDPRATVMKQTCDEVLKELGIQNDPQLELAMRLEEIALTDPYFIERSLYPNVDFYSGIILKAIGIPTSMFTVIFALARTVGWISHWKEMLSSPYKIGRPRQLYTGYESRDITKLEDRK

SEQ ID NO: 11582 - protein, 423 aa, Pseudomonas fluorescens PfO-1
MSSTPCRLAWSFTIASITTPSSRSSTRCLRRRSKPQPYSLINSRLETTMAEAKVLSGAGLRGQVAGQTALSTVGQAGAGLTYRGYDVRELAADAQFEEVAYLLLYGELPTKAQLADYQGKLSKLRDLPQALKEVLERIPADAHPMDVMRTGCSFLGNIEPEKDFSEQRDKTDRLLAAFPAIMCYWYRFSHDGKRINCVSDEPSIGGHFLHLLHDKKPSELHVKVMNVSLILYAEHEFNASTFTARVCASTLSDLYSCVTAAIGSLRGPLHGGANEAAMEMIERFSSPEEAVKGTLGMLERKDKIMGFGHAIYKDSDPRNEVIKGWSKKLADEVGDKVLFAVSEAIDKTMWEQKKLFPNADFYHASAYHFMGIPTKLFTPIFVCSRLTGWAAHVFEQRANNRIIRPSAEYTGVEQRKFVPIEQR

SEQ ID NO: 11583 - protein, 430 aa, Bifidobacterium longum NCC2705
MATAQLDVDSNKFNLPVVKASAGPDGIVVSKLRNDGWVTLDPGFLTTAQCESKITYIDGKHSILRYCGYPIEQLCENSDFLEVAWLLRHGELPSRAEYEQFCADINHKTMVGEDFRTFMGSFPRSAHPMSVLASAINALATFYPDTTDISDNDQLDEAAKIIMAKARTIVSYIFRRRRDEPMLYPDYARGYVDDFLRMCFAVPYEPFESDPLYVHALGRLLIIHADHEQNCSTSVVRIAGSAHANLYSAVAAGVNALSGPLHGGANEAVLRQLKAIRDSGKSVAEFVRDAKENGQKISGLGHRVYKSYDPRAAIARKYLEKIMEREDTQKLPSDERALFAVATELEDIALNDEYFVSRNLYPNVDFYTGLIYRAIGFDPAMFTTLFALGRIPGWIAQYREMLADPNTKIGRPRQVYTGPVERDFVPMDER

SEQ ID NO: 11584 - protein, 126 aa, Rickettsia sp. HL-30
GPAHGGANEAVINMLKEIGSSENIPKYIAKAKDKNDPFRLMGFGHRVYKNYDPRAAVLKETCKEVLKELGQLENNPLLQIAIELEAIALKDEYFIERKLYPNVDFYSGIIYKAMGIPSQMFTVLFA

SEQ ID NO: 11585 - protein, 428 aa, Pseudomonas aeruginosa PAO1
MADKKAQLIIEGSAPVELPVLSGTMGPDVVDVRGLTATGHFTFDPGFMSTASCESKITYIDGDKGVLLHRGYPIEQLAEKSDYLETCYLLLNGELPTAAQKEQFVGTIKNHTMVHEQLKTFFNGFRRDAHPMAVMCGVIGALSAFYHDSLDINNPKHREVSAHRLIAKMPTIAAMVYKYSKGEPMMYPRNDLNYAENFLHMMFNTPCETKPISPVLAKAMDRIFILHADHEQNASTSTVRLAGSSGANPFACIASGIAALWGPAHGGANEAVLRMLDEIGDVSNIDKFVEKAKDKNDPFKLMGFGHRVYKNFDPRAKVMKQTCDEVLQELGINDPQLELAMKLEEIARHDPYFVERNLYPNVDFYSGIILKAIGIPTSMFTVIFALARTVGWISHWQEMLSGPYKIGRPRQLYTGHTQRDFTALKDRG

SEQ ID NO: 11586 - protein, 375 aa, Pseudomonas aeruginosa PAO1
MAEAKVLSGAGLRGQVAGQTALSTVGQEGAGLTYRGYDVRDLAAAAIFEEVAYLLLYGELPNKQQLDAYLKKLQGQRDLPQALKEVLERIPKDAHPMDVMRTGASVLGTLEPELSFDQQRDVADRLLAAFPAIMTYWYRFTHEGQRIDCNSDEPTIGGHFLALLHGKKPSELHVKVMNVSLILYAEHEFNASTFTARVCASTLSDLYSCVTGAIGSLRGPLHGGANEAAMELIERFSSPQEATAELLKMLERKDKIMGFGHAIYKDSDPRNEVIKGWSKQLADEVGDKVLFAVSEAIDKTMWEQKKLFPNADFYHASAYHFMGIPTKLFTPIFVCSRTSGWTAHVFEQRANNRIIRPSAEYTGVEQRAFVPLEQR

SEQ ID NO: 11587 - protein, 372 aa, Streptococcus mutans UA159
MAETNGLKDMIACDTRISAIKDNKLSYAGYDIADLMDNKARFEEVIYLLWNLHLPTAIELKQFEEKLRKNYAISDAIEQCILIQSRQHLHPMSVLRSTVSLLGVYNLKAEERSVEATYDQSIQLMAKIPTIIATFARLRQGLSPIAPRKDLGFAANFLYMLNGRLPSELEILAMNRALVLHAEHELNASTFAARVCASTLSDIYSCVTTAIGTLKGPLHGGANERVFDMLREIREYGDVDSYLQEKLNSKEKIMGFGHRVYQTQDPREKYLREMARELTKGTEHDIWYQLSKKVEICMKQKKNLIPNVDFYSATVYHVLGIDSSIFTLIFAMSRVSGWIAHIQEQQKNNKLIRPRSHYTGMRKLRYIPIERR

SEQ ID NO: 11588 - protein, 428 aa, Shewanella oneidensis MR-1
MADLKAKLELPGNDSIELPVKQGSAGFDVIDISKLGSKGYFTFDPGFLATASCESAITYIDGDQGILLHRGYPIEQLAVDSDYLDLCYLLLYGELPTKEQYAEFVHTVKTHTMVHEQIAFFFRGFRRDAHPMAMLCGVTGALSAFYQDSLDVNDPRHREIAAYRLVSKMPTIAAMCYKYSSGQPFVYPRNDLSYAGNFLSMMFAVPCEEYKVNPIVERAMDRIFILHADHEQNASTSTVRLAGSSGANPFACIAAGIASLWGPAHGGANEACLQMLEEIGSVDRIPEFIARAKDKNDPFRLMGFGHRVYKNFDPRAKVMRETCHEVLKELKVQDPLLDVAMELERIALEDEYFISKKLYPNVDFYSGIIMKAIGIPTSMFTVLFALSRTVGWIAHWKEMLDQPGHKISRPRQLYTGETARDFVDLDKR

SEQ ID NO: 11589 - protein, 375 aa, Shewanella oneidensis MR-1
MSDAKKLTGAGLRGQSAGETALSTVGVSGSGLTYRGYDVKDLAENATFEEVAYLILYGELPTTAQLAAYKTKLKGMRGLPQALKEVLERIPADAHPMDVMRTGCSMLGNLEAEHSFSEQSQIADRLLAAFPSIICYWYRFSHDGVRIDTETDDDQIGAHFLHLLHGKAPSALHTKVMDVSLILYAEHEFNASTFTARVCASTLSDMHSCVTGAIGSLRGPLHGGANEAAMELIQDMKDEADARDVLMGKLERKEKIMGFGHAIYRDSDPRNAIIKEWSEKLAADYGDDRLYRVSVACEALMWEQKKLFCNADFFHASAYHFMGIPTKLFTPIFVCSRVTGWTAHVMEQRSNNRIIRPSADYVGVSPRKVIPIANR

SEQ ID NO: 11590 - protein, 426 aa, Yersinia pestis CO92
MADKKATLNLGEAAIELGVLSPTLGTDVIDVRTLGSKGYFTFDPGFTSTASCESKITYIDGDQGILLHRGFPIAQLAKDSTYLEVCYILLYGETPTPEEYKTFKTTVTRHTMIHEQITRLFHGFRRDSHPMAVLCGVTGALAAFYHDALDVNNERHREITAFRLLSKMPTVAAMCYKYSLGQPFVYPRNDLSYAGNFLHMMFSTPCEKYEVNPVLERAMDRILILHADHEQNASTSTVRTAGSSGANPFACIAAGIASLWGPAHGGANEACLKMLEEIKTVEHIPEFIRRAKDKNDSFRLMGFGHRVYKNYDPRATVMRETCHEVLEELKLNNSLLEVAMELENIALNDPYFIEKKLYPNVDFYSGIILKAMGIPSSMFTVIFAIARTIGWIAHWNEMHNDGIKIARPRQLYTGYTERDFQSQLKK

SEQ ID NO: 11591 - protein, 429 aa, Vibrio vulnificus CMCP6
MADKKATLHVEGKAPIELPIMEGSLGTPVIDVRKLGANGYFTFDPGFLATASCESQITYIDGGKGILLHRGYPIDQLANNADYLEVCYILLYGEAPTREQYEKFKTTVTRHTMVHEQIASFFHGFRRDAHPMAVMCGVVGALAAFYHDSLDINNDLHREITAYRLLSKMPTLAAMCYKYSTGQPFIYPRNDLSYAENFLHMMFATPCEEYEVNPVVARAMDKIFTLHADHEQNASTSTVRLAGSSGANPFACIAAGIASLWGPAHGGANEACLKMLEEIGSVDNIPEYVDRAKDKDDPFRLMGFGHRVYKNYDPRATVMRETCHEVLKELNIQDPLLDVAMELERIALSDEYFVSKKLYPNVDFYSGIILKAIGIPVSMFTVIFAISRTIGWIAHWNEMHSDPLNRIGRPRQLYTGEVQRDFQPMHERE

SEQ ID NO: 11592 - protein, 380 aa, Vibrio vulnificus CMCP6
MPSSLTKKGELGGAGLRGQSAGSTALCTVGKTGTGLTYRGYDITDLANHAQFEEVAYLLLRGHLPTQQELDAYKTRLIGLRGLPVELKQALELIPASAHPMDVMRTGCSVLGNLEQETDFSQQLDATERMLALFPAIICYWYRFSHDGVRIDTQDQSQDCIGGYFLKMLTGKEPSELHKQVMHCSLILYAEHEFNASTFAARVCASTLSDIHSCVTAAIGTLRGPLHGGANEAAMEMIENWQTPEEAESNILRMLANKEKIMGFGHAIYRESDPRNALIKRWSKALSEAVGDTHLYAVSERVEAVMKREKDLFCNADFFHASAYHFMDIPTKLFTPIFVMSRLTGWTAHVFEQRANNRIIRPSADYIGPDHQDWVPIEQR

SEQ ID NO: 11593 - protein, 359 aa, Methanosarcina barkeri
MRYKMSKNICFIDGLEGILKYREIDINQLVDLPYDAVSYLLILGDLPGDQELAEYSACLHGEREVNREVIDVIHMCNFNIDSIEALRTIVSFISQFDPDINDSSPEGNMRKATRLIAKIPTIVAAYYRIANGKEPVPPDPSLSHGANFLYMLRGNKPTQLEAEVMEKDFILSAEHELNASTFSSRVTASTLSDLYSAVVSGLCTLKGPLHGGARAEVTAMIEEIACPENAENYVLDKLSKKEKIMGFGHRVYKTYDPRGMIFKQLAKQLAEAKGDMHWYNIAEVVENTVIRELVEKKGKPIYPNVDFYSGVIYKYMDIPPQLATSIFAIGRVSGWIAHCFDQYEKKKIIRPRAFMLDEC

SEQ ID NO: 11594 - protein, 373 aa, Oceanobacillus iheyensis HTE831
MTASTKGLEGIVATQSSISSIIDDQLSYVGYRIDDLAENSSFEEIIYLLWNQKLPNKSELDELKSQLAENMDIPDAIINHLRSYDLNTVHPMAALRTAISLLGLYDNEADVMDEQANKRKAVRIQAQIATIVTTFSRIRKGQEPVKPKKDLSYAENFIYMLNGKEPEDIEVEAINKALVLHADHELNASTFTARVCVATLSDIYSGITAAIGALKGPLHGGANENVMKMLTEIGEEENAIPYIKEKLANKDKIMGMGHRVYRTGDPRAKFLREMSKELTKLTGQEKWYNMSVKIEDYIKENKGLPANVDFYSASVYHSLGLDHDIFTPLFAVSRTSGWIAHILEQYENNRLIRPRAEYTGPELRDYVSIEQRG

SEQ ID NO: 11595 - protein, 368 aa, Oceanobacillus iheyensis HTE831
MKTDEKFVPGLDGVIASETAISFLDVEKEKIIINGHDLIELSLKQDYLDILYLLLEGDLPKKVEITKTEKLLKDHYEVPQAVLDILKLLPKETHPMDGMRTALSVLAGYDKNIEDRSASANKDRAYQLLGQLPTITVNSYRILNNQEVVQPATELSYSANFLYMITGKEPSDLQVEIFDRLLLLYSEHEMPNSTFTARVISSTNSDMYGALTGAISSLKGNLHGGANEAVMYMLNEVETADEFEQLLYKKLENKEKIMGFGHRVYMKKMDPRALITKEALKKLCEKDNDYTLLEMCEAGEEVMKKEKGLYPNLDYYAAPVYWKLGIPISLYTPIFFSARTAGLAAHIVEQHSNNRIFRPRVKYIGKDY

SEQ ID NO: 11596 - protein, 429 aa, Pseudomonas syringae pv. tomato str. DC3000
MADKKAQLIIEGAAPVELPILTGTVGPDVIDVRGLTATGRFTFDPGFMSTASCESKITYIDGDNGILLHRGYPIEQLAEQSDYLETCYLLLNGELPTAEQKAQFVAVVKNHTMVHEQLKTFFNGFRRDAHPMAVMCGVVGALSAFYHDSLDINNPQHREISAVRLVAKMPTLAAMVYKYSMGQPMMYPRNDLSYAENFLHMMFNTPCEIKPISPVLAKAMDKIFILHADHEQNASTSTVRMAGSSGANPFACIAAGIAALWGPAHGGANEAVLTMLDEIGDVSNIDTFIAKAKDKNDPFKLMGFGHRVYKNRDPRATVMKQTCDEVLKELGIKNDPQLELAMRLEEIALTDPYFIERSLYPNVDFYSGIILKAIGIPTSMFTVIFALARTVGWISHWKEMLSSPYKIGRPRQLYTGNVQRDIIALKDRK

SEQ ID NO: 11597 - protein, 375 aa, Pseudomonas syringae pv. tomato str. DC3000
MAEAKVLSGAGLRGQVAGQTALSTVGMAGAGLTYRGYDVRELAAEAQFEEVAYLLLYGELPTQSQLAAYLGKLKGLRDLPQALKEVLERIPADTHPMDVMRTGASMLGTLEPELSFDQQRDATDRLLAAFPAIMCYWYRFSHDGQRIDCTTDESSIGGHFLHLLLDKTPSELHRKVMDVSLILYAEHEFNASTFTARVCASTLSDLYSCVTAAIGTLRGPLHGGANEAAMEMIQRFASADEATQGTLGMLERKEKIMGFGHAIYKESDPRNEVIKGWSKKLADEAGDSVLFPVSEAIDKVMWEQKKLFPNADFYHASAYHFMGIPTKLFTPIFVCSRLTGWAAHVFEQRANNRIIRPSAEYIGVEQRSFVPIEQR

SEQ ID NO: 11598 - protein, 429 aa, Vibrio parahaemolyticus RIMD 2210633
MADKKATLHVEGQAPIELPIMDGTLGTPVIDVRKLGANGYFTFDPGFLATASCESSITYIDGGKGILLHRGYPIDQLANNADYLEVCYILLYGEAPTREQYEQFKTTVTRHTMVHEQIASFFHGFRRDAHPMAVMCGVVGALAAFYHDSLDINNDEHREIAAYRLLSKMPTLAAMCFKYSVGQPFIYPRNDLSYAENFLHMMFANPCEEYEVNPVVARAMDKIFTLHADHEQNASTSTVRLAGSSGANPFACIAAGIASLWGPAHGGANEACLKMLEEIGSVDNIPEYVERAKDKDDPFRLMGFGHRVYKNYDPRATVMRETCHEVLKELNIKDPLLDVAMELERIALSDEYFVSKKLYPNVDFYSGIILKAIGIPVSMFTVIFAISRTIGWIAHWNEMHSDPLNRIGRPRQLYKGETQREFSPLHERE

SEQ ID NO: 11599 - protein, 380 aa, Vibrio parahaemolyticus RIMD 2210633
MPQTVAKKAELGGAGLRGQSAGSTALCTVGKTGTGLTYRGYDITDLANNAQFEEVAHLLLRGHLPSQQELDAYKTHLLSLRGLPTELKQALELIPASAHPMDVMRTGCSVLGNLEQEMSFDEQLQATERMLALFPAIICYWYRFSHDGVRIDTEDQTEDCIGGYFLRLLTDKEPSVLHKQVMHCSLILYAEHEFNASTFAARVCASTLSDIHSCITAAIGTLRGPLHGGANEAAMEMIEDWQTPDEAEANIMQMLANKDKIMGFGHAIYRESDPRNALIKRWSEELSKHVGDTHLYAVSERVESVMKREKGLFCNADFFHASAYHFMDIPTKLFTPIFVMSRLTGWAAHVYEQRANNRIIRPSADYTGPDHQEWVPIENR

SEQ ID NO: 11600 - protein, 372 aa, Bacillus subtilis subsp. subtilis str. 168
MTATRGLEGVVATTSSVSSIIDDTLTYVGYDIDDLTENASFEEIIYLLWHLRLPNKKELEELKQQLAKEAAVPQEIIEHFKSYSLENVHPMAALRTAISLLGLLDSEADTMNPEANYRKAIRLQAKVPGLVAAFSRIRKGLEPVEPREDYGIAENFLYTLNGEEPSPIEVEAFNKALILHADHELNASTFTARVCVATLSDIYSGITAAIGALKGPLHGGANEGVMKMLTEIGEVENAEPYIRAKLEKKEKIMGFGHRVYKHGDPRAKHLKEMSKRLTNLTGESKWYEMSIRIEDIVTSEKKLPPNVDFYSASVYHSLGIDHDLFTPIFAVSRMSGWLAHILEQYDNNRLIRPRADYTGPDKQKFVPIEERA

SEQ ID NO: 11601 - protein, 366 aa, Bacillus subtilis subsp. subtilis str. 168
MVHYGLKGITCVETSISHIDGEKGRLIYRGHHAKDIALNHSFEEAAYLILFGKLPSTEELQVFKDKLAAERNLPEHIERLIQSLPNNMDDMSVVRTVVSALGENTYTFHPKTEEAIRLIAITPSIIAYRKRWTRGEQAIAPSSQYGHVENYYYMLTGEQPSEAKKKALETYMILATEHGMNASTFSARVTLSTESDLVSAVTAALGTMKGPLHGGAPSAVTKMLEDIGEKEHAEAYLKEKLEKGERLMGFGHRVYKTKDPRAEALRQKAEEVAGNDRDLDLALHVEAEAIRLLEIYKPGRKLYTNVEFYAAAVMRAIDFDDELFTPTFSASRMVGWCAHVLEQAENNMIFRPSAQYTGAIPEEVLS

SEQ ID NO: 11602 - protein, 372 aa, Bacillus subtilis subsp. subtilis str. 168
MEEKQHYSPGLDGVIAAETHISYLDTQSSQILIRGYDLIELSETKSYLELVHLLLEGRLPEESEMETLERKINSASSLPADHLRLLELLPEDTHPMDGLRTGLSALAGYDRQIDDRSPSANKERAYQLLGKMPALTAASYRIINKKEPILPLQTLSYSANFLYMMTGKLPSSLEEQIFDRSLVLYSEHEMPNSTFAARVIASTHSDLYGALTGAVASLKGNLHGGANEAVMYLLLEAKTTSDFEQLLQTKLKRKEKIMGFGHRVYMKKMDPRALMMKEALQQLCDKAGDHRLYEMCEAGERLMEKEKGLYPNLDYYAAPVYWMLGIPIPLYTPIFFSARTSGLCAHVIEQHANNRLFRPRVSYMGPRYQTKS

SEQ ID NO: 11603 - protein, 259 aa, Aquifex aeolicus VF5
MADKKWKTAISTHVNHEPYVRGYRLLDLVGNLTFSEAIYLLLKGELPSEAEAKMMDAIFVSVIEHSIAPPSVIATRAVISGGNSLNVGVGAGVLAFGSAHGGALEDAMKFMQEGVKSNRPVEEIVKEYLSQKKPIPGYGHRYYKEFDPRTKRLFELAEKYGFCKEHCEFAKKVEEEIYKQKGKRIVLNVDGAIAAITSDMGFDWRLGKGFFIIGRVPGLVAHAYEELTQEKPFSKRLSEEEYEYTGVEPRELPPERKKV

SEQ ID NO: 11604 - protein, 372 aa, Archaeoglobus fulgidus DSM 4304
MKDGLEDVIACKTTISRIALENGRAILEYRGYDIRDLARKASYEEVAYLLLYGELPKKYELQDFKIELAERRELPPQIIGLLTHLPPYTHPMVVLRTATSYLGSLDKKIAVRTREETFNKAKDLIAKFPTIVAYYHRIRTGRNIIPPALEFSHAANFLYMLHGEEPTKTAERALDMDLILHAEHELNASTFAARIAASTLADIYACVVAATGTLMGPLHGGAAQEVMRMLREVASPRRAEEYVKRKIEAGERIMGFGHRVYRGVMDPRAELLRYLAKRLAAEGSTKWFEISEAIAKAAYKYKKLLPNVDFYSASVYANLGIPDDLFVNIFAMGRISGWTAHIIEQYENNRLIRPRAEYVGEKEKKFIPLSKR

SEQ ID NO: 11605 - protein, 379 aa, Haloferax volcanii
MSGELKRGLEGVLVAESKLSFIDGDAGQLVYCGYDIEDLARDASYEEVLYLLWHGALPTGEELDAFSDELAAHRDLDDGVLDVARELAEQDESPMAALRTLVSAMSAYDESADFEDVTDREVNLEKAKRITAKMPSVLAAYARFRRGDDYVEPDESLNHAANFLYMLNGEEPNEVLAETFDMALVLHADHGLNASTFSAMVTSSTLSDLYSAVTSAIGTLSGSLHGGANANVMRMLKDVDDSDMDPTEWVKDALDRGERVAGFVHRVYNVKDPRAKILGAKSEALGEAAGDMKWYEMSVAIEEYIGEEKGLAPNVDFYSASTYYQMGIPIDLYTPIFAVSRAGGWIAHVLEQYEDNRLIRPRARYTGEKDLDFTPVDER

SEQ ID NO: 11606 - protein, 434 aa, Bradyrhizobium japonicum USDA 110
MDAKASNKTATLTVGNKNYDLPIHSGSVGPDVIDIGKLYGQSGLFTYDPGFTSTASCQSKITYIDGDAGVLEYRGYPIEQLAENGDFLETCYLLLYGNLPTAAQKKDFDDRVIHHTMVHEQMARFFQGFRRDAHPMAVMVASVGALAAFYHDSTDINDPKQRMIASMRMIAKIPTLAAMAYKYTIGQPFVYPKNSLKFAENFLHMCFAVPCEEYKINPVLADALDKIFILHADHEQNASTSTVRIAGSSGANPFACIAAGIACLWGPAHGGANEAALAMLAEIGSVDKIPEFIAKVKDKNSEVRLMGFGHRVYKNYDPRAKIMQKMCHAVLKETGHGDDPMLKVAMELEKIALSDQYFIDRKLYPNVDFYSGITLKAMGFPVSMFTVLFAVARTVGWISQWSEMIEDPQQKIGRPRQLYTGVTRRDYVAIKDRK

SEQ ID NO: 11607 - protein, 364 aa, Bradyrhizobium japonicum USDA 110
MNIHLTKSQIGLDGVPAAETVLSHVDGERGELIIAGEHVGRLAAKSSFEGVTARLWNGASKTSLSEANVRASLGAARERAFARLAELLPATHGMGIVDGFRAAVAGLRAEHGLEHEATIVGAFPVISGALVRRAKGLDPVAPDPSASHAADTLRMLHGRAPATREVTALDAYLVTVCDHGMNASTFTTRVVASTQADLFAAVTAGYCALTGPLHGGAPEPVLEMLDAIGSRERIQPWVDAALARGERMMGFGHRVYRVRDPRADVLKTAIEALASNGADLPFAGEVEAYIRAALRKKNPDRPLETNVEFFTAILLDALAIPRQAFTPIFAVARAAGWTAHAREQQRTGRLIRPSSSYVGAVPEA

SEQ ID NO: 11608 - protein, 405 aa, Bradyrhizobium japonicum USDA 110
MKNSDELYLSAREAAAELAISPATLYAYVSRGLIRSEPTPDSRKNRYRAEDVRALKERRVPSPEPRGLRSFDADLPVMDTEISTITEEGAIYRGVNCVDLAENDTLEHTATLLWDVSGVDPFAPDNQPEISEEMRTIAGAARRAAPIDRAIAVLALAASADPRAFTRAPDGRAMVGARIVRLLVATMLNAEASAEPLHQQVARVWAADNKHAPDLIRRALVLLADHELNASTFTARCAASTGLNLYDAVIAGLAALKGPKHGGAGVLASQLVKTLVDRDVAPVVRERVALGERFAGFGHGVYKRGDPRAQSLLNALSRAGAPRKFTREVPERIAEATGEFVNIDYALAVLVHALRLPAGSELALFAMARSVGWIAHASEQLQFGKLIRPRARYVGPAPGRRTGGS

SEQ ID NO: 11609 - protein, 437 aa, Brucella melitensis 16M
MDMKGKTMSDKTASFTLDGKTFDLPVRKGTVGPDVVDIGPLYKNSHAFTYDPGFTSTASCESKITYIDGDEGVLLYRGYPIDQLAEHGDFLETCYLLLYGELPTATQKADFDYRVTRHTMLHEQMTKFFTGFRRDAHPMAVMVGCLGAMSAFYHDSTDITDPHQRMVASIRLIAKVPTLAAMAYKYHIGQPFVYPKNDLDFASNFLHMCFTVPCEEYKVNPVLARAMDRIFILHADHEQNASTSTVRLAGSSGANPFACIAAGVACLWGPAHGGANEAALNMLSEIGSVDRIPEYIARAKDKNDPFRLMGFGHRVYKNYDPRAKIMQKTCHEVLGELGIKDDPLLDVAMELERIALTDEYFIEKKLYPNIDFYSGITLKALGFPTEMFTVLFALARTVGWVAQWKEMIEDPQQKIGRPRQLYTGATERDYVPLAKRK

SEQ ID NO: 11610 - protein, 371 aa, Pyrococcus furiosus
LAKGLEDVYIDQTNICYIDGKEGKLYYRGYSVEELAELSTFEEVVYLLWWGKLPSLSELENFKKELAKSRGLPKEVIEIMEALPKNTHPMGALRTIISYLGNIDDSGDIPVTPEEVYRIGISVTAKIPTIVANWYRIKNGLEYVPPKEKLSHAANFLYMLHGEEPPKEWEKAMDVALILYAEHEINASTLAVMTVGSTLSDYYSAILAGIGALKGPIHGGAVEEAIKQFMEIGSPEKVEEWFFKALQQKRKIMGAGHRVYKTYDPRARIFKKYASKLGDKKLFEIAERLERLVEEYLSKKGISINVDYWSGLVFYGMKIPIELYTTIFAMGRIAGWTAHLAEYVSHNRIIRPRLQYVGEIGKKYLPIELRR

SEQ ID NO: 11611 - protein, 447 aa, Bacteroides thetaiotaomicron VPI-5482
MKKEYLIYKLSEEMKEATRIDNELFPKFDVKRGLRNEDGTGVLVGLTKIGNVVGYERIPGGGLKPIPGKLFYRGYDVEDISHAIIKEKRFGFEEVAYLLLSGRLPDKEELASFRELINDNMALEQKTKMNIIELEGNNIMNILSRSVLEMYRFDPDADDTSRDNLMRQSIDLISKFPTIIAYAYNMLRHATFGRSLHIRHPQEKLSIAENFLYMLKKDYTELDARTLDLLLILQAEHGGGNNSTFTVRVTSSTGTDTYSAIAAGIGSLKGPLHGGANIQVADMFHHLQENIKDWKSVDEIDTYFTRMLNKEVYNKTGLIYGIGHAVYTISDPRALLLKELARDLAREKGKEEEFAFLELLEERAIATFGRVKNNGKTVSSNIDFYSGFVYEMIGLPQEIFTPLFAMARIVGWCAHRNEELNFEGKRIIRPAYKNVLDDLAYIPIKKR

SEQ ID NO: 11612 - protein, 371 aa, Bacillus cereus ATCC 14579
MTVIRGLEGVVATTSSVSSIIDDTLTYVGYNIDDLAENATFEEVVYLLWHRKLPNEKELAEFNEIVSEYYKVPGEILTYLKQVDLKIAHPMSVLRTAISMLSLYDESAEIMDEKSNYLKAVKLQAQVGTLVAAYARIRKGLDIVEPRKDLSLAANFLYMLNDREPNEVEIEAFDKALVLHADHELNASTFTARVCVATLSDVYSGITAAIGALKGPLHGGANENVMKMLTEIGEEENVESYIHNALQNKVKIMGFGHRVYEQGDPRAKHLREMSKRLCVLLGEEKWYNMSIKIEDIVTKEKGLPPNVDFYSASVYHCLGIDHDLFTPIFAISRMSGWLAHILEQYENNRLIRPRADYNGPTHQVYVPIAQR

SEQ ID NO: 11613 - protein, 373 aa, Bacillus cereus ATCC 14579
MMKAEEKFSPGLDGIVAAETKISFLDTVKGEIVIQGYDLIELSKTKEYLDIVHLLLEEHLPNEDEKVTLEKKLKEEYAVPEGVFNVLKALPKETHPMDGLRTGVSALAGYDNDIENRSLEVNKSRGYKLLSKVPNIVANSYHILNNEEPIEPLKELSYSANFFYMLTGKKPTELEEKIFDRSLVLYSEHEMPNSTFTARVIASTQSDLYGALTGAVASLKGSLHGGANEAVMYMLLEAGNVEKFEELLQKKLYNKEKIMGFGHRVYMKKMDPRALMMKEALKQLCDVKGDYTLYEMCEAGEKIMEKEKGIYPNLDYYAAPVYWMLGIPIQLYTPIFFSSRTVGLCAHVIEQHANNRLFRPRVNYIGERHVLSK

SEQ ID NO: 11614 - protein, 430 aa, Coxiella burnetii RSA 493
MSNRKAKLSFENQSVEFPIYSPTLGKDVIDVKTLGNHGAYALDVGFYSTAACESKITFIDGEKGILLYRGYPIDQLADKSDYMEVCYLLMYGELPNKGEKEKFVRTIKEHTSVYEQVTKFFNGFHYDAHPMAMVLSTIGALSAFYHDALDITKPADRELSAIRLIAKMPTLAAMSYKYSIGQPFMHPRRAMNYAENFLHMLFGTPYEETEPDPVLARAMDRIFILHADHEQNASTTTVRVAGSTGANPFACISAGISALWGPAHGGANEACLNMLRKIGDEKNIGQYIKKAKDKNDPFRLMGFGHRVYKNYDPRAKVMQKTCYEVLDAVGRHNEPLFKLAIKLEKIALEDDYFIEKKLYPNVDFYSGLTLNAIGIPSNMFTVIFALSRTVGWISHWMEMMSSPDHRLARPRQLYTGETEREVISLDKRQA

SEQ ID NO: 11615 - protein, 372 aa, Coxiella burnetii RSA 493
MTKTAKGLRGQSAGETSIATVGKEGHGLTYRGYRIEDLAANATFEEVAYLLLKNKLPTKSELDAYTKKLVNLRSLPPALKDTLERIPASSHPMDVMRTGCSMLGNLEPENGFENEQNIADRLVAIFPAIQCYWYHYSHHGKRIDTELDDLTLAGYFLHLLLGKKAAQMAIDCMNASLILYAEHEFNASTFAARVCSATLSDIYSAVTAAIATLRGPLHGGANEAAMDLIMLYKTPSEAIAGIKRKLANKELIMGFGHAVYRERDPRNAIIKSWAQKLAPNAADGYLFDISDAIENTMQDEKKLFPNLDFYSATAYHFLNIPTKLFTPIFVMSRVTGWCAHIFEQRKDNRIIRPNADYIGPEEQGWVPIEKRR

SEQ ID NO: 11616 - protein, 429 aa, Streptomyces avermitilis MA-4680
MSDNSVVLRYGDGEYTYPVIDSTVGDKGFDIGKLRAQTGLVTLDSGYGNTAAYKSAITYLDGEQGILRYRGYPIEQLAERSTFLEVAYLLINGELPTVDELSTFKGEITQHTLLHEDVKNFYRGFPRDAHPMAMLSSVVSALSTFYQDSHNPFDEKQRNLSTIRLLAKLPTIAAYAYKKSIGHPFVYPRNDLGYVENFLRMTFSVPAQDYDLDPVVVSALDKLLILHADHEQNCSTSTVRLVGSSQANMFASISAGISALWGPLHGGANQSVLEMLEGIQTSGGDVDTFIRKVKNKEDGVKLMGFGHRVYKNFDPRAKIIKAAAHDVLSALGKSDELLDIALKLEEHALADDYFVERKLYPNVDFYTGLIYRAMGFPTEMFTVLFALGRLPGWIAQWHEMIKEPGSRIGRPRQIYTGEVLRDFVPVEGR

SEQ ID NO: 11617 - protein, 388 aa, Streptomyces avermitilis MA-4680
MPINRAASTSVDVPRGLAGVVVTDTSLGDVRGLEGFYHYRQYSAVELAQTRGFEDVWHLMVHGELPDAEQRAVFTARTAALRWLPDGVRATLPAVAAAAGRSGPLAGLRTALSLLGAAKGFRPVYDIDREQRRADTVMASAAVPTLLTALYRLGQGLDPVEPREDLSYAANYLYMLTGSEPDAARTRAIEQYLISTIDHGFNASTFTARVITSTGADVAAALVGAVGALSGPLHGGAPSRALDTLDAIGTPERIDSWIRERVLAGDRIMGFGHPVYRTEDPRSRMLRGVAEQFGGPLVDFAVEVERHVEAILAELKPGRELHTNVEFYAGVVMELCGLPREMFTPTFAAARVVGWSANILEQAEDPKIIRPAARYVGPVPPVAVPLMV

SEQ ID NO: 11618 - protein, 366 aa, Streptomyces avermitilis MA-4680
MSDFVPGLEGVIAFETEIAEPDKEGGALRYRGVDIEDLVGHVSFGNVWGLLVDGAFNPGLPPAEPFPIPVHSGDIRVDVQSALAMLAPVWGLKPLLDIDAEQARHDLARAAVMALSYVAQSARGQGLPMVPQSEIDKAHSVVERFMIRWRGEPDPKHVAAVDAYWTSAAEHGMNASTFTARVIASTGADVAAALSGAVGAMSGPLHGGAPSRVLGMIEEIERTGDAEAYVKKALDKGERLMGFGHRVYRAEDPRARVLRRTARELGAPRFEIAEALEKAALEELHNRRPDRVLATNVEFWAAIMLDFAEVPAHMFTSMFTCARTAGWSAHILEQKRTGRLVRPSARYVGPGSRGPQEIEGYEDIAR

SEQ ID NO: 11619 - protein, 418 aa, Streptomyces avermitilis MA-4680
MTDHEAAPTHPDRRLSTKEAAELLGVKPETVYAYVSRGQLSSRREPGGRGSTFDAKEVAALARRNRREPSGSSAIGGELSVRTRITLIDKDRYFFRGVDATELAARHSYEEIAEWLWTGRLRPGVTFAAPDASVAVARRAVDALPEHSGPTDRLRVATIAAATADPLRFDLSEDAVLGTARTLIPTLVAALPPLRRDHRDEGPLARHLWGRLTGRAPDAASVRVLDTALGLLIDHDLAASTLAVRVAASARAHPYAAVSAGLGVLEGPLHGAASGLAHRLLLDVLDQGSAAPVVADELRAGRRIPGLGHRLYPGEDPRARALFALLEEVPDAAPALAAAHDVVATTARHAPLHANVDLALAVLTVSSGMPASAGETVFAVARTAGWIAHALEEYEERPLRMRPSGRYVGARPPQPLPR

SEQ ID NO: 11620 - protein, 112 aa, Bartonella sp. Rt222sm
NEACLKMLQEINSVKRIPKFIARAKDKNDPFRLMGFGHRVYKNYDPRAKIMQQTCHEVLKELNIQDDPLLDIAIELEKIALNDEYFVEKKLYPNVDFYSGITLKALGFPTEM

SEQ ID NO: 11621 - protein, 377 aa, Sulfolobus solfataricus
MSVVSKGLENVIIKVTNLTFIDGEKGILRYRGYNIEDLVNYGSYEETIYLMLYGKLPTKKELNDLKAKLNEEYEVPQEVLDTIYLMPKEADAIGLLEVGTAALASIDKNFKWKENDKEKAISIIAKMATLVANVYRRKEGNKPRIPEPSDSFAKSFLLASFAREPTTDEINAMDKALILYTDHEVPASTTAALVAASTLSDMYSSLTAALAALKGPLHGGAAEEAFKQFIEIGDPNRVQNWFNDKVVNQKNRLMGFGHRVYKTYDPRAKIFKKLALTLIERNADARRYFEIAQKLEELGIKQFSSKGIYPNTDFYSGIVFYALGFPVYMFTALFALSRTLGWLAHIIEYVEEQHRLIRPRALYVGPEYQEYVSIDKR

SEQ ID NO: 11622 - protein, 377 aa, Sulfolobus solfataricus
MSVVSKGLENVIIKVTNLTFIDGEKGILRYRGYNIEDLVNYGSYEETIYLMLYGKLRTKKELNDLKAKLNEEYEVPQEVLDTIYLMPKEADAIGLLEVGTAALASIDKNFKWKENDKEKAISIIAKMATLVANVYRRKEGNKPRIPEPSDSFAKSFLLASFAREPTTDEINAMDKALILYTDHEVPASTTAALVAASTLSDMYSSLTAALAALKGPLHGGAAEEAFKQFIEIGDPNRVQNWFNDKVVNQKNRLMGFGHRVYKTYDPRAKIFKKLALTLIERNADARRYFEIAQKLEELGIKQFSSKGIYPNTDFYSGIVFYALGFPVYMFTALFALSRTLGWLAHIIEYVEEQHRLIRPRALYVGPEYQEYVSIDKR

SEQ ID NO: 11623 - protein, 385 aa, Thermoplasma acidophilum
MPETEEISKGLEDVNIKWTRLTTIDGNKGILRYGGYSVEDIIASGAQDEEIQYLFLYGNLPTEQELRKYKETVQKGYKIPDFVINAIRQLPRESDAVAMQMAAVAAMAASETKFKWNKDTDRDVAAEMIGRMSAITVNVYRHIMNMPAELPKPSDSYAESFLNAAFGRKATKEEIDAMNTALILYTDHEVPASTTAGLVAVSTLSDMYSGITAALAALKGPLHGGAAEAAIAQFDEIKDPAMVEKWFNDNIINGKKRLMGFGHRVYKTYDPRAKIFKGIAEKLSSKKPEVHKVYEIATKLEDFGIKAFGSKGIYPNTDYFSGIVYMSIGFPLRNNIYTALFALSRVTGWQAHFIEYVEEQQRLIRPRAVYVGPAERKYVPIAERK

SEQ ID NO: 11624 - protein, 391 aa, Thermoplasma acidophilum
MEKTANIDKGLENVNIKWTKLTYIDGNNGILKYGGYNVNDLIENGAKEDEIQYLFLYGELPNRLDLELFQSKVQKGYELPDFVKDIIFELPRESDAVAMQMAAFSALATSTYNFKWNADLDRDQAAKAIGLMSAVTANVYRHIMGKGPVDLEPSDSFAESFLRSTLDRTPSEDEIDAMNAALILYTDHEVPASTTAGLVAVSTLSDMYSGIAAALAALKGPLHGGAAEASIMQFQEIGDPDNVDAWFRDNIVNGNKRLMGFGHRVYKTYDPRARIFRRYAEKLSANDPEAKKMFDIATRLEKIGIDTFGSKKIYPNTDYFSGIVYLALGYPLRNNIYTSFFALSRVTGWISHFMEYVENQHRLIRPRAVYVGPEDLQFVKIDERRGPIITS

SEQ ID NO: 11625 - protein, 367 aa, Thermotoga maritima
MIQKGLEGVKICESSICYLDGINGRLYYRGIPVEELAEKSTFEETAYFLWYGKLPTKSELEEFKRKMADYRELPAEALGILYHLPKNLHYIDVLKIFLSIHGSMDGNDEDLREKAIRVASVFPTILAYYYRYSKGKELIRPRKDLSHVENFYYMMFGERNEKIRLLESAFILLMEQDINASTFAALVIASTLSDLYSCIVGALGALKGPLHGGASEKVPPMLEEIGSEDRVEEFVQKCLKEKRKIMGFGHRVYKTYDPRAVFLKRVLQEHFPDSKLFRIASKLEEYIVSNKIKNIYPNVDLYSSVLFEELGFPRNMFTALFATARVVGWTAHVIEYVSDNKLIRPTSEYVGPMDVEYIPIERRDENG

SEQ ID NO: 11626 - protein, 377 aa, Thermus aquaticus
MEVARGLEGVLFTETRMCFIDGEAGRLYYYGIPIQELAEKSTFEETTYLLLHGRLPQRGELEAFKKDLAARRALPSHLLESFRRYPASAHPMSFLRTAVSELGMLDPTEGDISREALYQKGLDLIAKFATIVAANKRLKEGKEPLPPREDLSHAANFLYMANGVEPSPEQERLMDAALILHAEHGFNASTFTAIAAFSTETDLYSAITAAVASLKGPRHGGANEAVMKMIQEIGAPERAREWVREKLSKKERIMGMGHRVYKAFDPRAGVLEKLARRVAEKHGHSPEYQILKIVEEEAGKVLNPRGIYPNVDFYSGVVYSDLGFGLEFFTPIFAVARISGWVGHILEYKEQDNRLLRPDAKYIGELDRPYVPLEARG

SEQ ID NO: 11627 - protein, 476 aa, Saccharomyces castellii
MSAVLSTQTTRSILSNSGRRAATIALIHRLYTTASAEPTLKETFSQLIPSKIDEIKQFKKDHGKTVIGNVLLEQAYGGMRGIKGIVWEGSVLDPEEGIKFRGLTIPEIRDQLPKLGDEPLPEGIFWLLLTGEIPSRAQVEQLSADLASRAELPEHVVNLLNGLPKHLHPMAQFSIAVNALESESKFAKAYAQGVNKKEYWKYTFEDSLDLLGKLPTIAATIYRNVFKDGKLGAWDPQADYGKNLATLMGFKNKDFMELMRLYLTIHSDHEGGNVSAHTTHLVGSALSSPYLSLAAGLNGLAGPLHGRANQEVLEWLFKLREEVKGDYSKETIEKYLWDTLNSGRVVPGYGHAVLRKTDPRYTAQREFALKHFPDYELFKLVSSIYEVAPKVLTKQGKTKNPWPNVDSHSGVLLQYYGLTEASFYTVLFGVARAFGVLPQLIIDRAVGAPIERPKSFSTEKYKELVAKIESGETKVV

SEQ ID NO: 11628 - protein, 473 aa, Saccharomyces castellii
MLRFSRQLHNSTRLCSQATGLKESLKAIIPKRKEEFLKLKKECMGTKVDDITIGSILSGMRGNRSMFWEGSMVDAQRGITFHGKTIEQCQRELPGDESGNFYPESMLWLLMTGEVPTKQQTKQLMEELAVRGSEANFPIATSRVIDSLPNDMHPMTQLAIGLASMNKVSRFASNYEKGLLNKNNYWEDTFEDTLNLISFLPILTGKIYSKITNDGKPLGKFSPTEDWSSNICSLMGMSNSTYSVNKNNFNASESKDFLSLMRLYTGIHADHEGGNVSAHTTHLVGSALSDPYLSYSSGIMGLAGPLHGLAAQEVVRFLVEMNGQISSPNQPDEIERYLWDLLNSKRVIPGYGHATLRKPDPRFTAMLKFTKDRKSEFENDKNVVLMQNLSSIAPKVLKAHGKCQNPYPNVDSASGILFHHYGLKESLFFTVIFGCSRSMGPLTQLVWDRIYGLPIERPKSVNMETLKLLSNSQ

SEQ ID NO: 11629 - protein, 377 aa, Thermus thermophilus
MEVARGLEGVLFTESRMCYIDGQQGKLYYYGIPIQELAEKSSFEETTFLLLHGRLPRRQELEEFSAALARRRAMPAHLLESFKRYPVSAHPMSFLRTAVSEFGMLDPTEGDISREALYEKGLDLIAKFATIVAANKRLKEGKEPIPPREDLSHAANFLYMANGVEPSPEQARLMDAALILHAEHGFNASTFTAIAAFSTETDLYSAITAAVASLKGPRHGGANEAVMRMIQEIGTPERAREWVREKLAKKERIMGMGHRVYKAFDPRAGVLEKLARLVAEKHGHSKEYQILKIVEEEAGKVLNPRGIYPNVDFYSGVVYSDLGFSLEFFTPIFAVARISGWVGHILEYQELDNRLLRPGAKYVGELDVPYVPLEARE

SEQ ID NO: 11630 - protein, 438 aa, Geobacter metallireducens
MGLKETLKQKIEEFRPRTTRLVKEFGKVKIDEVTIEQCIGGARDIRSLVTDISYLDPQEGIRFRGKTIPETFAALPKAPGSDYPTVESFWYFLLTGEVPTQAQVDEVLTEWKVRQEVPQYVFDTIRTLPRDSHPMAMLSVGITAMQRDSKFAALYNAGKFNKLSAWESVYEDACDIVARIPVIAAFIYNLKYKGDKQIAIDPALDMGANFAHMIDQGDAYKDVARMYFILHSDHESGNVSAHTTHLVHSALSDPYYAYAAGLNGLAGPLHGRANQEVLDWTIKFQEKYCKDQEPTKELITRALWDTLNSGQVIPGYGHAVLRKTDPRYISQREFCQKHLPEDPLFKLVSMIFEVAPGVLTEHGKTKNPWPNVDAQSGVIQWHYGVKEWDFYTVLFGVGRALGCMANITWDRGLGYAIERPKSVTTPMLEEWAAKGGRL

SEQ ID NO: 11631 - protein, 441 aa, Geobacter metallireducens
MALKETLKQKIEEFRPRTTRLVKEFGKVVIDQVTIDQAIGGARDIRSLVTDISYLDPQEGIRFRGKTIPETFEALPKASGSDYPTVESFWYFLLTGEVPTQAQVDEVVAEWKTRQVVPQYVFDAISALPKESHPMVMLSVGILALQKDSKFAGFYNSGKFNKMTAWEYVYEDASDLVARIPIIAAFIYNLKYRGGKQSAIDPTADCGANFARMIGQCKEYEDVARMYFILHSDHESGNVSAHTTHLVHSALSDPYYAYSAGLNGLAGPLHGLANQEVLDWTIKFQQKYCKDVEPTKELVTKALWDTLNAGQVVPGYGHAVLRKTDPRYMSQREFCLKTPGLKDDPLFKLVAMIFETAPGVLMEHGKAKNPWPNVDAQSGVIQWYYGLREWDFYTVLFGVGRALGCMANITWDRGLGYAIERPKSVTTPMLEKWAEEGGRKF

SEQ ID NO: 11632 - protein, 428 aa, Pseudomonas aeruginosa
MADKKAQLIIEGSAPVELPVLSGTMGPDVVDVRGLTATGHFTFDPGFMSTASCESKITYIDGDKGVLLHRGYPIEQLAEKSDYLETCYLLLNGELPTAAQKEQFVGTIKNHTMVHEQLKTFFNGFRRDAHPMAVMCGVIGALSAFYHDSLDITNPKHRQVSAHRLIAKMPTIAAMVYKYSKGEPMMYPRNDLNYAENFLHMMFNTPCETKPISPVLAKAMDRIFILHADHEQNASTSTVRLAGSSGANPFACIASGIAALWGPAHGGANEAVLRMLDEIGDVSNIDKFVEKAKDKNDPFKLMGFGHRVYKNFDPRAKVMKQTCDEVLQELGINDPQLELAMKLEEIARHDPYFVERNLYPNVDFYSGIILKAIGIPTSMFTVIFALARTVGWISHWQEMLSGPYKIGRPRQLYTGHTQRDFTALKDRG

SEQ ID NO: 11633 - protein, 428 aa, Pseudomonas aeruginosa
MADKKAQLIIEGSAPVELPVLSGTMGPDVVDVRGLTATGHFTFDPGFMSTASCESKITYIDGDKGVLLHRGYPIEQLAEKSDYLETCYLLLNGELPTAAQKEQFVGTIKNHTMVHEQLKTFFNGFRRDAHPMAVMCGVIGALSAFYHDSLDITNPKHREVSAHRLIAKMPTIAAMVYKYSKGEPMMYPRNDLNYAENFLHMMFNTPCETKPISPVLAKAMDRIFILHADHEQNASTSTVRLAGSSGANPFACIASGIAALWGPAHGGANEAVLRMLDEIGDVSNIDKFVEKAKDKNDPFKLMGFGHRVYKNFDPRAKVMKQTCDEVLQELGINDPQLELAMKLEEIARHDPYFVERNLYPNVDFYSGIILKAIGIPTSMFTVIFALARTVGWISHWQEMLSGPYKIGRPRQLYTGHTQRDFTALKDRG

SEQ ID NO: 11634 - protein, 482 aa, Kluyveromyces lactis
MSTTMLSTRNALARGLLRTSGGAAGASRNNLLLSLVASRYYSNGEKTLKQRFAEIFPEKAEEIKRLKKEHGKTVIGEVLLEQAYGGMRGIKGLVWEGSVLDPEEGIRFRGRTIPDIQKELPKAADGEEPLPEAIFWLLLTGEVPTETQVKALSADLASRSELPAHVESLLDNLPKDLHPMAQFSMAVTALESESKFAKAYAQGVSKKDYWNYTFEDSLDLLGKLPVIASKIYRNVFKDGKITSIDQNADYGKNLAHLLGYQNKEFVDLMRLYLTIHSDHEGGNVSAHTTHLVGSALSSPYLSLSAGLNGLAGPLHGRANQEVLEWLFKLREEVKGDYSPATIEKYLWDTLNSGRVVPGYGHAVLRKTDPRYTAQREFALKHFPDYELFKLVSTIYEVAPKVLTKHGKTKNPWPNVDSHSGVLLQYYGLTEASFYTVLFGVARAFGVLPQLIIDRAVGQPIERPKSFSTEKYIELVQSINAKK

SEQ ID NO: 11635 - protein, 433 aa, Ralstonia solanacearum
MTPSDVKATLSFSDGSPSVELPIYTGTVGPDVIDIRKLYGQTGKFTYDPGFMSTASCNSKITYIDGDKGELLYRGYAIDDLAGKCDFLEICYLLLKGELPNAKQKDEFNSTVMNHTMVHEQMQFFLRGFRRDAHPMAVLTGLVGAMSAFYPDAANINDSREREISQIRLIAKLPTLVAMAYKYNIGQPLIYPQNNLSYTGNFMRMMFATPCEDYKVNPVLERALDRIFILHADHEQNASTSTVRLAGSSGTNPIAAIAAGIACLWGPAHGGANEAALNMLEEIGSVDKIDEFIKQVKDKNSGVRLMGFGHRVYKNYDPRAKLMRETCHEVLQELGLENDRLFKLAMALEKIALEDEYFVSRKLYPNVDFYSGIVQRALGIPTSMFTCIFALARSVGWIAQWEEMITDPEYKIGRPRQLFNGAATRAVPELGKR

SEQ ID NO: 11636 - protein, 387 aa, Ralstonia solanacearum
MSEADSSTPAGAFKPKKSVALSGVTAGNTALCTVGRTGNDLHYRGYDILDLAAACEFEEVAYLLVHGKLPNKAELTTYKARLKALRGLPANVKAALEWVPASAHPMDVMRTGVSVLGTVLPERDDHNLPGARDIADRLMASLGSMLLYWYHYSHNGRRIEVETDDDSIGGHFLHLLHGVEPSKSWVDAMHVSLNLYAEHEFNASTFTGRVIAGTGSDIYSAITGAIGALRGPKHGGANEVAFEIQKRYDTPDEAEADVRRRVEAKEVIIGFGHPVYTISDPRNKVIKEVARKLSKEAGNTRMFDIAERLETVMWDVKKMFPNLDWFSAVSYHMMGVPTAMFTPLFVISRTSGWAAHVIEQRIDNKIIRPSANYTGPEDLKFVPLGKR

SEQ ID NO: 11637 - protein, 75 aa, Helicobacter hepaticus
YKNYDPRAKILKKLKDDLDAKGIKMNTRLSDLAHKVEEVALSDSYFVERNLYPNVDFYSGIILSALKIPVSLFTP

SEQ ID NO: 11638 - protein, 320 aa, Bartonella doshiae
TYIDGDKGILLYRGYPIEQLAEKGDFLESCYLLLYGELPTQQEKNDFDRRIMQHTMVHEQFSRFFQGFRRDSHPMAVMVACLGAMSAFYHDSIDITDPQQRMIASIRLISKVPTLAAMAYKYSIGQAFVYPHNSLSYAANFLRMCFAVPCEEYQVNPVLTRAMDRIFILHADHEQNASTSTVRLAGSSGANPFACIAAGVACLWGPAHGGANEACLKMLKEIGSVKKIPEFIARAKDKNDPFRLMGFGHRVYKNYDPRAKIMQKTCHEVLKELNRQDDPLLDIAIELEHIALNDEYFIEKKLYPNVDFYSGITLKALGFP

SEQ ID NO: 11639 - protein, 218 aa, Bartonella doshiae
IASIRLISKVPTLAAMAYKYSIGQAFVYPNNNLSYAANFLRMCFAVPCEEYQVNPVLTRAMDRIFILHADHDQNASTSTVRLAGSSGANPFACIAAGVACLWGPAHGGANEACLKMLQEIGSVKKIPEFIARAKDKNDPFRLMGFGHRVYKNYDPRAKIMQKTCHEVLKELNRQDDPLLDIAIELEHIALNDEYFIEKKLYPNVDFYSGITLKALGFP

SEQ ID NO: 11640 - protein, 319 aa, Bartonella grahamii
DGDKGILLYRGYPIDQLAEKGDFLESCYLLLYGELPTQQEKNEFDRCIMQHTMVHEQFARFFHGFRRDSHPMAVMVACLGAMSAFYHDSIDITDPHQRMIASVRLISKVPTLAAMAYKYSIGQAFVYPRNDLSYAANFLRMCFAVPCEEYKTNPVLARAMDQIFILHADHEQNASTSTVRLAGSSGANPFACIAAGVACLWGPAHGGANEACLKMLQEIGSIERIPEFIARAKDKNDPFRLMGFGHRVYKNYDPRAKIMQKTCHEVLKELNIQDDPLLDIAIELEKIALSDEYFIEKKLYPNVDFYSGITLKALGFPTE

SEQ ID NO: 11641 - protein, 322 aa, Bartonella taylorii
TYIDGNKGILLYRGYPIDQLAERGDFLESCYLLLYGELPTKQEKHDFDRCIMQHTMVHEQFARFFHGFRRDSHPMAVMVACLGAMSAFYHDSIDITDPQQRMIASVRLISKVPTLAAMAYKYSIGQAFVYPRNDLSYAANFLRMCFSVPCEGYNINSVLTRAMDRIFTLHADHEQNASTSTVRLAGSSGANPFACIAAGVACLWGPAHGGANEACLKMLQEIGSVERIPEFIARAKDKNDPFHLMGFGHRVYKNYDPRAKIMQKTCHEVLKELNIQDDPLLDIAMELEKIALNDEYFVEKKLYPNVDFYSGITLKALGFPTE

SEQ ID NO: 11642 - protein, 206 aa, Bartonella taylorii
AYKYSIGQAFVYPRNDLSYAANFLRMCFCVPCEEYKVNSVLTRAMDRIFILHADHEQNASTSTVRLAGSSGANPFACIAAGVACLWGPAHGGANEACLKMLQEIGSVERIPEFIARAKDKNDPFRLMGFGHRVYKNYDPRAKIMQKTCHEVLKELNIQDDPLLDIAIELEKIALNDEYFVEKKLYPNVDFYSGITLKALGFPTESL

SEQ ID NO: 11643 - protein, 319 aa, Bartonella vinsonii
DGNKGILLYRGYPIEQLAEKGDFLESCYLLLYGELPTQQEKSDFDRCIMQHTMVHEQFARFFHGFRRDSHPMAVMVACLGAMSAFYHDSIDITDPQQRMIASVRLISKVPTLAAMAYKYSIGQAFVYPRNDLSYAANFLRMCFSVPCEEYKTNPVLTRAMDRIFILHADHEQNASTSTVRLAGSSGANPFACIAAGVACLWGPAHGGANEACLKMLQEIGSVKRIPEFIARAKDKNDPFRLMGFGHRVYKNYDPRAKIMQKTCHEVLKELNIQDDPLLDIAIELEKIALNDEYFVEKKLYPNVDFYSGITLKALGFPTE

SEQ ID NO: 11644 - protein, 112 aa, Bartonella vinsonii
ANEACLKMLQEIGSVKRIPEFIARAKDKNDPFRLMGFGHRVYKNYDPRAKIMQKTCHEVLKELNIQDDPLLDIAIELEKIALNDEYFVEKKLYPNVDFYSGITLKALGFPTE

SEQ ID NO: 11645 - protein, 412 aa, Rickettsia bellii
NTEFAELKIRDKIFKLPILKASIGQDVIDISKVYSEADCFTYDPGFMSTASCRSTITYIDGDQGILRHRGYDIKDLAEKSDFLEVAYLLIYGELPNNKQYNDFTKKVAHHALVNERLHYLFQTFCSSSHPMAIMLAAVGSLSAFYPDLLNFFKEADYELTAIRMIAKIPTIAAMSYKYSIGQPFVYPDNSLDFTENFLHMMFATPCEKYKVNPVIKNALNKIFILHADHEQNASTSTVRIAGSSGANPFACVSTGIASLWGPAHGGANEAVINMLKEIGSVENIPKYIAKAKDKNDNFRLMGFGHRVYKNYDPRAAVLKETCKEVLKELGQLDNNPLLQIAIELEAIALKDEYFIERKLYPNVDFYSGIIYKAMGIPPQMFTVLFATARTVGWMAQWKEMHEDPEQKISRPR

SEQ ID NO: 11646 - protein, 411 aa, Rickettsia montanensis
DSEFAELKIRGKIFELPILKASIGEDVIDISRVSAEADCFTYDPGFMSTASCQSTITYIDGDKGILRHRGYDIKDLAEKSDFLEVAYLLIYGELPSGEQYNNFTKQVAHHSLVNERLHYLFQTFCSSSHPMAIMLAAVGSLSAFYPDLLNFKEADYELTAIRMIAKIPTIAAMSYKYSIGQPFIYPDNSLDFTENFLHMMFATPCTKYKVNPIIKNALNKIFILHADHEQNASTSTVRIASSSGANPFACISTGIASLWGPAHGGANEAVINMLKEIGSSEYIPKYIAKAKDKNDPFRLMGFGHRVYKNYDPRAAVLKETCKEVLKELGQLDNNPLLQIAIELEAIALKDEYFIERKLYPNVDFYSGIIYKAMGIPSQMFTVLFAIARTVGWMAQWKEMHEDPEQKISRPR

SEQ ID NO: 11647 - protein, 403 aa, Neorickettsia helminthoeca
MDTDEVTIKIQATVKSSGGPNGILISSEPRSFIYDPGYVSTASCKSEITFVDGEEGVLLYRGYPVDELATQCDFLRVVYLLLYGELPDPVRAKEFRTFIQNFPQLPDCVLENICSFPRDAHPMVILISAFAALASAHHDSDFETHKEVLIANVPRLVAYIYRYITSQDFIPPDACLSYVGNFFYMMFGEKKPDYESILDKILILHADHEQNASTSTARMVVSSGASPIAAVSAATATLWGPLHGGANEKVLHMLGEIEKQGGSVEEFIERVKRKEERLMGFGHRVYKNYDPRAVILKSTAQDILKGSSSILSIASKLESIASNDEYFISRKLYPNVDFYSGIILNALGIPTYMFTPIFALARTSGWVAQIKEFLSDKEQKIARPRQIYIGKPFRKVASQSEKL

SEQ ID NO: 11648 - protein, 427 aa, Azotobacter vinelandii
MADKKAQLIIEGNAPVELPMLTGTVGPDVIDVRGLTSTGHFTFDPGFMSTASCESKITYIDGDKGILLHRGYPIEQLAEKSDYLETCYLLLNGELPNADQKAKFVNNIKNHTMVHEQLKNFLNGFRRDAHPMAVMCGVVGALSAFYHDSLDINDPQHREISAIRLVAKMPTLAAMVYKYSLGQPLMYPRNDLDYAENFLHMMFNTPCEVKPISPVLAKAMDRIFVLHADHEQNASTSTVRLAGSSGANPFACIAAGIAALWGPAHGGANEAVLTMLDEIGDVSNIEKFVAKAKDKNDPFKLMGFGHRVYKNFDPRAKVMKQTCDEVLSELGINDPQLELAMKLEEIARNDPYFKERNLYPNVDFYSGIILKAIGIPTSMFTVIFALARTVGWISHWKEMLSGPYKIGRPRQLYTGYEKRDYISVEKR

SEQ ID NO: 11649 - protein, 387 aa, Azotobacter vinelandii
MSATAETTTVGFKPKKSVALSGTAAGNTALCTVGRTGNDLHYRGYDILDFATTCEFEEVAHLLVHGKLPNVAELNGYKAKLKSLRGLPAGVKAALEQLPPSSHPMDVMRTGVSVLGCLSPEKEDHNYPGARDIADKLMASLGSMLLYWYHFSHNGKRIDVETDDDSIGGHFLHLLHGKKPSDSWVRAMHTSLILYAEHEFNASTFTSRVISGTGSDMFSCITGAIGALRGPKHGGANEVAFEIQKRYDTPDEAEADIRARVERKEVVIGFGHPVYTVGDPRNKVIKEVARELSVEQGNTKMYDIAERLESVMWEIKKMFPNLDWFSAVSYHMMGIPTAMFTPVFVIARTSGWAAHAIEQRIDGKIIRPSANYVGPENLKFVPLRERK

SEQ ID NO: 11650 - protein, 411 aa, Rickettsia africae
DSEFAELKIRGKIFKLPILKASIGEDVIDISRVSAEADCFTYDPGFMSTASCQSTITYIDGDKGILRHRGYDIKDLAEKSDFLEVAYLLIYGELPSGEQYNNFTKQVAHHSLVNERLHYLFQTFCSSSHPMAIMLAAVGSLSAFYPDLLNFKEADYELTAIRMIAKIPTIAAMSYKYSIGQPFIYPDNPLDFTENFLHMMFATPCTKYTVNPIIKNALNKIFILHADHEQNASTSTVRIAGSSGANPFACISTGIASLWGPAHGGANEAVINMLKEIGSSEYIPKYIAKAKDKNDPFRLMGFGHRVYKNYDPRAAVLKETCKEVLKELGQLDNNPLLQIAIELEAIALKDEYFIERKLYPNVDFYSGIIYKAMGIPSQMFTVLFVIARTVGWMAQWKEMHEDPEQKISRPR

SEQ ID NO: 11651 - protein, 411 aa, Rickettsia helvetica
DSEFAELKIRGKIFKLPILKASIGEDVINISRVSAEADCFTYDPGFMSTASCQSTITYIDGDKGILRHRGYDIKDLAEKSDFLEVAYLLIYGELPSSEQYNNFTKQVAHHSLVNERLHYLFQTFCSSSHPMAIMLAAVGSLSAFYPDLLNCKEADYKLTAIRMIAKIPTIAAMSYKYSIGQPFIYPDNSLDFTENFLHMMFATPCTKYKVNPIIKNALNKIFILHADHEQNASTSTVRIAGSSGANPFACISTGIASLWGPAHGGANEAVINMLKEIGSSENIPKYIAKAKDKNDPFRLIGFGHRVYKNYDPRAAVLKETCKEVLKELGQLENNPLLQIAIELEAIALKDEYFIERKLYPNVDFYSGIIYKAMGIPSQMFTVLFAIARTIGWMAQWKEMHGDPEQKISRPR

SEQ ID NO: 11652 - protein, 113 aa, Rickettsia helvetica
ANEAVINMLKEIGSSENIPKYIAKAKDKNDPFRLIGFGHRVYKNYDPRAAVLKETCKEVLKELGQLENNPLLQIAIELEAIALKDEYFIERKLYPNVDFYSGIIYKAMGIPSQ

SEQ ID NO: 11653 - protein, 411 aa, Rickettsia japonica
DSEFAELKIRGKIFKLPILKASIGEDVIDISRVSAEADCFTYDPGFMSTASCQSTVTYIDGDKGILRHRGYDIKDLAEKSDFLEVAYLLIYGELPSGEQYNNFTKQVAHHSLVNDRLHYLFQTFCSSSHPMAIMLAAVGSLSAFYPDLLNFKEADYELTAIRMIAKIPTIAAMSYKYSIGQPFIYPDNSLDFTENFLHMMFATPYTKYTVNPIIKNALNKIFILHADHEQNASTSTVRIAGSSGANPFACISTGIASLWGPAHGGANEAVINMLKEIGSSEYIPKYIAKAKDKNDPFRLMGFGHRVYKNYDPRAAVLKETCKEVLKELGQLDNNPLLQIAIELEAIALKDEYFIERKLYPNVDFYSGIIYKAMGIPSQMFTVLFAIARTVGWMAQWKEMHEDPEQKISRPR

SEQ ID NO: 11654 - protein, 411 aa, Rickettsia massiliae
DSEFAELKIRGKIFKLPILKASIGEDVIDISRVSAEADCFTYDPGFMSTASCQSTITYIDGDKGILRHRGYDIKDLAEKSDFLEVAYLLIYGELPSGEQYNNFTKQVAHHSLVNERLHYLFQTFCSSSHPMAIMLAAVGSLSAFYPDLLNFKEADYELTAIRMIAKIPTIAAMSYKYSIGQPFIYPDNSLDFTENFLHMMFATPCTKYKVNPIIKNALNKIFILHADHEQNASTSTVRIAGSSGANPFACISTGIASLWGPAHGGANEVVINMLKEIGSSEYIPKYIAKAKDKNDPFRLMGFGHRIYKNYDPRAAVLKETCKEVLKELGQLDNNPLLQIAIELEAIALKDEYFIERKLYPNVDFYSGIIYKAMGIPSQMFTVLFAIARTVGWMAQWKEMHEDPEQKISRPR

SEQ ID NO: 11655 - protein, 411 aa, Rickettsia parkeri
DSEFAELKIRGKIFKLPILKASIGEDVIDISRVSAEADCFTYDPGFMSTASCQSTITYIDGDKGILRHRGYDIKDLAEKSDFLEVAYLLIYGELPSGEQYNNFTKQVAHHSLVNERLHYLFQTFCSSSHPMAIMLAAVGSLSAFYPDLLNFKEADYELTAIRMIAKIPTIAAMSYKYSIGQPFIYPDNSLDFTENFLHMMFATPCTKYTVNPIIKNALNKIFILHADHEQNASTSTVRIAGSSGANPFACISTGIASLWGPAHGGANEAVINMLKEIGSSEYIPKYIAKAKDKNDPFRLMGFGHRVYKNYDPRAAVLKETCKEVLKELGQLDNNPLLQIAIELEAIALKDEYFIERKLYPNVDFYSGIIYKAMGIPSQMFTVLFAIARTVGWMAQWKEMHEDPEQKISRPR

SEQ ID NO: 11656 - protein, 435 aa, Rickettsia sibirica
MTNENNNDSEFAELKIRGKIFKLPILKASIGEDVIDISRVSAEADCFTYDPGFMSTASCQSTITYIDGDKGILRHRGYDIKDLAEKSDFLEVAYLLIYGELPSGEQYNNFTKQVAHHSLVNERLHYLFQTFCSSSHPMAIMLAAVGSLSAFYPDLLNFKEADYELTAIRMIAKIPTIAAMSYKYSIGQPFIYPDNSLDFTENFLHMMFATPCTKYTVNPIIKNALNKIFILHADHEQNASTSTVRIAGSSGANPFACISTGIASLWGPAHGGANEAVINMLKEIGSSEYIPKYIAKAKDKNDPFRLMGFGHRVYKNYDPRAAVLKETCKEVLKELGQLDNNPLLQIAIELEAIALKDEYFIERKLYPNVDFYSGIIYKAMGIPSQMFTVLFAIARTVGWMAQWKEMHEDPEQKISRPRQLYTGYVHREYKGIRER

SEQ ID NO: 11657 - protein, 101 aa, Rickettsia slovaca
GSSEYIPKYIAKAKDKNDPFRLMGFGHRVYKNYDPRAAVLKETCKEVLKELGQLDNNPLLQIAIELEAIALKDEYFIERKLYPNVDFYSGIIYKAMGIPSQ

SEQ ID NO: 11658 - protein, 416 aa, Ehrlichia muris
MIKEAVLELDDQRIKLPVLYDTNGNKAVDITSLYKDTGVLTYDPGFMSTAACESKITFIDGNKGILCYRGHNIVDLVNGNKSFVEIIYLLFYGVFPSSEDLQNFTLQISQEYTPPQVVYDVIKAFSQDSHPMAILMACFSALAAYYHDREADKDELKCAKLAVAKIASIVALIYRYITNQDFITADTKLSYSENFVHMMFDISSYKFTQVVAKALDIIFVLHADHEQNASTATVRLAGSAGADLFACLVAGTATLWGPAHGGANEAVINMLMTIEKPSNVKQFIQKVKDGSKTTRLMGFGHRVYKNYDPRAKMMCEICREVLNDLGIDDPLLEVAVELENIALQDSYFIERNLYPNVDFYSGIVLKAIGIPVKMFTTLFALARTSGWSAQWYEMVANKNYKICRPRQLYTGHITKI

SEQ ID NO: 11659 - protein, 563 aa, Plasmodium falciparum 3D7
MEGIRYLSCNKILYKRTGSTKTLINSLRKRYVHNNFKKKTCEQVLNTVNKLHNEKRYFNFSCSFTKSSRWNICMNRHNSRFFSSNESNKNLYLENYANIRKHINSIDNEESVIMNILKEKTYECIKKTREQLKEIIHTYPNTPISICTPNNVIGGLRNTITLITDTSILEKKKGILFRGKPVEKILREFPKWDNTCEYPMAEAMLWFLLTKEVPAVDDLKLLSRELYCRAKKIPQFVFDFIDNIPPFTHPMSQLVSTVSFLESLSLFKYKYSEGILKTDYWKYILEDAISLISQIQVIGAYIFKRTFINNDIRKGEGMNLDLDLDWSANFAKLIGYENKEVQDLLRLYFLLHSDHEGGNASAHVSHLIGSTLGNPYLSYSGCVIALSGPLHGLANQECLKFLLDIKKQLGDNQLTYEFIEKYAKNLLKSGRVIPGYGHAVLRVPDPRFLALRSFALSHFPDDPIIQILEMCYKVIPGILSATGKVKNPYPNVDCSSGSVLHHYGIKYPEYYTVLFALSRSIGVMSQLVLSRGLMYPLERPKSVDIYNLRKICEKNYVKIEEYE

SEQ ID NO: 11660 - protein, 516 aa, Cucurbita maxima
MPTDMELSPSNVARHRLAVLAAHLSAASLEPPVMASSLEAHCVSAQTMVAPPELVKGTLTIVDERTGKRYQVQVSEEGTIKATDLKKITTGPNDKGLKLYDPGYLNTAPVRSSISYIDGDLGILRYRGYPIEELAESSTYVEVAYLLMYGNLPSQSQLADWEFAISQHSAVPQGLVDIIQAMPHDAHPMGVLVSAMSALSVFHPDANPALRGQDLYKSKQVRDKQIARIIGKAPTIAAAAYLRLAGRPPVLPSSNLSYSENFLYMLDSLGNRSYKPNPRLARVLDILFILHAEHEMNCSTSAARHLASSGVDVFTALSGAVGALYGPLHGGANEAVLKMLSEIGTVNNIPEFIEGVKNRKRKMSGFGHRVYKNYDPRAKVIRKLAEEVFSIVGRDPLIEVAVALEKAALSDEYFVKRKLYPNVDFYSGLIYRAMGFPPEFFTVLFAIPRMAGYLAHWRESLDDPDTKIIRPQQVYTGEWLRHYIPPNERLVPAKADRLGQVSVSNASKRRLSGSGI

SEQ ID NO: 11661 - protein, 339 aa, Populus balsamifera subsp. trichocarpa X Populus deltoides
MPTKEQVGALSKELRDRALVHDYVFKAIDALPVTAHPMTQFATGVMALQVQSEFQKAYEKGIHKSKYWEPTYEDSLSLIARVPIVASYIYRRIYKDGKVIPMNDSLVIGGNFSHMLGFDSPEMQELMRLYVTNHSDHEGGNVSAHTGHLVASALSDPYLSFAAALNGLAGPLHGLANQEVLLWIKSVVEECGENITTEQLKDYVWKTLNSGKVVPGFGHGVLRKTVPRYTCQREFALKHLPDDPLFQLVSKLYEVVPPVLTQLGKVKNPWPNVDAHSGVLLNYYGLTEARYYTVLFGVSRSIGICSQLIWDRALGLPLERPKSVTMELLENHCKKAPAN

SEQ ID NO: 11662 - protein, 509 aa, Arabidopsis thaliana
MEISERVRARLAVLSGHLSEGKQDSPAIERWCTSADTSVAPLGSLKGTLTIVDERTGKNYKVPVSDDGTVKAVDFKKIVTGKEDKGLKLYDPGYLNTAPVRSSISYIDGDEGILRYRGYPIEEMAENSTFLEVAYLLMYGNLPSESQLSDWEFAVSQHSAVPQGVLDIIQSMPHDAHPMGVLVSAMSALSIFHPDANPALRGQDIYDSKQVRDKQIIRIIGKAPTIAAAAYLRMAGRPPVLPSGNLPYADNFLYMLDSLGNRSYKPNPRLARVLDILFILHAEHEMNCSTAAARHLASSGVDVYTAVAGAVGALYGPLHGGANEAVLKMLSEIGTVENIPEFIEGVKNRKRKMSGFGHRVYKNYDPRAKVIKNLADEVFSIVGKDPLIEVAVALEKAALSDDYFVKRKLYPNVDFYSGLIYRAMGFPPEFFTVLFAIPRMAGYLSHWKESLDDPDTKIMRPQQVYTGVWLRHYTPVRERIVTDDSKESDKLGQVATSNASRRRLAGSSV

SEQ ID NO: 11663 - protein, 514 aa, Arabidopsis thaliana
MEISQRVKARLAVLTAHLAVSDTVGLEQVLPAIAPWCTSAHITAAPHGSLKGNLTIVDERTGKKYQVPVSEHGTVKAVDLKKITTGKDDKGLKLYDPGYLNTAPVRSSICYIDGDEGILRYRGYPIEELAESSTFIEVAYLLMYGNLPSQSQLADWEFTVSQHSAVPQGVLDIIQSMPHDAHPMGVLVSAMSALSIFHPDANPALSGQDIYKSKQVRDKQIVRILGKAPTIAAAAYLRTAGRPPVLPSANLSYSENFLYMLDSMGNRSYKPNPRLARVLDILFILHAEHEMNCSTAAARHLASSGVDVYTACAGAVGALYGPLHGGANEAVLKMLAEIGTAENIPDFIEGVKNRKRKMSGFGHRVYKNYDPRAKVIKKLADEVFSIVGRDPLIEVAVALEKAALSDEYFVKRKLYPNVDFYSGLIYRAMGFPPEFFTVLFAVPRMAGYLSHWRESLDDPDTRIMRPQQAYTGVWMRHYEPVRERTLSSDSDKDKFGQVSISNASRRRLAGSSAL

SEQ ID NO: 11664 - protein, 480 aa, Arabidopsis thaliana
MEISERARARLAVLNAHLTVSEPNQVLPAIEPWCTSAHITAAPHGSLKGNLKIVDERTGNEYQVPVSEHGTVKTVDLKKITTGKDDKGLNLYDPGYLNTAPVRSSISYIDGDEGILRYRGYPVEELAEKSTYTEVTYLLIYGNLPSQRQLADWEFAISQNSAVPQGVLDMIQSMPNDVHPVGALVTAMSALSIFYPDANPSLMGLGVYKSKQVRDKQIVRVLGQAPTIAAAAYLRKAGKPPVQPLSNLSYSENFLYMVESMGDRSYKPNPRLARVLDILFILQAEHEMNCSTAAARHLSSSGGDVYTAVSGGVGAIYGPLHGGAVEATINMLSEIGTVENIPEFIESVKNKKRRLSGFGHRIYKNYDPRGKVVKKLADEVFSILGRDPLVEVGDALEKAALSDEYFVKRKLYPNVDFYSGLINRAMGIPSSFTAVSRIAGYLSHWRESLDDPDTKIMRPQQVYTGAGIRHYETVRERTKL

SEQ ID NO: 11665 - protein, 474 aa, Arabidopsis thaliana
MVFFRSVSAFTRLRSRVQGQQSSLSNSVRWIQMQSSTDLDLKSQLQELIPEQQDRLKKLKSEHGKVQLGNITVDMVIGGMRGMTGLLWETSLLDPEEGIRFRGLSIPECQKVLPTAQSGAEPLPEGLLWLLLTGKVPSKEQVEALSKDLANRAAVPDYVYNAIDALPSTAHPMTQFASGVMALQVQSEFQKAYENGIHKSKFWEPTYEDCLNLIARVPVVAAYVYRRMYKNGDSIPSDKSLDYGANFSHMLGFDDEKVKELMRLYITIHSDHEGGNVSAHTGHLVGSALSDPYLSFAAALNGLAGPLHGLANQEVLLWIKSVVEECGEDISKEQLKEYVWKTLNSGKVIPGYGHGVLRNTDPRYVCQREFALKHLPDDPLFQLVSKLYEVVPPVLTELGKVKNPWPNVDAHSGVLLNHYGLTEARYYTVLFGVSRSLGICSQLIWDRALGLALERPKSVTMDWLEAHCKKASSA

SEQ ID NO: 11666 - protein, 473 aa, Arabidopsis thaliana
MVFFRSVSAFTRLRSRVGQQSSLSNSVRWIQMQSSTDLDLKSQLQELIPEQQDRLKKLKSEHGKVQLGNITVDMVIGGMRGMTGLLWETSLLDPEEGIRFRGLSIPECQKVLPTAQSGAEPLPEGLLWLLLTGKVPSKEQVEALSKDLANRAAVPDYVYNAIDALPSTAHPMTQFASGVMALQVQSEFQKAYENGIHKSKFWEPTYEDCLNLIARVPVVAAYVYRRMYKNGDSIPSDKSLDYGANFSHMLGFDDEKVKELMRLYITIHSDHEGGNVSAHTGHLVGSALSDPYLSFAAALNGLAGPLHGLANQEVLLWIKSVVEECGEDISKEQLKEYVWKTLNSGKVIPGYGHGVLRNTDPRYVCQREFALKHLPDDPLFQLVSKLYEVVPPVLTELGKVKNPWPNVDAHSGVLLNHYGLTEARYYTVLFGVSRSLGICSQLIWDRALGLALERPKSVTMDWLEAHCKKASSA

SEQ ID NO: 11667 - protein, 473 aa, Arabidopsis thaliana
MVFFRSVSAFTRLRSRVGQQSSLNNSVRWIQMQSSTDLDLKSQLQELIPEQQDRLKKLKSEHGKVQLGNITVDMVIGGMRGMTGLLWETSLLDPEEGIRFRGLSIPECQKVLPTAQSGAEPLPEGLLWLLLTGKVPSKEQVEALSKDLANRAAVPDYVYNAIDALPSTAHPMTQFASGVMALQVQSEFQKAYENGIHKSKFWEPTYEDCLNLIARVPVVAAYVYRRMYKNGDSIPSDKSLDYGANFSHMLGFDDEKVKELMRLYITIHSDHEGGNVSAHTGHLVGSALSDPYLSFAAALNGLAGPLHGLANQEVLLWIKSVVEECGEDISKEQLKEYVWKTLNSGKVIPGYGHGVLRNTDPRYVCQREFALKHLPDDPLFQLVSKLYEVVPPVLTELGKVKNPWPNVDAHSGVLLNHYGLTEARYYTVLFGVSRSLGICSQLIWDRALGLALERPKSVTMDWLEAHCKKASSA

SEQ ID NO: 11668 - protein, 433 aa, Arabidopsis thaliana
MVMQDLKSQMQEIIPEQQDRLKKLKSEQGKVPVGNITVDMVLGGMRGMTGLLWETSLLDADEGIRFRGMSIPECQKILPSAESGEEPLPESLLWLLLTGKVPTKEQANALSTELAHRAAVPAIDALPSTAHPMTQFASGVMALQVQSEFQKAYEQGDISKSKYWEPTFEDALNLIARVPVVASYVYRRMYKDGSIIPLDDSLDYGANFSHMLGFDSPQMKELMRLYVTIHSDHEGGNVSAHAGHLVGSALSDPYLSFAAALNGLAGPLHGLANQEVLLWIKLVVEECGESISKEQLKDYVWKTLNSGKVVPGYGHGVLRKTDPRYICQREFALKHLPDDPLFQLVSKLYEVVPPILTELGKVKNPWPNVDAHSGVLLNYYGLTEARYYTVLFGVSRSLGICSQLIWDRALGLPLERPKSVNMDWLDNFTRLNR

SEQ ID NO: 11669 - protein, 472 aa, Arabidopsis thaliana
MVFFRSVSAFTRLRSRVQGQQSSLSNSVRWIQMQSSTDLDLKSQLQELIPEHKDRLKKLKSEHGKVQLGNITVDMVIGGMRGMTGLLWETSLLDPEEVFALGDCRLPECQKALLPTAQSGGLNHYRRSFVASLNWKGTLAKSKLKHCRKTWNRAAVSDYVYNAIDALPSTAHPMTQFASGVMALQVQSEFQKAYENGIHKSKFWEPTYEDCLNLIARVPVVAAYVYRRMYKNGDSIPSDKSLDYGANFSHMLGFDDERLKELMRLTSPSTVMHEGGNVSAHTGHLVGSALSDPYLSFAAALNGLAGPLHGLANQEVLLWIKSVVEECGEDISKEQLKEYVWKTLNSGKVIPGYGHGVLRNTDPRYVCQREFALKHHPDDPLFQCCKLMKLASCLTELESEEPWPNVDAHSGVLLNHYGLTEARYYTVLFGVSRSLGICSQLIWDRELLLALERPKSVTMDWLEAHCKKASSA

SEQ ID NO: 11670 - protein, 471 aa, Citrus maxima
MASLRSATALSRLRSRAGQQSNLSNSVRWLQMQSSADLDLHSQLKEMIPEQQERLKKVKSDLGKAQLGNITIDVVIGGMRGMTGLLWETSLLDPDEGIRFRGLSIPECQKLLPAAKPDGEPLPEGLLWLLLTGKVPSKEQVDGLSKELRDRATVPDYVYKAIDALPVSAHPMTQFASGVMALQVQSEFQEAYEKGIHKSKSWEPTSEDSLNLIARVPVVAAYVYQRIYKDGKIIPKDDSLDYGGNFSHMLGFDDPKMLELMRLYVTIHSDHEGGNVSAHTGHLVASALSDPYLSFLAALNGLAGPLHGLANQEVLLWIKSVVDECGENVTTEQLKDYVWKTLNSGKVVPGFGHGVLRKTDPRYTCQREFALKHLPDDPLFQLVSKLYEVVPPILTKLGKVKNPWPNVDAHSGVLLNHFGLAEARYYTVLFGVSRSLGICSQLIWDRALGLPLERPKSVTLDWIEKNCKKAA

SEQ ID NO: 11671 - protein, 469 aa, Fragaria x ananassa
MAFFRTVTKLRSRLGQPPSLRDSVRCLQTQASSDLDLHSQLKELIPEQQERLKKLKKEHGKVQLGTITVDMVIGGMRGMTGLLWETSLLDPDEGIRFRGLSIPECQKVLPGATPGGEPLPEGLLWLLLTGKVPSRSKNMHYPVNNGVVPKFQIMCSRPLMLCLLEHIPMTQFTTGVMALQVQSEFQKAYDKGIPKSRYWEPTYEDSLSLIAQLPVVASYVYRRIYKGGRMIPVDDSLDYGGNFSHLLGFDDHKMQELMRLYVTIHSDHEGGNVSAHTGHLVASALSDPFLSFAAALNGLAGPLHGLANQEVLLWIKSVVDECGENITKDQLKDYVWKTLNSGKVVPGFGHGVLRKTDPRYTCQREFALKHLPDDPLFRLVSKLYDVVPPILTELGKVKNPWPNVDAHSGVLLNHFGLTEARYFTVLFGVSRSIGIGSQLIWDRALGLPLERPKSVTMESLESFCKKAAS

SEQ ID NO: 11672 - protein, 434 aa, Bradyrhizobium japonicum
MDAKASNKTATLTVGNKNYDLPIHSGSVGPDVIDIGKLYGQSGLFTYDPGFTSTASCQSKITYIDGDAGVLEYRGYPIEQLAENGDFLETCYLLLYGNLPTAAQKKDFDDRVIHHTMVHEQMARFFQGFRRDAHPMAVMVASVGALAAFYHDSTDINDPKQRMIASMRMIAKIPTLAAMAYKYTIGQPFVYPKNSLKFAENFLHMCFAVSCEEYKINPVLADALDKIFILHADHEQNASTSTVRIAGSSGANPFACIAAGIACLWGPAHGGANEAALAMLGEIGSVDKIPEFIAKVKDKNSEVRLMGFGHRVYKNYDPRAKIMQKMCHAVLKETGHGDDPMLKVALELEKIALSDQYFIDRKLYPNVDFYSGITLKAMGFPVSMFTVLFAVARTVGWISQWSEMIEDPQQKIGRPRQLYTGVTRRDYVAIKDRK

SEQ ID NO: 11673 - protein, 473 aa, Prunus persica
  unsure (1)..(473): unsure at all Xaa locations
MVFFRSVNALSKLRSRLGQQSNLRDSVRWLQTQTSTDLDLRSQLKELIPEQQERLKKIKAEYGKVQLGNITVDMVLGGMRGMTGLLWETSLLDPDEGIRFRGLSIPECQKVLPGAKPGGEPLPEGLLWLLLTGKVPSKEQVDALSXELRSRAAVPDYVYKAIDALPITAHPMTQFTTGVMALQVQSEFQKAYDXGIYKSKYWEPTFEDSLSLIAQLPVVASYVYQRIFKDGKVIPVDDSLDYGANFSHLWGFDDPKMHELMRLYVTIHSDHEGGNVSAHTGHLVASALSDPYLSFAAALNGLAGPLHGLANQEVLLWIKSVVDEVGENVTTEQLKDYVWKTLNSGKVVPGFGHGVLRKTDPRYSCQREFALKHLPDDPLFQLVSKLYEVVPPILIELGKVKNPWPNVDAHSGVLLNHFGLTEARFFTVLFGVSRSIGIGSQLIWDRALGLPLERPKSVTMESLENYCKKAASS

SEQ ID NO: 11674 - protein, 411 aa, Rickettsia honei
GSEFAELKIRGKIFKLPILKASVGEDVIDISMVSAEADCFTYDPGFMSTASCQSTITYIDGDKGILRHRGYDIKDLAEKSDFLEVAYLLIYGELPSGEQYNNFTKQVAHHSLVNERLHYLFQTFCSSSHPMAIMLAAVGSLSAFYPDLLNFKEADYELTAIRMIAKIPTIAAMSYKYSIGQPFIYPDNALDFTENFLHMMFATPCTKYTVNPIIKNALNKIFILHADHEQNASTSTVRIAGSSGANPFACISTGIASLWGPAHGGANEAVINMLKEIGSSEYIPKYIAKAKDKNDPFRLMGFGHRVYKNYDPRAAVLKETCKEVLKELGQLDNNPLLQIAIELEAIALKDEYFIERKLYPNVDFYSGIIYKAMGIPSQMFTVLFAIARTVGWMAQWKEMHEDPEQKISRPR

SEQ ID NO: 11675 - protein, 349 aa, Rickettsia honei
ISMVSAEADCFTYDPGFMSTASCQSTITYIDGDKGILRHRGYDIKDLAEKSDFLEVAYLLIYGELPSGEQYNNFTKQVAHHSLVNERLHYLFQTFCSSSHPMAIMLAAVGSLSAFYPDLLNFKEADYELTAIRMIAKIPTIAAMSYKYSIGQPFIYPDNALDFTENFLHMMFATPCTKYTVNPIIKNALNKIFILHADHEQNAFTSTVRIAGSSGANPFACISTGIASLWGPAHGGANESVISMLKEIGSSEYIPKYIAKAKDKNDPFRLMGFGHRVYKNYDPRAAVLKETCKEVLKELGQLDNNPLSQIAIELEAIALKDEYFIERELYPNVDFYSGIIYKAMGIPSQ

SEQ ID NO: 11676 - protein, 429 aa, Sinorhizobium fredii
MSGTNATISIDGKTADLPVRSGSIGPDVVDIWSLYKQTKMFTYDPGFTSTASCESKITYIDGDEGVLLHRGYPIEQLADHGDFLEVCYLLLYGELPTKAQKDDFDYRVTHHTMIHEQMSRFFTGFRRDAHPMAVMCGCVGALSAFYHDSTDITDPHQRMVASLRMIAKMPTIAAMAYKYHIGQPFIYPKNDLDYASNFLRMCFAVPCEDYVVNPVLSRAMDRIFILHADHEQNASTSTVRLAGSSGANPFACIAAGIACLWGPAHGGANEAALNMLAEIGSVDRIPEFITRAKDKNDPFRLMGFGHRVYKNYDPRAKIMQKTTHEVLAELGHKDDPLLEVAMELERIALTDEYFIEKKLYPNIDFYSGITLKALGFPTTMFTVLFALARTVGWIAQWNEMIEDPEQRIGRPRQLYVGAPLRDYVPLSKR

SEQ ID NO: 11677 - protein, 355 aa, male-killing Rickettsia from Adalia bipunctata
GFMSTASCRSTITYIDGDKGILRYRGYDIKDLAEKSDFLEVAYLLIYGELPSSEQYNNFTKKVAVHSLVNERLHYLFQTFCSSSHPMAIMLAAVGSLSAFYPDLLNFKEADYELTAIRMIAKIPTIAAMSYKYSIGQPFIYPDNALDFTENFLHMMFATPCEKYKVNPIIKNALNKIFILHADHEQNASTSTVRIAGSSGANPFACVSTGIASLWGPAHGGANEAVINMLKEIGSSENIPQYIAKAKDKNDPFRLMGFGHRVYKNYDLRAAVLKETCKDVLKELGQLDGNPLLQIAIELEAIALKDEYFIERKLYPNVDFYSGIIYKAMGIPSQMFTVLFAIARTVGWMAQWKEM

SEQ ID NO: 11678 - protein, 355 aa, male-killing Rickettsia from Adalia bipunctata
GFMSTASCRSTITYIDGDKGILRYRGYDIKDLAEKSDFLEVAYLLIYGELPSSEQYNNFTKKVAVHSLVNERLHYLFQTFCSSSHPMAIMLAAVGSLSAFYPDLLNFKEADYELTAIRMIAKIPTIAAMSYKYSIGQPFIYPDNALDFTENFLHMMFATPCEKYKVNPIIKNALNKIFILHADHEQNASTSTVRIAGSSGANPFACVSTGIASLWGPAHGGANEAVINMLKEIGSSENIPKYIAKAKDKNDPFRLMGFGHRVYKNYDLRAAVLKETCKEVLKELGQLDGNPLLQIAIELEAIALKDEYFIERKLYPNVDFYSGIIYKAMGIPSQMFTVLFAIARTVGWMAQWKEM

SEQ ID NO: 11679 - protein, 355 aa, male-killing Rickettsia from Adalia bipunctata
GFMSTASCRSTITYIGGDKGILRYRGYDIKDLAEKSDFLEVAYLLIYGELPSSEQYNNFTKKVAVHSLVNERLHYLFQTFCSSSHPMAIMLAAVGSLSAFYPDLLNFKEADYELTAIRMIAKIPTIAAMSYKYSIGQPFIYPDNSLDFTENFLHMMFAAPCEKYKVNPIIKNALNKIFILHADHEQNASTSTVRIAGSSGANPFACVSTGIASLWGPAHGGANEAVINMLKEIGSSENIPKYIAKAKDKNDPFRLMGFGHRVYKNYDLRAAVLKETCKEVLKELGQLDGNPLLQIAIELEAIALKDEYFIERKLYPNVDFYSGIIYKAMGIPSQMFTVLFAIARTVGWMAQWKEM

SEQ ID NO: 11680 - protein, 117 aa, male-killing Rickettsia from Adalia bipunctata
HGGANEAVINMLKEIGSSENIPKYIAKAKDKNDPFRLMGFGHRVYKNYDLRAAVLKETCKEVLKELGQLDGNPLIQIAIELEAIALKDEYFIERKLYPNVDFYSGIIYKAMGIPSQM

SEQ ID NO: 11681 - protein, 433 aa, Mesorhizobium loti
MGGANQEATATLQFAGKTHEFKVRSGSVGPDVIDIASLYSTTGAFTYDPGFTSTASCESEITFIDGDAGILLHRGYPIDQLAEHGDFLEVCYLLLYGELPTKAQKDDFDYRVTRHTMVHEQMSRFFTGFRRDAHPMAVMCGVVGALSAFYHDSTDISDPYQRMVASMRLIAKMPTIAAMAYKYHIGQPFIYPKNDLGFAANFLHMCFAVPCEEYKINPVLARAMERIFILHADHEQNASTSTVRLAGSSGANPFACIAAGIACLWGPAHGGANEAALNMLGEIGHVDHIPEFIARAKDKNDPFRLMGFGHRVYKNYDPRAKIMQKTAHEVLGELGIKDDPLLDIAMELEKIALTDPYFIEKKLYPNVDFYSGITLKALGFPTTMFTVLFAVARTVGWIAQWKEMIEDPRQKIGRPRQLYTGAPERDYVPIAKR

SEQ ID NO: 11682 - protein, 362 aa, Mesorhizobium loti
MANGLDDVVAAETVLSDVDGLGGRLTIRGHSLAELAGRWSFPQVVRLLLDGFFEDLAGDAELAAQLGEARVDVFERLQPSLPLLAPLDIYSAMRAGMALLPDGETLADALRLIAAPAVLTPALLRLQRGEQPVAPDGKAAHAADMLRMLRGSVPSPALAKALDTYLVTVCDHGLNASTFATRVVASTLAGLTSSVLAGLGALKGPLHGGAPGPVIEMLDAIEAHGDAAGWLRNEIAQGRRIMGFGHRIYRVRDPRADVLKAVVRQLGGEGETGRRLAFAEEVEKTALEVLRIAKPQRSLQTNVEFYTALVLEAAGFPPQAFSNVFAAGRVAGWIAHAREQQTTGRLIRPQSRYVGPVPDLVA

SEQ ID NO: 11683 - protein, 379 aa, Mesorhizobium loti
MSEWLSREEALERLRVRPQTLYAYVSRGRIGMRPDRADPRRSQYRADDIAALATRRARGRSPSAIAESAIAWGEPSIATAISTVWHGHLIYRGRDAAVLSDNATLEETAAVLWGLPEPIRFEAPAPDAPRQPGRASAFAQLALLAGQARPSLGRSAASLCADAARAIGVLAGALGAEAGPDPVHRRLARGWSVDDAGADAIRRALVLLADHELNASTFAARVAASTGASPAACLLAGLATLSGPRHGGAGEAVMQLAEDAARHGADAAIRRWLGHDRPLPAFGHPLYPDGDPRTTALSAAIPVDETLQQLEKAAIAMTGARPNIDFALAALTRGLGLPRDAPFQLFALGRSVGWAAHMVEQIVSGSIIRPRGRYEGLLP

SEQ ID NO: 11684 - protein, 429 aa, Sinorhizobium meliloti
MSEKSATVTFGGKSADLPVRSGSIGPDVVDIGSLYKQTTMFTYDPGFTSTASCESKITYIDGDEGVLLHRGFPIEQLAEHGDFLEVCYLLLYGELPTKAQKADFDYRVTHHTMVHEQMSRFFTGFRRDAHPMAVMCGCVGALSAFYHDSTDITDPHQRMVASLRMIAKMPTIAAMAYKYHIGQPFVYPKNDLDYASNFLRMCFAVPCEDYVVNPVLARAMDRIFILHANHEQNASTSTVRLAGSSGANPFACIAAGIACLWGPAHGGANEAALNMLAEIGTADRIPEYIAKAKDKNDPFRLMGFGHRVYKNYDPRAKIMQKTTHEVLAELGHKDDPLLEVAMELERIALTDEYFVEKKLYPNIDFYSGITLKALGFPTTMFTVLFALARTVGWIAQWNEMIEDPEQRIGRPRQLYVGAPLRDYVPITKR

SEQ ID NO: 11685 - protein, 429 aa, Sinorhizobium meliloti
MSEKSATVTFGGKSADLPVRSGSIGPDVVDIGSLYKQTTMFTYDPGFTSTASCESKITYIDGDEGVLLHRGFPIEQLAEHGDFLEVCYLLLYGELPTKAQKADFDYRVTHHTMVHEQMSRFFTGFRRDAHPMAVMCGCVGALSAFYHDSTDITDPHQRMVASLRMIAKMPTIAAMAYKYHIGQPFVYPKNDLDYASNFLRMCFAVPCEEYVVNPVLARAMDRIFILHADHEQNASTSTVRLAGSSGANPFACIAAGIACLWGPAHGGANEAALNMLAEIGTVDRIPEYITKAKDKNDPFRLMGFGHRVYKNYDPRAKIMQKTTHEVLAELGHKDDPLLEVAMELERIALTDEYFIEKKLYPNIDFYSGITLKALGFPTTMFTVLFALARTVGWIAQWNEMIEDPEQRIGRPRQLYVGAPLRDYVPISKR

SEQ ID NO: 11686 - protein, 431 aa, Bartonella henselae
MSKNKAHITVNDKKIELSVRKGTLGPDVIEIASLYKETDTFTYDPGFTSTASCESKITYIDGNEGILLYRGYPIDQLAEKGDFLESCYLLLYGELPTKQEKIDFDRCIMQHTMVHEQFARFFHGFRRDSHPMAVMIACLGAMSAFYHDSIDITDPQQRMIASIRLISKVPTLAAMAYKYSIGQAFVYPRNDLSYAANFLRMCFSVPCEEYKINPVLTRAMDRIFTLHADHEQNASTSTVRLAGSSGANPFACIAAGVACLWGPAHGGANEACLKMLQEIGSVERIPEFIARAKDKNDSFRLMGFGHRVYKNYDPRAKIMQQTCHEVLKELNIQNDPLLDIAITLENIALNDEYFIEKKLYPNVDFYSGITLKALGFPTEMFTVLFALARSVGWVAQWKEMIEDPAQKISRPRQLYTGYAAREYIPIDKRVN

SEQ ID NO: 11687 - protein, 309 aa, Bartonella henselae
DGNEGILLYRGYPIDQLAEKGDFLESCYLLLYGELPTKQEKIDFDRCIMQHTMVHEQFARFFHGFRRDSHPMAVMIACLGAMSAFYHDSIDITDPQQRMIASIRLISKVPTLAAMAYKYSIGQAFVYPRNDLSYAANFLRMCFSVPCEEYKINPVLTRAMDRIFTLHADHEQNASTSTVRLAGSSGANPFACIAAGVACLWGPAHGGANEACLKMLQEIGSVERIPEFIARAKDKNDSFRLMGFGHRVYKNYDPRAKIMQQTCHEVLKELNIQNDPLLDIAITLENIALNDEYFIEKKLYPNVDFYSGI

SEQ ID NO: 11688 - protein, 545 aa, Glycine max
  unsure (1)..(545): unsure at all Xaa locations
IHLHIQSFELFHFLQIIPIPQPTKKHHQHNTTMSKTTTSSEQTARNRLATLAAHXASLRPTSAAAILHPHRLSAPTGDLPPANLKGTLTVVDERTGKKYQIEVTPDGTVRASDFKKISSGKNDKGLKLYDPGYLNTAPVISRISYIDGDAGILRYRGYPIEDLAEKSTFTEVSYLILYGNLPSESQLAEWEFALSQHSAVPQGVLDMIESMPHDAHPMGMLVNAMSALSVFHPDANPALKGLDIYNSKQVRDKQIARVIGKITTIAAAINLRLAGRPPVLPSNKLSYTENFLYMLDSFGNRSYKPNPRLTRALDIIFVLHAEHEMNCSTSAVRHLSSSGVDVYTAIAGAVGALYGPLHGGANEAVLKMLSEIGTVENIPAFIEGVKARKRKLSGFGHRVYKNYDPRAKVLRKLTEEVFSIVGRDPLIEIAVALEKIALSDEYFIKRKLYPNVDFYSGLIYRAMGFQPEFFTVLFAIPRMAGYLAHWRESLDDPDTKIMRPQQVYVGEWLRHYAPINQRTASSNTDKLGQLAVSNASKRRLAGSGA

SEQ ID NO: 11689 - protein, 522 aa, Glycine max
  unsure (1)..(522): unsure at all Xaa locations
MHHQHNTTMSKTTTSSEQTARNRLATLAAHXASLRPTSAAAILHPHRLSAPTGDLPPANLKGTLTVVDERTGKKYQIEVTPDGTVRASDFKKISSGKNDKGLKLYDPGYLNTAPVISRISYIDGDAGILRYRGYPIEDLAEKSTFTEVSYLILYGNLPSESQLAEWEFALSQHSAVPQGVLDMIESMPHDAHPMGVLVNAMSALSVFHPDANPALRGLDIYDSKQIRDKQIARVIGKITTIAAAVYLRMAGRPPVLPSNQLSYTENFLYMLDSFGNRSYKPNPRLTRALDIIFILHAEHEMNCSTSAVRHLSSSGVDVYTAIAGAVGALYGPLHGGANEAVLKMLSEIGTVENIPAFIEGVKARKRKLSGFGHRVYKNYDPRAKVLRKLTEEVFSIVGRDPLIEVXAVALEKIALSDEYFIKRKLYPNVDFYSGLIYRAMGFQPEFFTVLFAIPRMAGYLAHWRESLDDPDTKIMRPQQVYVGEWLRHYAPINQRTASSNTDKLGQLAVSNASKRRLAGSGA

SEQ ID NO: 11690 - protein, 360 aa, Glycine max
  unsure (1)..(360): unsure at all Xaa locations
MSSNSDAAAATVHAHGRLAMLAAHLLPSQLTHPAPSTLSIXSSQLPPPPNLAGTLTVVDERTGKKYQLHVSKEGTVKASEFKKILTGKNDKGLKLYDPGYLNTAPVRSTISYIDGDEGILRYRGYPIEELADKSTFTEVSYLIMYGSLPSESQLAEWEFAISQHSAVPQGVLDMIQSMPHDAHPMGVLVNAMSALSVFHPDANPALRGLDIYDSKQIRDKQITRVIGKITTIAAAVYLRMAGRPPVLPSNHLSYTENFLYMLDSFGNRSYKPNPRLTRVLDIIFILHAEHEMNCSTSAVRHLASSGVDVYTAIAGXAVGALYGPLHGGANEAVLXXLSEIGTVQXIXRXIESVKARKRKX

SEQ ID NO: 11691 - protein, 132 aa, Glycine max
  unsure (1)..(132): unsure at all Xaa locations
EEVFSIVGRDPLIEVAVXALEKVALSDEYFIKRKLYPNVDFYSGLIYRAMGFPPEYFTVLFAIPRMAGYLAHWRESLDDPDTKILRPQQVYVGEWLRHYTQVNVRTTSSDADKLGEVAISNASKRRLAGSGV

SEQ ID NO: 11692 - protein, 484 aa, Glycine max
  unsure (1)..(484): unsure at all Xaa locations
MAFFRSVSALSRLRSRVGQQSNLANSVRWLQTPSSSNTDLYSELKELVPEYQERVKKLKKDHGSVELGKITVDMVLGGMRGMTALVWLGSAVDPDEGIRFRGMSIPECQKKLPGAFPGGEPLPEAVLWLLLTGKIPSKAQVDSLSKELRSRATIPDYAYKAIDALPVSAHPMTQFTTGVMALQVQSEFQKAYEGGIAKARYWEPTYEDTMNLIARLPAIAAYIYRRKYKDGKIIPLDDSLDYGANYAHMLGFDDPEMLEFMRLYISIHSDHEGGNVSSHTAHLVASPLSDPYLAFAAALNGLAGPLHGLANQEVLRWIRSIVAEFGTPNISTEQLADYINKTLSRGQVVPGYGHGVLRQTDPRYTCQREFALKHLPNDPYFQLVSKIKEVVPPILTKLGKVKNPWPNVDAHSGVLLNYYGLTEENYYTVLFGVSRSFGVGPQLIWDRALGMPLERPKSVTLEKLEQLVAKSSXNLKRHFSVNNF

SEQ ID NO: 11693 - protein, 146 aa, Glycine max
  unsure (1)..(146): unsure at all Xaa locations
XSSRANQTYRKPRTRGKQVARVWGKITTIAAAINLRLAGRPPVLSSNKLSYTENFLYMLDSFGNRSYKPNPRLTRALDIIFILHAEHEMNCSTSAVRHLLSSGXVDVYTAIAGXAVGALYGPLHGGANEXAVLKMXLSENGTAENX

SEQ ID NO: 11694 - protein, 137 aa, Glycine max
  unsure (1)..(137): unsure at all Xaa locations
XCSYLRMAGRPPVLPSNHLSYTXXNFLYMLDSFGNRSYKPNPRLTRVLDIIFILHAEHEMNCSTSAVRHLASSGVDVYTAIAGAVGALYGPLHGGANEVAISSXXSSHDLLCIARLNIVNKHKHYTVIXYGNMLMXX

SEQ ID NO: 11695 - protein, 203 aa, Glycine max
  unsure (1)..(203): unsure at all Xaa locations
MSKTTTSSSEQTARNRLATLAAHLLPSDAXPPPPRSSAXHRLSAPAGSSPPVNLKGTVTVVDERTGKKYQIEVTPDGTVRASDFKKISTGKNDKGLKLYDPGYLNTAPVISRISYIDGDAGILRYRGYPIEDLAEKSSFMEVSYLIRXXIQSMPHDAHPXGMLVNAMSALSVYHPEANPALKGLDIYNSKQVRNKQVARGIGX

SEQ ID NO: 11696 - protein, 429 aa, Rhizobium tropici
MTEQSAKLTWGEKTVDLPVKTGTIGPSVIDIGALYKNTSTFTYDPGFTSTASCESSITFIDGDEGVLLHRGYPIEQLAEHGDFLEVCYLLLYGELPTAAQKKDFDYRVVHHTMVHEQMSRFFTGFRRDAHPMAVMCGCVGALSAFYHDSTDITDPHQRMVASLRMIAKMPTLAAMAYKYHIGQPFVYPKNDLDYASNFLRMCFAVPCEEYVVNPVLARAMDRIFILHADHEQNASTSTVRLAGSSGANPFACIAAGIACLWGPAHGGANEAALNMLTEIGTVDRIPEYIARAKDKNDPFRLMGFGHRVYKNYDPRAKIMQKTAHEVLGELGIKDDPLLDIAIELERIALTDDYFIEKKLYPNVDFYSGITLKALGFPTTMFTVLFALARTVGWIAQWNEMIEDPDQRIGRPRHVYTGAPLREYVPVSKR

SEQ ID NO: 11697 - protein, 429 aa, Rhizobium tropici
MDNNNACVLVDGHSAELKLRSSTIGPNVLGIGSLYEQTKMFTYDPGFTSTASCESSITFIDGDEGVLLHRGYPIEQLAEHGDFLEVCYLLLYGELPTAAQKKDFDYRVVHHTMVHEQMSRFFTGFRRDAHPMAVMCGCVGALSAFYHDSTDITDPHQRMVASLRMIAKMPTLAAMAYKYHIGQPFVYPKNDLDYASNFLRMCFAVPCEEYVVNPVLARAMDRIFILHADHEQNASTSTVRLAGSSGANPFACIAAGIACLWGPAHGGANERALNMLTEIGTVDRIPEYIARAKDKNDPFRLMGFGHRVYKNYDPRAKIMQKTAHEVLGELGIKDDPLLDIAIELERIALTDDYFIEKKLYPNVDFYSGITLKALGFPTTMFTVLFALARTVGWIAQWNEMIEDPDQRIGRPRQLYTGAPLREYVPLSKR

SEQ ID NO: 11698 - protein, 493 aa, Oryza sativa (japonica cultivar-group)
MQSASDLDLKSQLQELIPEQQDRLKKLKSEHGKVQLGNITVDMVLGGMRGMTGMLWETSLLDPDEGIRFRGLSIPECQKVLPTAVKDGEPLPEGLLWLLLTGKKIKNIVTDTYRDYGVFVPTKLYSASTINTPSFLYNVPPDGSLGCITNLCFCKHTACYPLTYLALIRLTYDTDAGHVYEAIDALPVTAHPMTQFTTGVMALQVESEFQKAYDKGMSKSKFWEPTYEDCLNLIARLPAVASYVYRRIFKGGKTIAADNALDYAANFSHMLGFDDPKMLELMRLYITIHTDHEGGNVSAHTGHLVGSALSDPYLSFAAALNGLAGPLHGLANQEVLLWIKSVIGETGSDVTTDQLKEYVWKTLKSGKVVPGFGHGVLRKTDPRYTCQREFALKYLPEDPLFQLVSKLYEVVPPILTELGKVKNPWPNVDAHSGVLLNHFGLSEARYYTVLFGVSRSIGIGSQLIWDRALGLPLERPKSVTMEWLENHCKKVAA

SEQ ID NO: 11699 - protein, 472 aa, Daucus carota
MVFFRSVSLLNKLRSRAVQQSNLSNTVRWFQVQTSASDLDLRSQLKELIPEQQERIKKLKAEHGKVQLGNITVDMVLGGMRGMTGLLWETSLLDPEEGIRFRGLSIPECQKLLPGAKPGGEPLPEGLLWLLLTGKVPTKEQVDALSAELRSRAAVPEHVYKTIDALPVTAHPMTQFATGVMALQVQSEFQKAYEKGIHKTKYWEPTYEDSITLIAQLPVVAAYIYRRMYKNGQSISTDDSLDYGANFAHMLGYDSPSMQELMRLYVTIHTDHEGGNVSAHTGHLVASALSDPYLSFAAALNGLAGPLHGLANQEVLLWIKSVVSECGENVTKEQLKDYIWKTLNSGKVVPGYGHGVLRNTDPRYICQREFALKHLPDDPLFQLVSNLFEVVPPILTELGKVKNPWPNVDAHSGVLLNHYGLTEARYYTVLFGVSRAIGICSQLVWDRALGLPLERPKSVTMEWLENHCKKSS

SEQ ID NO: 11700 - protein, 309 aa, Bartonella vinsonii subsp. berkhoffii
ITYIDGNKGVLLYRGYPIEQLAEKGDFLESCYLLLYGELPTQQEKSDFDRCIMQHTMVHEQFARFFHGFRRDSHPMAVMVACLGAMSAFYHDSIDIIDPQQRMIASVRLISKVPTLAAMAYKYSIGQAFVYPRNDLSYAANFLRMCFSVPCEEYKTNPVLTRAMDRIFILHADHEQNASTSTVRLAGSSGANPFACIAAGVACLWGPAHGGANEACLKMLLEIGSVKRIPEFIARAKDKNDPFRLMGFGHRVYKNYDPRAKIMQKTCHEVLKELNIQNDPLLDIAIELEKIALNDEYFVEKKLYPSVDF

SEQ ID NO: 11701 - protein, 112 aa, Bartonella vinsonii subsp. berkhoffii
ANEACLKMLLEIGSVKRIPEFIARAKDKNDPFRLMGFGHRVYKNYDPRAKIMQKTCHEVLKELNIQNDPLLDIAIELEKIALNDEYFVEKKLYPNVDFYSGITLKALGFPTE

SEQ ID NO: 11702 - protein, 469 aa, Nicotiana tabacum
MVFYRGVSLLSKLRSRAVQQTNLSNSVRWLQVQTSSGLDLRSELQELIPEQQDRLKKLKSEHGKVQLGNITVDMVLGGMRGMTGLLWETSLLDPDEGIRFRGLSIYECQKVLPAAKPGGEPLPEGLLWLLLTGKVPSKEQVDSLSQELRSRATVPDHVYKTIDALPVTAHPMTQFATGVMALQVQSEFQKAYEKGIHKSKLWEPTYEDSMSLIAQVPLVAAYVYRRMYKNGNTIPKDDSLDYGANFAHMLGFSSSDMHELMKLYVTIHSDHEGGNVSAHTGHLVASALSDPYLSFAAALNGLAGPLHGLANQEVLLWIKSVVEECGENISKEQLKDYAWKTLKSGKVVPGFGHGVLRKTDPRYTCQREFALKHLPEDPLFQLVAKLYEVFLQFLQNLAKLNPWPNVDAHSGVLLNYYGLTEARYYTVLFGVSRALGICSQLIWDRALGLPLERPKSVTMEWLENHCKKA

SEQ ID NO: 11703 - protein, 471 aa, Solanum tuberosum
MVFYRSVSLLSKLRSRAVQQSNVSNSVRWLQVQTSSGLDLRSELVQELIPEQQDRLKKIKSDMKGSIGNITVDMVLGGMRGMTGLLWKPHYLDPDEGIRFRGLSIPECQKVLPAAKPGGEPLPEGLLWLLLTGKVPSKEQVNSIVSGIAESGIISLIIMYTTIDALPVTAHPMTQFATGVMALQVQSEFQKAYEKGIHKSKYWEPTYEDSMNLIAQVPLVAAYVYRRMYKNGDTIPKDESLDYGANFAHMLGFSSSEMHELLMRLYVTIHSDHEGGNVSAHTGHLVASALSDPYLSFAAALNGLAGPLHGLANQEVLLWIKSVVEECGENISKEQLKDYVWKTLNSGKVVPGFGHGVLRKTVPRYTCQREFAMKHLPEDPLFQLVSKLYEVFLLFLQNLAKLKPWPNVDAHSGVLLNYYGLTEARYYTVLFGVSRALGICSQLIWDRALGLPLERPKSVTMEWLENQCKKA

SEQ ID NO: 11704 - protein, 106 aa, Rickettsia felis
NMLKEIGSSENIPKYIAKAKDKNDPFRLMGFGHRVYKNYDPRAAVLKETCKEVLKELGQLENNPLLQIAIELEAIALKDEYFIERKLYPNVDFYSGIIYKAMGIPS

SEQ ID NO: 11705 - protein, 436 aa, Acetobacter aceti
MSASQKEGKLSTATISVDGKSAEMPVLSGTLGPDVIDIRKLPAQLGVFTFDPGYGETAACNSKITFIDGDKGVLLHRGYPIAQLDENASYEEVIYLLLNGELPNKVQYDTFTNTLTNHTLLHEQIRNFFNGFRRDAHPMAILCGTVGALSAFYPDANDIAIPANRDLAAMRLIAKIPTIAAWAYKYTQGEAFIYPRNDLNYAENFLSMMFARMSEPYKVNPVLARAMNRILILHADHEQNASTSTVRLAGSTGANPFACIAAGIAALWGPAHGGANEAVLKMLARIGKKENIPAFIAQVKDKNSGVKLMGFGHRVYKNFDPRAKIMQQTCHEVLTELGIKDDPLLDLAVELEKIALSDDYFVQRKLYPNVDFYSGIILKAMGIPTSMFTVLFAVARTTGWVSQWKEMIEEPGQRISRPRQLYIGAPQRDYVPLAKR

SEQ ID NO: 11706 - protein, 372 aa, Legionella pneumophila
MSSKSGGLAGVVAGQSAIATVGLAGKGLNYRGYSINDLAEYASFEEVAYLLHYGELPTQKELDVYIKKLVNLRHIPDVLKTVLKLIPKNTHPMDVLRTACSFLGTIEPEENFKQQYEIADRLLALFPGIMCYWYTYHFKNKEISGLSEENTTGGHFLALLHGRKPSKIETDMMNVSLILYAEHEFNASTFAARVTAATLADFYSAITSAIGTLRGPLHGGANEAAMELIERFKTPDEAAIGIKQMLASKELIMGFGHRVYTTCDPRSDIIKKWSFRLGEEKGNLLLYHISERIEEIMWQEKKLFPNLDFYSASAYHYCDIPTHLFTPIFVMSRITGWSAHVFEQRANNKLIRPTSEYIGPDSRPFPAIETRG

SEQ ID NO: 11707 - protein, 492 aa, Dictyostelium discoideum
MAHIDRINILANHLSKEEEEENELLTSPVSADKKKETVTVTDNRNGKSYDFKIKNDTINALNFKELQLAKGDGGLMIYDPGFQNTAVVTSYITYIDGDKGILRYRGYPIEELAERSNFLEVAYLLINGNLPNKSQLDGWSNKIMTHTFLHENLVGLMKTFRYDAHPMGMLISTVAALGTFYPEANPALAGGDIFKSENVRNKQIYRIVGKLPTIAACAWRHRIGRPYNTPVNHLGYTENFLYMLDKLSEPDYKPNPVLCRALEILFILHADHELNCSTAAMRHISSSGTDPYTSVAGAAGALYGPSHGGANEAVLDMLIHIGSKENIPQFISDVKSKKKKLMGFGHRIYKNYDPRAKIIRRVAYEVFESLGKEPLIEVATELEKQALEDEYFVSRKLYPNVDFYSGLIYKAMGFPTDMFPVLFTIPRAVGWLAHWVEHLEDPETKIYRPRQVYKGEWFRNYVPIDGRPPAKVRSQDSYSSATTKRYSKVTSH

SEQ ID NO: 11708 - protein, 512 aa, Dictyostelium discoideum
MSSNSQEDNNKTTEKKNTLTVIDNRTGKSYEIPINHETVKSIDFRAIKEQSIDFGTMIYDPGYYNTAVCKSQITYIDGDRGILEYRGYPIEQLAEKSSFLEVSYLLIYGDLPSKEQSNLWNTKIMNHTFIHENLISMMKSFRYDAHPMGMLISSLSAMSTFYPEANPALAGVDIYKNKQLMNKQIFRILGKLPTIAACAYRHRIGRPYNDPSNTLSYTENFLYMLDRLSESNYKPHPVLTRALDKLFIIHADHELNCSTATMRQIASTLVDPYTACAGSAGALYGPLHGGANEAVLRMLEAIGTIENIPKFIEQVKQKKQRLMGFGHRVYKSYDPRAKILKTVTMEIFALLGKNPLMQIATELERLALSDSYFIERQLYPNVDFYSGIIYKSMGFPTDMFPVLFSIPRAAGWLAHWVEELADPELRIFRPRQIYMGRRNMNYVPMDARQVQQHNSGEKLSSFSSGFDRRRDVSEELFNFEDGAIPKTATGSKSQLSASIEQSFGEKISPQSH

SEQ ID NO: 11709 - protein, 247 aa, Dictyostelium discoideum
ASTLVDPYTACAGSAGALYGPLHGGGNEAVLRMLEAIGTIENIPKFIEQVKQKKQRLMGFGHRVYKSYDPRAKILKTVTMEIFALLGKNPLMQIATELERLALSDSYFIERQLYPNVDFYSGIIYKSMGFPTDMFPVLFSIPRAAGWLAHWVEELADPELRIFRPRQIYMGRRNMNYVPMDARQVQQHNSGEKLSSFSSGFDRRRDVSEELFNFEDGAIPKTATGSKSQLSASIEQSFGEKISPQSH

SEQ ID NO: 11710 - protein, 460 aa, Dictyostelium discoideum
MFARLARANYLKNSGKYFSTEPTLKERLVQIIPGKIEQVKQLKTEHGDKIIGTCTVAQAYGGMRSVKSLVTETSSLDPEEGIRFRGLTIPECQEKLPKAPGGAEPLPEGILWLLLTGEVPTESQVKTLSKDLAKRAGLPKHVTSMIKAFPEQMHPMSQLAAAILALQGESKFVKAYNDGVKKDKYWESTLEDSLDVIAKLPEVAALIYQNTYKKSDITHKIDENLDWSANFNRMLGYTSKDFDELMRLYLTIHTDHEGGNVSAHTTHLVGSALSDSYLSLSAGMCGLAGPLHGLANQEVLSWTMKLQEKLGNKEVSNEVLSEAIWEGLNAGRVVPGFGHAVLRKTDPRYTCQREFALKHLPQDPLFKLVSQIYEVVPDILTKHGKTKNPYPNVDAHSGCLLQYYGLKEHNFYTVLFGVSRAIGVLSSLVWDRILGHPIERPKSVTTEWISIYLISDQSKK

SEQ ID NO: 11711 - protein, 411 aa, Israeli tick typhus rickettsia
DSEFAELKIRGKIFKLPILKASIGEDVIDISRVSAEADCFTYDPGFMSTASCQSTITYIDGDKGILRYRGYDIKDLAEKSDFLEVAYLLIYGELPSGEQYNNFTKQVAHHSLVNERLHYLFQTFCSSSHPMAIMLAAVGSLSAFYPDLLNFKEADYELTAIRMIAKIPTIAAMSYKYSIGQPFIYPDNSLDFTENFLHMMFATPCTKYTVNPIIKNALNKIFILHADHEQNASTSTVRIAGSSGANPFACISTGIASLWGPAHGGANEAVINMLKEIGSSEYIPKYIAKAKDKNDPFRLMGFGHRVYKNYDPRAAVLKETCKEVLKALGQLDNNPLLQIAIELEAIALKDEYFIERKLYPNVDFYSGIIYKAMGIPSQMFTVLFVIARIVGWMAQWKEMHEDPEQKISRPR

SEQ ID NO: 11712 - protein, 541 aa, Oryza sativa
  unsure (1)..(541): unsure at all Xaa locations
FPQSGSQTQTNPNLQPNADESSKQPPPAPTSAXALLSSPMDRARLAVLSAHLASPAXPPAGRRTRRGRXERSAASAGARGGALAVVDGRTGKRYEVKVSDEGTVRATDFKKITTGKDDKGLKIYDPGYLNTAPVRSSICYIDGDEGILRYRGYPIEELAESSSFVEVAYLLMYGSLPTQSQLAGWEFAISQHSAVPQGLLDIIQAMPHDAHPMGALASAMSTLSVFHPDANPALRGQDLYKSKQVRDKQIVRVLGKAPTIAAAAYLRLAGRPPILPTNSLSYSENFLYMLDSLGDKEYKPNPRLARVLDILFILHAEHEMNCSTAAARHLASSGVDVFTALSGAVGALYGPLHGGANEAVLKMLNEIGSVENIPDFIEGVKNRKRKMSGFGHRVYKRYDPRAKVIRKLAEEVFSIVGRDPLIEVAVALEKAALSDDYFVKRKLYPNVDFYSGLIYRAMGFPTEFFPVLFAIPRXMAGWLAHWKESLDDPDTKIMRPQQVYTGVWLRHYTPVRERVPASQGEQLGQIATSNATRRRRAGSAL

SEQ ID NO: 11713 - protein, 923 aa, Oryza sativa
  unsure (1)..(923): unsure at all Xaa locations
XAVQEYKRLMPGRIIGVSVDSSGKPALRMAMQTREQHIRRDKATSNICTAQALLANMAAMYAVYHGPEGLKAIADRVHGLAGTFAQGLKKLGTVTVQELPFFDTVKVKVADANAIAQEACKNEMNLRVVDATTITVAFDETTTLEDVDKLFKVFNGGKPVNFTAESLAPEVSSSIPSSLVRKSPYLTHPIFNMYHTEHELLRYLYKLQSKDLSLCHSMIPLGXSCTMKLNATVEMMPVTYPNFANMHPFAPTDQAAGYHEMFDDLGDLLCKITGFDSFSLQPNAGASGEYAGLMVIRAYHRARGDYHRDVCIIPVSAHGTNPASAAMCGMKIVAVGTDSKGNINIEELRKAAEANKDNLAALMVTYPSTHGVYEEGIDEICMIIHENGGQVYMDGANMNAQVGLTSPGFIGADVCHLNLHKTFCIPHGGGXGPGMGPIGVKKHLAPFLPSHPVITTGGFPLPEKTDPLGTISAAPWGXSALILPISYTYIAMMGSKGLTDASKIAILNANYMTKRLEKHYPVLFRGVNGTVAHEFIIDLRGFKTTAGIEPEDVAKRLMDYGFHAPTMSWPVPGTLMIEPTESESKAXELDRFCDALISIREEIAEIESGKADVNNNVLKSAPHPPQLLMSDSWTKPYSREYAAFPAAYLRLAGRPPILPTNSLSYSENFLYMLDSLGDKEYKPNPRLARVLDILFILHAEHEMNCSTAAARHLASSGVDVFTALSGAVGALYGPLHGGANEAVLKMLNEIGSVENIPDFIEGVKNRKRKMSGFGHRVYKNYDPRAKVIRKLAEEVFSIVGRDPLIEVAVALEKAALSDDYFVKRKLYPNVDFYSGLIYRAMGFPTEFFPVLFAIPRMAGWLAHWKESLDDPDTKIMRPQQVYTGVWLRHYTPVRERVPASQGEQLGQIATSNATRRRRAGSAL

SEQ ID NO: 11714 - protein, 476 aa, Oryza sativa
  unsure (1)..(476): unsure at all Xaa locations
GILPPLNRNSCYSSMFARTTPRVRISAPVKKANFGSVSSHSLKQRLQHLIPEKAAEIKNIKDKHGDKLLGTCTVSQAYGGMRGVKAMIYETSLLDADEGIRFRGFTIPEVQQKLPKAPGGAEPLPEGLLWLLLTGEVPTQAQVSELSADLAHRNKVPEWVFKLLKDLPPDMHPMTQFIIAINALQKESLFAQKYQEGMPKSKYWEYALEDSLNLIARLPTVAAAIYRYTYKNGQIIQPDSKLDWSANFSRMLGHNNKQFDDLMRLYLTIHSDHEGGNVSAHATQLVGSALSDPYLAFAAGMCGLAGPLHGLANQEVLRWIVNLKKKFGDRNITNEELKKALWDTLNSGQVVPGFGHAVLRKTDPRYTCQREFALKHLPNDPLFKLVAQLYEVVPGILKEHGKTKNPWPNVDAHSGVLLVHYGMTEENYYTVLFGVSRAIGVLSNLVWTRALGFPLERPKSVTTEWVXKLVSHRPYG

SEQ ID NO: 11715 - protein, 472 aa, Oryza sativa; identical to SEQ ID NO: 480

SEQ ID NO: 11716 - protein, 472 aa, Oryza sativa; identical to SEQ ID NO: 480

SEQ ID NO: 11717 - protein, 493 aa, Oryza sativa; identical to SEQ ID NO: 11698

SEQ ID NO: 11718 - protein, 104 aa, Oryza sativa
VAVALEKAALSDDYFVKRKLAMGFPTEFFPVLFAIPRMAGWLAHWKESLDDPDTKIMRPQQVYTGVWLRHYTPVRERVPASQGEQLGQIATSNATRRRRAGSAL

SEQ ID NO: 11719 - protein, 206 aa, Oryza sativa
  unsure (1)..(206): unsure at all Xaa locations
YXXALTSSFRAHDIQLQVGSALSDPYLSFAAALNGLAGPLHGLANQEVLLWIKSVIGETGSDVTTDQLKEYVWKTLKSGKVVPGFGHGVLRKTDPRYTCQREFALKYLPEDPLFQLVSKLYEVVPPILTELGKVKNPWPNVDAHSGVLLNHFGLSEARYYTVLFGVSRSIGIGSQLIWDRALGLPLERPKSVTMEWLENHCKKVAA

SEQ ID NO: 11720 - protein, 763 aa, Oryza sativa
  unsure (1)..(763): unsure at all Xaa locations
VGSALSDPYLSFAAALNGLAGPLHGLANQEVLLWIKSVIGETGSDVTTDQLKXYVWKTLKSGKVVPGFGHGVLRKTDPXRYTCQREFALKYLPEDPLFQLVSKLYEVVPPILTELGKVKNPWPNVDAHSGVLLNHFGLSEARYYTVLFGVSRSIGIGSQLILRFAPANEAASTALLSARWRSLWRSTGAVNLAVRLPEPDDGRRHGHRVSHDAVSSCHDAFVRSAQAALSAAAAAAGGRGRHVTRLTLDLRAATMDVIDRFVHTERPLGADAAPDTDVWLRLSDDVEREADRWVKRGDVVRDVVSHPAARRVEELRISASAPAVDDDDDDGEVGRLVGVFHLDLRYVPSETLRVLDLSRCSGLRMPPAVETPRLTTLRLQACAVNVNDLQRVIDAAPALATVHLDSVSFDGMEHGCYRLRLPAATTALVLARCRTDAEPYRYRRSGRPLGTSSVEIDAPGLRSFRYAGYARRFSLASPPDMARADLHFFHDMYASASTSRDLFWRFVRSFRGIRSLKLKVSDLKHVAVAGRATRAELLVAFPNVEHLELEGHHESASETAAAVAIGNLLRCCPAARHLALHLATAPPRERDSAMNGRYGRDLLRARQQADLAESLDRFARRRRRKPNPPPPPPPPTPVNSMDEHLSIVGLSGRSFACLKNSLRRFVIQFRMDRPNCIGVKLIKFFAENAIHLEEMRIDGGNQRMHDHINHMVEGWISDSSSAKKRANHESSQGIDATVVDIISMYICEYSEKSGNHLAMEHKP

SEQ ID NO: 11721 - protein, 542 aa, Triticum aestivum
  unsure (1)..(542): unsure at all Xaa locations
SKSRTQPETSKQPLPSLLLLCSSSLQSTLLASHRPIRWTAPXPARGRLAVLSSHLLAAGADPAAXRWXXRSPASAAAPGARAGVLAVVDSRTGKRYEVKVSEDGTVRATDFKKITAGKDDKGLKTYDPGYLNTAPVRSSICYIDGDEGILRYRGYPIEEVAESSSFVEVAYLLMYGNLPTQSQLAGWEFAISQHSAVPQGLLDIIQSMPHDAHPMGVLASAMSTLSVFHPDANPALRGQDLYNSKQVRDKQIVRVLGKAPAIAAAAYLRLAGRPAVLPSNNLSYSENFLYMLDSLGDKEYKPNPRLARVLDILFILHAEHEMNCSTAAVRHLASSGVDVFTALSGAVGALYGPLHGGANEAVLKMLNEIGAVENIPDFIEGVKNRKRKMSGFGHRVYKNYDPRAKVIRKLAEEVFSIVGRDPLIEVAVALEKAALSDEYFIKRKLYPNVDFYSGLIYRAMGFPTEFFPVLFAIPRMAGWLAHWKESLDDPDNKIMRPQQVYTGVWLRHYTPVRERVASNQGEELGQIATSNATRRRRAGSSL

SEQ ID NO: 11722 - protein, 513 aa, Triticum aestivum
  unsure (1)..(513): unsure at all Xaa locations
EAKAVPNXTSKHSLSSLALLVSSPPCSHRTDRSDGPRRSRAGPPPHAPPHPPRGVLAVVDSRTGKRYEVKVSEDGTVRATDFKKITAGKDDKGLKTYDPGYLNTAPVRSSICYIDGDEGILRYRGYPIEEVAESSSFVEVAYLLMYGNLPTQSQLAGWEFAISQHSAVPQGLLDIIQSMPHDAHPMGVLASAMSTLSVFHPDANPALRGQDLYKSKQVRDKQIVRVLGKAPAIAAAAYLRLAGRPAVLPSNNLSDSENFLYMLDSLGNKEYKPNPRLARVLDILFILHAEHEMNCSTAAVRHLASSGVDVFTALSGAVGALYGPLHGGANEAVLKMLNEIGAVENIPDFIEGVKNRKRKMSGFGHRVYKNYDPRAKVIRKLAEEVFSIVGRGPLIEVAVALEKAALSDDYFIKRKLYPNVDFYSGLVNRVLGFPSDFFPVLFAIPRMAGWLAHWKESLDDPDNKIMRPRQVYTGVWLRHYTPVRERVASNQGEELGQIATSNATRRRRAGSSL

SEQ ID NO: 11723 - protein, 472 aa, Triticum aestivum
MAFFRGLAAVSRLRSRMGQDATTLGGVRWLQMQSASDLDLRSQLQEMIPEQQDRLKKLKSEHGKVQLGNITVDMVLGGMRGMTGMLWETSLLDPEEGIRFRGLSIPECQKVLPAAVKDGEPLPEGLLWLLLTGKVPTKEQVDALSKELLSRSTVPGYVYKAIDALPVTAHPMTQFTTGVMALQVESEFQKAYNKGMPKTKFWEPTYEDCLNLISRFPQVASYVYRRIFKDGKAIAADNTLDYAANFSHMLGFDDPKMLELMRLYITIHTDHEGGNVSAHTGHLVGSALSDPYLSFAAALNGLAGPLHGLANQEVLLWIKSVMEETGSNITTDQLKEYVWKTLKSGKVVPGYGHGVLRNTDPRYSCQREFALKYLPEDPLFQLVSKLYEVVPPILTELGKVKNPWPNVDAHSGVLLNHFGLTEARYYTVLFGVSRSIGIGSQLIWDRALGLPLERPKSVTMEWLENHCKKAAA

SEQ ID NO: 11724 - protein, 100 aa, Triticum aestivum
  unsure (1)..(100): unsure at all Xaa locations
XDECLIKRTLDTNVDFDCGLTDRAIGYPTEIVPVLFALPRMAGWLAHCXERLDDPVHKMMRPQQVYAGGWLRHYTPVRERVASNQGEELGQIATSNATRX

SEQ ID NO: 11725 - protein, 529 aa, Zea mays
  unsure (1)..(529): unsure at all Xaa locations
MDRADPARGRLAVLSSHLRXXAGAEEAAGLERSPVSAPAPGPRAGALAVVDGRTGKRHEVQXVSEDGTVRATDFKKITTGKDDKGLKIYDPGYLNTAPVRSSICYIDGDEGILRYRGYPIEELAESSSFVEVAYLLMYGNLXPTQSQLAGWEFAISQHSAVPQGLLDIIQSMPHDAHPQGVLASAMSTLSVFHPDANPALQGQDLYKSKQVRDKQIVRVLGKAPTIAAAAYLRLAGRPPVLPLNTLSYSENFLYMLDSLGDRTYKPNPRLARALDILFILHAEHEMNCSTAAVRHLASSGVDVFTALSGGVGALYGPLHGGANEAVLKMLNEIGSMENIPDFIVGVKNRKRKMSGFGHRVYKNYDPRAKVIRKLADEVFSIVGRDPLIEVAIALEKAALSDEYFIKRKLYPNVDFYSGLIYRAMGXFPTEFFPVLFAIPRMGGWLAHWKESLDDPDTKIIRPQQVYTGFWXLRHYTPVRERVLSSQSXXELGQVATSNATRRRRAGSALXKLQRINAPAYSINIDHFCA

SEQ ID NO: 11726 - protein, 299 aa, Zea mays
  unsure (1)..(299): unsure at all Xaa locations
XLEPAERTTSALHPVWASAFAWLLLPXSHRPTRSRAMDRAGALAVVDGRTGKRHEVKVSEDGTVRATDFKKITTGKDDKGLKIYDPGYLNTAPVRSSICYIDGDEGILRYRGYPIEELAESSSFVEVAYLLMYGNLPTQSQLAGWEFAISQHSAVPQGLLDIIQSMPHDAHPMGVLASAMSTLSVFHPDANPALQGQDLYKSKQVRDKQIVRVLGKAPTIAAAAYLRLAGRPPVLPLNTLSYSENFLYMLDSLGDRTYKPNPRLARALDILFILHAEHEMNCSTAAXRHLASSSNEVYY

SEQ ID NO: 11727 - protein, 230 aa, Zea mays
  unsure (1)..(230): unsure at all Xaa locations
TSHXTDPMDRAGVLAVVDSRTGKRYEVKVSEDGTVRATDFKKITAGKDDKGLKTYDPGYLNTAPVRSSICYIDGDEGILRYRGYPIEEVAESSSFVEVAYLLMYGNLPSQSQLAAWGFAISQHSAVPQGLLDIIQSMPHDAHPMGVLASAMSTLSVFHPDANPALRGQDLYNSKQVRDKQIVRVLGKAPAIAAAAYLRLAGRPAVLPSKNLSYSQNXLDMLDSLGDQKYX

SEQ ID NO: 11728 - protein, 474 aa, Zea mays
  unsure (1)..(474): unsure at all Xaa locations
MAFYRGLTAVSRLRSRMAQEATTLGGVRWLQMQSASDLDLKSQLQELIPEQQDRLKKLKSEHGKTQLGNITVDMVLGGMRGMTGMLWETSLLDPEEGIRFRGLSIPECQKVLPTAVKGGEPLPEGLLWLLLTGKVPTKEQVDALSKELLARSTVPAHVYKTIDALPVDAHPMTQFTTGVMALQVESEFQKAYDNGLPKSKFWEPTYEDCLNLIARLPPVASYVYRRIFKSGKSIEADNSLDYAANFSHMLGFDDQKMLELMRLYVTIHTDHEGGNVSAHTGHLVGSALSDPYLSFAAALNGLAGPLHGLANQEVLLWIKSVIEETGSGVTTDQLKDYVWKTLKSGKVVPGFGHGVLRKTXDPRYSCQREFALKHLPEDPLFQLVSKLYEVVPPILTELGKVKNPWPNVDAHSGVLLNHFGLSEARYYTVLFGVSRSMGIGSXQLIWDRALGLPLERPKSVTMEWLENYCKNKAA

SEQ ID NO: 11729 - protein, 472 aa, Zea mays
MAFFRGLTAVSRLRSRMAQEATTLGGVRWLQMHSASELDLKSQLRELIPEQQDRLKKLKSEHGKVQLGNITVDMVLGGMRGIIGMLWETSLVDPEEGIRFRGLSIPECRKVLPTAVEGGEPLPEGLLWLLLTGKVPTKDQVDALSKELLARSTVPAHVYKVIDALPVTAHPMTQFTAGIMALQVESEFQKAYGNGLPKSKLWEPTYEDCLNLIARLPPVASYVYRRIFKDGKSIEADDSLDYAANLSHMLGFDDPRMLELMRLHVTIHADHEGGNISSHTGHLVGSALSDPYLSFASSVNGLAGPLHGLANQEALLWLKSIIQETGSDVTTDQLKDYVWKTLKSGKVVHGFGHGVLRRTDPRYLCQREFALKYLPEDPLFQLLSKLYEVVPPILTELGKVKNPWPNVDAHSGLLLNHFGLSETRYHTVLFGVSRSMGVGSQLIWDRALGLPLERPKSVTMEWLENYCKNKAA

SEQ ID NO: 11730 - protein, 473 aa, Zea mays
  unsure (1)..(473): unsure at all Xaa locations
MAFFRGLTAVSRLRSRMAQEATTLGGVRWLQMQSASDLDLKSQLQELIPEQQDRLKKLKSEHGKVQLGNITVDMVLGGMRGMIGMLWETSLLDPEEGIRFRGLSIPECQKVLPTAVKGGEPLPEGLLWLLLTGKVPTKXEQVDALSKELLERSTVPAHVYKAIDALPVTAHPMTQFTTGVMALQVESEFQKAYDNGLPKSKFWEPTYEDCLNLIARLPPVASYVYRRIFKGGKSIETDNSLDYAANFSHMLGFDDPKMLELMRLYVTIHTDHEGGNVSAHTGHLVGSALSDPYLSFAAALNGLAGPLHGLANQEVLLWIKSVIQETGSDVTTDQLKEYVWKTLKSGKVVPGFGHGVLRKTDPRYSCQREFALKHLPEDPLFQLVSKLYEVVPPILTELGKVKNPWPNVDAHSGVLLNHFGLSEARYYTVLFGVSRSMGIGSQLIWDRALGLPLERPKSVTMEWLENYCKNKAA

SEQ ID NO: 11731 - protein, 472 aa, Zea mays
  unsure (1)..(472): unsure at all Xaa locations
MAFFRGLTAVSRLRSRMMQSASDLVGQLVFLLLYIARKDDLKSQLRELIPEQQDRLKKLKSEHGKVQLGNITVDMVLGGMRGIIGMLWETSLVDPEEGIRFRGLSIPECRKVLPTAVEGGEPLPEGLLWLLLTGKVPTKDQVDALSKELLARSTVPAHVYKVIDALPVTAHPMTQFTAGIMALQVESEFQKAYGNGLPKSKLWEPTYEDCLNLIARLPPVASYVYRRIFKDGKSIEADNSLDYAANLSHMLGFDDPRMLELMRLHXDHEGGNISSHTGHLVGSALSDPYLSFASSVNGLAGPLHGLANQEALLWLKSIIQETGSDVTTDQLKDYVWKTLKSGKVVHGFGHGVLRRTDPRYLCQREFALKYLPEDPLFQLLSKLYEVVPPILTELGKVMWXKNPWPNVDAHSGLLLNHFGLSETRYHTVLFGVSRSMGVGSQLIWDRALGLPLERPKSVTMEWLENYCKNKAA

SEQ ID NO: 11732 - protein, 480 aa, Zea mays
  unsure (1)..(480): unsure at all Xaa locations
MAFYRGXLTAVSRLRSRMAQEATTLGGVRWLQMQSASDLDLKSQLQELIPEQQDRLKKLKSEHGKTQLGNITVDMVLGGXMRGMTGMLWETSLLDPEEGIRFRGLSIPECQKVLPTAVKGGEXPLPEGLLWLLLTGKVPTKEQVDALSKELLGALNXVPAHVYKTIDALPVDAHPMTQFTXTGVMALQVESEFXQKAYDNGLPKSKFWEXPTYEDCLXNLIARLPPVASYVYRRIFQSGKSIEADNSLDYAANFSHMLGFDDPKMLELMRLYVTIHTDHEGGNVSAHTGHLVGSALSDPYLSFAAALNGLAGPLHGLANQEVLLWIKSVIEETGSGVTTDQLKDYVWKTLKSGKVVPGFGHGVLRKTDPRYSCQREFALKHLPEDPLFQLVSKLYEVVPPILTELGKVKNPWPNVDAHSGVLLNHFGLSEARYYTVLFGVSRSMGIGSQLIWDRALGLPLERPKSVTMEWLENYCKNKAA

SEQ ID NO: 11733 - protein, 476 aa, Zea mays
  unsure (1)..(476): unsure at all Xaa locations
MAFFRGLTAVSRLRSRMAQEATTLGGVRWLQMQSASDLDLKSQLQELIPEQQDRLKKLKSEHGKVQLGNITVDMVLGGMRGMIGMLWETSLLDPEEGIRFRGLSIPECQKVLPTAVKGGEPLPEGLLWLLLTGKVPTKEQVDALSKELLARSTVPAHVYKAIDALPVTAHPMTQFTXTGVMAXLQVESEFQKAYDNGLPKSKFWEPTYEDCLNMIARLPPVASYVYRRIFKGGKSIETDNSLDYAANFSHMLGFDDPKMXLELMRLYVTIHTDHEGGNVSAHTGHLVGSALSDPYLSFAAALNGLAGPXLHGLANQEVLLWIKSVIQETGSDVTTDQLKEYVWKTLKSGKVVPGFGHGVLRKTDPRYSCQREFALKHLPEDPLFQLVSKLYEVVPPILTELGKVKNPWPNVDAHSGVLLNHFGLSEARYYTVLFGVSRSMGIGSQLIWDRALGLPLERPKSVTMEWLENYCNNKAA

SEQ ID NO: 11734 - protein, 247 aa, Zea mays
  unsure (1)..(247): unsure at all Xaa locations
HWVPRGRPGPLXXDKDYSFXLANQLGFAENKDFVELMRLYLTIHTDHEGGNVSAHTTHLVGSALSSPYLSLAAGLNGLAGPLHGLANQEVLVWLQKMKKAIGNDLSDQAIKDYLWSTLKAGQVVPGYGHAVLRKTDPRYVSQREFAQKHLPDDPMFKLVSQVYKIAPGVLTEHGKTKNPYPNVDAHSGVLLQYYGLTEQNYYTVLFGVSRALGVLPQLIIDRAVGAPIERPKSFSTEAYAKLVGAKL

SEQ ID NO: 11735 - protein, 207 aa, Zea mays
  unsure (1)..(207): unsure at all Xaa locations
XCFSDHEGGNISSHTGHLVGSALSDPYLSFASSVNGLAGPLHGLANQEALLWLKSIIQETGSDVTTDQLKDYVWKTLKSGKVVHGFGHGVLRRTDPRYLCQREFALKYLPEDPLFQLLSKLYEVVPPILTELGKVKNPWPNVDAHSGLLLNHFGLSETRYHTVLFGVSRSMGVGSQLIWDRALGLPLERPKSVTMEWLENYCKNKAA

SEQ ID NO: 11736 - protein, 319 aa, Bartonella sp.
ITYIDGDKGVLLYRGYPIDQLAEKGDFLESCYLLLYGELPTKQEKNDFDRCIMQHTMVHEQFARFFHGFRRDSHPMAVMVACLGAMSAFYHDSIDITDPQQRMIASVRLISKVPTLAAMAYKYSIGQAFVYPRNDLSYAANFLRMCFSVPCEEYKTNPVLTRAMDRIFILHADHEQNASTSTVRLAGSSGANPFACIAAGVACLWGPAHGGANEACLKMLQEIGDVKRIPEFIARAKDRNDPFRLMGFGHRVYKNYDPRAKIMQKTCHEVLKELNIQDDPLLDIAIELEKIALNDEYFVEKKLYPNVDFYSGITLKALG

SEQ ID NO: 11737 - protein, 318 aa, Bartonella sp.
ITYIDGDKGVLLYRGYPIDQLAEKGDFLESCYLLLYGELPTKQEKNDFDRCIMQHTMVHEQFARFFHGFRRDSHPMAVMVACLGAMSAFYHDSIDITDPQQRMIASVRLISKVPTLAAMAYKYSIGQAFVYPRNDLSYAANFLRMCFSVPCEEYKTNPVLTRAMDRIFILHADHEQNASTSTVRLAGSSGANPFACIAAGVACLWGPAHGGANEACLKMLQEIGSVKRIPEFIARAKDRNDPFRLMGFGHRVYKNYDPRAKIMQKTCHEVLKELNIQDDPLLDIAIELEKIALNDEYFVEKKLYPNVDFYSGITLKAL

SEQ ID NO: 11738 - protein, 322 aa, Bartonella sp.
TYIDGDKGLLLYRGYPIDQLAEKGDFLESCYLLLYGELPTKQEKNDFDRCIMQHTMVHEQFARFFHGFRRDSHPMAVMVACLGAMSAFYHDSIDITDPQQRMIASVRLISKVPTLAAMAYKYSIGQAFVYPRNDLSYAANFLRMCFSVPCEEYKTNPVLTRAMDQIFILHADHEQNASTSTVRLAGSSGANPFACIAAGVACLSGPAHGGANEACLKMLQEIGSVKRIPEFIARAKDKNDPFRLMGFGHRVYKNYDPRAKIMQKTCHKVLKELNIQDDPLLDIAIELEKIALNDEYFVEKKLYPNVDFYSGITLKALGFPTE

SEQ ID NO: 11739 - protein, 321 aa, Bartonella sp.
YIDGNAGVLLYRGYPIDQLAEKGDFLESCYLLLYGELPTKQEKNDFDRCIMQHTMVHEQFARFFHGFRRDSHPMAVMVACLGAMSALYHDSIDITDPQQRMIASVRLISKVPTLAAMAYKYSIGQAFIYPRNDLSYAANFLRMCFSVPCEEYKTNPVLTRAMDRIFILHADHEQNASTSTVRLAGSSGANPFACIAAGVACLWGPAHGGANEACLKMLQEIGSVERIPEFIARAKDKNDPFRLMGFGHRVYKNYDPRAKIMQKTCHEVLKELNIQDDPLLDIAIELEKIALNDEYFVEKKLYPNVDFYSGITLKALGFPTE

SEQ ID NO: 11740 - protein, 315 aa, Bartonella sp.
DGDKGVLLYRGYPIDQLAEKGDFLESCYLLLYGELPTKQEKNDFDRCIMQHTMVHEQFARFFHGFRRDSHPMAVMVACLGAMSAFYHDSIDITDPQQRMIASVRLISKVPTLAAMAYKYSIGQAFVYPRNDLSYAANFLRMCFSVPCEEYKTNPVLTRAMDRIFILHADHEQNASTSTVRLAGSSGANPFACIAAGVACLWGPAHGGANEACLKMLQEIGSVKRIPEFIARAKDRNDPFRLMGFGHRVYKNYDPRAKIMQKTCHEVLKELNIQDDPLLDIAIELEKIALNDEYFVEKKLYPNVDFYSGITLKALG

SEQ ID NO: 11741 - protein, 299 aa, Bartonella sp.
  unsure (1)..(299): unsure at all Xaa locations
DGDKGILLYRGYPIDQLAEKGDFLESXYLLLYGELPTQQEKNDFDRCIMQHTMVHEQFARFFHGFRRDSHPMAVMVSCLGAMSAFYHDSIDITDPHQRMIASVRXISKVPTLAAMAYKYSIGQPFVYPRNDLSYAANFLRMCFAVPCEEYKTNPVLSRAMDQIFILHADHEQNASTSTVRLAGSSGANPFACIAAGVACLSIKRIPEFIARAKDKNDPFHLMGFGNRVYKNYDPRAKIMQKTCHEVLKELNIQDDPLLDIAIELEKIALNDEYFIEKKLYPNVDFYSGITLKALGFPTE

SEQ ID NO: 11742 - protein, 99 aa, Bartonella sp.
QEIGSVKRIPEFIARAKDKNDPFRLMGFGHRVYKNYDPRAKIMQKTCHEVLKELNIQDDPLLDIAIELEKIALNDEYFVEKKLYPNVDFYSGITLKALG

SEQ ID NO: 11743 - protein, 317 aa, Novosphingobium aromaticivorans
MSDNQASLTADGKTVEMPVKSGTIGPDVIDIRKLYGQTGMFTYDPGFTSTASCDSALTYIDGDEGVLLHRGYPIGQLAEHSSFMEVSYLLLNGELPSQQELADFTRTITRHTMLHEQLATFYRGFRRDAHPMAIMCGVVGALSAFYHDSTDISDPTHRKISSHRLIAKMPTIAAMAYKYSVGQPFVYPDNKLSYTGNFLKMTFGVPAEEYEVIPAVEKAMDRIFILHADHEQNASTSTVRLAGSSGANPFACIAAGIACLWGPAHGGANEAALNMLKEIGTPDKIPHYIERAKDKNDPFRLMGFGHRVYRTTTRARP

SEQ ID NO: 11744 - protein, 473 aa, Schizosaccharomyces pombe
MTNTRLASTRRLASSLLSQASLRSRQLNPLFTSSYSTRSSSLKDRLAELIPEKQAEIKKFRAEHGQDVIGEVTINQMYGGARGVRSLIWEGSVLDPNEGIRFRGYTIPECQKLLPSSPNGKQPLPESLFWLLVTGEIPTLSQVQALSADWAARSQLPKFVEELIDRCPPTLHPMAQFSLAVTALEHDSAFAKAYERGMNKHDYWKYEYEDCMDLIAKTVPIAGRIYRNLYRDGVVAPIQMDKDHSYNFANVLGFANNEEFVELMRLYLTIHADHEGGNVSAHTGHLVGSALSSPFLSMAASLNGLAGPLHGLANQEVLNFLITMKKEIGDDLSEETIKSYLWKLLNSGRVVPGYGHAVLRKTDPRYTAQREFALEHLPKDPMFQLVSRLYEIVPGVLTEHGKTKNPYPNVDSHSGVLLQYYGLKEQSFYTVLFGVSRTLGVASQLIWDRALGLPIERPKSFSTEALKKMVETK

SEQ ID NO: 11745 - protein, 456 aa, Issatchenkia orientalis
MSLRNFARSATRAYSTAEPTLKERFAELLPGWQAEVKELKSKHGKTVIGEVLLEQAYGGMRGIKGLVWEGSVLDPVEGIRFRGKTIPDIQKELPKAEGSSEPLPEALFWLLLTGEVPTLAQTKAFSAELASRSALPKHVEDLLDTCPTTLHPMAQFSIAINALESESKFAKAYADGVNKKEYWKYTYEDSIDLLAKLPNVAAKIYRNVFKDGKVAPVNASLDYSHNFANMLGFGDNKEFVELMRLYLSIHSDHEGGNVSAHTTHLVGSALSSPYLSLAAGMNGLAGPLHGRANQEVLEWLVGMKKELGDDIFNKEKIEEYLWKTLNAGRVVPGYGHAVLRKTDPRYTAQREFALKHMPDYDMFKLVSNIYEVAPKVLAEQGKTKNPWPNVDSHSGILLQYYGLTQESYYTVLFGVARAFGVLPQLIIDRGLGMAIERPKSFSTQKYKELVENLNKA

SEQ ID NO: 11746 - protein, 479 aa, Saccharomyces bayanus
MSAILSTTSKNFLSRNPARQCQSAQKALFALLSSRHYSSATEQTLKERFAEIIPAKAEEIKKFKKEHGKTVIGEVLLEQAYGGMRGIKGLVWEGSVLDPDEGIRFRGRTIPEIQRELPKAEGSTEPLPEALFWLLLTGEIPTDAQVKALSADLAARSEIPEHVVQLLDSLPKDLHPMAQFSIAVTALESESKFAKAYAQGVSKKEYWSYTFEDSLDLLGKLPVIASKIYRNVFKDGKITTVDPNADYGKNLAQLLGYENKDFVDLMRLYLTIHSDHEGGNVSAHTTHLVGSALSSPYLSLAAGLNGLAGPLHGRANQEVLEWLFKLREEVKGDYSKETIEKYLWETLNSGRVVPGYGHAVLRKTDPRYMAQREFALKHFPDYELFKLVSTIYDVAPGVLTKHGKTKNPWPNVDSHSGVLLQYYGLTEASFYTVLFGVARAIGVLPQLIIDRAVGAPIERPKSFSTEKYKELVKKIESKN

SEQ ID NO: 11747 - protein, 460 aa, Saccharomyces cerevisiae
MTVPYLNSNRNVASYLQSNSSQEKTLKERFSEIYPIHAQDVRQFVKEHGKTKISDVLLEQVYGGMRGIPGSVWEGSVLDPEDGIRFRGRTIADIQKDLPKAKGSSQPLPEALFWLLLTGEVPTQAQVENLSADLMSRSELPSHVVQLLDNLPKDLHPMAQFSIAVTALESESKFAKAYAQGISKQDYWSYTFEDSLDLLGKLPVIAAKIYRNVFKDGKMGEVDPNADYAKNLVNLIGSKDEDFVDLMRLYLTIHSDHEGGNVSAHTSHLVGSALSSPYLSLASGLNGLAGPLHGRANQEVLEWLFALKEEVNDDYSKDTIEKYLWDTLNSGRVIPGYGHAVLRKTDPRYMAQRKFAMDHFPDYELFKLVSSIYEVAPGVLTEHGKTKNPWPNVDAHSGVLLQYYGLKESSFYTVLFGVSRAFGILAQLITDRAIGASIERPKSYSTEKYKELVKNIESKL

SEQ ID NO: 11748 - protein, 486 aa, Saccharomyces cerevisiae
MVQRLLPGAHICRRSFNSSAIIKSSALTLKEALENVIPKKRDAVKKLKACYGSTFVGPITISSVLGGMRGNQSMFWQGTSLDPEHGIKFQGLTIEECQNRLPNTGIDGDNFLPESMLWLLMTGGVPTFQQAASFRKELAIRGRKLPHYTEKVLSSLPKDMHPMTQLAIGLASMNKGSLFATNYQKGLIGKMEFWKDTLEDSLNLIASLPLLTGRIYSNITNEGHPLGQYSEEVDWCTNICSLLGMTNGTNSSNTCNLTSQQSLDFINLMRLYTGIHVDHEGGNVSAHTTHLVGSALSDPYLSYSSGIMGLAGPLHGLAAQEVVRFLIEMNSNISSIAREQEIKDYLWKILNSNRVIPGYGHAVLRKPDPRFTAMLEFAQKRPIEFENDKNVLLMQKLAEIAPKVLLEHGKSKNPFPNVDSASGILFYHYGIRELLFFTVIFGCSRAMGPLTQLVWDRILGLPIERPKSLNLEGLEALTKASNVNKL

SEQ ID NO: 11749 - protein, 480 aa, Saccharomyces cerevisiae
MSAILSTTSKSFLSRGSTRQCQNMQKALFALLNARHYSSASEQTLKERFAEIIPAKAQEIKKFKKEHGKTVIGEVLLEEQAYGGMRGIKGLVWEGSVLDPEEGIRFRGRTIPEIQRELPKAEGSTEPLPEALFWLLLTGEIPTDAQVKALSADLAARSEIPEHVIQLLDSLPKDLHPMAQFSIAVTALESESKFAKAYAQGVSKKEYWSYTFEDSLDLLGKLPVIASKIYRNVFKDGKITSTDPNADYGKNLAQLLGYENKDFIDLMRLYLTIHSDHEGGNVSAHTTHLVGSALSSPYLSLAAGLNGLAGPLHGRANQEVLEWLFKLREEVKGDYSKETIEKYLWDTLNAGRVVPGYGHAVLRKTDPRYTAQREFALKHFPDYELFKLVSTIYEVAPGVLTKHGKTKNPWPNVDSHSGVLLQYYGLTEASFYTVLFGVARAIGVLPQLIIDRAVGAPIERPKSFSTEKYKELVKKIESKN

SEQ ID NO: 11750 - protein, 479 aa, Saccharomyces cerevisiae
MSAILSTTSKSFLSRGSTRQCQNMQKALFALLNARHYSSASEQTLKERFAEIIPAKAEEIKKFKKEHGKTVIGEVLLEQAYGGMRGIKGLVWEGSVLDPEEGIRFRGRTIPEIQRELPKAEGSTEPLPEALFWLLLTGEIPTDAQVKALSADLAARSEIPEHVIQLLDSLPKDLHPMAQFSIAVTALESESKFAKAYAQGVSKKEYWSYTFEDSLDLLGKLPVIASKIYRNVFKDGKITSTDPNADYGKNLAQLLGYENKDFIDLMRLYLTIHSDHEGGNVSAHTTHLVGSALSSPYLSLAAGLNGLAGPLHGRANQEVLEWLFKLREEVKGDYSKETIEKYLWDTLNAGRVVPGYGHAVLRKTDPRYTAQREFALKHFPDYELFKLVSTIYEVAPGVLTKHGKTKNPWPNVDSHSGVLLQYYGLTEASFYTVLFGVARAIGVLPQLIIDRAVGAPIERPKSFSTEKYKELVKKIESKN

SEQ ID NO: 11751 - protein, 277 aa, Desulfitobacterium hafniense
SCLAEGPITLRFGEVHSYIIDEGEMVPVPGRLIYRGYDITDLARGFMEDNRFGFEETAYLLLFGRLPNRQELIDFHNLLDIYQKLPDNFARDMILNVPSKDIMNGMARSVLGFYCYDTNPDDTSIRNVLKQCIRLIAAFPALAVYCYQAYTHYHGNKSLVIHSPQPELSLAENILYMLRPNHKYTELEARLLDLALVLHAEHGGGNNSSFVTHVVTSTGTDTYSAVAAALGSLRGPKHGGANHKVIQMFQDIKEKISDWQDEDELSAYLDKFFLGCL

SEQ ID NO: 11752 - protein, 475 aa, Saccharomyces kluyveri
MTSILSSTYRSPVARNLLKSSKTRGGLFLAARNYSNGEKTLKERFAEIFPSKAEEIKKLKKEHGKTVIGEVLLEQAYGGMRGIKGLVWEGSVLDPEEGIRFRGRTIPEIQKELPKAADGSEPLPEAIFWLLLTGEIPTETQVKALSADLASRSELPEHVVDLLDRLPKDLHPMAQFSIAVTALESESKLPKAYAQGVAKKDYWNYTFEDSLDLLGKLPVIASKIYRNVFKDGKLASVDPNADYGKNLANLLGFQNKDFVDLMRLYLTIHSDHEGGNVSAHTTHLVGSALSSPYLSLAAGLNGLAGPFDGRANQEVLEWLFKLREEVKGDYSKETIEKYLWDTLNSGRVVPGYGHAVLRKTDPRYTAQREFALKHFPDYELFKLVSTIYEVAPGVLTKQGKTKNPWPNVDSHSGVLLQYYGLTEASFYTVLFGVARAFGVLPQLIIDRAVGQPIERPKSFSTEKYIELVNSIKAKN

SEQ ID NO: 11753 - protein, 332 aa, Saccharomyces kluyveri
ELHVVESVLLPKDMHPNLQLAIGLASMNKSSLFSAMYQEGTIGKGDYWEFVYEDALNLISALPLLTGKIYSNIVNDGEPLGQFNPDRDWSYNIASLLGMTFRDSVNKQHMTADQCEDFTNLVRLYCGIHVDHEGGNVSAHTTHLVGSALSDPYLSYSSGIMGLAGPLHGLAAQEVVRFLVEMNSEIESPENEKQVEEYLWKILKSNRVIPGYGHAVLRKPDPRFEAMLRFVEDRQQEFAQDKNVQLMKKMSQVAPKVLAKHGKTKNPFPNVDSASGILFHHYGIQELLFFTVIFGCSRSIGPLTQLVWDRALGLPIERPKSVDLNTIRSLCK

SEQ ID NO: 11754 - protein, 386 aa, Thermoplasma volcanium
MPETTEEISKGLEDVNIKWTRLTTIDGNKGILRYGGYSVEDIINNGAQAEEIQYLFLYGELPNAQELKIFKENVQKGYNIPDFVINSIRQLPRESDAVAMQMAAVASMAASEIKFKWNKDTDRDVAAQMIGSMSAITANVYRHILGMPAERPKPSDSYAESFLKAAFGRNVTKEEVDAINTALILYTDHEVPASTTAGLVAVSTLSDIYSGITAALAALKGPLHGGAAEAAIAQFDEIKEPSNVEKWFNDNIINGKKRLMGFGHRVYKTYDPRAKIFKGIAENLSKNNAEVKKIYDIATKLEDLGVKQFGSKGIYPNTDYFSGIVYMSVGFPLRNNIYTALFALSRVTGWEAHFIEYVEEQQRLIRPRAVYVGPAERKFVKLPDRK

SEQ ID NO: 11755 - protein, 474 aa, Aspergillus niger
MASTLRLGTSALRSTSIAAKPVVQSAAFNGLRCYSTGKAKSLKETFAEKLPAEIEKVKKLRKEHGSKVIGEVTLDQAYGGARGVKCLVWEGSVLDSEEGIRFRGRTIPECQELLPKAPGGQEPLPEGLFWLLLTGEIPTEQQVRDLSAEWAARSDLPKFIEELIDRCPSTLHPMSQFSLAVTALEHESAFAKAYAKGINKKDYWNYTFEDSMDLIAKLPTIAAKIYRNVFKDGKVAPIQKDKDYSYNLANQLGYGDNNDFVELMRLYLTIHSDHEGGNVSAHTTHLVGSALSSPMLSLAAGLNGLAGPLHGLANQEVLNWLTKMKAAIGNDLSDEAIKNYLWSTLNAGQVVPGYGHAVLRKTDPRYVSQREFALRKLPDDPMFKLVSQVYKIAPGVLTEHGKTKNPYPNVDAHSGVLLQYYGLTEANYYTVLFGVSRALGVLPQLIIDRALGAPIERPKSYSTEAFAKLVGAKL

SEQ ID NO: 11756 - protein, 475 aa, Aspergillus niger
MASTLRLGTSALRSSSIAAKPVVQSAAFNGLRCYSTGKAKSLKETFAEKLPAELEKVKKLRKEHGSKVIGEVTLDQAYGGARGVKCLVWEGSVLDSEEGIRFRGRTIPECQELLPKAPGGQEPLPEGLFWLLLTGEIPTEQQVRDLSAEWAARSDLPKFIEELIDRCPSTLHPMSQFSLAVTALEHESAFAKAYAKGINKKDYWNYTFEDSMDLIAKLPTIAAKIYRNVFKDGKVAPIQKDKDYSYNLANQLGYGDNNDFVELMRLYLTIHSDHEGGNVSAHTTHLVGSALSSPMLSLAAGLNGLAGPLHGLANQEVLNWLTKMKAAIGNDLSDEAIKNYLWSTLNAGQVVPGYGHAVLRKTDPRYVSQREFALRKLPDDPMFKLVSQVYKIAPGVLTEHGKTKNPYPNVDAHSGVLLQYYGLTEANYYTVLFGVSRALGVLPQLIIDRALGAPIERPKSYSTELSPSLLVLSCK

SEQ ID NO: 11757 - protein, 385 aa, Ralstonia eutropha
MSEAQPLVTPKPKKSVALSGVTAGNTALCTVGRTGNDLHYRGYDILDIAETCEFEEIAHLLVHGKLPTKSELAAYKAKLKSLRGLPANVKAALEWVPASAHPMDVMRTGVSVLGTVLPEKEDHNTPGARDIADRLMASLGSMLLYWYHYSHNGRRIEVETDDDSIGGHFLHLLHGEKPSALWERAMNTSLNLYAEHEFNASTFTARVIAGTGSDMYSSISGAIGALRGPKHGGANEVAFEIQKRYDNPDEAQADITRRVENKEVVIGFGHPVYTTGDPRNQVIKEVAKKLSKDAGSMKMFDIAEALETVMWDIKKMFPNLDWFSAVSYHMMGVPTAMFTALFVIARTSGWAAHIIEQRIDNKIIRQSANYTGPENLKFVPLKDRK

SEQ ID NO: 11758 - protein, 469 aa, Neurospora crassa
MAPVMRLGSAALRSSIHLTSRQTAFTAARCYSSKTQTLKERFAELLPENIEKIKALRKEHGSKVVDKVTLDQVYGGARGIKCLVWEGSVLDAEEGIRFRGKTIPECQELLPKAPGGKEPLPEGLFWLLLTGEVPSEQQVRDLSAEWAARSDVPKFIEELIDRCPSDLHPMAQLSLAVTALEHTSSFARAYAKGINKKEYWGYTFEDSMDLIAKLPTIAARIYQNVFKGGKVAAVQKDKDYSFNFANQLGFGDNKDFVELLRLYLTIHTDHEGGNVSAHTTHLVGSALSSPFLSVAAGLNGLAGPLHGLANQEVLNWLTEMKKVIGDDLSDEAITKYLWDTLNAGRVVPGYGHAVLRKTDPRYSAQRKFAQEHLPEDPMFQLVSQVYKIAPKVLTEHGKTKNPYPNVDAHSGVLLQHYGLTEANYYTVLFGVSRAIGVLPQLIIDRAVGAPIERPKSYSTDKWIEICKKL

SEQ ID NO: 11759 - protein, 469 aa, Neurospora crassa
MAPVMRLGSAALRSSIHLTSRQTAFTAARCYSSKTQTLKERFAELLPENIEKIKALRKEHGSKVVDKVTLDQVYGGARGIKCLVWEGSVLDAEEGIRFRGKTIPECQELLPKAPGGKEPLPEGLFWLLLTGEVPSEQQVRDLSAEWAARSDVPKFIEELIDRCPSDLHPMAQLSLAVTALEHTSSFARAYAKGINKKEYWGYTFEDSMDLIAKLPTIAARIYQNVFKGGKVAAVQKDKDYSFNFANQLGFGDNKDFVELLRLYLTIHTDHEGGNVSAHTTHLVGSALSSPFLSVAAGLNGLAGPLHGLANQEVLNWLTEMKKVIGDDLSDEAITKYLWDTLNAGRVVPGYAHAVLRKTDPRYSAQRKFAQEHLPEDPMFQLVSQVYKIAPKVLTEHGKTKNPYPNVDAHSGVLLQHYGLTEANYYTVLFGVSRAIGVLPQLIIDRAVGAPIERPKSYSTDKWIEICKKL

SEQ ID NO: 11760 - protein, 470 aa, Neurospora crassa
MAMNLRTGSRAFGGALRNHARVSRRGYATAEPDLKTVLKEAIPEKRELFKKVKAHGNKVLGEVKVENTIGGMRGLKAMIWEGSVLDANEGIRFHGRTIKDCQKELPKGKNGTEMLPEAMFWLLLTGKVPSTNQVRQFSRELAEQAALPDFVNKLLDGFPKDLHPMTQFAIAVSALNHTSKFAKAYEQGLNKADYWEPTFDDCISLLGKLPTIAAKIYQNSYKGGGALPAEVDLEQDWAYNFAAMLGKPGKENENFQDLLRLYLALHGDHEGGNVSAHTTHLVGSALSDPFLAYSAGLQGLAGPLHGLAAQEVLRWILQMKEAIPSSYTDEDVRSYLWNTLNSGRVVPGYGHAVLRKPDPRFEALMDYAASRPKIAADPVFQLVLKNSQIAPEVLKQHGKTKNPYPNVDSSSGVLFHHYGFHETLYYTATFGVSRGLGPLAQLIWDRALGLPIERPKSINLEGILKQVEGQ

SEQ ID NO: 11761 - protein, 472 aa, Podospora anserina
MAPAMRLTSSALRASLKASSFATKQTAFTAARCYSSKTQTLKERFAELLPEKIEEIKALRKEHGSKVVDKVTLDQVYGGARGIKCLVWEGSVLDAEEGIRFRGKTIPECQQVLPKAPGGSEPLPEGLFWLLLTGEVPTEQQVRDLSADWAARAEIPKFVEELIDRCPSDLHPMAQFSMAVTALEQTSSFARAYAKGINKKEYWGYTFEDSMDLIAKLPTIAARIYQNVFKGGKVAPVQKDKDYSFNFANQLGFGNNADFIELMRLYLTIHTDHEGGNVSAHTTHLVGSALSSPFLSLAAGLNGLAGPLHGLANQEVLNWLTEMKKVIGDDISDESITKYLWDTLNSGRVVPGYGHAVLRKTDPRYSAQREFAQKHMSEDPMFKLVSQVYKIAPKVLTEHGKTKNPYPNVDAHSGVLLQYYGLTEANYYTVLFGVSRAIGVLPQLIIDRAVGAPIERPKSFSTEKWIEICKKL

SEQ ID NO: 11762 - protein, 112 aa, Bartonella alsatica
ANEACLKMLQEIGSVKRIPEFIARAKDKNDPFRLMGFGHRVYKNYDPRAKIMQKTCHEVLKELNIQNDPLLDIAIELEKIALNDKYFVEKKLYPNVDFYSGITLKALGFPTK

SEQ ID NO: 11763 - protein, 113 aa, Rickettsia moreli
ANEAVINMLKEIGSSEYIPKYIAKAKDKNDPFRLMGFGHRVYKNYDPRAVVLKETCKEVLKELGQLDNNPLLQIAIELEAIALKDEYFIERKLYPNVDFYSGIIYKAMGIPSQ

SEQ ID NO: 11764 - protein, 467 aa, Candida tropicalis
MSALRSFQRSSNVAKSTLKNSVRTYATAEPTLKQRLEEILPAKAEEVKQLKKDYGKTVIGEVLLEQAYGGMRGIKGLVWEGSVLDPIEGIRFRGRTIPDIQKELPKAPGGEEPLPEALFWLLLTGEVPTEAQTRALSEEFAARSALPKHVEELIDRSPSHLHPMAQFSIAVTALESESQFAKAYAKGVHKSEYWKYTYEDSIELLAKLPTIAAKIYRNVFHDGKLPAQIDSKLDYGANLASLLGFGENKEFLELMRLYLTIHSDHEGGNVSAHTTHLVGSALSSPFLSLAAGLNGLAGPLHGRANQEVLEWLFKLREELNGDYSKEAIEKYLWDTLNAGRVGPGYGHAVLRKTDPRYTAQREFALKHMPDYELFKLVSNIYEVAPGVFDQHGMTKNPWPNVGSHSGVLLQYYGLTEESFYTVLFGVSRAFGVLPQLILDRGLGMPIERPKSFSTEKYIELVKSIGKN

SEQ ID NO: 11765 - protein, 426 aa, Escherichia coli
ADTKAKLTLNGDTAVELDVLKGTLGQDVIDIRTLGSKGVFTFDPGFTSTASCESKITFIDGDEGILLHRGFPIDQLATDSNYLEVCYILLNGEKPTQEQYDEFKTTVTRHTMIHEQITRLFHAFRRDSHPMAVMCGITGALAAFYHDSLDVNNPRHREIAAFRLLSKMPTMAAMCYKYSIGQPFVYPRNDLSYAGNFLNMMFSTPCEPYEVNPILERAMDRILILHADHEQNASTSTVRTAGSSGANPFACIAAGIASLWGPAHGGANEAALKMLEEISSVKHIPEFFRRAKDKNDSFRLMGFGHRVYKNYDPRATVMRETCHEVLKELGTKDDLLEVAMELENIALNDPYFIEKKLYPNVDFYSGIILKAMGIPSSMFTVIFAMARTVGWIAHWSEMHSDGMKIARPRQLYTGYEKRDFKSDIKR

SEQ ID NO: 11766 - protein, 127 aa, Escherichia coli
MADTKAKLTLNGDTAVELDVLKGTLGQDVIDIRTLGSKGVFTFDPGFTSTASCESKITFIDGDEGILLHRGFPIDQLATDSNYLEVCYILLNGEKPTQEQYDEFKTTVTRHTMIHEQITRLFHAFRR

SEQ ID NO: 11767 - protein, 98 aa, Escherichia coli
MADTKAKLTLNGDTAVELDVLKGTLGQDVIDIRTLGSKGVFTFDPGFTSTASCESKITFIDGDEGILLHRGFPIDQLATDSNYLEVCYILLNGEKPTQ

SEQ ID NO: 11768 - protein, 112 aa, Bartonella clarridgeiae
ANETCLKMLQEIGTVQKIPEFIARAKDKNDRFRLMGFGHRVYKNYDPRAKIMQQTCHEVLKELNIQDDPLLDIAMELEKIALNDEYFIEKKLYPNVDFYSGITLKALGFPTE

SEQ ID NO: 11769 - protein, 394 aa, Aeropyrum pernix
MSQQPECRVEGNYIIVPKGLVNVIVDETRISGVDPKGEATIYRGYTIEDIGEHASFYEAAHLILFGRLPCDEELKEIKSKIDKYRGQIPEKLFDAMKHVPVTHPMYYGIYGTALLGQYYAPEWRFDEDFLYDHALRLTAQLPVIFTTGWNLAHHGTFLRPDPSKDHAWDVLRMIVMREPSDIEARAFESTLVLYMDHGFNASTFTTRVIGSTLSDLYSAVAGGIAALKGPLHGGANEKAMEMFLDAMKKAEEKGVPLYDYIEEYIKEKLARKEKIMGFGHRIYKLHDPRTDVAAKFVAKLKDGEFWMKVLKKAEEVMWREKKIPANIDLYTAVLYYQLGIPIPMYTPIFAMGRVVGWSAHYIEQVLNNKLIRPTEKYVGPTGLKYQPIEERCRK

SEQ ID NO: 11770 - protein, 379 aa, Antarctic bacterium DS2-3R
MTEPTIHKGLAGVTADVTAISKVNSDTNSLLYRGYPVQELAAKCSFEQVAYLLWNSELPNDSELKAFVNFERSHRKLDENVKGAIDLLSTACHPMDVARTAVSVLGANHARAQDSSPEANLEKAMSLLATFPSVVAYDQRRRRGEELIEPREDLDYSANFLWMTFGEEAAPEVVEAFNVSMILYAEHSFNASTFTARVITSTLADLHSAVTGAIGALKGPLHGGANEAVMHTFEEIGIRKDESLDEAATRSKAWMVDALAQKKKVMGFGHRVYKNGDSRVPTMKSALDAMIKHYDRPEMLGLYNGLEAAMEEAKQIKPNLDYPAGPTYNLMGFDTEMFTPLFIAARITGWTAHIMEQVADNALIRPLSEYNGPEQRQVP

SEQ ID NO: 11771 - protein, 378 aa, Antarctic bacterium DS2-3R
TEPTIHKGLAGVTADVTAISKVNSDTNSLLYRGYPVQELAAKCSFEQVAYLLWNSELPNDSELKAFVNFERSHRKLDENVKGAIDLLSTACHPMDVARTAVSVLGANHARAQDSSPEANLEKAMSLLATFPSVVAYDQRRRRGEELIEPREDLDYSANFLWMTFGEEAAPEVVEAFNVSMILYAEHSFNASTFTARVITSTLADLHSAVTGAIGALKGPLHGGANEAVMHTFEEIGIRKDESLDEAATRSKAWMVDALAQKKKVMGFGHRVYKNGDSRVPTMKSALDAMIKHYDRPEMLGLYNGLEAAMEEAKQIKPNLDYPAGPTYNLMGFDTEMFTPLFIAARITGWTAHIMEQVADNALIRPLSEYNGPEQRQVP

SEQ ID NO: 11772 - protein, 462 aa, Tetrahymena thermophila
MRSINQLLKQASLSQKSQYNFSQTNLKKVIAEIIPQKQAELKEVKEKYGDKVVGQYTVKQVIGGMRGMKGLMSDLSRCDPYQGIIFRGYTIPQLKEFLPKADPKAADQANQEPLPEGIFWLLMTGQLPTHAQVDALKHEWQNRGTVNQDCVNFILNLPKDLHSMTMLSMALLYLQKDSKFAKLYDEGKISKKDYWEPFYEDSMDLIAKIPRVAAIIYRHKYRDSKLIDSDSKLDWAGNYAHMMGFEQHVVKECIRGYLSIHCDHEGGNVSAHTTHLVGSALSDPYLSYSAGVNGLAGPLHGLANQEVLKWLLQFIEEKGTKVSDKDIEDYVDHVISSGRVVPGYGHAVLRDTDPRFHHQVDFSKFHLKDDQMIKLLHQCADVIPKKLLTYKKIANPYPNVDCHSGVLLYSLGLTEYQYYTVVFAVSRALGCMANLIWSRAFGLPIERPGSADLKWFHDKYRE

SEQ ID NO: 11773 - protein, 307 aa, Prochlorococcus marinus subsp. pastoris str. CCMP1378
MHRRLSFRVRDMMKCFPATGHPMDALQSSAASLGLFYSRRAIDDPKYIYNAVIRLIAKIPTMIAAFQLIRKGQDPIQPRDDLSYSSNFLYMLTEKEQDPIAAKVFDRCLILHAEHSLNASTFSARVTASTLTDPYAVIASAVGTLAGPLHGGANEDVIAMLEDIKTPEKAASFLEDAIQNKSKIMGFGHREYKVKDPRAIILQKLAEELFVRFGKDEMYEVAKKLELEAIPRLGGKGIFPNVDFYSGLVYRKLGIPRDLFTPIFAISRVAGWLAHWREQLGANRIFRPSQIYTGSAPRDWITLENRK

SEQ ID NO: 11774 - protein, 389 aa, Salmonella typhimurium
MTDTTILQNNTHVIKPKKSVALSGVPAGNTALCTVGKSGNDLHYRGYDILDLAEHCEFEEVAHLLIHGKLPTRDELNAYKSKLKALRGLPANVRTVLEALPAASHPMDVMRTGVSALGCTLPEKEGHTVSGARDIADKLLASLNSILLYWYHYSHNGERIQPETDDDSIGGHFLHLLHGEKPTQSWEKAMHISLVLYAEHEFNASTFTSRVIAGTGSDVYSAIIGAIGALRGPKHGGANEVSLEIQQRYETPDEAEADIRKRVENKEVVIGFGHPVYTIADPRHQVIKRVAKQLSEEGGSLKMYHIADRLETVMWETKKMFPNLDWFSAVSYNMMGVPTEMFTPLFVIARVTGWAAHIIEQRQDNKIIRPSANYTGPEDRPFVSIDDRC

SEQ ID NO: 11775 - protein, 376 aa, Schistosoma japonicum
MMQFTRKAISISRDLTCRNVFRQLSLTSVVSASLKDIMADLIPKEQAKVASFRKEFGTTKVGDVTVDMMYGGMRGIKGLVTETSVLDINEGIRFRGLSIPDCQKQLPKAPGGQEPLPEGIFFLLLTGKVPTKAQVDNISKEFASRADLPSHVLNMLDSFPSSLHPMSQLVAACAALNSESKFARAYSQGIKKSVYWEYVYEDSMDLIAKLPTVASIIYRNLYRDGTSVAAIDSNTDWSHNFCRMLGYEDPGFTEMMRLYLTFHCDHEGGNVSAHSCHLVGSALSDPYLSFAASMCGLAGPLHGLANQEVLVFLNKMQEKVGKNPTDENVKQYVMDTLNSGQVIPGYGHAVLRKTDPRFTCAQEFVKDTFQMILYTN

SEQ ID NO: 11776 - protein, 468 aa, Caenorhabditis elegans
MSLSGMAIRRLITKGVIPVCQVAPLSTSAEGSTNLKEVLSKKIPAHNAKVKSFRTEHGSTVVQNVNIDMIYGGMRSMKGMVTETSVLDPEEGIRFRGYSIPECQKLLPKAKGGEEPLPEAIWWLLCTGDVPSEAQTAAITKEWNARADLPTHVVRMLDNFPDNLHPMAQFIAAIAALNNESKFAGAYARGVAKASYWEYAYEDSMDLLAKLPTVAAIIYRNLYRDGSAVSVIDPKKDWSANFSSMLGYDDPLFAELMRLYLVIHSDHEGGNVSAHTSHLVGSALSDPYLSFSAAMAGLAGPLHGLANQEVLVFLNKIVGEIGFNYTEEQLKEWVWKHLKSGQVVPGYGHAVLRKTDPRYECQREFALKHLPNDDLFKLVSTLYKITPGILLEQGKAKNPWPNVDSHSGVLLQYFGMTEMSFYTVLFGVSRALGCLSQLIWARGMGLPLERPKSHSTDGLIKLALAAKK

SEQ ID NO: 11777 - protein, 378 aa, Nostoc punctiforme
MMVCEYKPGLEGIPAAQSSISYVDGQKGILEYRGIRIEELAEKSTFLETAYLLIWGELPSKEELEGFEHEVRYHRRIKYRIRDMMKCFPESGHPMDALQASAAALGLFYSLRDLHNPAYIRDSVVRLIATIPTMVAAFQLMRKGNDPVRPRDDLDYSSNFLYMLDEKEPDPLMARIFDICLILQVEHTMNASTFSARVTASTLTDPYAVVASAVGTLGGPLHGGANEEVIQMLEKIGSVENVRPYIEHCLETKSKIMGFGHRVYKVKDPRAIILQGLAEKLFEKFGYDKFYDIAQEMERVVGEKLGSKGIYPNIDFYSGLVYRKMGIPTDLFTPIFAIARVAGWLAHWKEQLAENRIFRPTQVYNGLHEVTYTPIDQR

SEQ ID NO: 11778 - protein, 376 aa, Halobacterium sp. NRC-1
MSDELKKGLEDVLVAESDLSFIDGDAGKLVYCGYAIEDLARTASYEEVLYLLWHGDLPTRSELDAFRADMASHREIDDDVLALVENLAAADADPMAALRTAASALSAHDDTAGGSDPDDARESGKRITAKLPTIVAAFTRLRNGDDVVAPRDDLGHAANFLYMLNGEAPDDVLADVFDQALVLHADHGLNASTFSGMVTASTLADVHAAVTSAIGTLSGSLHGGANANVMRMLKEVDDSDKDPLSWVQDALANGERVMGFGHRVYNVKDPRAHILSERSEELGAAAGDTKWYEMSVAIEDYMADEKGLAPNVDFYSASTYYQMGIPVDIYTPIFAMSRVGGWVGHVLEQYDDNRLIRPRARYVGAEDRDSTPLDER

SEQ ID NO: 11779 - protein, 431 aa, Vibrio cholerae
MVMADKKATLHIEGKAPIELPIMDGSLGPQVIDVRTLGSNGYFTFDPGFLATASCESQITYIDGAKGILLHRGYPIDQLANNADYLEVCYILLYGEAPNRKQYEEFKKIVTRHTMVHEQIASFFHGFRRDAHPMAVMCGVVGALAAFYHDSLDINNDTHREIAAYRLLSKMPTLAAMCYKYSVGQPFIYPRNDLSYAENFLHMMFATPCEEYEVNPIVARAMDKIFTLHADHEQNASTSTVRLAGSSGANPFACIAAGIASLWGPAHGGANEACLRMLEEIGSVDKIPEYVRRAKDKDDPFRLMGFGHRVYKNYDPRATVMREACHEVLKELSIQDPLLDVAMELERIALSDEYFIEKKLYPNVDFYSGIILKAIGIPVSMFTVIFAMSRTIGWIAHWNEMHSDPDNRIGRPRQLYTGQKLRDFTPLHERS

SEQ ID NO: 11780 - protein, 377 aa, Vibrio cholerae
MSAAKELGGAGLRGQSAGSTALCTVGKTGTGLTYRGYDITDLAHHAQFEEVAHLLLVGYLPTQAELDQYKTRLIGLRGLPEKLKQALELIPAEAHPMDVMRTGCSILGNLEPEHTFAEQQAATERMLALFPAIICYWYRFSHEGVRIDTADQSEDSIGGYFLKMLTGQAPSELFKKVMHCSLTLYAEHEFNASTFAARVCASTLSDIHSCVTGAIGTLRGPLHGGANEAAMAMIEQWHSADEAEAGIMRMLASKEKIMGFGHAIYRESDPRNALIKEWSKALSEAVGDSHLYAVSERVEAVMKREKDLFCNADFFHASAYHFMGIPTKLFTPIFVMSRLTGWAAHVYEQRANNRIIRPSADYVGPEHQTWLPIEQRG

SEQ ID NO: 11781 - protein, 113 aa, Rickettsia cooleyi
ANEAVINMLKEIGSSENIPKYIAKAKDKNDPFRLMGFGHRVYKSYDPRAAVLKETCKEVLKELGQLENNPLLQIAIELEAIALKDEYFIERKLYPNVDFYSGIIYKAMGIPSQ

SEQ ID NO: 11782 - protein, 522 aa, Drosophila melanogaster
MFVRRFGNGSLGHHFAFQRRYLAKNSMWDSKSIGTPSSFRMRSKKDNVTGNLKEQQQSATPETLNMPDMQDAQKLPNVGAYVRMIAADGKSLRDVLAAKVPQEQERVKNFRKQHGATKMGETTIDMMYGGMRGIKALVTETSVLDADEGIRFRGLSIPECQKVLPAADGGTEPLPEGLFWLLLTGEVPTKSQVQQLSREWAERAALPQHVVTMLNNMPTTLHPMSQFAAAVTALNHDSKFAKAYSDGVHKSKYWEYVYEDSMDLIAKLPVVAATIYCNTYRGGKGSRSIDSSLDWSANFVKMLGYDNAPFTELMRLYLTIHSDHEGGNVSAHTVHLVGSALSDPYLSFAAGLNGLAGPLHGLANQEVLVWLRKLQKEAGNNPSEEQLKEYIWKTLKSGQVVPGYGHAVLRKTDPRYTCQREFALKHLPEDETFQLVSKIYKVVPPILTETGKVKNPWPNVDAHSGVLLQYYGMKEMNYYTVLFGVSRALGVLASLVWDRALGLPIERPKSFSTDLLVKMVQK

SEQ ID NO: 11783 - protein, 464 aa, Drosophila melanogaster
MSLYRISARKLSEAQKLPNVGAYVRMIAADGKSLRDVLAAKVPQEQERVKNFRKQHGATKMGETTIDMMYGGMRGIKALVTETSVLDADEGIRFRGLSIPECQKVLPAADGGTEPLPEGLFWLLLTGEVPTKSQVQQLSREWAERAALPQHVVTMLNNMPTTLHPMSQFAAAVTALNHDSKFAKAYSDGVHKSKYWEYVYEDSMDLIAKLPVVAATIYCNTYRGGKGSRSIDSSLDWSANFVKMLGYDNAPFTELMRLYLTIHSDHEGGNVSAHTVHLVGSALSDPYLSFAAGLNGLAGPLHGLANQEVLVWLRKLQKEAGNNPSEEQLKEYIWKTLKSGQVVPGYGHAVLRKTDPRYTCQREFALKHLPEDETFQLVSKIYKVVPPILTETGKVKNPWPNVDAHSGVLLQYYGMKEMNYYTVLFGVSRALGVLASLVWDRALGLPIERPKSFSTDLLVKMVQK

SEQ ID NO: 11784 - protein, 478 aa, Drosophila melanogaster
MQKTNNYKSFKIFFKNVPFRSYPDCKNGKGSGLKAKLAKKIPIEREKFLGIKCLHGKKIIGQISVNSVIGGMRGLPLLFCETSSLDKNKGIYYRGKLLKDVCAKLPRVQEGTQEGTPEGCFFLLTSGSMPTKKEAQEVTNEWLKRGSVPRYCLRMIDSMDKRVHPMAQLCAASACLNPQSQFVEAYTKGARRADYWKYSYEDSMNLIAMLPTVAAAIYSNVFRDGEGSREVNYEEDWSGNFCRMLGLPEKDFVDLMRLYMILHADHESGNVSAHACHLVGTALSDPFLSFSASMCGLAGPLHGLANQEVLVWLTKLRKAIGDDPSDEELKKFIDDTLKGGQVIPGYGHAVLRDTDPRFVLQNEFAMKHCKDDPGVKLVTRLWKIIPEVLKKLNKVANPYPNVDAHSGVLLQHYCLKELKFYTVLFGVSRALGVLSQLIWSRALGAPIERPKSFSSIEICKFINEADKKAGKKNNKKKC

SEQ ID NO: 11785 - protein, 261 aa, Drosophila melanogaster
MDLIAKLPVVAATIYCNTYRGGKGSRSIDSSLDWSANFVKMLGYDNAPFTELMRLYLTIHSDHEGGNVSAHTVHLVGSALSDPYLSFAAGLNGLAGPLHGLANQEVLVWLRKLQKEAGNNPSEEQLKEYIWKTLKSGQVVPGYGHAVLRKTDPRYTCQREFALKHLPEDETFQLVSKIYKVVPPILTETGKVKNPWPNVDAHSGVLLQYYGMKEMNYYTVLFGVSRALGVLASLVWDRALGLPIERPKSFSTDLLVKMVQK

SEQ ID NO: 11786 - protein, 566 aa, Plasmodium yoelii yoelii
MKKIKNISHNAGFTKNKRDFDIFKSQYKKVFFHSTQKKKICEKQLNTYNENFVNENKASISSVSSYMFPIKKENILNRNHARYFSTNNINEPNLYIENYSKIRQYINTIDGEESIIMNVLKEKTHACIKKTREQLKTIIHTYPNTPISICTPNNVIGGLRNTITLITDTSILEKKKGILFRGRSVDKILKDFPKWDETCKYPMAEAMLWYLLTKEIPGVENLKLFSRELYCRANKIPSFVFEFIDNIPPFTHPMSQLISTVSFLESLSLFKIKYSEGILKSDYWKYILEDAVSLIAQIQVVGAYIFRRTFIDNSIKKGEGINLDIDLDWSANFSKLIGYDSNQVKDLLRLYFLLHSDHEGGNASAHVSHLIGSTLGNPYLSFSGCAIALYGPLHGLANQECLNFLLDIKNKLGDNKASYEFIEKYAKNYLNSGRVIPGYGHAVLRVPDPRFLAFRNFALANFPNDPLVEILEMCYKVIPGILSATGKVKNPYPNVDCYSGSLLYHYGIKYPEYYTVLFAISRAIGVMSQLVLSRGLMYPLERPRSVDVYNLRKICEKNYVKIEEFE

SEQ ID NO: 11787 - protein, 112 aa, Bartonella sp. NVH1
ANEACLKMLQEIGSVKRIPEFIARAKDKNDPFRLMGFGHRVYKNYDPRAKIMQQTCHEVLKELNIQDDPLLDIAIELENIALNDEYFVEKRLYPNVDFYSGITLKALGFPTE

SEQ ID NO: 11788 - protein, 396 aa, Prochlorococcus marinus str. MIT 9313
MGQEQVGEIRHDRSGISFRPGLEGVPVTQSAICDIDGLQGRLAYRGYPIAELSAHSSFLETTYLLIWGDLPSPQQLRDFEAEVQMHRRVSFRVRDMMKCFPASGHPMDALQSSAASLGLFYSRRAIDDPKYVYNAVVRLIAKIPTMVAAFKLIRKGQDPIQPRDDLAYSANFLYMLTEREPDPLAARVLDRCLILHAEHSLNASTFSARVTASTLTDPYAVVASAVGTLAGPLHGGANEDVLAMLEEIGSPEHAGDYLDEAIASKRKVMGFGHREYRVKDPRAVILQGLAEELFARFGTDEMYDVAKALEQAAATRLGPKGIYPNVDFYSGLVYRKLGIPRDLFTPVFAISRVAGWLAHWREQLGANRIFRPSQIYTGPQNRTWIPSDERFSSTGA

SEQ ID NO: 11789 - protein, 428 aa, Pasteurella multocida
MSELTAKLTLSDGREYDLPVHKGSLGYDAIDVQSLVKNKLFTFDPGFMSTACCRSEITYIDGDNGVLLHRGYPIAELAKNADYLEVAHLLLFGERPSPEEYKNFTQLVRRHTLVHEQISRFFHGFRRDSHPMAIMCGVSGALAAFYHDSLDINDITHREITAIRLLAKMPTLAAMCYKYSIGQPFMFPQNHLSYSGNFLYMMFATPCEPYIVNPVLERAMDRIFILHADHEQNASTSTVRTAASSGANPFACIAAGIASLWGPAHGGANEACINMLEEIGTVDRIPEFIARAKDKNDPFRLMGFGHRVYKNYDPRAKVMRQTCHEVLKELNIQNPLFDVAMELERIALSDPYFIDHKLYPNVDFYSGIILKAIGIPTSMFTVMFALARTVGWIAHWKEMFKPGNMKIVRPRQLYMGEKERSFEAMDKS

SEQ ID NO: 11790 - protein, 417 aa, Anaplasma centrale
MVEKAILECGDCKVSLPVMRGNDGTLAIDVTGLYKDAKILTYDPGFLSTAACRSEITFIDGDKGILRTRGYDIADLVTTGGGFCSVAHLLLHGALPQGRELDDFASAVGNECHVPAQVVNVIKSLPSSAHPMAILIASFVTLAACYHAENSIDPLKSAIVAISKVPGIVAAIYRHTSGMPAVEADPNLGYVQNFVKMMFGDLGSTRQSVICRALESIFIMHADHEQNASTATVRVTGSAGANLFACLSAGAATLWGPAHGGANEAVVRMLEEIGSPERVGMFIQRVKDKKDGVRLMGFGHRVYKNYDPRALIIRDICKETLHELGTSDPLLDVAFELERVALQDEYFVKRFLYPNVDFYSGIVLKAIGVPVNMFTAFFALARTTGWSAQWYEMVTEHGDSNRICRPRQLYVGNMNAK

SEQ ID NO: 11791 - protein, 417 aa, Anaplasma marginale
MVEKAILECGDCKISLPVMHGSDGTLAVDTTSLYKDSKILTYDPGFMSTAACKSEITFIDGDEGILRYRGYDIADLTMADGGFCSIAYLLLYGTMPQGRELADFVATVSRECNVRTQVLDVIRALPRDAHPMAILIASFAALAAHYHGANSLDPLRSAIVAISQVPGIVASIYRHTSGAPLIEADPSLGYVQNFVHMMFGDLHETRKSIICKALEAIFIMHADHEQNASTATVRATGSAGANLFACLSAGAATLWGPAHGGANEAVVKMLEEIGRPERVGEFIEKVKEKESGVRLMGFGHRVYKNYDPRARIIRDICKETLSGLGADDPLLDVATALEKAALEDEYFVKRSLYPNVDFYSGIVLKAAGVPVNMFTAFFALARTTGWSAQWYEMLDKQHEGSKICRPRQLYTGKMNAE

SEQ ID NO: 11792 - protein, 321 aa, Bartonella bacilliformis
YIDGDEGILLYHGYSIDQLAENGDFLETCYLLLYGELPNKQQKIDFDRCIMRHTMVHEQFARFFHGFRRDSHPMAVMVACLGAMSAFYHDSINITDPQQRMIASIRLISKVPTLAAMAYKYSIGQPFVYPRNDLNYATNFLHMCFSVPCEEHKISPVIARAMDRIFTLHADHEQNASTSTVRLAGSSGANPYACIAAGVACLWGPAHGGANEACLKMLQEIGSVKKIPEFIARAKDKNDPFRLMGFGHRVYKNYDPRAKIMQKTCHEVLQELNIQDDPLLDIAMELEHIALNDEYFINKKLYPNVDFYSGITLKALGFPTE

SEQ ID NO: 11793 - protein, 303 aa, Bartonella bacilliformis
YIDGDEGILLYHGYSIDQLAENGDFLETCYLLLYGELPNKQQKIDFDRCIMRHTMVHEQFARFFHGFRRDSHPMAVMVACLGAMSAFYHDSINITDPQQRMIASIRLISKVPTLAAMAYKYSIGQPFVYPRNDLNYATNFLHMCFSVPCEEHKISPVIARAMDRIFTLHADHEQNASTSTVRLAGSSGANPYACIAAGVACLWGPAHGGANEACLKMLQEIGSVKKIPEFIARAKDKNDPFRLMGFGHRVYKNYDPRAKIMQKTCHEVLQELNIQDDPLLDIAMELEHIALNDEYFINKKLYP

SEQ ID NO: 11794 - protein, 112 aa, Bartonella bacilliformis
ANEACLKMLQEIGSVKKIPQFIARAKDKNDPFRLMGFGHRVYKNYDPRAKIMQKTCHEVLKELNIQDNPLFDIAMELEHIALNDEYFINKKLYPNVDFYSGITLKALGFPTE

SEQ ID NO: 11795 - protein, 112 aa, Bartonella bacilliformis
ANEACLKMLQEIGSVKKIPQFIARAKDKNDPFRLMGFGHRVYKNYDPRAKIMQKTCHEVLKELYIQDNPLFDIAMELEHIALNDEYFINKKLYPNVDFYSGITLKALGFPTE

SEQ ID NO: 11796 - protein, 110 aa, Bartonella bacilliformis
EACLKMLQEIGSVKKIPQFIARAKDKNDPFRLMGFGHRVYKNYDPRAKIMQKTCHEVLKELNIQDNPLFDIAMELEHIALNDEYFINKKLYPNVDFYSGITLKALGFPTE

SEQ ID NO: 11797 - protein, 109 aa, Bartonella bacilliformis
TCLKMLQEIGSVKKIPQFIARAKDKNDPFRLMGFGHRVYKNYDPRAKIMQKTCHEVLKELNIQDNPLFDIAMELEHIALNDEYFINKKLYPNVDFYSGITLKALGFPTE

SEQ ID NO: 11798 - protein, 109 aa, Bartonella bacilliformis
TCLKLLQEIGSVKKIPQFIARAKDKNDPFRLMGFGHRVYKNYDPRAKIMQKTCHEVLKELNIQDNPLFDIAMELEHIALNDEYFINKKLYPNVDFYSGITLKALGFPTE

SEQ ID NO: 11799 - protein, 415 aa, Ehrlichia ruminantium
MIKKAAVELDDQKITLPILYDTEGNEVLDITSLYKNTGVLTYDPGFMSTAACESKITFIDGNKGILRYRGYDIADLVYNNKSFIEVVYLLFYGVFPNAEQLQEFILHISQEYVLPQMVRDVITSFPQNSHPMAILIASFSSLAAYYCDQKTDGELECKLAVAKVASIVALIYRHITNQDFIQADVGLSYSKNFIHMMFDISSYKFTEIVDKALDVIFVLHADHEQNASTATVRMTGSSGPNLFACLAAGAATLWGPAHGGANEAVINMLMNIGKPENVKQFIQKVKDSNKSTKLMGFGHRVYKNYDPRARIMCTICKEILKDFGLNDPLLEVAVELENIALQDDYFIARNLYPNVDFYSGIVLKTIGIPVKMFTTLFALARTSGWSAQWYEMVSSKNYKISRPRQLYTGNPVQKV

SEQ ID NO: 11800 - protein, 112 aa, Bartonella weissi
ANEACLKMLQEIGSTEKIPEFIERAKDKNDPFRLMGFGHRVYKNYDPRAKLMQKTCHEVLKELNIQDDPLLDIAMELEKIALNDEYFIEKKLYPNVDFYSGITLKALGFPTE

SEQ ID NO: 11801 - protein, 112 aa, Bartonella sp. tm6313nv
ANEACLKMLQEIGSVKRIPEFIARAKDKNDPFRLMGFGHRVYKNYDPRAKIMQQTCHEVLKELNIQDDPLLDIAIELEKIALNDEYFVEKRLYPNVDFYSGITLKALGFPTE

SEQ ID NO: 11802 - protein, 435 aa, Rickettsia conorii
MTNENNNDSEFAELKIRGKIFKLPILKASIGEDVIDISRVSAEADCFTYDPGFMSTASCQSTITYIDGDKGILRHRGYDIKDLAEKSDFLEVAYLLIYGELPSGEQYNNFTKQVAHHSLVNERLHYLFQTFCSSSHPMAIMLAAVGSLSAFYPDLLNFKEADYELTAIRMIAKIPTIAAMSYKYSIGQPFIYPDNSLDFTENFLHMMFATPCTKYTVNPIIKNALNKIFILHADHEQNASTSTVRIAGSSGANPFACISTGIASLWGPAHGGANEAVINMIKEIGSSEYIPKYIAKAKDKNDPFRLMGFGHRVYKNYDPRAAVLKETCKEVLKELGQLDNNPFLQIAIELEAIALKDEYFIERKLYPNVDFYSGIIYKAMGIPSQMFTVLFAIARTVGWMAQWKEMHEDPEQKISRPRQLYTGYVHREYKGIRER

SEQ ID NO: 11803 - protein, 411 aa, Rickettsia conorii
DSEFAELKIRGKIFKLPILKASIGEDVIDISRVSAEADCFTYDPGFMSTASCQSTITYIDGDKGILRHRGYDIKDLAEKSDFLEVAYLLIYGELPSGEQYNNFTKQVAHHSLVNERLHYLFQTFCSSSHPMAIMLAAVGSLSAFYPDLLNFKEADYELTAIRMIAKIPTIAAMSYKYSIGQPFIYPDNSLDFTENFLHMMFATPCTKYTVNPIIKNALNKIFILHADHEQNASTSTVRIAGSSGANPFACISTGIASLWGPAHGGANEAVINMIKEIGSSEYIPKYIAKAKDKNDPFRLMGFGHRVYKNYDPRAAVLKETCKEVLKELGQLDNNPFLQIAIELEAIALKDEYFIERKLYPNVDFYSGIIYKAMGIPSQMFTVLFAIARTVGWMAQWKEMHEDPEQKISRPR

SEQ ID NO: 11804 - protein, 119 aa, Rickettsia conorii
AHGGANEAVINMLKEIGSSEYIPKYIAKAKDKNDPFRLMGFGHRVYKNYDPRAAVLKETCKEVLKELGQLDNNPFLQIAIELEAIALKDEYFIERKLYPNVDFYSGIIYKAMGIPSQMF

SEQ ID NO: 11805 - protein, 436 aa, Rickettsia prowazekii
MTNGNNNNLEFAELKIRGKLFKLPILKASIGKDVIDISRVSAEADYFTYDPGFMSTASCQSTITYIDGDKGILWYRGYDIKDLAEKSDFLEVAYLMIYGELPSSDQYCNFTKKVAHHSLVNERLHYLFQTFCSSSHPMAIMLAAVGSLSAFYPDLLNFNETDYELTAIRMIAKIPTIAAMSYKYSIGQPFIYPDNSLDFTENFLHMMFATPCTKYKVNPIIKNALNKIFILHADHEQNASTSTVRIAGSSGANPFACISTGIASLWGPAHGGANEAVINMLKEIGSSENIPKYVAKAKDKNDPFRLMGFGHRVYKSYDPRAAVLKETCKEVLNELGQLDNNPLLQIAIELEALALKDEYFIERKLYPNVDFYSGIIYKAMGIPSQMFTVLFAIARTVGWMAQWKEMHEDPEQKISRPRQLYTGYVHREYKCIVERK

SEQ ID NO: 11806 - protein, 411 aa, Rickettsia prowazekii
NLEFAELKIRGKLFKLPILKASIGKDVIDISRVSAEADYFTYDPGFMSTASCQSTITYIDGDKGILWYRGYDIKDLAEKSDFLEVAYLMIYGELPSSDQYCNFTKKVAHHSLVNERLHYLFQTFCSSSHPMAIMLAAVGSLSAFYPDLLNFNETDYELTAIRMIAKIPTIAAMSYKYSIGQPFIYPDNSLDFTENFLHMMFATPCTKYKVNPIIKNALNKIFILHADHEQNASTSTVRIAGSSGANPFACISTGIASLWGPAHGGANEAVINMLKEIGSSENIPKYVAKAKDKNDPFRLMGFGHRVYKSYDPRAAVLKETCKEVLNELGQLDNNPLLQIAIELEALALKDEYFIERKLYPNVDFYSGIIYKAMGIPSQMFTVLFAIARTVGWMAQWKEMHEDPEQKISRPR

SEQ ID NO: 11807 - protein, 126 aa, Rickettsia prowazekii
GPAHGGANEAVINMLKEIGSSENIPKYVAKAKDKNDPFRLMGFGHRVYKSYDPRAAVLKETCKEVLNELGQLDNNPLLQIAIELEALALKDEYFIERKLYPNVDFYSGIIYKAMGIPSQMFTVLFA

SEQ ID NO: 11808 - protein, 410 aa, Rickettsia rickettsii
DSEFAELKIRGKIFKLPILKASIGEDVIDISRVSAEADCFTYDPGFMSTASCQSTITYIDGDKGILRHRGYDIKDLAEKSDFLEVAYLLIYGELPSGEQYNNFTKQVAHHSLVNERLHYLFQTFCSSSHPMAIMLAAVGSLAAFYPDLLNFKEADYELTAIRMIAKIPTIAAMSYKYSIGQPFIYPDNSLDFTENFLHMMFATPCTKYTVNPIIKNALNKIFILHADHEQNASTSTVRIAGSSGANPFACISTGIASLWGPAHGGANEAVINMLKEIGSSEYIPKYIAKAKDKNDPFRLMGFGHRVYKNYDPRAVVLKETCKEVLKELGQLDNNLLQIAIELEAIALKDEYFIERKLYPNVDFYSGIIYKAMGIPSQMFTVLFAIARTVGWMAQWKEMHEDPEQKISRPR

SEQ ID NO: 11809 - protein, 146 aa, Rickettsia rickettsii
ANEAVINMLKEIGSSEYIPKYIAKAKDKNDPFRLMGFGHRVYKNYDPRAVVLKETCKEVLRELGQLDNNPLLQIAIELEAIALKDEYFIERKLYPNVDFYSGIIYKAMGIPSQMFTVLFAIARTVGWMAQWKEMHEDPEQKISRPR

SEQ ID NO: 11810 - protein, 411 aa, Rickettsia typhi
NLEFAELKIRGKMFKLPILKASIGKDVIDISRVSAEADCFTYDPGFMSTASCQSTITYIDGDKGILWHRGYDIKDLAEKSDFLEVAYLMIYGELPSSEQYHNFTTKIAHHALVNERLHYLFQTFCSSSHPMAIMLAAVGSLSAFYPDLLNFNETDYELTAIRMIAKIPTIAAMSYKYSIGQPFIYPDNSLDFTENFLHMMFATPCTKYKVNPIIKNALNKIFILHADHEQNASTSTVRIAGSSGANPFACISTGIASLWGPAHGGANEAVINMLKEIGSSENIPKYVAKAKDKNDPFRLMGFGHRVYKSYDPRAAVLKETCKEVLNELGQLENNPLLQIAIELEALALKDEYFIERKLYPNVDFYSGIIYKAMGIPSQMFTVLFAIARTVGWMAQWKEMHEDPEQKISRPR

SEQ ID NO: 11811 - protein, 119 aa, Rickettsia typhi
GGANEAVINMLKEIGSSENIPKYVAKAKDKNDPFRLMGFGHRVYKSYDPRAAVLKETCKEVLNELGQLENNPLLQIAIELEALALKDEYFIERKLYPNVDFYSGIIYKAMGIPSQMFTV

SEQ ID NO: 11812 - protein, 411 aa, Rickettsia akari
DSEFAELKIRGKIFQLPILKASIGEDVIDISRVSAEVNCFTYDPGFMSTASCKSTITYIDGDKGILRHRGYNIKDLAEKSDFLEVAYLLIYGELPSIEQYNNFTKQVAHHSLVNERLHYLFQTFCSSSHPMAIMLAAIGSLSAFYPDLLNFKEADYELTAIRMIAKIPTIAAMSYKYSIGQPFVYPDNSLDFTENFLHMMFATPCTKYKVNPIIKNALNKIFILHADHEQNASTSTVRIAGSSGANAFACISTGIASLWGPAHGGANEAVINMLKEIGSSENIPKYIAKAKDKSDPFRLMGFGHRVYKNYDPRASVLKETCKEVLKELGQLENNPLLQIAIELEAIALKDEYFIERKLYPNVDFYSGIIYKAMGIPSQMFTVLFAIARTVGWMAQWKEMHEDPGQKISRPR

SEQ ID NO: 11813 - protein, 127 aa, Rickettsia akari
WGPAHGGANEAVINMLKEIGSSENIPKYIAKAKDKSDPFRLMGFGHRVYKNYDPRASVLKETCKEVLKELGQLENNPLLQIAIELEAIALKDEYFIERKLYPNVDFYSGIIYKAMGIPSQMFTVLFA

SEQ ID NO: 11814 - protein, 411 aa, Rickettsia australis
DSEFAELKIRGKIFKLPILKASIGEDVIDISRVSAEADCFTYDPGFMSTASCQSTITYIDGDKGILRHRGYNIKDLAEKSDFLEVAYLLIYGELPTIEQYNNFTTQVAHHSLVNERLHYLFQAFCSSSHPMAIMLAAVGSLSAFYPDLLNFKEADYELTAIRMIAKIPTIAAMSYKYSIGQPFIYPDNSLDFTENFLHMMFATPCTKYKVNPIIKNALNKIFILHADHEQNASTSTVRIAGSSGANAFACISTGIASLWGPAHGGANEAVINMLKEIGSSENIPKFIAKAKDKNDPFRLMGFGHRVYKNYDPRAAVLKETCKAVLKELGQLENNPLLQIAIELEAIALKDEYFIERKLYPNVDFYSGIIYKAMGIPSQMFTVLFAIARTVGWMAQWKEMHEDPEQKISRPR

SEQ ID NO: 11815 - protein, 122 aa, Rickettsia australis
AHGGANEAVINMLKEIGSSENIPKFIAKVKDKNDPFRLMGFGHRVYKNYDPRAAALKETCKAVLKELGQLENNPLLQIAIELEAIALKDEYFIERKLYPNVDSHSGIIYKAMGIPSQMSTVL

SEQ ID NO: 11816 - protein, 411 aa, Rickettsia canadensis
DSEFVELKIRGKIFKLPILKASIGEDVIDISRVSSEADCFTYDPGFMSTASCRSTITYIDGDKGILRYRGYDIKDLADKSDFLEVAYLLIYGELPSSEQYNNFTKKVAVHSLVNERLHYLFQTFCSSSHPMAIMLAAVGSLSAFYPDLLNFKEADYELTAIRMIAKIPTMAAMSYKYSIGQPFIYPDNSLDFTENFLHMMFATPCMKYEVNPVIKNALNKIFILHADHEQNASTSTVRIAGSSGANPFACISTGIASLWGPAHGGANEAVINMLKEIGSSENIPKYIAKAKDKDDPFRLMGFGHRVYKNYDPRAAVLKETCNEVLKELGQLENNPLLQIAIELEAIALKDEYFIERKLYPNVDFYSGIIYKAMGIPSQMFTVLFAIARTVGWMAQWKEMHEDPEQKISRPR

SEQ ID NO: 11817 - protein, 119 aa, Rickettsia canadensis
GGANEAVINMLKEIGSSENIPKYIAKAKDKDDPFRLMGFGHRVYKNYDPRAAVLKETCNEVLKELGQLENNPLLQIAIELEAIALKDEYFIERKLYPNVDFYSGIIYKAMGIPSQMFTV

SEQ ID NO: 11818 - protein, 411 aa, Rickettsia sp.
DSEFAELKIRGKIFKLPILKASIGEDVIDISRVSAEADCFTYDPGFMSTASCQSTITYIDGDKGILRHRGYDIKDLAEKSDFLEVAYLLIYGELPSGEQYNNFTKQVAHHSLVNERLHYLFQTFGSSSHPMAIMLAAVGSLSAFYPDLLNFKEADYELTAIRMIAKIPTIAAMSYKYSIGQPFIYPDNSLDFTENFLHMMFATPCTKYTVNPIIKNALNKIFILHADHEQNASTSTVRIAGSSGANPFACISTGIASLWGPAHGGANEAVINMLKEIGSSEYIPKYIAKAKDKNDPFRLMGFGHRVYKNYDPRAAVLKETCKEVLKELGQLDNNPLLQIAIELEAIALKDEYFIERKLYPNVDFYSGIIYKAMGIPSQMFTVLFAIARTVGWMAQWKEMHEDPEQKISRPR

SEQ ID NO: 11819 - protein, 411 aa, Rickettsia sp.
DSEFAELKIRGKIFKLPILKASIGEDVIDISRVSAEADCFTYDPGFMSTASCQSTITYIDGDKGILRHRGYDIKDLAEKSDFLEVAYLLIYGELPNGEQYNNFTKQVAHHSLVNERLHYLFQTFCSSSHPMAIMLAAVGSLSAFYPDLLNFKEADYELTAIRMIAKIPTIAAMSYKYSIGQPFIYPDNSLDFTENFLHMMFATPCTKYKVNPIIKNALNKIFILHADHEQNASTSTVRIAGSSGANPFACISTGIASLWGPAHGGANEVVINMLKEIGSSEYIPKYIAKAKDKNDPFRLMGFGHRVYKNYDPRAAVLKETCKEVLKELGQLDNNPLLQIAIELEAIALKDEYFIERKLYPNVDFYSGIIYKAMGIPSQMFTVLFAIARTVGWMAQWKEMHEDPEQKISRPR

SEQ ID NO: 11820 - protein, 411 aa, Rickettsia sp.
DSEFAELKIRGKIFKLPILKASIGEDVIDISRVSAEADCFTYDPGFMSTASCQSTITYIDGDKGILRHRGYDIKDLAEKSDFLEVAYLLIYGELPSGEQYNNFTKQVAHHSLVNERLHYLFQTFCSSSHPMAIMLAAVGSLSAFYPDLLNFKEADYELTAIRMIAKIPTIAAMSYKYSIGQPFIYPDNSLDFTENFLHMMFATPCTKYTVNPIIKNALNKIFILHADHEQNASTSTVRIAGSSGANPFACISTGIASLWGPAHGGANEAVINMLKEIGSSEYIPKYIAKAKDKNDPFRLMGFGHRVYKNYDPRAAVLKETCKEVLKELGQLDNNPLLQIAIELEAIALKDEYFIERKLYPNVDFYSGIIYKAMGIPSQMFTVLFVIARTVGWMAQWKEMHEDPEQKISRPR

SEQ ID NO: 11821 - protein, 411 aa, Rickettsia sp.
DSEFAELKIRGKIFKLPILKASIGEDVIDISRVSAEADCFTYDPGFMSTASCRSTITYIDGDKGILRYRGYDIKDLAEKSDFLEVAYLLIYGELPSSEQYNNFTKKVAVHSLVNERLHYLFQTFCSSSHPMAIMLAAVGSLSAFYPDLLNFKEADYELTAIRMIAKIPTIAAMSYKYSIGQPFIYPDNALDFTENFLHMMFATPCEKYKVNPIIKNALNKIFILHADHEQNASTSTVRIAGSSGANPFACVSTGIASLWGPAHGGANEAVINMLKEIGSSENIPKYIAKAKDKNDPFRLMGFGHRVYKNYDLRAAVLKETCKEVLKELGQLDGNPLLQIAIELEAIALKDEYFIERKLYPNVDFYSGIIYKAMGIPSQMFTVLFAIARTVGWMAQWKEMHEDPEQKISRPR

SEQ ID NO: 11822 - protein, 373 aa, Rickettsia sp.
RVSAEADCFTYDPGFMSTASCQSTITYIDGDQGILRHRGYDIKDLAEKSDFLDVAYLLIYGELPSGEQYNNFTKQVAHHSLVNERLHYLFQTFCSSSHPMAIMLAAVGSLSAFYPDLLNFKEADYELTAIRMIAKIPTIAAMSYKYSIGQPFIYPDNSLDFTENFLHMMFATPCTKYKVNPIIKNALNKIFILHADHEQNASTSTVRIAGSSGANPFACISTGIASLWGPAHGGANEAVINMLKEIGSSEYIPKYIAKAKDKNDPFRLMGFGHRVYKNYDPRAAVLKETCKEVLKELGQLDNNPLLQIAIELEAIALKDEYFIERKLYPNVDFYSGIIYKAMGIPSQMFTVLFAIARTVGWMAQWKEMYEDPE

SEQ ID NO: 11823 - protein, 356 aa, Rickettsia sp.
GFMSTASCRSTITYIDGDQGILRHRGYDIKDLAEKSDFLEVAYLLIYGELPNSKQYNDFTKKVAHHALVNERLHYLFQTFCSSSHPMAIMLAAVGSLSAFYPDLLNFFKEADYELTAIRMIAKIPTIAAMSYKYSIGQPFVYPDNSLDFTENFLHMMFATPCEKYKVNPVVKNALNKIFILHADHEQNASTSTVRIAGSSGANPFACVSTGIASLWGPAHGGANEAVINMLKDIGSVENIPKYIAKAKDKNDNFRLMGFGHRVYKNYDPRAAVLKETCKEVLKELGQLDNNPLLQIAIELEAIALKDEYFIERKLYPNVDFYSGIIYKAMGIPPQMFTVLFATARTVGWMAQWKEM

SEQ ID NO: 11824 - protein, 468 aa, Danio rerio
MSFLSISRLAPRLLSSKNAACVVVAARNASASTNLKDVLSDLVPKEQSRIKNFKQQYGKTSIGQITVDMVYGGMRGVKGLVYETSVLDPDEGIRFRGYSIPECQQLLPKAPGGEEPLPEGLFWLLVTGQVPTEEQVSWLSKEWAKRAALPSHVVTMLDNFPTNLHPMSQFSAAITALNSESSFARAYSEGVNKAKYWEFVYEDSMDLIAKLPCVAAKIYRNLYREGSSIGAIDSNLDWSHNFTNMLGYTEPQFTELMRLYLTIHSDHEGGNVSAHTSHLVGSALSDPYLSFSAAMNGLAGPLHGLANQEVLVWLTALQKELGGEVSDEKMRDYIWNTLKSGRVVPGYGHAVLRKTDPRYTCQREFALKHLPNDPMFKLVAQLYKIVPNVLLEQGKAKNPWPNVDAHSGVLLQYYGMTEMNYYTVLFGVSRALGVLAQLVWSRALGFPLERPKSMSTDGLMALVGAKSG

SEQ ID NO: 11825 - protein, 320 aa, Bartonella quintana
IDGDKGILLYCGYPIDQLAEKGDFLESCYLLLYGELPTKQEKIDFDRCIMQHMMVHERFTRFFHGFRRDSHPMAVMVACLGAMSAFYHDSIDIKDAQQRMIAAIRLISKVPTLAAMAYKYSIGQAFVYPRNDLSYAANFLHMCFSVPCEEYKINPVLSRAMDRICTLHADHEQNASTSTVRLVGSSGANPFACIAAGVACLWGPAHGGANEACLKMLQKIGSVERIPEFIARAKDKNDPFRLMGFGHRVYKNYDPRAKIMQQTCHEVLKELNIQDDPLLDIAIALENTALNDEYFIEKKLYPNVDFYSGITLKALGFPTE

SEQ ID NO: 11826 - protein, 160 aa, Bartonella quintana
SIDQLAEKGDFLESCYLLLYGELPTKQEKIDFDRCIMQHMMVHEQFTRFFHGFRRDSHPMAVMVACLGAMSAFYHDSIDIKDAQQRMIAAIRLISKVPTLAAMAYKYSIGQAFVYPRNDLSYAANFLHMCFSVPCEEYKINPVLSRAMDRIFTLHADHEQ

SEQ ID NO: 11827 - protein, 112 aa, Bartonella quintana
ANEACLKMLQKIGSVERIPEFIARAKDKNDPFRLMGFGHRVYKNYDPRAKIMQQTCHEVLKELNIQDDPLLDIAIALENTALNDEYFIEKKLYPNVDFYSGITLKALGFPTE

SEQ ID NO: 11828 - protein, 321 aa, Bartonella elizabethae
YIDGDKGILLYRGYPIDQLAEKGDFLESCYLLLYGELPTQQEKNDFDRCIMQHTMVHEQFSRFFHGFRRDSHPMAVMVACLGAMSAFYHDSIDITDPHQRMIASVRLISKVPTLAAMAYKYSIGQAFVYPRNDLSYAANFLRMCFAVPCEEYKINPVLARAMDQIFILHADHEQNASTSTVRLAGSSGANPFACIAAGVACLWGPAHGGANEACLKMLQEIGSIKRIPEFIARAKDKNDPFRLMGFGHRVYKNYDPRAKIMQKTCHEVLKELNIQDDPLLDIAIELEKIALSDEYFIEKKLYPNVDFYSGITLKALGFPTE

SEQ ID NO: 11829 - protein, 112 aa, Bartonella elizabethae
ANEACLKMLQEIGSIKRIPEFIARAKDKNDPFRLMGFGHRVYKNYDPRAKIMQKTCHEVLKELNIQDDPLLDIAIELEKIALSDEYFIEKKLYPNVDFYSGITLKALGFPTE

SEQ ID NO: 11830 - protein, 112 aa, Bartonella sp. sh6700ga
ANEACLKMLQEIGSVERIPEFIARAKDKNDPFRLMGFGHRVYKNYDPRAKIMQKTCHEVLKELNIQDDPLLDIAIELEKIALNDEYFVEKKLYPNVDFYSGITLKALGFPTE

SEQ ID NO: 11831 - protein, 112 aa, Bartonella sp. sh6833ga
ANEACLKMLQEIGSVKRIPEFIARAKDKNDPFRLMGFGHRVYKNYDPRAKIMQKTCHEVLKELNIQDDPLLDIAIELEKIALNDEYFGEKKLYPNVDFYSGITLKALGFPTE

SEQ ID NO: 11832 - protein, 112 aa, Bartonella sp. sh6537ga
ANEACLKMLQEIGSVKKIPEFIARAKDKNDPFRLMGFGHRVYKNYDPRAKIMQKTCHEVLKELNRQDDPLLDIAIELEKIALNDEYFVEKKLYPNVDFYSGITLKALGFPTE

SEQ ID NO: 11833 - protein, 431 aa, Mycobacterium tuberculosis H37Rv
MADTDDTATLRYPGGEIDLQIVHATEGADGIALGPLLAKTGHTTFDVGFANTAAAKSSITYIDGDAGILRYRGYPIDQLAEKSTFIEVCYLLIYGELPDTDQLAQFTGRIQRHTMLHEDLKRFFDGFPRNAHPMPVLSSVVNALSAYYQDALDPMDNGQVELSTIRLLAKLPTIAAYAYKKSVGQPFLYPDNSLTLVENFLRLTFGFPAEPYQADPEVVRALDMLFILHADHEQNCSTSTVRLVGSSRANLFTSISGGINALWGPLHGGANQAVLEMLEGIRDSGDDVSEFVRKVKNREAGVKLMGFGHRVYKNYDPRARIVKEQADKILAKLGGDDSLLGIAKELEEAALTDDYFIERKLYPNVDFYTGLIYRALGFPTRMFTVLFALGRLPGWIAHWREMHDEGDSKIGRPRQIYTGYTERDYVTIDAR

SEQ ID NO: 11834 - protein, 393 aa, Mycobacterium tuberculosis H37Rv
MTGPLAAARSVAATKSMTAPTVDERPDIKKGLAGVVVDTTAISKVVPQTNSLTYRGYPVQDLAARCSFEQVAFLLWRGELPTDAELALFSQRERASRRVDRSMLSLLAKLPDNCHPMDVVRTAISYLGAEDPDEDDAAANRAKAMRMMAVLPTIVAIDMRRRRGLPPIAPHSGLGYAQNFLHMCFGEVPETAVVSAFEQSMILYAEHGFNASTFAARVVTSTQSDIYSAVTGAIGALKGRLHGGANEAVMHDMIEIGDPANAREWLRAKLARKEKIMGFGHRVYRHGDSRVPTMKRALERVGTVRDGQRWLDIYQVLAAEMASATGILPNLDFPTGPAYYLMGFDIASFTPIFVMSRITGWTAHIMEQATANALIRPLSAYCGHEQRVLPGTF

SEQ ID NO: 11835 - protein, 373 aa, Mycobacterium tuberculosis H37Rv
MTVVPENFVPGLDGVVAFTTEIAEPDKDGGALRYRGVDIEDLVSQRVTFGDVWALLVDGNFGSGLPPAEPFPLPIHSGDVRVDVQAGLAMLAPIWGYAPLLDIDDATARQQLARASVMALSYVAQSARGIYQPAVPQRIIDECSTVTARFMTRWQGEPDPRHIEAIDAYWVSAAEHGMNASTFTARVIASTGADVAAALSGAIGAMSGPLHGGAPARVLPMLDEVERAGDARSVVKGILDRGEKLMGFGHRVYRAEDPRARVLRAAAERLGAPRYEVAVAVEQAALSELRERRPDRAIETNVEFWAAVVLDFARVPANMMPAMFTCGRTAGWCAHILEQKRLGKLVRPSAIYVGPGPRSPESVDGWERVLTTA

SEQ ID NO: 11836 - protein, 427 aa, Escherichia coli K12; identical to SEQ ID NO: 479

SEQ ID NO: 11837 - protein, 427 aa, Escherichia coli K12
MADTKAKLTLNGDTAVELDVLKGTLGQDVIDIRTLGSKGVFTFDPGFTSTASCESKITFIDGDEGILLHRGFPIDQLATDSNYLEVCYILLNGEKPTQEQYDEFKTTVTRHTMIHEQITRLFHAFRRDSHPMAVMCGITGALAAFYHDSLDVNNPRHREIAAFRLLSKMPTMAAMCYKYSIGQPFVYPRNDLSYAGNFLNMMFSTPCEPYEVNPILERAMDRILILHADHEQNASTSTVRTAGSSGANPFACIAAGIASLWGPAHGGANEAALKMLEEISSVKHIPEFFRRAKDKNDSFRLMGFGHRVYKNYDPRATVMRETCHEVLKELGTKDDLLEVAMELENIALNDPYFIEKKLYPNVDFYSGIILKAMGIPSSMFTVIFAMARTVGWIAHWSEMHSDGMKIARPRQLYTGYEKRDFKSDIKR

SEQ ID NO: 11838 - protein, 389 aa, Escherichia coli K12
MSDTTILQNSTHVIKPKKSVALSGVPAGNTALCTVGKSGNDLHYRGYDILDLAKHCEFEEVAHLLIHGKLPTRDELAAYKTKLKALRGLPANVRTVLEALPAASHPMDVMRTGVSALGCTLPEKEGHTVSGARDIADKLLASLSSILLYWYHYSHNGERIQPETDDDSIGGHFLHLLHGEKPSQSWEKAMHISLVLYAEHEFNASTFTSRVIAGTGSDMYSAIIGAIGALRGPKHGGANEVSLEIQQRYETPDEAEADIRKRVENKEVVIGFGHPVYTIADPRHQVIKRVAKQLSQEGGSLKMYNIADRLETVMWESKKMFPNLDWFSAVSYNMMGVPTEMFTPLFVIARVTGWAAHIIEQRQDNKIIRPSANYVGPEDRPFVALDKRQ

SEQ ID NO: 11839 - protein, 427 aa, Escherichia coli O157:H7
MADTKAKLTLNGDTAVELDVLKGTLGQDVIDIRTLGSKGVFTFDPGFTSTASCESKITFIDGDEGILLHRGFPIDQLATDSNYLEVCYILLNGEKPTQEQYDEFKTTVTRHTMIHEQITRLFHAFRRDSHPMAVMCGITGALAAFYHDSLDVNNPRHREIAAFRLLSKMPTMAAMCYKYSIGQPFVYPRNDLSYAGNFLNMMFSTPCEPYEVNPILERAMDRILILHADHEQNASTSTVRTAGSSGANPFACIAAGIASLWGPAHGGANEAALKMLEEISSVKHIPEFVRRAKDKNDSFRLMGFGHRVYKNYDPRATVMRETCHEVLKELGTKDDLLEVAMELENIALNDPYFIEKKLYPNVDFYSGIILKAMGIPSSMFTVIFAMARTVGWIAHWSEMHSDGMKIARPRQLYTGYEKRDFKSDVKH

SEQ ID NO: 11840 - protein, 411 aa, Rickettsia sp. DaE100R
DSEFAELKIRGKIFKLPILKASIGEDVIDISRVSAEADCFTYDPGFMSTASCQSTITYIDGDKGILRHRGYDIKDLAEKSDFLEVAYLLIYGELPSGEQYNNFTKQVAHHSLVNERLHYLFQTFCNSSHPMAIMLAAVGSLSAFYPDLLNFKEADYELTAIRMIAKIPTIAAMSYKYSIGQPFIYPDNSLDFTENFLHMMFATPCTKYTVNPIIKNALNKIFILHADHEQNASTSTVRIAGSSGANPFACISTGIASLWGPAHGGANEAVINMLKEIGSSEYIPKYIAKAKDKNDPFRLMGFGHRVYKNYDPRAVVLKETCKEVLKELGQLDNNPLLQIAIELEAIALKDEYFIERKLYPNVDFYSGIIYKAMGIPSQMFTVLFAIARTVGWMAQWKEMHEDPEQKISRPR

SEQ ID NO: 11841 - protein, 468 aa, Xenopus laevis
MSLISAGRVCARILGAKNSPCALIAARQASSSTNLKDVLSDLIPKEQTRIKNFKQQHGKTVIGQVTVDMVYGGMRGMKGLVYETSVLDPDEGIRFRGYSIPECQKLLPKAPGGEEPLPEGLFWLLVTGEVPNQDQVNWISKEWAKRAALPSHVVTMLDNFPTNLHPMSQLSAAITALNSESNFARAYAEGVNKAKYWELVYEDSMDLIAKLPCVAAKIYRNLYREGSSIGAIDSNLDWSDNFTNMLGYTDQQFTELMRLYLTIHSDHEGGNVSAHTSHLVGSALSDPYLSFSAAMNGLAGPLHGLANQEVLVWLTSLQKDLGGEVSDEKLRDYIWNTLNSGRVVPGYGHAVLRKTDPRYTCQREFALKHLPDDPMFKLVAQLYKIVPNILLEQGKAKNPWPNVDAHSGVLLQYYGMTEMNYYTVLFGVSRALGVLSQLIWSRALGFPLERPKSMSTDGLMQLVGSKSG

SEQ ID NO: 11842 - protein, 396 aa, SYNECHOCOCCUS SP. WH 8102
MAQKQSGDLRHARTGIELRPGLDGVPATQSAICDIDGEQGLLTYRGYPMQDLAANSSFLETAFLLIWGELPSRDQLAEFEHAVQMHRRVSFRVRDMMKCFPASGHPMDALQSSAASLGLFYSRRAIDDPQYVYDAVVRLIAKIPTMVAAFQLIRKGQDPIQPRDDLAYSANFLYMLTEREPDPLAARIFDRCLMLHAEHSLNASTFSARVTASTLTDPYAVVASAVGTLAGPLHGGANEDVLAMLEEVGTAENAGAYLDEAMAAKRKIMGFGHREYKVKDPRAVILQALVEEMFARFGHDELYDVAVAIEREAESRLGPKGIYPNVDFYSGLVYRKLGIPRDLFTPVFAIARVAGWLAHWREQLGANRIFRPSQIYSGSQLRAWMPIDERVTAPAA

SEQ ID NO: 11843 - protein, 111 aa, Bartonella tribocorum
ANEACLKMLQEIGSIKRIPEFIARAKDKNDPFRLMGFGHRVYKNYDPRAKILQKTCHEVLKELNIQDDPLLDIAIELEKIALNDEYFIEKKLYPNVDFYSGITLKALGFPT

SEQ ID NO: 11844 - protein, 426 aa, Helicobacter pylori 26695
MSVTLVNNENNERYEFETIESTRGPKAVDFSKLFETTGFFSYDPGYSSTAGCQSKISYVNGKKGELYYRGHRIEDLVAKYKYVDVCKLLLTGELPKNQDESLEFELELRHRSFVHESLLNMFSAFPSNAHPMAKLSSGVSILSTLYSTHQNMHTEEDYQTMARRIVAKIPTLAAICYRNEVGAPIIYPDIARSYVENILFMLRGYPYSRLKHTTQGEVEITPLEVEAFDKILTLHADHSQNASSTTVRNVASTGVHPYAAISAGISALWGHLHGGANEKVLLQLEEIGDVKNVDKYIARVKDKNDNFKLMGFGHRVYKSYDPRAKILKGLKDELHQKGVKMDERLSEIAAKVEEIALKDEYFIERNLYPNVDFYSGTILRALKIPVRFFTPVFVIGRTVGWCAQLLEHVKSPQARITRPRQVYVGD

SEQ ID NO: 11845 - protein, 426 aa, Helicobacter pylori J99
MSVTLINNENNARYEFETIECTRGPKAVDFSKLFETTGFFSYDPGYSSTAGCQSKISYINGKKGELYYRGHRIEDLVAKYKYVDVCRLLLTGELPKNQDESLEFELELRHRSFVHESLLNMFSAFPSNAHPMAKLSSGVSILSTLYSTHQNMHTEEDYQTMARRIVAKIPTLAAICYRNEVGAPIIYPDIARSYVENILFMLRGYPYSRLKHTTQGEVGITPLEVEAFDKILTLHADHGQNASSTTVRNVASTGVHPYAAISAGISALWGHLHGGANEKVLLQLEEIGDVKNVDKYIARVKDKNDNFKLMGFGHRVYKSYDPRAKILKGLKDELHQKGVKMDERLSEIAAKVEEIALKDEYFIERNLYPNVDFYSGTILRALKIPVRFFTPVFVIGRTVGWCAQLLEHVKSPQARITRPRQVYVGD

SEQ ID NO: 11846 - protein, 372 aa, Bacillus halodurans
MSVTRGLEGVVATTSSVSSIIESVLTYQGYDIDELAEHASFEEVIYLLWNGKLPNKVELKELADELANNAEIPQEVIEQMKAYPLDRVHPMGALRTAISSLGLYDEEADLMDEAANKRKALKLQAQVSTVVTAFSRIREGKEPVAPRTDLSFAANFLYMLTGEEPDEIAVDAFNKALVLHADHELNASTFTARVCVATLSDVYSGITAAIGALKGPLHGGANEQVMAMLTEIGDVENVEPYIRKALDNKQKIMGFGHRVYKNGDPRAKHLREMSKKLTSITGESKWYEMSVKIEEIVTNEKGLLPNVDFYSASVYHSLGIKHDLFTPIFAVSRMSGWLAHILEQYSNNRLIRPRAEYVGPNKRQYVRLEERN

SEQ ID NO: 11847 - protein, 368 aa, Bacillus halodurans
MSIKQPFVPGLDRVIAAETAISFLDTEREKIIIRGHDLIDLSVSNDYLDIVHLLLDGTLPNASEKSALEDTLKKHYDIPSYVMEILSLLPETTHPMDGLRTGLSALSSVDKEIENRSTEANKARAYKLLGKLPAITVNSYRLINGLKTVQPVPTLSYSANFLYMITGKEPKPFEAKIFDRSLLLYSEHEMPNSTFTARVIASTHSDLYGALTGGVASLKGNLHGGANEAVMYMLQSVDSAAEFQQLIQKKLVNKEKVMGFGHRVYMKKMDPRALEMKESLKQLCEKKGDYSLLDRCEAGEKTMLEEKGLYPNLDYYAAPVYWMLGIPIELYTPIFFTARTAGLAAHVMEQHQNNRIFRPRVSYIGESY

SEQ ID NO: 11848 - protein, 112 aa, Bartonella sp. pn15646ga
ANEACLKMLQEIGSIKKIPEFIARAKDKNDPFRLMGFGHRVYKNYDPRAKIMQKTCHEVLKELNIQDDPLLDIAIELEKIALSDEYFIEKKLYPNVDFYSGITLKALGFPTE

SEQ ID NO: 11849 - protein, 112 aa, Bartonella sp. sh8784ga
ANEACLKMLQEIGSVKRIPEFIARAKDKNDPFRLMGFGHRVYKNYDPRAKIMQKTCHEVLKELNIQDDPLLDIAIELEKIALNDEYFAEKKLYPNVDFYSGITLKALGFPTE

SEQ ID NO: 11850 - protein, 429 aa, Gallus gallus
ASSTNLKDVLAALIPKEQARIKTFRQQHGGTALGQITVDMSYGGMRGMKGLVYETSVLDPDEGIRFRGFSIPECQKALPKGGGGEPLPEGLFWLLVTGQIPTGAQVSWLSKEWAKRAALPSHVVTMLDNFPTNLHPMSQLSAAITALNSESNFARAYAEGILRTKYWEMVYESAMDLIAKLPCVAAKIYRNLYRAGSSIGAIDSKLDWSHNFTNMLGYTDAQFTELMRLYLTIHSDHEGGNVSAHTSHLVGSALSDPYLSFAAAMNGLAGPLHGLANQEVLGWLAQLQKAAGADASLRDYIWNTLNSGRVVPGYGHAVLRKTDPRYTCQREFALKHLPGDPMFKLVAQLYKIVPNVLLEQGAAANPWPNVDAHSGVLLQYYGMTEMNYYTVLFGVSRALGVLAQLIWSRALGFPLERPKSMSTDGLIAL

SEQ ID NO: 11851 - protein, 433 aa, Gallus gallus
  unsure (1)..(433): unsure at all Xaa locations
ASSTNLKDVLAALIPKEQARIKTFRQQHGGTALGQITVDMSYGGMRGMKGLVYETSVLDPDEGIRFRGFSIPECQKLLPKGGXGGEPLPEGLFWLLVTGQIPTGAQVSWLSKEWAKRAALPSHVVTMLDNFPTNLHPMSQLSAAITALNSESNFARAYAEGILRTKYWEMVYESAMDLIAKLPCVAAKIYRNLYRAGSSIGAIDSKLDWSHNFTNMLGYTDAQFTELMRLYLTIHSDHEGGNVSAHTSHLVGSALSDPYLSFAAAMNGLAGPLHGLANQEVLGWLAQLQKAXXXAGADASLRDYIWNTLNSGRVVPGYGHAVLRKTDPRYTCQREFALKHLPGDPMFKLVAQLYKIVPNVLLEQGAAANPWPNVDAHSGVLLQYYGMTEMNYYTVLFGVSRALGVLAQLIWSRALGFPLERPKSMSTDGLIAL

SEQ ID NO: 11852 - protein, 437 aa, Gallus gallus
ASSTNLKDVLASLIPKEQARIKTFRQQHGNTAVGQITVDMSYGGMRGMKGLIYETSVLDPDEGIRFRGFSIPECQKLLPKAGGGEEPLPEGLFWLLVTGQIPTPEQVSWVSKEWAKRAALPSHVVTMLDNFPTNLHPMSQLSAAITALNSESNFARAYAEGINRTKYWEFVYEDAMDLIAKLPCVAAKIYRNLYRAGSSIGAIDSKLDWSHNFTNMLGYTDPQFTELMRLYLTIHSDHEGGNVSAHTSHLVGSALSDPYLSFAAAMNGLAGPLHGLANQEVLLWLSQLQKDLGADASDEKLRDYIWNTLNSGRVVPGYGHAVLRKTDPRYTCQREFALKHLPSDPMFKLVAQLYKIVPNVLLEQGKAKNPWPNVDAHSGVLLQYYGMTEMNYYTVLFGVSRALGVLAQLIWSRALGFPLERPKSMSTAGLEKLSAGG

SEQ ID NO: 11853 - protein, 435 aa, Gallus gallus
STNLKDVLASLIPKEQARIKTFRQQHGNTAVGQITVDMSYGGMRGMKGLIYETSVLDPDEGIRFRGFSIPECQKLLPKAGGGEEPLPEGLFWLLVTGQIPTPEQVSWVSKEWAKRAALPSHVVTMLDNFPTNLHPMSQLSAAITALNSESNFARAYAEGINRTKYWEFVYEDAMDLIAKLPCVAAKIYRNLYRAGSSIGAIDSKLDWSHNFTNMLGYTDPQFTELMRLYLTIHSDHEGGNVSAHTSHLVGSALSDPYLSFAAAMNGLAGPLHGLANQEVLLWLSQLQKDLGADASDEKLRDYIWNTLNSGRVVPGYGHAVLRKTDPRYTCQREFALKHLPSDPMFKLVAQLYKIVPNVLLEQGKAKNPWPNVDAHSGVLLQYYGMTEMNYYTVLFGVSRALGVLAQLIWSRALGFPLERPKSMSTAGLEKLSAGG

SEQ ID NO: 11854 - protein, 427 aa, Salmonella enterica subsp. enterica serovar Typhi
MADTKAKITLTGDTAIELDVLKGTLGQDVIDIRSLGSKGVFTFDPGFTSTASCESKITFIDGDEGILLHRGFPIDQLATDSNYLEVCYILLYGEKPTQEEYDEFRTTVTRHTMIHEQITRLFHAFRRDSHPMAVMCGITGALAAFYHDSLDVNNPRHREIAAFRLLSKMPTMAAMCYKYSIGQPFVYPRNDLSYAGNFLNMMFSTPCETYEVNPVLERAMDRILILHADHEQNASTSTVRTAGSSGANPFACIAAGIASLWGPAHGGANEAALKMLEEISSVKHIPEFVRRAKDKNDSFRLMGFGHRVYKNYDPRATVMRETCHEVLKELGTKDDLLEVAMGLEHIALNDPYFIEKKLYPNVDFYSGIILKAMGIPSSMFTVIFAMARTVGWIAHWNEMHTDGMKIARPRQLYTGYDKRDFKSALKR

SEQ ID NO: 11855 - protein, 389 aa, Salmonella enterica subsp. enterica serovar Typhi
MTDTTILQNNTHVIKPKKSVALSGVPAGNTALCTVGKSGNDLHYRGYDILDLAEHCEFEEVAHLLIHGKLPTRDELNAYKSKLKALRGLPANVRTVLEALPAASHPMDVMRTGVSALGCTLPEKEGHTVSGARDIADKLLASLSSILLYWYHYSHNGERIQPETDDDSIGGHFLHLLHGEKPTQSWEKAMHISLVLYAEHEFNASTFTSRVIAGTGSDVYSAIIGAIGALRGPKHGGANEVSLEIQQRYETPDEAEADIRKRVENKEVVIGFGHPVYTIADPRHQVIKRVAKQLSEEGGSLKMYHIADRLETVMWETKKMFPNLDWFSAVSYNMMGVPTEMFTPLFVIARVTGWAAHIIEQRQDNKIIRPSANYTGPEDRVFVPIEKRC

SEQ ID NO: 11856 - protein, 431 aa, Nitrosomonas europaea
MEKTMPPQNVATLSPGKGKQEIELPIVSGNEGPDVVDIRSLYAQSGMFTYDPGFVSTASCKSAITFIDGDKGVLLYRGYPIEQLATRCDFMEVSYLLLNGELPTPDQKAKFVDNIKNHTMLHEQLIKFLSGFRRDAHPMAVMVGVVGALSAFYHDAMDVSDAQHREQSAFRLIAKLPTITAIAYKYNIGQPFIYPHNDLGFTENFLHMMFATPAEQYTPNPVIVRALDRILILHADHEQNASTSTVRLAGSSGANPFACISAGITCLWGPAHGGANEACLNMLEQIGDVSRINEYIARAKDKNDPFRLMGFGHRVYKNFDPRATLMRETCHEVLDELGLHNDRLFKLALELEKIALEDDYFITKKLYPNVDFYSGIVQRALGIPTSMFTAIFATARTVGWVAQWNEMISDPEQKIGRPRQLYVGAPRRDVP

SEQ ID NO: 11857 - protein, 386 aa, Acidithiobacillus ferrooxidans
MAEPNFAPGLEGVAATQSSISNIDGAAGLLSYRGFAIADLAAHSSFEEVALLLLDGVLPGAADLERFDHGLRAHRQVKYNVREIMKFMPVTGHPMDMLHCAVASLGMFYPQQELSDAERGNTLHLDAMAMRIIARMPTIVAMWEQMRFGNDPISPRPDLSHAANFLYMLSGREPDPAHTKILDSCLILHAEHTINASTFSVLVTGSTLTNPYHVIGGAIGTLAGPLHGGANQKVVEMLEEISSVQQVGAYLDRKMANKEKIWGFGHRIYKTRDPRAVILKGMMEDMASHGNLRHSSLFEIAIEVERQATERLGAQGIHANVDFYSGVLYHEMGIKADLFTPIFAMARSAGWLAHWREQLADNRIFRPTQVYTGEQDRRYVPVAQRT

SEQ ID NO: 11858 - protein, 331 aa, Bartonella koehlerae
STASCESKITYIDGNEGILLYRGYPIDQLAEKGDFLESCYLLLYGELPTKQEKIDFDRCIMQHTVVHEQFARFFHGFRRDSHPMAVMIACLGAMSAFYHDSIDITDPQQRMIASIRLISKVPTLAAMAYKYSIGQAFVYPRNDLSYAANFLHMCFSIPCEEYKINPVLTRAMDRIFTLHADHEQNASTSTVRLAGSSGANPFACIAAGVACLWGPAHGGANEACLKMLQEIGSVERIPQFIARAKDKNDSFRLMGFGHRVYKNYDPRAKIMQQTCHEVLKELNIQDDPLLDIAIALENIALNDEYFVGKKLYPNVDFYSGITLKALGFPTE

SEQ ID NO: 11859 - protein, 416 aa, Ehrlichia canis
MVKEAVLELDGQKVKLPVLCDTNGNKVIDITSLYKGTGILTYDPGFMSTAACESKITFIDGNKGILCYRGYNIADLVNNNKSFIEIVYLLFYGSFPSVDNLKDFMLQISQEYMPPEMVCDVIKSFSQDSHPMTILMACFSALASYYHDQAVDKDGLKHPKLAVAKVASIIAMIYRYTTNQDFIEPNHGLSYSENFIHMMFDISSYKFTQVVAKALDVIFTLHADHEQNASTATVRLAGSSGADLFACLVAGIATLWGPAHGGANEAVINMLMAIEKPSNVKQFIQKVKDGNKSTRLMGFGHRVYKNYDPRAKIICEICKEVLNDLGVNDPLLEIALELENIALQDSYFIERSLYPNVDFYSGIILKAIGIPVRMFTTLFALARTSGWSAQWYEMVADKNYKICRPRQLYTGHIAKI

SEQ ID NO: 11860 - protein, 111 aa, Bartonella sp. pb18975nm
ANEACLKMLQEIGSVKRIPEFIARAKDKNDPFRLMGFGHRVYKNYDPRAKIMQKTCHEVLKELNIQDDPLLDIAIELEKIALNDEYFVEKKLYPNVDFYSWHYEMFTVLFA

SEQ ID NO: 11861 - protein, 112 aa, Bartonella sp. pb18980nm
ANEACLKMLQEIGSVKRIPEFIARAKDKNDPFRLMGFGHRVYKNYDPRAKIMQKTCHEVLKELNIQDNPLLDIAIELEKIALNDEYFVEKKLYPNVDFYSGITLKALGFPTE

SEQ ID NO: 11862 - protein, 112 aa, Bartonella sp. sa18991nm
ANEACLKMLQEIGSIKRIPEFIARAKDKNDPFRLMGFGHRVYKNYDPRAKIMQKTCHEVLKELNIQNDPLLDIAIELEKIALNDEYFVEKKLYPNVDFYSGITLKALGFPTE

SEQ ID NO: 11863 - protein, 112 aa, Bartonella sp. ed19224az
ANEACLKMLQEIGSIKRIPEFIARAKDKNDPFRLMGFGHRVYKNYDPRAKIMQQTCHEVLKELNIQDDPLLDIAIELENIALNDEYFVEKRLYPNVDFYSGITLKALGFPTE

SEQ ID NO: 11864 - protein, 433 aa, Ehrlichia chaffeensis
MLYKQDMCGVIINLGRIMVKEAVLELDGQRIKLPVLYDTHGNKAVDITSLYKNTGILTYDPGFMSTAACESRITFIDGNKGILCYRGHDIVNLVNNNKSFIEIVYLLFYGVLPGLEDLQNFISQISQEYNPPKIVHDVIKSFPRDSHPMSILMACFSALASCYHNQDNSADQLKCAKLAVAKVASIIALIYRYITNQDFVESDTKLSYSENFVHMMFDISSYKFTQVVAKALDIIFVLHADHEQNASTATVRLSGSSGADLFACLVAGTATLWGPAHGGANEAVINMLMAIEKPSNVKQFIQKVKDGNKSTRLMGFGHRVYKNYDPRAKIMYKICREVLNNLNVNDPLLEIALELENIALQDSYFIDRNLYPNVDFYSGIVLKAIGIPVRMFTTLFALARTSGWSAQWYEMVAEENYKICRPRQLYTGNIAEC

SEQ ID NO: 11865 - protein, 411 aa, Anaplasma phagocytophilum
MVEKAVLECGDRRISLPVLRGTDGTPVVDITTLYRENNVLTYDPGFMSTAACRSEITFIDGNKGTLRYRGIDIENLIGTPNSFSSIVYLLLNGTLPSETEHEEFARILGAEYDVPEQVMNVIRSFPRDSHPMAILIASFSALAANYHASRIDPLTGAIIAIAKVPGIVASIYRHTANLDFIQADANLEYTHHFIRMMFGDMDDAHRDIMHKALDAIFIMHADHEQNASTSTVRMTGSSGAGLFACLCAGVATLWGPAHGGANEAVIKMLAEIGSPENVSSFIDKVKNNKGKSRLMGFGHRVYKSYDPRARVLRTICKDVLDSLGRDENLLAVAEELESQALQDEYFIERKLYPNVDFYSGIVLRAMGVPVDMYTAFFALARTSGWASQWYEMIQSDEGKRISRPRQLYTGK

SEQ ID NO: 11866 - protein, 411 aa, Anaplasma phagocytophilum
MVEKAVLECGDRRISLPVLRGTDGTPVVDITTLYRENNVLTYDPGFMSTAACRSEITFIDGNKGTLRYRGIDIENLIGTPNSFSSIVYLLLKGTLPSETEHEEFARILGAEYDVPEQVMNVIRSFPRDSHPMAILIASFSALAANYHASRIDPLTGAIIAIAKVPGIVASIYRHTANLDFIQADANLEYTHHFIRMMFGDMDDAHRDIMHKALDAIFIMHADHEQNASTSTVRMSGSSGAGLFACLCAGVATLWGPAHGGANEAVIKMLAEIGSPENVSSFIDKVKNNKGKNRLMGFGHRVYKSYDPRARVLRTICKDVLDSLGRDENLLAVAEELESQALRDEYFIERKLYPNVDFYSGIVLRAMGVPVDMYTAFFALARTSGWASQWYEMIQSDEGKRISRPRQLYTGK

SEQ ID NO: 11867 - protein, 411 aa, Anaplasma phagocytophilum
MVEKAVLECGDRRISLPVLRGTDGTPVVDITTLYRENNVLTYDPGFMSTAACRSEITFIDGNKGTLRYRGIDIENLIGTPNSFSSIVYLLLKGTLPSETEHEEFVRILGAEYDVPEQVMNVIRSFPRDSHPMAILIASFSALAANYHASRIDPLTGAIIAIAKVPGIVASIYRHTANLDFIQADANLEYTHHFIRMMFGDMDDAHRDIMHKALDAIFIMHADHEQNASTSTVRMTGSSGAGLFACLCAGVATLWGPAHGGANEAVIKMLAEIGSPENVSSFIDKVKNNKGKSRLMGFGHRVYKSYDPRARVLRTICKDVLDSLGRDENLLAVAEELESQALQDEYFIERKLYPNVDFYSGIVLRAMGVPVDMYTAFFALARTSGWASQWYEMIQSDEGKRISRPRQLYTGK

SEQ ID NO: 11868 - protein, 411 aa, Anaplasma platys
MKENAVLMCGDKKVSLPMLSGTDGIQLIDITTLYRDHKVLTYDPGFMSTAACSSEITFIDGEKGILRHRGLDIADLIGIKGGFCSVAHLLLYGVLPSDTVFEQFLAAIGAQHALSSDVLGVISSFRRDAHPMAILMACFSTLAAKYHGDNRGNEELAVLAIAQVPSLVAAIYRHRMGLELVSPDPSLSYTGNFVKMMFGALEKTRADAIEEALDAIFIMHADHEQNASTATVRMAGSAGTELFACLAAGTATLWGPAHGGANEAVIRMLESIGSPDKVEEFIGFVKDNNSKVRLMGFGHRVYKSYDPRAKILGQISRSVLDNLGCSDELLGVAEELERCALQDEYFVERKLYPNVDFYSGIVLRAMGVPVEMYTTFFALARTAGWVSQWCELLRGSESLKICRPRQLYAGK

SEQ ID NO: 11869 - protein, 411 aa, Anaplasma platys
MKENAVLMCGDKKVSLPMLSGTDGIQLIDITTLYRDHKVLTYDPGFMSTAACSSEITFIDGEKGILRHRGLDIADLIGIKGGFCSVAHLLLYGVLPSDTVFEQFLAAIGAQHALSSDVLGVISSFRRDAHPMAILMACFSTLAAKYHGDNRGNEELAVLAIAQVPSLVAAIYLHRMGLELVSPDPSLSYTGNFVKMMFGALEKTRADAIEEALDAIFIMHADHEQNASTATVRMAGSAGTELFACLAAGTATLWGPAHGGANEAVIRMLESIGSPDKVEEFIGFVKDNNSKVRLMGFGHRVYKSYDPRAKILGQISRSVLDNLGCSDELLGVAEELERCALQDEYFVERKLYPNVDFYSGIVLRAMGVPVEMYTTFFALARTAGWVSQWCELLRGSESLKICRPRQLYAGK

SEQ ID NO: 11870 - protein, 398 aa, Neorickettsia risticii
MNSEKVKVNVEEFLKSTAGPSGVSASLEPRGFFYDPGYAKTAPCKSSITFIDGENGILLHRGYPIEELAQTSDFLQVGYLLINGKLPDSIATREFEEKIKHVPQLPECVLKNIRSFPTSAHPMAVLISALASLASVYGEMDFHEKKLLLVAYTPWLVAYIYRHINSQEFIEPDIRLPYTENFLYMMFGEKKPKDAEILDKIFILHADHGQTASTSVARMVVSSGASPIVACSAATASLWGPLHGGANERVLEMLRGIIESGENVENFIERVKRKEERLMGFGHRVYKNYDPRAAILKQKAHDVLKADSPILKTAGKLETIATREEYFLSRKLYPNVDFYSGIVLDALGIPSCMFTPIFALARTVGWVAQIAEFLSDSEQKLCRPRQIYVGEPRRSVHG

SEQ ID NO: 11871 - protein, 398 aa, Neorickettsia sennetsu
MNSEKVKVNVEEFLKSTAGPFGVSASLEPKGFFYDPGYAKTAPCKSSITFIDGENGILLHRGYPIEELAQTSDFLQVGYLLIDGKLPDSAATREFEERIKHVPQLPECVLKNIRSFPTSAHPMAVLISALASLASVYGEMDFNQKKLLLVAYTPWLIAHIYRHINSLEFVEPDIRLPYTENFLYMMFGEKKPKDAEILDKIFILHADHGQTASTSVARMVVSSGASPIAACSAATASLWGPLHGGANERVLEMLRGIVESGEKVENFIERVKRKEERLMGFGHRVYKNYDPRAAILKQKAHDVLKADSPILKTAGELETITAREEYFLSRKLYPNVDFYSGIVLDALGISSCMFTPIFALARTVGWVAQITEFLSDSEQKLCRPRQIYVGEPRRNVHG

SEQ ID NO: 11872 - protein, 413 aa, Wolbachia pipientis
MDKKALLELSNGSKIDLPVLSGTVGPDVLNIKDLYKKTGLFTYDPGFVSTASCSSTITFIDGDEGVLKYRGHNIADLAENNNFTAVIYLLLYGKLPSSEQHKKFLLKIQESSKVSEQVTNVIKAFPKTAHPMSILVACFANLSASYHEMHGKNVNGEDLDFGISAIAKVPAIVAMIYRHINNQEFINANNKLSYSENFLNMIFGSAVNNTLFVKALDKIFTLHADHEQNASTAAVRLVGSAGSNLFASLSAGVATLWGPAHGGANEAVINMLKEIEQSGDVDRFIEKAKDDKDPFKLMGFGHRVYKNYDPRALILKDACHEILSKLEQNNELLEIAKKLEEIALKDEYFITRKLYPNVDFYSGIIMNAIGIPSSMFTPIFALARTTGWVAQWYEMINDKETKICRPRQLYLGK

SEQ ID NO: 11873 - protein, 466 aa, Homo sapiens [sequence omitted]

SEQ ID NO: 11874 - protein, 466 aa, Homo sapiens
MALLTAAARLLGTKNASCLVLAARHASASSTNLKDILADLIPKEQARIKTFRQQHGKTVVGQITVDMMYGGMRGMKGLVYETSVLDPDEGIRFRGFSIPECQKLLPKAKGGEEPLPEGLFWLLVTGCIPTEEQVSWLSKEWAKRAALPSHVVTMLDNFPTNLHPMSQLSAAVTALNSESNFAQAYARGISRTKYWELIYEDSVDLIAKLPCVAAKIYRNLYWEGSGIGAIDSNLDWSHNFTNMLGYTDHQFTELMRLYLTIHSDHEGGNVSAHTSHLVGSALSDPYLSFAAAMNGLAGPLHGLANQEVLVWLTQLQKEVGKDVSDEKLRDYIWNTLNSGRVVPGYGHAVLRKTDPRYTCQREFALKHLPNDPMFKLVAQLYKIVPNVLLEQGKAKNPWPNVDAHSGVLLQYYGMTEMNYYTVLFGVSRALGVLAQLIWSRALGFPLERPKSMSTEGLMKFVDSKSG

SEQ ID NO: 11875 - protein, 264 aa, Homo sapiens
MDLIAKLPCVAAKIYRNLYREGSGIGAIDSNLDWSHNFTNMLGYTDHQFTELTRLYLTIHSDHEGGNVSAHTSHLVGSALSDPYLSFAAAMNGLAGPLHGLANQEVLVWLTQLQKEVGKDVSDEKLRDYIWNTLNSGRVVPGYGHAVLRKTDPRYTCQREFALKHLPNDPMFKLVAQLYKIVPNVLLEQGKAKNPWPNVDAHSGVLLQYYGMTEMNYYTVLFGVSRALGVLAQLIWSRALGFPLERPKSMSTEGLMKFVDSKSG

SEQ ID NO: 11876 - protein, 377 aa, Ferroplasma acidarmanus
MIKMAVSLGLEDVFIKYTGLTFIDGNAGVLRYRGYDINDLVQNTGFEEVCYLMTNGELPNSQQLAEFKKSVKEHYKLPDHVMELISDLPREADTLTMMETAFASLSSGDYQWNKENDRKQVPKILGENLGIISNIYRHKMGMGLQNPDPKYDYAEAFLRNCFGNADEKKISAMNAALVIYVDHEVPASTTAALVASSTLSDMYSCITAATAALKGPLHGGAAEAAYKQLLDIGNVDNVENWFKTNILDGKRRLMGFGHRVYRTYDPRMKIFKKLATTLEQTDEQKKLFEIAVKLEELGVKEFGGKGIYPNTDYYSGIVFNEIGFPIYMFTTLFGFSRVLGWLSHITEYVEEEERLIRPRAVYTGPDKRDFVKIQDRK

SEQ ID NO: 11877 - protein, 372 aa, Ferroplasma acidarmanus
MEEISPGLENVYIKYTELTFIDGQKGIMRYRGYDINELAEKSSFEKVSYLMLFGKFPDDSELKNFQNKINSHLALDDYLKDILRAMPETSDSLGILQTLLSAKASKESNYKYTKENDGEKIPEILGSVLSMVANIYRLKSGNNIIDPEPGESYAETFLKACSGSADKNKISAMDSALILYMDHEIPASTTAALVTASTLSDMYSSLASAIAALRGPLHGGAAEGAYRQFLEIGEPENVNAWFENNILNGKRRLVGFGHRVYRTYDPRLKTFKKYADILSTTEEQKKILAIAKRLEEAGVKAFGSKGIYTNTDFYAGMVFNAIGFPVDMFTTLFGLSRISGILAHITEYVETQERLIRPRAIYRGSGERKYPE

SEQ ID NO: 11878 - protein, 437 aa, Sus scrofa
ASSTNLKDILADLIPKEQARIKTFRQQHGNTVVGQITVDMMYGGMRGMKGLVYETSVLDPDEGIRFRGYSIPECQKMLPKAKGGEEPLPEGLFWLLVTGQIPTEEQVSWLSKEWAKRAALPSHVVTMLDNFPTNLHPMSQLSAAITALNSESNFARAYAEGIHRTKYWELIYEDCMDLIAKLPCVAAKIYRNLYREGSSIGAIDSKLDWSHNFTNMLGYTDAQFTELMRLYLTIHSDHEGGNVSAHTSHLVGSALSDPYLSFAAAMNGLAGPLHGLANQEVLVWLTQLQKEVGKDVSDEKLRDYIWNTLNSGRVVPGYGHAVLRKTDPRYTCQREFALKHLPHDPMFKLVAQLYKIVPNVLLEQGKAKNPWPNVDAHSGVLLQYYGMTEMNYYTVLFGVSRALGVLAQLIWSRALGFPLERPKSMSTDGLIKLVDSK

SEQ ID NO: 11879 - protein, 464 aa, Sus scrofa
MALLTAAARLFGAKNASCLVLAARHASASSTNLKDILADLIPKEQARIKTFRQQHGNTVVGQITVDMMYGGMRGMKGLVYETSVLDPDEGIRFRGYSIPECQKMLPKAKGGEEPLPEGLFWLLVTGQIPTEEQVSWLSKEWAKRAALPSHVVTMLDNFPTNLHPMSQLSAAITALNSESNFARAYAEGIHRTKYWELIYEDCMDLIAKLPCVAAKIYRNLYREGSSIGAIDSKLDWSHNFTNMLGYTDAQFTELMRLYLTIHSDHEGGNVSAHTSHLVGSALSDPYLSFAAAMNGLAGPLHGLANQEVLVWLTQLQKEVGKDVSDEKLRDYIWNTLNSGRVVPGYGHAVLRKTDPRYTCQREFALKHLPHDPMFKLVAQLYKIVPNVLLEQGKAKNPWPNVDAHSGVLLQYYGMTEMNYYTVLFGVSRALGVLAQLIWSRALGFPLERPKSMSTDGLIKLVDSK

SEQ ID NO: 11880 - protein, 437 aa, Sus scrofa
ASSTNLKDILADLIPKEQARIKTFRQQHGNTAVGQITVDMMYGGMRGMKGLVYETSVLDPDEGIRFRGYSIPECQKMLPKAKGGEEPLPEGLFWLLVTGQIPTEEQVSWLSKEWAKRAALPSHVVTMLDNFPTNLHPMSQLSAAITALNSESNFARAYAEGIHRTKYWELIYEDCMDLIAKLPCVAAKIYRNLYREGSSIGAIDSKLDWSHNFTNMLGYTDAQFTELMRLYLTIHSDHEGGNVSAHTSHLVGSALSDPYLSFAAAMNGLAGPLHGLANQEVLVWLTQLQKEVGKDVSDEKLRDYIWNTLNSGRVVPGYGHAVLRKTDPRYTCQREFALKHLPHDPMFKLVAQLYKIVPNVLLEQGKAKNPWPNVDAHSGVLLQYYGMTEMNYYTVLFGVSRALGVLAQLIWSRALGFPLERPKSMSTDGLIKLVDSK

SEQ ID NO: 11881 - protein, 427 aa, Cytophaga hutchinsonii
MSKEAEIILDGKSYKFPVIEGSEGEKAIDIAKLRDLTGYVTLDTGYKNTGATKSAITFLDGEQGILRYRGYPIEQLASKASFLEVSYLLIYGELPTTSQLENFKERIRKHTNLHEDIKKVFDGFPSSAHPMGVLSSAVSSLTAYYPGSIDPTANDDEVDMTIVRLMAKLPTIAAWSYRNSKGQPLMYPKPKLGYCENFLYMMFGQPNEDFELDPVVVEALNTLFILHADHEQNCSTSTVRIVGSAHASLYSSIAAGINALWGPLHGGANQEVIEMLEEIKASGISTKDYIAKVKTKEVRLMGFGHRVYKNFDPRAKIIKKACDDILNKLGVKDPALEIAKELEQAALSDPYFVERKLYPNVDFYSGIIYKALGLRSDLFTVMFAIGRLPGWIAQWKELRDAKEPIGRPRQIYTGYTERDYVSIDKRK

SEQ ID NO: 11882 - protein, 427 aa, Salmonella typhimurium LT2
MADTKAKITLTGDTTIELDVLKGTLGQDVIDIRSLGSKGVFTFDPGFTSTASCESKITFIDGDEGILLHRGFPIDQLATDSNYLEVCYILLYGEKPTQEEYDEFRTTVTRHTMIHEQITRLFHAFRRDSHPMAVMCGITGALAAFYHDSLDVNNPRHREIAAFRLLSKMPTMAAMCYKYSIGQPFVYPRNDLSYAGNFLNMMFSTPCETYEVNPVLERAMDRILILHADHEQNASTSTVRTAGSSGANPFACIAAGIASLWGPAHGGANEAALKMLEEISSVKHIPEFVRRAKDKNDSFRLMGFGHRVYKNYDPRATVMRETCHEVLKELGTKDDLLEVAMELEHIALNDPYFIEKKLYPNVDFYSGIILKAMGIPSSMFTVIFAMARTVGWIAHWNEMHTDGMKIARPRQLYTGYDKRDFKSALKR

SEQ ID NO: 11883 - protein, 389 aa, Salmonella typhimurium LT2
MTDTTILQNNTHVIKPKKSVALSGVPAGNTALCTVGKSGNDLHYRGYDILDLAEHCEFEEVAHLLIHGKLPTRDELNAYKSKLKALRGLPANVRTVLEALPAASHPMDVMRTGVSALGCTLPEKEGHTVSGARDIADKLLASLSSILLYWYHYSHNGERIQPETDDDSIGGHFLHLLHGEKPTQSWEKAMHISLVLYAEHEFNASTFTSRVIAGTGSDVYSAIIGAIGALRGPKHGGANEVSLEIQQRYETPDEAEADIRKRVENKEVVIGFGHPVYTIADPRHQVIKRVAKQLSEEGGSLKMYHIADRLETVMWETKKMFPNLDWFSAVSYNMMGVPTEMFTPLFVIARVTGWAAHIIEQRQDNKIIRPSANYTGPEDRPFVSIDDRC

SEQ ID NO: 11884 - protein, 77 aa, Streptococcus salivarius
EFMKEKKGLIPNVDFYSATVYHTLGIDSDIFTLIFAMSRVAGWIAHIQEQQKNNKLIRPRSQYIGQENMTYIPLEKR

SEQ ID NO: 11885 - protein, 312 aa, Methanothermobacter thermautotrophicus str. Delta H
MNKDALNALKFKYMKIRWSDMMNEGIINDILRVKNPRWRTSITRVEPNRIVTRGYSQEDLIGGVSFSEMVYLLIRGELPPQNVARMLEAVLVSFCDHGVTPPSTQAARMIASAGSPVHACIAGGLLAFGKNHAGAIERSMKLFQETVSSCESEDEIPDAALRLVDDHLQANRRIPGFGHRYHNADPRAVRLLELAEDYGCVGPHTSLALEVQEILLERKGVRMNVDGANAGILSDMGFDWRTGAGVFMIGRLPGLISHVYEEKVREPAFRKFFEIEEIQYDGEEKRILEADYRTLNGSEIWKTTNTKEPGRE

SEQ ID NO: 11886 - protein, 280 aa, Methanothermobacter thermautotrophicus str. Delta H
MAIGKESLEQVFRAGSPRWRTSITRVEPNRIVTRGYSQEDLIGGVSFSEMVYLLIRGELPPQNVARMLEAVLVSFCDHGVTPPSTQAARMIASAGSPVHACIAGGLLAFGKNHAGAIERSMKLFQETVSSCESEDEIPDAALRLVDDHLQANRRIPGFGHRYHNADPRAVRLLELAEDYGCVGPHTSLALEVQEILLERKGVRMNVDGANAGILSDMGFDWRTGAGVFMIGRLPGLISHVYEEKVREPAFRKFFEIEEIQYDGEEERDLSAGADLEPMPE

SEQ ID NO: 11887 - protein, 123 aa, Glycine max
  unsure (1)..(123): unsure at all Xaa locations
XDDPLFKLVSKLYEVVPPMRIELGKVKNPWPNVDAHSGVVLNHFGLTEAKYFTVLFGVARSIGVGPQLILDRILGLPLERPKSVTMAWLEEYCKNAAKXAFCVRTGNFRLIMEIPFERSAICD

SEQ ID NO: 11888 - protein, 188 aa, Sesbania rostrata
TGVMALQVQSEFQKAYEGGITKSRYWEPTYEDSMNLIARLPAIAAYIYRRKYKDGKIIPLDDSLDYGANYAHMLGFDDPEMLEFMRLYVSIHSDHEGGNVSSHTAHLVASPLSDPYLAFAAALNGLAGPLHGLANQEVLRWIRSIVKEFGTPNISTEQLSDYIHKTLSSGQVVPGYGHGVLRKTVQDT

SEQ ID NO: 11889 - protein, 258 aa, Zea mays
  unsure (1)..(258): unsure at all Xaa locations
PRAPAIAFFRGLAAVSRLRSRMGQDATTLGGVRWLQMQSASDLDLRSQLQEMIPEQQDRLKKLKSEHGKVQLGNITVDMVLGGMRGMTGMLWETSLLDPEEGIRFRGLSIPECQKVLPAAVKDGEPLPEGLLWLLLTGKVPTKEQVDALSKELLARSTVPAHVYKAIDALPVTAHPMTQFTXGIMALQVESEFXSAYDKGMPKTKFWEPTYEDCLXLIARLXQVAXYGYRRXFKDGKXYAADXTLDYAANFXHMLWFD

SEQ ID NO: 11890 - protein, 294 aa, Saccharomyces bayanus
MTVPYLNSGRNVASYLQTHSHQEKTLKERFSEIYPSHAQDVKQFVKEHGKTKISDVLLEQVYGGMRGVPGSVWEGSELDAEEGIRFRGRTIADIQKELPKAKGSSQPLPEALFWLLLTGEVPTQAQVENLSADLMSRSELPHHVVQLLDNLPKDLHPMAQLSIAVTALESESKFAKAYAQGISKQDYWSYTFEDSLDLLGKLPVIAAKIYRNVFKDGKIGEVDPNADYGKNLVNLIGSKDEDFVDLMRLYLTIHSDHEGGNVSAHTSHLVGSALSSPYLSLASGLNGLAGPLHG

SEQ ID NO: 11891 - protein, 138 aa, Bos taurus
LRGMKGLVYETSVLDPDEGIRFRGYSIPECQKLLPKAKGGEEPLPEGLFWLLVTGQIPTEEQVSWLSQEWAKRAALPSHVVTMLDNFPTNLHPMSQLSADVTALNSESTFARAYSEGINRTKYWELIYEDSMDLIAKL

SEQ ID NO: 11892 - protein, 327 aa, Mus musculus
MDSWVVLLGLQIIWLPLLTHGTAPTPTLRFVAVGDWGGVPNAPFHTAREMANAKEIARTVQTMGADFIMSLGDNFYFTGVHDASDKRFQETFEDVFSDRALRNIPWYVLAGNHDHLGNVSAQIAYSKISKRWNFPSPYYRLRFKIPRTNITVAIFMLDTVMLCGNSDDFASQQPKMPRDLGVARTQLSWLKKQLAAAKEDYVLVAGHYPIWSIAEHGPTRCLVKNLRPLLATYGVTAYLCGHDHNLQYLQDENGVGYVLSGAGNFMDPSVRHQRKVPNGYLRFHYGSEDSLGGFTHVEISPKEMTIIYVEASGKSLFKTSLPRRPRP

SEQ ID NO: 11893 - protein, 327 aa, Rattus norvegicus
MDTWMVLLGLQILLLPLLAHCTAPASTLRFVAVGDWGGVPNAPFHTAREMANAKEIARTVQIMGADFIMSLGDNFYFTGVHDANDKRFQETFEDVFSDRALRNIPWYVLAGNHDHLGNVSAQIAYSKISKRWNFPSPYYRLRFKVPRSNITVAIFMLDTVMLCGNSDDFVSQQPEMPRDLGVARTQLSWLKKQLAAAKEDYVLVAGHYPIWSIAEHGPTRCLVKNLRPLLAAYGVTAYLCGHDHNLQYLQDENGVGYVLSGAGNFMDPSVRHQRKVPNGYLRFHYGSEDSLGGFTYVEIGSKEMSITYVEASGKSLFKTSLPRRPRP

SEQ ID NO: 11894 - protein, 306 aa, Rattus norvegicus
TAPASTLRFVAVGDWGGVPNAPFHTAREMANAKEIARTVQIMGADFIMSLGDNFYFTGVHDANDKRFQETFEDVFSDRALRNIPWYVLAGNHDHLGNVSAQIAYSKISKRWNFPSPYYRLRFKVPRSNITVAIFMLDTVMLCGNSDDFVSQQPEMPRDLGVARTQLSWLKKQLAAAKEDYVLVAGHYPIWSIAEHGPTRCLVKNLRPLLAAYGVTAYLCGHDHNLQYLQDENGVGYVLSGAGNFMDPSVRHQRKVPNGYLRFHYGSEDSLGGFTYVEIGSKEMSITYVEASGKSLFKTSLPRRPRP

SEQ ID NO: 11895 - protein, 303 aa, Nostoc sp. PCC 7120
MNLKRRQFLFLSSLSAVGTGLLAWKFAHKYYQSSDLAIASPPKKDLLLRFVSVADTGTGARGQYAVARAMTLYHKQNPYDLVVLAGDNIYNNGEIEKVNAVFERPYQDLLKQGVKFQACLGNHDIRTDNGDPQVRYPGFNMNGRRYYTFRRDRVQFFALDTNSNADWQNQLTWLEKELSSSNAPWKVVFGHHPIYSSGVYGSNQAFIKTFTPLFQKYGVQLYINGHEHSYERTRAIDGTTYLTCGAGAGNRPVGRSKWTEYSTSDLSFATYEVYPDRIELNAIATNNRIFDRGIIRRVEVSGV

SEQ ID NO: 11896 - protein, 310 aa, Bacteroides thetaiotaomicron VPI-5482
MKIKSLFILLFLSVFTFAHAQLTDYSIFDKKFNFYVANDLSRNGYYDQKPIAELMGTMGEEIGPEFVLATGDVHHFDGVRSVNDPLWMTNYELIYSHPELMIDWFSILGNHEYRGSTQAVLDYTNISRRWSMPDRYYTKVFEEKGATIRIVWIDTTPLIDKYRNESDKYPDACKQDISKQLSWLESVLASAKEDWIIVAGHHPIYAYTPKEESERLDMQKRVDSILRKHNVDMYICGHIHNFQHIRVPGSDIDYVVNSAASLARKVEPIEGTKFCSPEPGFSVCSIDKKELNLRMIDKKGNVLYTVTRKK

SEQ ID NO: 11897 - protein, 336 aa, Arabidopsis thaliana
MATLKHKPVNLVFYVYNLIIIFSSHSSTAELRRLLQPSKTDGTVSFLVIGDWGRRGSYNQSQVALQMGEIGEKLDIDFVISTGDNFYDNGLTSLHDPLFQDSFTNIYTAPSLQKPWYSVLGNHDYRGDVRAQLSPMLRALDNRWVCMRSFIVNAEIVDLFFVDTTPFVDKYFIQPNKHVYDWSGVLPRQTYLNNLLKELDVALRESVAKWKIVIGHHTIKSAGHHGNTIELEKHLLPILQANEVDLYVNGHDHCLEHISSVDSNIQFMTSGGGSKAWKGGDVNYVEPEEMRFYYDGQGFMSVHVSEAELRVVFYDVFGHVLHHWKKTYKEALYFAS

SEQ ID NO: 11898 - protein, 366 aa, Arabidopsis thaliana
MTYIYRDTKITTKSTIPFLIFFLFCFSNLSMATLKHKPVNLVFYVYNLIIIFSSHSSTAELRRLLQPSKTDGTVSFLVIGDWGRRGSYNQSQVALQMGEIGEKLDIDFVISTGDNFYDNGLTSLHDPLFQDSFTNIYTAPSLQKPWYSVLGNHDYRGDVRAQLSPMLRALDNRWVCMRSFIVNAEIVDLFFVDTTPFVDKYFIQPNKHVYDWSGVLPRQTYLNNLLKELDVALRESVAKWKIVIGHHTIKSAGHHGNTIELEKHLLPILQANEVDLYVNGHDHCLEHISSVDSNIQFMTSGGGSKAWKGGDVNYVEPEEMRFYYDGQGFMSVHVSEAELRVVFYDVFGHVLHHWKKTYKEALYFAS

SEQ ID NO: 11899 - protein, 335 aa, Arabidopsis thaliana
MDSLRDVKPIKLIFSIFCLVIILSACNSTAELPRFVQPPEPDGSLSFLVVGDWGRRGSYNQSQVALQMGKIGKDLNIDFLISTGDNFYDDGIISPYDSQFQDSFTNIYTATSLQKPWYNVLGNHDYRGNVYAQLSPILRDLDCRWICLRSYVVNAEIVDIFFVDTTPFVDRYFDEPKDHVYDWRGVLPRNKYLNSLLTDVDVALQESMAKWKIVVGHHTIKSAGHHGNTIELEKQLLPILEANEVDLYINGHDHCLEHISSINSGIQFMTSGGGSKAWKGDVNDWNPQEMRFYYDGQGFMSVYTSEAELRVVFYDGLGHVLHRWSTLKNGVYSDI

SEQ ID NO: 11900 - protein, 364 aa, Arabidopsis thaliana
MTYIYRDTKITTKSTIPFLIFFLFCFSNLSMATLKHKPVNLVFYVYNLIIIFSSHSSTAELRRLLQPSKTDGTVSFLVIGDWGRRGSYNQSQVALQMGEIGEKLDIDFVISTGDNFYDNGLTSLHDPLFQDSFTNIYTAPSLQKPWYSGNHDYRGDVRAQLSPMLRALDNRWVCMRSFIVNAEIVDLFFVDTTPFVDKYFIQPNKHVYDWSGVLPRQTYLNNLLKELDVALRESVAKWKIVIGHHTIKSAGHHGNTIELEKHLLPILQANEVDLYVNGHDHCLEHISSVDSNIQFMTSGGGSKAWKGGDVNYVEPEEMRFYYDGQGFMSVHVSEAELRVVFYDVFGHVLHHWKKTYKEALYFAS

SEQ ID NO: 11901 - protein, 338 aa, Arabidopsis thaliana
MNSGRRSLMSATASLSLLLCIFTTFVVVSNGELQRFIEPAKSDGSVSFIVIGDWGRRGSFNQSLVAYQMGKIGEKIDLDFVVSTGDNFYDNGLFSEHDPNFEQSFSNIYTAPSLQKQWYSVLGNHDYRGDAEAQLSSVLREIDSRWICLRSFVVDAELVEMFFVDTTPFVKEYYTEADGHSYDWRAVPSRNSYVKALLRDLEVSLKSSKARWKIVVGHHAMRSIGHHGDTKELNEELLPILKENGVDLYMNGHDHCLQHMSDEDSPIQFLTSGAGSKAWRGDINPVTINPKLLKFYYDGQGFMSARFTHSDAEIVFYDVFGEILHKWVTSKQLLHSSV

SEQ ID NO: 11902 - protein, 339 aa, Arabidopsis thaliana
MSSKFDIGSLSIVMTLLICFLLLSLAPKLEAELATVQHAPNPDGSISFLVIGDWGRHGLYNQSQVALQMGRIGEEMDINFVVSTGDNIYDNGMKSIDDPAFQLSFSNIYTSPSLQKPWYLVLGNHDYRGDVEAQLSPILRSMDSRWICMRSFIVDAEIAELFFVDTTPFVDAYFLSPQDQTYDWSGVSPRKSYLQTILTELEMGLRESSAKWKIVVGHHAIKSASIHGNTKELESLLLPILEANKVDLYMNGHDHCLQHISTSQSPIQFLTSGGGSKAWRGYYNWTTPEDMKFFYDGQGFMSVKITRSELSVVFYDVSGNSLHKWDTSKMLDSDFYFPL

SEQ ID NO: 11903 - protein, 338 aa, Arabidopsis thaliana
MNSGRRSLISATASLSLLLCIFTTFVVVSNGELQRFIEPAKSDGSVSFIVIGDWGRRGSFNQSLVAYQMGKIGEKIDLDFVVSTGDNFYDNGLFSEHDPNFEQSFSNIYTAPSLRKQWYSVLGNHDYRGDAEAQLSSVLREIDSRWICLRSFVVDAELVEMFFVDTTPFVKEYYTEADGHSYDWRAVPSRNSYVKALLRDLEVSLKSSKARWKIVVGHHAMRSIGHHGDTKELNEELLPILKENSVDLYMNGHDHCLQHMSDEDSPIQFLTSGAGSKAWRGDINPVTINPKLLKFYYDGQGFMSARFTHSDAEIVFYDVFGEILHKWVTSKQLLHSSV

SEQ ID NO: 11904 - protein, 328 aa, Arabidopsis thaliana
MKMHVCFSVILMFLSIFFINGALSKLERLKHPVKKKSDGSLSFLVIGDWGRKGGFNQSLVAHQMGVVGEKLDIDFVISVGDNFYDDGLKGVNDPSFEASFSHIYTHPSLQKQWYSVLGNHDYRGNVEAQLSKVLTQKDWRWFCRRSFVLSSGMVDFFFADTNPFVEKYFTEPEDHTYDWRNVLPRNKYISNLLHDLDLEIKKSRATWKFVVGHHGIKTAGNHGVTQELVDQLLPILEENKVDLYINGHDHCLQHIGSHGKTQFLTSGGGSKAWRGHVQPWDPKELKLYYDGQGFMSLHITHSKAKFIYYDVSGNVLHRSSLSKRSAHL

SEQ ID NO: 11905 - protein, 328 aa, Arabidopsis thaliana
MKMHVCFSVILMFLSIFFINGALSKLERLKHPVKKKSDGSLSFLVIGDWGRKGGFNQSLVAHQMGVVGEKLDIDFVISVGDNFYDDGLKGVNDPSFEASFSHIYTHPSLQKQWYSVLGNHDYRGNVEAQLSKVLTQKDWRWFCRRSFVLSSGMVDFFFADTNPFVEKYFTEPEDHTYDWRNVLPRNKYISNLLHDLDLEIKKSRATWKFVVGHHGIKTAGNHGVTQELVDQLLPILEENKVDLYINGHDHCLQHIGSHGKTQFLTSGGGSKAWRGHVQPWDPKELKLYYDGQGFMSLHITHSKAKFIYYDVSGNVLLRSSLSKRSAHL

SEQ ID NO: 11906 - protein, 333 aa, Arabidopsis thaliana
MSSKFDIGSLSIVMTLLICFLLLSLAPKLEAELATVQHAPNPDGSISFLVIGDWGRHGLYNQSQVALQEMDINFVVSTGDNIYDNGMKSIDDPAFQLSFSNIYTSPSLQKPWYLVLGNHDYRGDVEAQLSPILRSMDSRWICMRSFIVDAEIAELFFVDTTPFVDAYFLSPQDQTYDWSGVSPRKSYLQTILTELEMGLRESSAKWKIVVGHHAIKSASIHGNTKELESLLLPILEANKVDLYMNGHDHCLQHISTSQSPIQFLTSGGGSKAWRGYYNWTTPEDMKFFYDGQGFMSVKITRSELSVVFYDVSGNSLHKWDTSKMLDSDFYFPL

SEQ ID NO: 11907 - protein, 351 aa, Arabidopsis thaliana
MDSLRDVKPIKLIFSIFCLVIILSACNSTAELPRFVQPPEPDGSLSFLVVGDWGRRGSYNQSQVALQMGKIGKDLNIDFLISTGDNFYDDGIISPYDSQFQDSFTNIYTATSLQKPWYNVLGNHDYRGNVYAQLSPILRDLDCRWICLRSYVVNAEIVDIFFVDTTPFDHVYDWRGVLPRNKYLNSLLTVTFFFLLYHKLVISSNSLKIRIIKLDVDVALQESMAKWKIVVGHHTIKSAGHHGNTIELEKQLLPILEANEVDLYINGHDHCLEHISSINSGIQFMTSGGGSKAWKGDVNDWNPQEMRFYYDGQGFMSVYTSEAELRVVFYDGLGHVLHRWSTLKNGVYSDI

SEQ ID NO: 11908 - protein, 314 aa, Arabidopsis thaliana
MDSLRDVKPIKLIFSIFCLVIILSACNSTAELPRFVQPPEPDGSLSFLVVGDWGRRGSYNQSQVALQMGKIGKDLNIDFLISTGDNFYDDGIISPYDSQFQDSFTNIYTATSLQKPWYNVLGNHDYRGNVYAQLSPILRDLDCRWICLRSYVVNAEIVDIFFVDTTPFVDRYFDEPKDHVYDWRGVLPRNKYLNSLLTDVDVALQESMAKWKIVVGHHTIKSAGHHGNTIELEKQLLPILEANEVDLYINGHDHCLEHISGINSGMQFMTSGGGFKAWKGDVNDWNLQEMRFTMMDKDSCRFTHSEAELPRRFL

SEQ ID NO: 11909 - protein, 304 aa, Arabidopsis thaliana
MKMHVCFSVILMFLSIFFINGALSKLERLKHPVKKKSDGSLSFLVIGDWGRKGGFNQSLVAHQMGVVGEKLDIDFVISVGDNFYDDGLKGVNDPSFEASFSHIYTHPSLQKQWYSVLGNHDYRGNVEAQLSKVLTQKDWRWFCRRSFVLSSVNMFCCGYRNGGFFLRGHKSFYLEIKKSRATWKFVVGHHGIKTAGNHGVTQELVDQLLPILEENKVDLYINGHDHCLQHIGSHGKTQFLTSGGGSKAWRGHVQPWDPKELKLYYDGQGFMSLHITHSKAKFIYYDVSGNVLHRSSLSKRSAHL

SEQ ID NO: 11910 - protein, 332 aa, Glycine max
MGTQRSKPSCTIVAIFLAFCCFVSSSKAKLESLQHAPKADGSLSFLVVGDWGRKGAYNQSLVAFQMGVIGEKLDVDFVISTGDNFYDNGLTGVFDPSFEESFTKIYTAPSLQKKWYNVLGNHDYRGNAKAQISHVLRYRDNRWVCFRSYTLNSENVDFFFVDTTPYVDKYFIEDKGHNYDWRGILPRKRYTSNLLKDVDLALRQSTATWKVVIGHHTIKNIGHHGDTQELLIHFLPLLKANNVDLYMNGHDHCLEHISSLDSSVQFLTSGGGSKAWRGDTKQSEGDEMKFYYDGQGFMSVHISQTQLRISFFDVFGNAIHKWNTCKFDSSDM

SEQ ID NO: 11911 - protein, 332 aa, Glycine max; identical to SEQ ID NO: 11910

SEQ ID NO: 11912 - protein, 352 aa, Glycine max
  unsure (1)..(352): unsure at all Xaa locations
EAFACFGVPVPLRAMTDISKSLLFTFTIIISFGLCILYASAELQRLSHSSKHDGALSFLVLGDWGRRGAYNQSQVSFQMEKFSCRXGKVGEKLDIDFVVSTGDNFYDNGLTSDHDNAFQESFTQIYTAKSLQKQWYSVLGNHDYRGDAEAQLSPVLREIDSRWLCLRSFIVDSELVEIFFVDTTPFVDEYFTEPPEHKYDWRGIGPQKPYITNLLKDLELALRGSTAKWRIVVGHHAIRSVGHHGDTQELINRLLPILQANNVHFYMNGHDHCLEHISDTESPIQFLTSGAGSKAWRGDIEGMNRRGVNFFYDGQGFMSVKLTQTDATIEFYDVFGNVLHRLTSSKQLHSSM

SEQ ID NO: 11913 - protein, 336 aa, Glycine max
  unsure (1)..(336): unsure at all Xaa locations
MASSLNQRMLFPLMFVIGMFCLMVTXXSIAELPIFKHPPKKQQSLNILVLGDWGRKGTYNQSLVANQMGIVGEKLDIDFVISTGDNFYEDGLKGVDDPAFYQSFVDMYTGPSLQKTWYTVLGNHDYRGDVGAQLSPILKQKDSRWLCMRSFILDGEIVEFFFVDTTPFVEEYFTDPGEHTYDWEGVLPRLAYLSELLKDVDLALAQSKAKWKMVVGHHTINSAGHHGSTEELKQLLVPILEANDVDAYINGHDHCLQHIIDNNSGIHFITSGGGSKAWSGDVKPWKLEELKLYYDGQGFMSMQITKSTAHIIFYDAFGKVLHTWSISKDRNVAAWI

SEQ ID NO: 11914 - protein, 352 aa, Glycine max
  unsure (1)..(352): unsure at all Xaa locations
NQNPQHKAFILFSDLVLRQHMGLQLVFIGTIALCLVVSSAVLERFEQALKQDGSLSFLIIGDWGRKGAYNQSKVAFQMGVIGQQLDIDFVISTGDNFYDSGLTGIDDPDFXXTASSLQKQWYSVLGNHDYRGNVEAQLSPVLTNLDKRWLCLRSFIVNAEIAEFFFVDTTPFVDKYFIEPKDHVYDWSGILPRKQYISNLLKDVDLALQQSNAKWKIVVGHHTIRSAGVHGNTDELVKQLLPILEANNIDLYINGHDHCLQHISSFDSAIQFLTCGGGSKAWRGVVNWWKPEEMKFYYDGQGVMSVKVPETEIDIVFYDVYGHVLHKWNTSKQLHASWXTSSRSNPRHLIMN

SEQ ID NO: 11915 - protein, 400 aa, Glycine max
  unsure (1)..(400): unsure at all Xaa locations
MAGLGIWMGFVSLCLLSVSVSGLLQRLEHPVKADGSLSLMVIGDWGRKGTYNQSQVATQMGRVAAKLNIDFVISTGDNFYDDGLTGIDDPAFEISFSKIYTAKSLQKQWYSVLGNHDYRGDVEAQLNPILQKIDPRWICQRSFIVDTEIAEFFFIDSTPFVDKYFLKPKDHKYDWRGVLPREKYLSKLLKDLEIALKDSTAKWKIXVVGHHPVRSIGHHGDTKELIRQLLPILEENXNVDMXYINGHDHCLEHISSRSSQIQFLTSGGGSKAWKGDMXIKIRKMGSSFTMMDKDLCPWSWKKPMPKLFISIFMGKFCMLXICPRGXVLLSLPYRRCFRVSVVAKGNDSYVFASINYSTKQNQRSVFNSFVLFHINEVRRWLLLYYICLQLIFNVRTESLS

SEQ ID NO: 11916 - protein, 165 aa, Glycine max
  unsure (1)..(165): unsure at all Xaa locations
TPLLTNRTAAVPVCLRPSTMARSSMAAVLAVLAVAALRCAXXAAAELPLVEHPAKNDGSLSLLVIGDWGRNGXYNQSRVADQMGKVGERLDIDFVVSTGDNFYEDGLTGVHDQQFEESFTNIYTAQSLQKPWYLVLGNYDYRGXALAQLEPXMRKLDERFVCMRX

SEQ ID NO: 11917 - protein, 194 aa, Glycine max
SSFSSGSIISIYIKLLPLAILINQNAHPKLSFFSIKFSDLNIWGCSLFSLVLALCLVVSSAVLERFEQALKQDGSLSFLVIGDWGRKGAYNQSKVAFQMGVIGQQLDIDFVISTGDNFYDSGLTGIDDPDFDDSFTKIYTASSLQKQWYSVLGNHDYRGNVEAQLSPVLTNLDKRWLCLRSFIGHAEEPEVFFL

SEQ ID NO: 11918 - protein, 140 aa, Glycine max
  unsure (1)..(140): unsure at all Xaa locations
QAFACFGVPVPVRAMXSXSMSFLXYLYHHHQLWLVHSSSAELQRLSHSSKHDGALSFLVLGDWGRRGAYNQSQVSFQMGKVGEKLDIDFVVSTGDNFYDNGLTSDHDNAFQXESFTQIYTGXQSLQKAWYSVLGNHDYRX

SEQ ID NO: 11919 - protein, 131 aa, Glycine max
  unsure (1)..(131): unsure at all Xaa locations
XTLKESYAVTSTAQRLYKQWDSMICNHDYWGDATAQLSPELREIDLPXVRLMLKIVDEELVDSFYGAPXXLWRPCWNESCGHRSEWRGIAPPYYYMSNLLIDVELRLRGSTANWTMDVNHHAIRCDEHHGX

SEQ ID NO: 11920 - protein, 71 aa, Glycine max
DLALQQSNAKWKIVVGHHTIRSAGLHGNTDELVKQLLPILEANNIDLYINGQDHCLQHIGSLGRKLHILTK

SEQ ID NO: 11921 - protein, 136 aa, Glycine max
  unsure (1)..(136): unsure at all Xaa locations
FQYXSSTSTLAKHEFTISQXFFNWDTELSISIFLNXILLSSFDLFVNXQNHLSLNHECWLXCSQIQFLTSGGGSKAWKGDMDKDKTDGIKFYYDGQGFMSAELEETNVKVVYYDILGKVLHVVNLPKGLGTSVSAI

SEQ ID NO: 11922 - protein, 80 aa, Glycine max
  unsure (1)..(80): unsure at all Xaa locations
XLKISTNNVSCILNLEPIRKSGHHGDTQELINRLLPILQANNVHFYMNGHDHCLEHISDTDEFMQIFTCNEAKIIYLSDX

SEQ ID NO: 11923 - protein, 331 aa, Phaseolus vulgaris
MAGLGVWLAFIGVCFLNVSALLQRLEHPVKADGSLSLVVIGDWGRKGTYNQSEVSAQMGRVGAKLNIDFVISTGDNFYDDGLSGVDDPAFELSFSKIYTAKSLQKQWYSVLGNHDYRGDVEAQLNTILQKIDPRWICQRSFIVDTEIAEFFFVDTTPFVDKYFLKPKDHTYDWTGVLPRDKYLSKLLKDLEIALKDSTAKWKIVVGHHPVRSIGHHGDTQELIRHLLPILEANDVDMYINGHDHCLEHISSTSSQIQFLTSGGGSKAWKGDHLIKMGKMGQRFTMMDKYLQVWRFKKSIPKLFIMIFLAKFCKLLICPRGYVMCMPYNSLI

SEQ ID NO: 11924 - protein, 312 aa, Ipomoea batatas
MAVYSGISMVLCLWVGVVFGVCLASAIVELPTFHHPTKGDGSLSFLVIGDWGRKGDYNQSQVAFQMGEIGDQLAIDFVVSTGDNFYDNGLTGEHDDAFTESFTDVYTAESLQKQWYSVLGNHDYRGDAEAQLSSHLRKLDSRWPCLRSFVVNTETVDLFFVDTTPFVEEYFNSPEHVYDWRGVFPQQTYTKNVLNGLEYALMKSTTKWRIVIGHHAIRSAGHHGDTKELVERLLPILRTYNVDLYMNGHDHSLEHISDDESPIQFMTSGAGSKAWRGDVTMDRKGVSFFYDGQGFMSVQLVETDIGIVFYGC

SEQ ID NO: 11925 - protein, 336 aa, Triticum aestivum
  unsure (1)..(336): unsure at all Xaa locations
MARSSMAAVLAVLAVAALRCAPAAAELPLVEHPAKNDGSLSLLVIGDWGRNGTYNQSRVAEQMGKVGERLDIDFVVSTGDNFYENGLTGVHDQQFEESFTNIYTAKSLQKPWYLVLGNHDYRGDALAQLDPVMRKLDERFVCMRSFVVNAEIVEFFFIDTTPFQLKYWTHPKDSHYDWRGVAPRENYIANLLKDLDEAMKKSTAKWKIAVGHHTMRSVSDHGDTEELLQLLLPVLKVNGIDFYINGHDHCLEHISSRDSPIQYFTSGGGSKAWRGVYQPNDDKLQFFYDGQGFMSLQLNQDQADFIFYDVSGKVLYKWSSRKTNYXXQPSIYVTAE

SEQ ID NO: 11926 - protein, 336 aa, Triticum aestivum
  unsure (1)..(336): unsure at all Xaa locations
MARSSMAAVLAVLAVAALRCAPAAAELPLVEHPAKNDGSLSLLVIGDWGRNGTYNQSRVADQMGKVGERLDIDFVVSTGDNFYEDGLTGVHDQQFEESFTNIYTAQSLQKPWYLVLGNHDYRGNALAQLDPVMRKLDERFVCMRSFIVNAEIVEFFFIDTTPFQLKYWTHPKDSHYDWRGVAPRENYIANLLKDLDEAMKKSTAKWKIAIGHHTIRSVSDHGDTKELLQLLLPVLKVNGIDFYINGHDHCLEHISSRDSPIQYFTSGGGSKAWRGVYQPNDDKLQFFYDGQGFMSLQLNQDQADFIFYDVSGKVLYKWSSRKTNYXXQPSIYVTAE

SEQ ID NO: 11927 - protein, 382 aa, Triticum aestivum
  unsure (1)..(382): unsure at all Xaa locations
NLRDCPHRARFFLAPRRRRRHQPTILPPLVSLHPVQIESARSKITQSLDSAAVXVLRGSMSMAFSCASXSPARPRRHRQVPGRSSXAERLFVPDWGRRRGYXQPTALQEKGAEVADVSGSXVGMGSSGLVAAVVEVGIVVEGGDGVGMATXSLHNPWYLVLGNHHYRRNALAQVDPFMRKLDERFMRMRSFIVNAXIGXLFLIXDTTPFQLKYWTYPKDSHYDWRGVAPLENYIANLLKDLDEAMKKSTAKWKIAIGHHTIRSVSDHGDTEELLQLLLPVLKVNGIDFYINGHDHCLEHISSRDSPIQYFTSGGGSKAWRGVYQPNDDKLQFFYDGQGFMSLQLNQDQADFIFYDVSGKVLYKWSSRKTNYXXQPSIYVTAE

SEQ ID NO: 11928 - protein, 346 aa, Zea mays
MAQGSRSAAVPAAASFFALLAVAPLLLCCAPAAAELARLEHPAKDGGSLSLLVVGDWGRKGTFNQSRVAHQMGRVGEQLSIDFVISTGDNFYENGLTGTDDEAFEQSFTDIYTAKSLQKPWYLVLGNHDYRGDALAQLSPVLRKIDSRFICIKSFVVNAEIVEFFFVDTTPFQLKYWTHPKDDHYDWRGVAPREKYINNLLKDLDGAMKRSTAAWKVAVGHHTMKSVSDHGDTKELLQLLLPVLQANGVDFYINGHDHCLEHISSRDSPIQYFTSGGGSKAWRGVQNPTEDDLKFFYDGQGFMSLQLDRSQAKFTFYDVDGKALYSWSSLMETGHHLQASGYVNEE

SEQ ID NO: 11929 - protein, 335 aa, Zea mays
  unsure (1)..(335): unsure at all Xaa locations
MANRSVAMGVALAFVAMTALCCAPGAAELPRLDHPARSDGSLKLLVVGDWGRKGTHNQSRVADQMGRVGEKLDIDFVISTGDNFYKDGLKGVRDQAFEESFVDIYTAQSLQKPWYSVLGNHDYRGNALAQLSPVLRKIDDRFICMRSFIVNAELVDFFFVDTTPFQLEYWTHPGKDRYDWRGVAPRGKYIANLLKDLDVAMKKSTARWKIVAGHHTMRSVSEHGDTKELLELLLPVLKDNGVDFYINGHDHCLEHISSRDSPLQYFTSGGGSKAWRGVFHPNKDKLRFFYDGQGFMSLQLNQDQAHFIFYDVFGNILYRWSXXRHPQPSTYLDEE

SEQ ID NO: 11930 - protein, 347 aa, Zea mays
MAQGSRSAAVPAAASFFALLAVAAPLLLCCAPAAAELARLEHPPKDGGSLSLLVVGDWGRKGTFNQSRVAHQMGRVGEQLSIDFVISTGDNFYENGLTGTDDEAFEQSFTDIYTAKSLQKPWYLVLGNHDYRGDALAQLSPVLRKIDSRFICIKSFVVNAEIVEFFFVDTTPFQLKYWTHPKDDHYDWRGVAPRENYINNLLKDLDGAMKTSTAAWKVAVGHHTMRSVSDHGDTKELLQLLLPVLQANGVDFYINGHDHCLEHISSRDSPIQYFTSGGGSKAWRGVQNPTEDDLKFFYDGQGFMSLQLDRSQAKFTFYDVDGKALYSWSSLMETGHHLQASGYINEE

SEQ ID NO: 11931 - protein, 346 aa, Zea mays
MAQGSRSAAVPAAASFFALLAVAPLLLCCAPAAAELARLEHPAKDGGSLSLLVVGDWGRKGAFNQSRVAHQMGRVGEQLSIDFVISTGDNFYENGLTGTDDEAFEQSFTDIYTAKSLQKPWYLVLGNHDYRGDALAQLSPVLRKIDSRFICMKSFVVNAEIVEFFFVDTTPFQLKYWTHPKDDHYDWRGVAPREKYINNLLKDLDGAIKRSTAAWKVAVGHHTMRSVSDHGDTKELLQLLLPVLQANGVDFYINGHDHCLEHISSKDSPIQYFTSGGGSKAWRGVQNPTEDDLKFFYDGQGFMSLQLDRSQAKFTFYDVDGKALYSWSSLMETGHHLQASGYVNEE

SEQ ID NO: 11932 - protein, 347 aa, Zea mays
  unsure (1)..(347): unsure at all Xaa locations
MAQGSRSATVPAAASFFALVAVAPAAPXCCAPAAAELARLEHPAKDGGSLSLLVVGDWGRKGTFNQSRVAHQMGRVGEQLSIDFVISTGDNFYENGLTGTDDEAFEQSFTDIYTAKSLQKPWYLVLGNHDYRGDALAQLSPVLRKIDSRFICIKSFVVNAEIVEFFFVDTTPFQLKYWTHPKDDHYDWRGVAPRENYINNLLKDLDGAMKTSTAAWKVAVGHHTMRSVSDHGDTKELLQLLLPVLQANGVDFYINGHDHCLEHISSRDSPIQYFTSGGGSKAWRGVQNPTEDDLKFFYDGQGFMSLQLDRSQAKFTFYDVDGKALYSWSSLMETGHHLQASGYINEE

SEQ ID NO: 11933 - protein, 348 aa, Zea mays
MAQGSRSAGVPVRQPSFFALVAVAAPLLLCCAPAAAELARLEHPAKDGGSLSLLVVGDWGRKGTFNQSRVAHQMGRVGEQLSIDFVISTGDNFYENGLTGTDDEAFEQSFTDIYTAKSLQKPWYLVLGNHDYRGDALAQLSPVLRKIDSRFICIKSFVVNAEIVEFFFVDTTPFQLKYWTHPKDDHYDWRGVAPRENYINNLLKDLDGAMKTSTAAWKVAVGHHTMRSVSDHGDTKELLQLLLPVLQANGVDFYINGHDHCLEHISSRDSPIQYFTSGGGSKAWRGVQNPTEDDLKFFYDGQGFMSLQLDRSQAKFTFYDVDGKALYSWSSLMETGHHLQASGYVNEE

SEQ ID NO: 11934 - protein, 335 aa, Zea mays
  unsure (1)..(335): unsure at all Xaa locations
MANRSVAMGVAVAFVAMTALCCAPGAAELPRLDHPARSDGSLKLLVVGDWGRKGTHNQSRVADQMGRVGEKLDIDFVISTGDNFYKNGLKGVRDQAFEESFMDIYTAQSLQKPWYSVLGNHDYRGNALAQLSPVLRKIDDRFICMRSFIVNAELVDFFFVDTTPFQLEYWTHPGKHRYDWRGVAPRGKYIANLLKDLDVAMKKSTARWKIVVGHHTMRSVSEHGDTEELLELLLPVLKDNGVDFYINGHDHCLEHISSRDSPLQYFTSGGGSKAWRGVFHPNKDKLRFFYDGQGFMSLQLHQDQAHFIFYDVFGNILYRWSXXRHPQSSMYLDEE

SEQ ID NO: 11935 - protein, 337 aa, Zea mays
  unsure (1)..(337): unsure at all Xaa locations
MANRSVAMGVAVAFVAMTALCCAPGAAELPRLDHPARSDGSLKLLVVGDWGRKGTHNQSRVADQMGRVGEKLDIDFVISTGDNFYKNGLKGVRDQAFEESFMDIYTAQSLQKPWYSVLGNHDYRGNALAQLSPVLRKIDDRFICMRSFIVNAELVDFFFVDTTPFXQLEYWTHPGKHRYDLXRGVAPRGKYIANLLKDLDVAMKKSTARWKIVVGHHTMRSVSEHGDTEELLELLLPVLKDNGVDFYINGHDHCLEHISSRDSPLQYFTSGGGSKAWRGVFHPNKDKLRFFYDGQGFMSLQLNQDQAHFIFYDVFGNILYRWSXXRHPQPSTYLDEE

SEQ ID NO: 11936 - protein, 308 aa, Zea mays
  unsure (1)..(308): unsure at all Xaa locations
MANRSVAMGVAVAFVAMTALCCAPGAAELPRLDHPARSDGSLKLLVVGDWGRKGTHNQSRVADQMGRVGEKLDIDFVISTGDNFYKNGLKGVRDQAFEESFMDIYTAQSLQKPWYSVLGNHDYRGNALAQLSPVLRKIDDRFICMRSFIVNAELVDFFFVDTTPFLEYWXSPGQASYEWXPRQXYIANLXXSVSEHGDTKELLELLLPVLKDNGVDFYINGHDHCLEHISSRDSPLQYFTSGGGSKAWRGVFHPNKDKLRFFYDGQGFMSLQLNQDQAHFIFYDVFGNILYRWSXXRHPQPSTYLDEE

SEQ ID NO: 11937 - protein, 258 aa, Zea mays
  unsure (1)..(258): unsure at all Xaa locations
MARGSMAAVLAVLAVAALRCAPAAAELPLVEHPAKNDGSLSLLVVGDWGRNGTYNQSRVAEQMGKVGERLDIDFVVSTGDNFYENGLTGVHDQQFEESFTNIYTAQSLQKPWYLVLGNHDYRGDALAQLDPVMRKLDERFVCMRSFVVNAEMVEFFFIDTTPFQLKYWTHPKDSHYDWXRGVAPRENYIANLLKDLDEAMKKSTAKWKIAVGHHTMRSVSDHGDTEELLQLLLPVLEVNGIDFYINGHDHCFEHITSX

SEQ ID NO: 11938 - protein, 285 aa, Zea mays
  unsure (1)..(285): unsure at all Xaa locations
MAQGSRSAAVPAAACFFALLAEAPLLLCCAPAAAELARLEHPAKDGGSLSLLVVGDWGRKGTFNQSRVAHQMGRVGEQLSIDFVISTGDNFYENGLTGTDDEAFEQSFTDIYTANSLQKPWYLVLGNHDYRGDALAQLSPVLRKIDSRIICIKSFVVNAGIVEFFFVDTTPVRLKYWTHPKDDHYDWRGVAPRENYINNLLKDLDGAMKTSTXAAWKVAVGHHXTMRSVSDHGDTKELLQLLLPVLQPTGVDFYINGHDHCLEXISSRDSPIRTVSVMAFWVAVI

SEQ ID NO: 11939 - protein, 419 aa, Caenorhabditis elegans
MLLVDEKLEKRSSSSSLDRFLPDLPQKVKSRRKMRKIMCFVGLFGISTIFFIAVSNISSSEDVPLYNGNIYDPERDSKSFRILLVGDTGGIPILETTWAQNEVKQTMASLADEHSVQMILNMGDNIYFTGPTDEFDPRFESRFENVYTNPSLQVPWLTIAGNHDHFGNVTAEIEYTKHSKKWYFPSLYYKKSVEFNGTSIDFLMIDTISLCGNTKDIQNAGFIEMLRNESHDPRGPVNITAAEEQWAWLENNLEASSAQYLIISGHYPVHSMSSHGPTDCLRQRLDPLLKRFNVNAYFSGHDHSLQHFTFPGYGEHIINYVVSGAASRADASTKHIKEFSRDTLKFNYPEKSWFSWSPVSQLGFRKGGLIYAEFGHYNARLDFFDKRGKQLYSTIIPTRVIPTDTSTRSTASPFVEIGM

SEQ ID NO: 11940 - protein, 305 aa, Nostoc punctiforme
MNLKRRQFLFLSSFSAIGTGFLAWMLADKNHQSADITDSTTAIAANPVKKDLLLRFVSVADTGTGARGQYAVAGAMNAYHKQNPYDLVVLAGDNIYNNGEIEKISAVFERPYQPLLKQGVKFQACLGNHDIRTDNGDPQVKYIGFNMKGRYYTFKRNQVQFFALDTNSNADWKNQLPWLEKELSISNAPWKVVFGHHPIYSSGQYGSNADFIKTFTPLFQKYGVQLYINGHEHNYERTRAIDGTTYLICGAGAGNRPVGRSEWTKYSTSDLSFASYEVYKDRIEISAIATDNRVFDKGIIQLKSA

SEQ ID NO: 11941 - protein, 325 aa, Homo sapiens
MDMWTALLILQALLLPSLADGATPALRFVAVGDWGGVPNAPFHTAREMANAKEIARTVQILGADFILSLGDNFYFTGVQDINDKRFQETFEDVFSDRSLRKVPWYVLAGNHDHLGNVSAQIAYSKISKRWNFPSPFYRLHFKIPQTNVSVAIFMLDTVTLCGNSDDFLSQQPERPRDVKLARTQLSWLKKQLAAAREDYVLVAGHYPVWSIAEHGPTHCLVKQLRPLLATYGVTAYLCGHDHNLQYLQDENGVGYVLSGAGNFMDPSKRHQRKVPNGYLRFHYGTEDSLGGFAYVEISSKEMTVTYIEASGKSLFKTRLPRRARP

SEQ ID NO: 11942 - protein, 323 aa, Homo sapiens
MDMWTALLILQALLLPSLADGATPALRFVAVGDWGGVPNAPFHTAREMANAKEIARTVQILGADFILSLGDNFYFTGVQDINDKRFQETFEDVFSDRSLRKVPWYVLAGNHDHLGNVSAQIAYSKISKRWNFPSPFYRLHFKIPQTNVSVAIFMLDTVTLCGNSDDFLSQQPERPRLTARTQLSWLKKQLAAAREDYVLVAGHYPVWSIAEHGPTHCLVKQLRPLLATYGVTAYLCGHDHNLQYLQDENGVGYVLSGAGNFMDPSKRHQRKVPNGYLRFHYGTEDSLGGFAYVEISSKEMTVTYIEASGKSLFKTRLPRRARP

SEQ ID NO: 11943 - protein, 323 aa, Homo sapiens [sequence omitted]

SEQ ID NO: 11944 - protein, 340 aa, Sus scrofa
MDTWTVLLILQASLVLPGAVGTRTNTRTAPTPILRFVAVGDWGGVPNAPFHTAREMANAKAIATTVKTLGADFILSLGDNFYFTGVHDAKDKRFQETFEDVFSDPSLRNVPWHVLAGNHDHLGNVSAQIAYSKISKRWNFPSPYYRLRFKIPRSNVSVAIFMLDTVTLCGNSDDFVSQQPERPRNLALARTQLAWIKKQLAAAKEDYVLVAGHYPVWSIAEHGPTHCLVKQLLPLLTTHKVTAYLCGHDHNLQYLQDENGLGFVLSGAGNFMDPSKKHLRKVPNGYLRFHFGAENSLGGFAYVEITPKEMSVTYIEASGKSLFKTKLPRRARSEHQHRRA

SEQ ID NO: 11945 - protein, 313 aa, Sus scrofa
TAPTPILRFVAVGDWGGVPNAPFHTAREMANAKAIATTVKTLGADFILSLGDNFYFTGVHDAKDKRFQETFEDVFSDPSLRNVPWHVLAGNHDHLGNVSAQIAYSKISKRWNFPSPYYRLRFKIPRSNVSVAIFMLDTVTLCGNSDDFVSQQPERPRNLALARTQLAWIKKQLAAAKEDYVLVAGHYPVWSIAEHGPTHCLVKQLLPLLTTHKVTAYLCGHDHNLQYLQDENGLGFVLSGAGNFMDPSKKHLRKVPNGYLRFHFGAENSLGGFAYVEITPKEMSVTYIEASGKSLFKTKLPRRARSEHQHRRA

SEQ ID NO: 11946 - protein, 338 aa, Sus scrofa
MDTWTVLLILQASLVLPGAVGTRTNTRTAPTPILRFVAVGDWGGVPNAPFHTAREMANAKAIATTVKTLGADFILSLGDNFYFTGVHDAKDKRFQETFEDVFSDPSLRNVPWHVLAGNHDHLGNVSAQIAYSKISKRWNFPSPYYRLRFKIPRSNVSVAIFMLDTVTLCGNSDDFVSQQPERNLALARTQLAWIKKQLAAAKEDYVLVAGHYPVWSIAEHGPTHCLVKQLLPLLTTHKVTAYLCGHDHNLQYLQDENGLGFVLSGAGNFMDPSKKHLRKVPNGYLRFHFGAENSLGGFAYVEITPKEMSVTYIEASGKSLFKTKLPRRARSEHQHRRA

SEQ ID NO: 11947 - protein, 325 aa, Oryctolagus cuniculus
MDTWTLLLVLHTSLLLPWAEGATPTLRFVAVGDWGGVPNAPFHTAREMANAKQIGKVVQMLGAHFILSLGDNFYFSGVQSVSDKRFQETFEDVFSDRSLQNVPWYVLAGNHDHIGNVSAQIAYSKVSKRWNFPSPFYRLRFRIPRTNVSVAIYMLDTVTLCGNSNDFLSQQPERPRNLELARTQLAWLKRHLADAKEDYVLVAGHYPVWSIAEHGPTHCLVKKLQPLLVKYGVTAYLCGHDHNLQYLQDENGVGYVLSGAGNFMDPSTQHQRSVPNGYLRFHYGAENSLGGFAYLEITPKEMTVTYMEASGKSLFKTRLPKRAKA

SEQ ID NO: 11948 - protein, 142 aa, Aphanizomenon baltica
GDNIYNNGEIEKINQVFELPYQPLLKNGVKFHACLGNHDIRTDNGVPQVKYPGFNMQGRYYTFTQNQVQFFALDTNNNADWQNQLIWLEKELSSSQNPWKIVFGHHPIYSSGQYGSNKNFIKIFTPLFKKYNVQLYINGHEH

SEQ ID NO: 11949 - protein, 286 aa, Triticum aestivum
  unsure (1)..(286): unsure at all Xaa locations
XVAEQMGVVGEKLAADFVISTGDNFYNDGLAGDNDTAFFTSFTDIYTASSLQKPWYIVLGNHDYTGDALAQQSPAIREVDSRWTSVNKSFIVEADIVDFFLVDTSPFVLKYWNESKFDWRNVAPRDTYIATLLQDLDDALAASNATWKVVVGHHPVSSGCEHGNTTELREHLLPLLKAHGVDMYLNGHDHCLQRISSIDSPVEFVTSGGGSKAWAGKFKATSDKMEFLYDGQGFLSMKLTATEAHLAFYDVSGAVLHSWGLTKSADARIISXADHRGRQDRCKPAV

SEQ ID NO: 11950 - protein, 142 aa, Nodularia spumigena
GDNIYNNGEIEKIGAVFERPYQELLTQGVKFHACLGNHDIRTENGDPQIKYPGFNMRGRYYTFRRDAVQFFALDTNHNADWKNQVVWLEQELSRSDAPWKVVFGHNPFYSSGHYGVNQTLIKRFTPLFKQYNVQLYINGHEH

SEQ ID NO: 11951 - protein, 142 aa, Aphanizomenon sp. TR183
GDNIYNNGEIEKINEVFERPYQPLLKNGVKFHACLGNHDIRTDNGVPQVKYPGFNMQGRYYTFSQNKVQFFALDTNGNADWKNQLIWLDKELSLSKAPWKVVFGHHPIYSSGHYGNNTSFIKTFTPLFKKYNVQLYINGHEH

SEQ ID NO: 11952 - protein, 174 aa, Prunus armeniaca
WPSNYSNPTMPSNCNGTKFDDRKVYPQLRSKLKRSWPDVESGNDTKFWESEWNKHGTCSEQTHNQMQYFERSHAMWYSHNITEILKNASIVPHPTQTWTYSDIVSAIKSKTQRTPLLRCKPQPKTKSQTKAQPKSQANSLLLHEVVLCYGYNALKLIDCNRTGGCQNQQAISFQ

SEQ ID NO: 11953 - protein, 256 aa, Oryza sativa (japonica cultivar-group); identical to SEQ ID NO: 565

SEQ ID NO: 11954 - protein, 240 aa, Hordeum vulgare
MKLVVLSALLLLSLVAVSSAEEFDFFYLVQQWPGSFCDTKKGCCFPDTGKPATDFGIHGLWPNYAECKTRGELDGALEMVTRRRKKCWPESCNSERLKLWEIRDLVTELDANWPTLACKGGKSFEFWTHEWEKHGTCSNLDQHGYLATALGFKARHNLTSILADAGIVPSDTETYFLSSIRDAIREGTGFTANLECNRGVDGETQLFQVYQCIDRDGENLIDCPLPMQGNCKDRVQLPAF

SEQ ID NO: 11955 - protein, 248 aa, Triticum aestivum
PRVRKLGEDELVVLSALLLLSLVAVSSAEEFDFFYLVQQWPGSFCDTKKGCCFPDTGKPATDFGIHGLWPNYAKCKTRGELDGALEMVTKRKKKCWPENCNSERLKLWEIKDLVTELDANWPTLACKGGKSIEFWTHEWEKHGTCSNLDQHGYFATALGFKARHNLTGILADAGIVPSDSETYFLSSIRDAIKEGTGFTANLECNRGVAGETQLFQVYQCIDSAGENLIDCPLPMQGNCKDRVQLPAF

SEQ ID NO: 11956 - protein, 245 aa, Triticum aestivum
  unsure (1)..(245): unsure at all Xaa locations
SPTRPLVVGLWVLLLLSLLAVSSGEEFDVFYLGQQWPGSFCDTKKGCCFPDTGXPATDFGIHGLWPNYAKCKTRGELDGALEMVTKRKKKCWPENCNSERLKLWEIKDLVTELDANWPTLACKGGKSIEFWTHEWEKHGTCSNLDQHGYFKTALGFKARHNLXTGILADAGIVPSDSETYFLSSIRDAIKEGTGFTANLECNRGVAGETQLFQVYQCIDRAGKNLIDCPLPMQGNCKDRVQLPAF

SEQ ID NO: 11957 - protein, 261 aa, Zea mays
MKLATAFVVLLSSLLPDSSTAEDFDFFYLVQQWPGSFCDTRQGCCFPDGAGKPAAAFGIHGLWPNYAKCRGRHHREGGGLARAVLGADDAFLAAVGRRGKCWPEYCGGGGDGDGGHQLSPWDVRDLVASLGRSWPTLSCKNRRSFEFWSYEWKKHGTCSNLDPHDYFARALQLRERHDLAAVLADAGIVPSDTDTYPVDRVRDAIAQGTGFVANLECNRDADGEAQLFQVYQCVDREAKDLIDCPLPMPTKCTDRVKLPVF

SEQ ID NO: 11958 - protein, 123 aa, Solanum carolinense
EQHAMLNDCGKKFNDIMDPRESKELDKRWPDLKNRESIATKTQSFWRYEYNKHGTCCSERYNQKEYFDLAMNLKDKFDLLQILKSQGITPGDSYPVDKIEQAIRAVTHEYPNLNCIDNRKKLM

SEQ ID NO: 11959 - protein, 88 aa, Prunus mume
FVQQWPPTTCRVRKRPCTKPRPLQIFTIHGLWPSNYSDPWKPSNCSGSQFKDGKVYPQLRSKLKKSWPDVESGNDTKFWEGEWNKHGR

SEQ ID NO: 11960 - protein, 88 aa, Prunus mume
FVQQWPPTTCKLSSRPSCKHRPLQIFTIHGLWPSNYSNPTRPSNCIGSKYNDSKLYPKLRSKLKRSWPNVETDNDTKFWEGEWNKHGR

SEQ ID NO: 11961 - protein, 85 aa, Prunus mume
FVQQWPPTTCRFRKKCFKPRPLQIFTIHGLWPSNYSSPTKPSSCTGSEFKELPPRLRPKLKISWPNVESSNDTKVWEHEWDKHGT

SEQ ID NO: 11962 - protein, 88 aa, Prunus mume
FVQQWPPATCIRSNKPCTKHRPLPIFTIHGLWPSNYSNPRMPSNCRGSLFETRKLSPELQSKLKRSWPNVETDNDTKLWEHEWNKHGR

SEQ ID NO: 11963 - protein, 285 aa, Rhodobacter sphaeroides
MPCTSSSCIPQKSAIWRNERVVLSISQTAVALDISGLFIGRSSANLDHAGKTAAAGPRLLVFGKFTLAYNAVPPRGEVKMRLLAFTLALAAAPALADHDRAGDFTHYILALSWEPTWCALEGEARGAEECSWGRGFVLHGLWPQREQGWPAFCLTTERDPSRRETAGMADLIAPGLAWHQWKKHGRCAGLPATDYFALMRRAVERVVVPEPLRHLPVDISLPPRVLEEAFTEANPGLAPEGITVACEAGHVQEVRICLTKDLDFRPCALEARPDCPLPLAKMDRP

SEQ ID NO: 11964 - protein, 146 aa, Crataegus monogyna
AVCNFNPTPCKDPPDKLFTAHGLWPSNSNGNDPEYCKAPPYHTIKILEPQLVIIWPNVLNRNDHEGFWRRQWDKHGSCASSPIQNQKHYFDTVIKMYTTQKQNVSEILSKANIKPGRKNRTLVDIENAIRNVINNMTPKFKCQKNT

SEQ ID NO: 11965 - protein, 146 aa, Crataegus monogyna
AVCNSNPTPCKDPPDKLFTVHGLWPSDSNRNDPKYCQAPPYQTMKILEPQLAIIWPNVLNRNDHEAFWRKQWDKHGSCASAPIQNQTHYFDTVIKMYTTRKQNVSEILSKANIKPGRKSRRLVDIENAIRNVINNMTPKFKCQKNT

SEQ ID NO: 11966 - protein, 252 aa, Agrobacterium tumefaciens str. C58 (U. Washington)
MKRYAGFIALGLLSLAALWFAQEKPVSKGPENDRQTPAQQQSAARPQQNTARQNADNAQPPRGTGFDFYVLSLSWSPAFCASSEGSGNRQQCGSDRRYGFVVHGLWPQNENGYPEFCQSSEPERVPDAIGRSMFDIMPSMGLIGHQWRKHGACSGLSQKDYFAATRAAFDAIRLPGKISSGAQTNTLSADAIETAFTDANPGLSKRAVSISCDGRRLEEVRICLNKDMAFRDCPELDRKGCRASATEIIPIR

SEQ ID NO: 11967 - protein, 262 aa, Agrobacterium tumefaciens str. C58 (Cereon)
MVQFPGNMHGMKRYAGFIALGLLSLAALWFAQEKPVSKGPENDRQTPAQQQSAARPQQNTARQNADNAQPPRGTGFDFYVLSLSWSPAFCASSEGSGNRQQCGSDRRYGFVVHGLWPQNENGYPEFCQSSEPERVPDAIGRSMFDIMPSMGLIGHQWRKHGACSGLSQKDYFAATRAAFDAIRLPGKISSGAQTNTLSADAIETAFTDANPGLSKRAVSISCDGRRLEEVRICLNKDMAFRDCPELDRKGCRASATEIIPIR

SEQ ID NO: 11968 - protein, 229 aa, Brucella suis 1330
MLRTLAAARAILLATGFSAAIGFSPAKADDRDGGRPGDFDFYVLSLSWSPSYCASQGPRANQQQCGVRRPFGFVVHGLWPQNERGYPANCQVDNMRSRGSYVPRRIISSLSDIIPSAGLIAHQWRKHGSCSGLPQNDYFATVRNAFEKVNIPPSLRNLATERRVDPLLVEKAFIAANPGMKPDGISIACKRNYLQEVRICMTRDLQYRSCDEVDANACRSRSVIMPAMQ

SEQ ID NO: 11969 - protein, 258 aa, Pseudomonas fluorescens PfO-1
MQVLPCVMRLQHGHDSISVWPSDGQTTETTDTRVPRNGNMKKLFTIMALIALTVGSIGLSSARQSSASKAESVAGVFDYYLLTLSWSPTFCLTHKDDPQCTGKGYGFVLHGLWPQYAKGGWPESCPPLTNLSAAETAKGLTLFPTKKLLDHEWSKHGTCSGLGAMGYLDEADKAVGAVKIPQELQPFSSSYYFEAQEIADLFRRSNPGIPSDGIAVICNGPELSEVRVCMGKDLQFGACGKGVKTQCRAGDIRVPPSR

SEQ ID NO: 11970 - protein, 384 aa, Shewanella oneidensis MR-1
MTALFSLPIRKRDSQPVTLCRHLQGVLGLLLIGLTPITTVAAPATGEFIANKRCELFQSKNKQTNPDDWQSNIGERYPVAELLGNSANPDWLRVRTNAITSPLRWIKGDCGQYHASVAAETYQPSSSGKPVQTTTASDINAINSESLKEHGTSEKRQGNLCQIEDNYDSHVLALSWQSTFCELYGSRKAECRALRQTTDAPQWQHFSLHGLWPNRQQCGTRYGFCSSVKQQPSDFCDYPEVPLNASVQKNLEEVMPSARYGTCLERHEWWKHGTCRDQDPNDYFLLATQLTQEVNASVWVKEFIHQRIGKKVTQKELNQSFDTSFGQGAHTKVTLDCAKGLLNEIRINLPQEIKLSDSIPSLLAKAPKAKKTNCPDPLLIDMPN

SEQ ID NO: 11971 - protein, 225 aa, Brucella melitensis 16M
MAAARAILLATGFSAAIGFSPAKADDRDGGRPGDFDFYVLSLSWSPSYCASQGPRANQQQCGVRRPFGFVVHGLWPQNERGYPANCQVDNMRSRGSYVPRRIISSLSDIIPSAGLIAHQWRKHSSCSGLPQNDYFATVRNAFEKVNIPPSLRNLATERRVDPLLVEKAFIAANPGMKPDGISIACKRNYLQEVRICMTRDLQYRSCDEVDANACRSRSVIMPAMQ

SEQ ID NO: 11972 - protein, 277 aa, Nicotiana glutinosa
MTFLPVHAIVNLRMLFLLIGACCILVGVNGGWDGEVGLLRRGRGGAGGGYQREFDYFKLSLQWPGTYCRRTRRCCSSNACCSRSNSPPVFTIHGLWTEYNDGTWPACCSGKAFDEREISTLLEPLRKYWPSLSCGSPRSCHHRKGPFWAHEWEKHGTCAYPVVHDEYEFFLTTLNIYFKYNVTEVLFEAGYVPSDSEKYPLGGIISSIENAFHATPELTCSGDALEELRICFYKNFEPRDCARDTSALSRGSCPQYVSLPAHGSWDEIRISNTTAAS

SEQ ID NO: 11973 - protein, 146 aa, Sorbus aucuparia
AACNSNPTPCKDPPDKLFTVHGLWPSDSNGNDPKYCKAPPYQTMKILEPQLVIIWPNVLNRNDHEVFWRKQWDKHGSCASSPIQNQTHYFDTVIKMYTTQKQNVSEILSKANIKPGRKSRRLVDIENAIRNVINNMTPKFKCQKNT

SEQ ID NO: 11974 - protein, 259 aa, Arabidopsis thaliana
MASRLCLLLLVACIAGAFAGDVIELNRSQREFDYFALSLQWPGTYCRGTRHCCSKNACCRGSDAPTQFTIHGLWPDYNDGSWPSCCYRSDFKEKEISTLMDGLEKYWPSLSCGSPSSCNGGKGSFWGHEWEKHGTCSSPVFHDEYNYFLTTLNLYLKHNVTDVLYQAGYVASNSEKYPLGGIVTAIQNAFHITPEVVCKRDAIDEIRICFYKDFKPRDCVGSQDLTSRKSCPKYVSLPEYTPLDGEAMVLKMPTEREAL

SEQ ID NO: 11975 - protein, 252 aa, Sinorhizobium meliloti
MLEYKKLKRISRIRSNATRFWLLPAIVVLGTLVGCGGEDGSQTAPNPSKDLARSASIAPAPVGTGFDFYVLSLSWSPTWCDANDPKGKSDQCETGSGHGLIVHGLWPQNENGYPEYCRTRHSDRVPESLGRQYFDLIPSMGLIGHQWRKHGTCSGLSQRDYFAVTRAAHERLTIPPELTTADGAESLSVQAIEAAFEKKNSGMTSESIAVTCEGRLLEEIRICFDKELKFRACPQVDRQACRRDTVSLPPAP

SEQ ID NO: 11976 - protein, 281 aa, Glycine max
  unsure (1)..(281): unsure at all Xaa locations
MPPLTLWLVLPFLVLLAAATTSPTRATTVASSFHGQREFDYFAFALQWPGTYCKRTRSCCPTNGCCRGSNFPTVFTIHGLWPDYNDGTWPSCCSGSSFDPKEILTLTNSLEQYWPSLSCSKPSLCHGGKGTFWAHEWEKHGTCSYPVFRNEYDYFVAVLNLYFKYNVTSVLNDAGYVPSNTEKYPLGGIISAIENAFHASPQIVCSKDSVEELRLCFYKDFQPRDCALGSDIKINMVTSKKSCPKYVSLPEPVSVSKTAMDFKVGAMMMXLFKVMVLYFYL

SEQ ID NO: 11977 - protein, 281 aa, Glycine max; identical to SEQ ID NO: 11976
  unsure (1)..(281): unsure at all Xaa locations

SEQ ID NO: 11978 - protein, 336 aa, Glycine max
  unsure (1)..(336): unsure at all Xaa locations
LPFFYLLPSQTQKSPSETNNASFDFVXXVLPFLVLLAAATTSPTRATTVASSFHGQREFDYFAFALQWPGTYCKRTRSCCPTNGCCRGSNFPTVFTIHGLWPDYNDGTWPSCCSGSSFDPKEILTLTNSLEQYWPSLXCSKPSLCHGGKGTXWAHEWEKHGTCSYPVFRNEYDYFVAVLNLYFKYNVTEXVLNDAGYVPSNTEKYPLGGIISAIENAFHASXQIVCSKDSIEELYLCFYKNFQPRDCALGSDIKIDMVTSKKSCPKYVSLPESVSVGYNGLQSRVSDDVALXGYGTVLLFVNICTLRTSKAARIKLLGCGTIYQLVINEYSEELDI

SEQ ID NO: 11979 - protein, 198 aa, Glycine max
  unsure (1)..(198): unsure at all Xaa locations
SYLLPLQTQNSGTVKNDASIDFLAGAAHSRVVGGSGNNPSSTCLTGRVVLRRGSSQREFDYFKLALQWPGTYCKRTRSCCPTNGCCRGSNSPAVFTIHGLWPDYNDGSWPSCCSGSSFDPKEISTLTNALEQYWPSLSCSKPSLCHGGKGTFWAHEWEKHGTCSYPVFSKXEYDYFLTVLNVYLKYNITSVLNDAGYX

SEQ ID NO: 11980 - protein, 266 aa, Oryza sativa (japonica cultivar-group)
MATARKAPRMVAIWAVVVVVVAADLFGAAVARSASARHAVGKKQREFDYFALALQWPGTICASTRHCCAINGCCRSEPLQTFTIHGLWPDYDDGTWPACCRHTSFDMDKILPLKPTLEKYWPSLYCSSSSTCFSGKGPFWAHEEMLASGGIHVSNGKQYALTDVIDAIKCAFGASPQIVCKKGSVEELRLCFDKDLKKTCTILLNSVVYFQPLDCLTTTATNENVSKKKYCPRYITLPTYDPIVHANSTREIITVESEVYGYLYTS

SEQ ID NO: 11981 - protein, 138 aa, Lycopersicon peruvianum
IHGVWPDNHSRQLNYCDRQATFVDVPLGKKLDDLDKRWPQLKHNKEYGEKHQPHWREEFMKHGTCCKNLYNEEQYFDLAINFIDRFDILRILRYHGIIPGKSYIVQKVQDAIRTVTHKLPKLQCLENSVGLELSEVGI

SEQ ID NO: 11982 - protein, 196 aa, Nicotiana alata
AFEYMQLVLQWPTAFCHTTPCKRIPNNFTIHGLWPDNVSTTLNYCAAKENFKNIEDDTKKDDLYKRWPDLTTAETYCKQHQNFWRHEYNKHGKCCSESYNREQYFDLAMALKDKFDLLSSLRNHGIIPGRGMKYTVQKINSTIKKITQGYPNLSCTKGIMELVEIGICFDSMVKNVINCPHPKTCKPTGSNEIKFP

SEQ ID NO: 11983 - protein, 214 aa, Nicotiana alata
MSKSQLTSVFFILLCALSPIYGAFEYMQLVLTWPITFCRIKHCERTPTNFTIHGLWPDNHTTMLNYCDRSKPYNMFTDGKKKNDLDERWPDLTKTKFDSLDKQAFWKDEYVKHGTCCSDKFDREQYFDLAMTLRDKFDLLSSLRNHGISRGFSYTVQNLNNTIKAITGGFPNLTCSRLRELKEIGICFDETVKNVIDCPNPKTCKPTNKGVMFP

SEQ ID NO: 11984 - protein, 218 aa, Nicotiana alata
MFNSPLTSVFFILLFALSPIYGTFEYMQLVLQWPTAFCHTTACTIIPTNFTIHGLWPDNVSTMLNYCEGRKNKYDSITDDKRKSDLYEHWPDLIIDKADCLDHQNFWEHEYNKHGTCCLPSYNQEQYFNLALALKDKFDLLTSLRSHGIIPGTQYTVQRINRTIKAVTQGYPNLSCTKGITMELLEIGICFDSRVKKVIDCPHPKTCKPFRNQAITFP

SEQ ID NO: 11985 - protein, 215 aa, Nicotiana alata
MFNLPLTSVFVIFLFALSPIYGAFEYMQLVLQWPTTFCHTTPCKNIPSNFTIHGLWPDNVSTTLNFCGKEDDYNIIMDGPEKNGLYVRWPDLIREKADCMKTQNFWRREYIKHGTCCSEIYNQVQYFRLAMALKDKFDLLTSLKNHGIIRGYKYTVQKINNTIKTVTKGYPNLSCTKGQELWEVGICFDSTAKNVIDCPNPKTCKTASNQGIMFP

SEQ ID NO: 11986 - protein, 215 aa, Nicotiana alata
MFNLPLTSVFVIFLFALSPIYGAFEYMQLVLQWPTAFCHTTPCKNIPSNFTIHGLWPDNVSTTLNFCGKEDDYNIIMDGPEKNGLYVRWPDLIREKADCMKTQNFWRREYIKHGTCCSEIYNQVQYFRLAMALKDKFDLLTSLKNHGIIRGYKYTVQKINNTIKTVTKGYPNLSCTKGQELWFVGICFDSTAKNVIDCPNPKTCKTASNQGIMFP

SEQ ID NO: 11987 - protein, 219 aa, Nicotiana alata
MFGSQLMFVLFILFLSLSPVYGTFDQLQLVLTWPPSFCHGKPCTRIPKNFTIHGLWPDEQHGMLNDCGETFTKLREPREKKELDDRWPDLKRSRSDAQDVQSFWEYEYNKHGTCCTELYDQAAYFDLAKNLKDKFDLLRNLKNEGIIPGSTYTVDEIAEAIRAVTQAYPNLNCVGDPQKILELSEIGICFDRGATKVITCRRRTTCNPINKKEISFPLN

SEQ ID NO: 11988 - protein, 196 aa, Nicotiana alata
DFEYLQLVLTWPASFCYANHCERIAPNNFTIHGLWPDNVKTRLHNCKPKPTYSYFTGKMLNDLDKHWMQLKFEQDYGRTEQPSWKYQYIKHGSCCQKRYNQNTYFGLALRLKDKFDLLRTLQTHRIIPGSSYTFQDIFDAIKTVSQENPDIKCAEVTKGTPELYEIGICFTPNADSMFRCPQSDTCDKTAKVLFRR

SEQ ID NO: 11989 - protein, 159 aa, Prunus avium
PSNYSNPRMPSKCTGSLFNFRKVYPQLRSDLKISWPDVESGNDTRFWESEWNKHGRCSEASLNQMQYFERSHAMWISYNITEILKNASIVPSATKNWTYSDIVSPIKRATKRTPLLRCKYDKSTQLLHEVVFCYEYDALKQIDCNGTAGCPNQKVISFQ

SEQ ID NO: 11990 - protein, 274 aa, Oryza sativa
MATARKAPRMVAIWAVVVVVVAADLFGAAVARSASARHAVGKKQREFDYFALALQWPGTICASTRHCCAINGCCRSEPLQTFTIHGLWPDYDDGTWPACCRHTSFDMDKLECSMPTLEKYWPSLYCSSSSTCFSGKGPFWAHEKHGTCSSPVVKDELEYFTTALDLYFKYNVTEMLASGGIHVSNGKQYALTDVIDAIKCAFGASPQIVCKKGSVEELRLCFDKDLKPLDCLTTTDVSKKKYCPRYITLPTYDPIGENAHFCTPAIAANTNQQL

SEQ ID NO: 11991 - protein, 258 aa, Oryza sativa
  unsure (1)..(258): unsure at all Xaa locations
WISQAPSSQVSLKLLFLLLAATPSELTVQPSRRQREFDYFALALQWPGTICASTRHCCAINGCCRXSXPPPPPRLHGLWPDYDDGTWPACCRHTSFDMDKILPLKPTLEKYWPSLYCSSSSTCFSGKGPFWAHESEKHGTCSSPVVKDELEYFTTALDLYFKYNVTEMLASGGIHVSNGKQYALTDVIDAIKCAFGASPQIVCKKGSVEELRLCFDKDLKPLDCLTTTDVSKKKYCPRYITLPTYDPIGNAGMXIIVX

SEQ ID NO: 11992 - protein, 197 aa, Oryza sativa
MATARKAPRMVAIWAVVVVVVAADLFGAAVARSASARHAVGKKQREFDYFALALQWPGTICASTRHCCAINGCCRSEPLQTFTIHGLWPDYDDGTWPACCRHTSFDMDKILPLKPTLEKYWPSLYCSSSSTCFSGKGPFWAHEEMLASGGIHVSNGKQYALTDVIDAIKCAFGASPQIVCKKGSVEELRLCFDKDLK

SEQ ID NO: 11993 - protein, 282 aa, Triticum aestivum
TLCTTLNSETTTHPAARGREGKGEKETPRRAEAMATATATTACLLAVWALVAAGLFGTGLARASVAPAAVGKEQREFDYFALALQWPGTICSSTRHCCAVNGCCRSEALHTFTIHGLWPDYDDGTWPSCCRHTSFDMDKLTPLKPTLDKYWPSLYCSTSSTCFSGRGPFWAHEEMLATGDILVSNGKEYALSDVIDTIKHAFGGSPQIICKKGSVEELRLCFTKDLKPRDCLTTSAMYKNLSKSKHCPRKISLPTYDPIVLTNSTLEIVPEASDNGLYFFTS

SEQ ID NO: 11994 - protein, 325 aa, Candida albicans
MLSQSFLIALAVIPVTLASPYYNPYFGKYFHGQRTSGDSSSSGNFYPVKDCSAFIDQNPETSWSCHNKSPVSSANSCCFEENGIILSTQFWDYNTTLLEIAVNGSTSDIVEAELKSKLDTVYNDLSRTFTIHGTWDDFCNGSYPQYCNKSLEVSDEKDNLTHILVDQFKEVELYNIMSKYWIDTIASNVDSSASTALWEHEYNKHGTCMTTLSPSCFTSQSYTRFENVVNFYKKTVEIWSQLDTFEFLAAAGIYPTVSRKYKLSQVQEALQKAHGAEVYVGCLNNSISEIWYFYNLQGSILTGTYKPIDTTTNTKCKDEVWYIPK

SEQ ID NO: 11995 - protein, 121 aa, Prunus salicina
PKRPSNCAGSRFNFTKVYPQLRNKLKISWPDVEGGNDTKFWEGEWNKHGTCSAERLNQMQYFERSHDMWMSYNITKILKNASIVPSATQTWSYADIVSAIKTATKRTPLLRCKPDPQPNKP

SEQ ID NO: 11996 - protein, 252 aa, Hordeum vulgare subsp. vulgare
MAFRRALLCLLGMLIASSAIAVSDSGIYYQIGLMWPGAYCVQTTGGCCMPKSPIVPAADFYVSGFTVLNATTDAPETSCSSTPFNSDEILGISGLRQYWSNIKCPSNNGQKSWKSAWKTSGVCSGLDDKAYFQAAIALRSKINPLSRLVSKGIKPDFGLYSLEKIKKAIQAGTGVAPLIQCSKGPFDKFQLYQIFICVAEDAKTLIECPKPQKFTCSDEILFHPFKKWMLKQAASSVSFAEAFEMAGAAMGY

SEQ ID NO: 11997 - protein, 197 aa, Glycine max
  unsure (1)..(197): unsure at all Xaa locations
PRVRASCRMALLLGLLLLVVASPAIADDDSGIYYQLALMWPGAYCEQTSAGCCKPTTGVSPARDFYITGFTVLNATTDAAVTGCSNKVPYDPNLITGIQGLNQYWSNIRCPSNNGQSSWKNAWKKAGACSGLSEKDYFETALSFRSRINPLVRLKAKGIEPDFGLYGLKAITKVFKSGINATPVIQCSXGPFDKYMX

SEQ ID NO: 11998 - protein, 245 aa, Hordeum vulgare
MAMRAISLCLILGLLAAAAPASATSFDFYYLILMWPGAYCADSDYGCCVPKYGYPAEDFFVEGFMTFDLSLNKAIVRCNSDKPFDVNKLEPIENNLNHYWSNIHCPRNDGTGTWKSEWRSYGVCSGLKLVDYFRAALNLRKKADVLGALAEQGINPDYRLYNTEHIKWAVNQKLGVMPGVQCRDGPFGKKQLYQIYLCVDKDGQIFIDCPKLPKLHCPEEVLFHPFHTWMLNATSPAKITLPTEA

SEQ ID NO: 11999 - protein, 268 aa, Oryza sativa
  unsure (1)..(268): unsure at all Xaa locations
MASGRIALLCLLGLLLAPAAIAAKDDKIFYQITFMWPGAYCAQTKAGCCMPKTDVAPASDFYVAGFTVYNATTNSSLSSCSNTPFDMNQIGDVTRLMQYWNNIRCPSKSGQKGWKNAWETSGVCSDLTESAYFDTALALRDKINPLSRLVSNGIKPDFGLYSVKKIKEVIEEGIGAPALIQCSKGPFNKFQLYQIYVCVAEDAKTFVECPSPRKPYTCGDDILFHPFKKWMLKXXNSTKSYAAADAIAAARSGHGNLSSIDRSIKKTN

SEQ ID NO: 12000 - protein, 252 aa, Oryza sativa
MEQRKFLLCLILGLLATSGPAKTVNADSPFDFYYLILMWPGAYCTDSEYGCCVPKYGYPSEDFFVKSFMTFDSSENTAVVRCNSDNPFDINKLDSIENNLNHYWSNIKCPRTDGVNSWKSEWNSYGVCSGLKELDYFKAGLQLRKNADVLSALAEQGIKPDYQLYNTAFIKWAVNQKLGVTPGVQCRDGPFGKKQLYEIYLCVDKDAKSFIDCPVLPNLSCPAEVLFHPFHTWMLNTTSAANIVMPTETVLA

SEQ ID NO: 12001 - protein, 252 aa, Oryza sativa; identical to SEQ ID NO: 12000

SEQ ID NO: 12002 - protein, 252 aa, Oryza sativa
MEQRKFLLCLILGLLAASGPAKTVNADSPFDFYYLILMWPGAYCTDSEYGCCVPKYGYPSEDFFVKSFMTFDSSENTAVVRCNSDNPFDINKLDSIENNLNHYWSNIKCPRTDGVNSWKSEWNSYGVCSGLKELDYFKAGLQLRKNADVLSALAEQGIKPDYQLYNTAFIKWAVNQKLGVTPGVQCRDGPFGKKQLYEIYLCVDKDAKSFIDCPVLPNLSCPAEVLFHPFHTWMLNTTSAANIVIPTETVLA

SEQ ID NO: 12003 - protein, 256 aa, Triticum aestivum
MAFGMAFRTALLCLLGMLIASPAIAVSDSGIYYQIGLMWPGAYCAQTTGGCCMPKSPVVPAADFYVSGFTVFNATTDAPETSCSGTPFNSGEILEISGLRQFWSNIKCPSNNGQSSWKSAWKTSGVCSGLDDKAYFQAAIALRSKINPLSRLVSKGIKPDFGLYSLEKIKKVIQAGTGVTPVIQCSKGPFDKFQLYQIFICVAGDAKTLIECPKPQKFTCSDEILFHPFKKWMLKQAASSVSYAEAFEMAGAVMGY

SEQ ID NO: 12004 - protein, 167 aa, Triticum aestivum
MASSRIPLLCLLGLLLVASPAIADDSSGIYYQLALLWPGAYCEQTNAGCCKPTTGVSPARDFYITGLTVYNATTNAALTECSNQAPYNPNLITGIGLEQYWINIKCPANNGQRSWKNAWKKAGACSGLDEKAYFEKALSFRSKINPLVRLKQNGIEDDFELYGLKAI

SEQ ID NO: 12005 - protein, 245 aa, Triticum aestivum
MAQRTISLCLILGLLAAAAPANATSFDFYYLVLMWPGAYCVDSEYGCCVPKYGYPAEDFFVQSFTTFDLSLNKAIVRCNSDKPFDINKLEPIENNLNHYWSNIHCPRTDGTSTWKSEWRSYGVCSGLKEVDYFRAALNLRKNADVLGALAEQGINPDYRLYSTEHIKWAVNQKLGVMPGVQCRDGPFGKKQLYQIYLCVDKNGEAFIDCPKLPKLQCPEEVLFHPFHTWMLNATSPAKIMLPTEA

SEQ ID NO: 12006 - protein, 245 aa, Triticum aestivum
MAQRTISLCLILGLLAAAAPANATSFDFYYLVLMWPGAYCVDSEYGCCVPKYGYPAEDFFVQSFTTFDLSLNKAIVRCNSDKPFDINKLEPIENNLNHYWSNIHCPRTDGTSTWKSEWRSYGVCSGLKEVDYFRAGLNLRKNADVLGALAEQGINPDYRLYSTEHIKWAVNQKLGVMPGVQCRDGPFGKKQLYQIYLCVDKNGETIIDCPKLPKLHCPEEVLFHPFHTWMLNATSPAKIMLPTEA

SEQ ID NO: 12007 - protein, 247 aa, Triticum aestivum
  unsure (1)..(247): unsure at all Xaa locations
MEQRKFLLCLILGLLAASGPAKTVNADSPFDFYYLILMWPGAYCTDSEYGCCVPKYGYPSEDFFVKSFMTFDSSENTAVVRCNSDNPFDINKLDSIENNLNHYWSNIKCPRTDGVNSWKSEWNSYGVCSGLKELDYFKAGLQLRKNADVLSALAEQGIKPDYQLYNTAFIKWAVNQKLGVTPGVQCRDGPFGKKQLYEIYLCVDKDAKSFIDCPVLPNLSCPAEVLFHPFHTWMLNTTSAANIVMPX

SEQ ID NO: 12008 - protein, 210 aa, Triticum aestivum
  unsure (1)..(210): unsure at all Xaa locations
XIVLSLILGLLAAANAVPFDFFYLILMWPGAYCGRGRNGCCVPKYGYPAEDFFVEFFQTFDVSINKPIVRCRNGSPFDAKKLDKIENYINHYWTRLKCPPTDGVNAWKSAWDNYGVCSGLKQLDYFKAALSLRKQADILGALADQGILPDYKLYNTARIKGXAVAAKLGVEPGLQCRDGPFGKKQLYQVYLCVDTDAKTFIKCPKLPATL

SEQ ID NO: 12009 - protein, 145 aa, Pseudanabaena sp. PCC 6903
VYRFNEHGDGTVIAETKQPHLESFLGLHYPDSDIPKQAKHLYTLNWLRLIPDVNYQPTALVSHKQSPEAKSSSEKVPLDMSYCALRSVSPIHIEYLQNMGVTASMSVSLIQNKKLWGLIACHHYTPKFIPYETRTICEFLGQLMS

SEQ ID NO: 12010 - protein, 139 aa, Leptolyngbya sp. PCC 7375
LYRFDDDGHGEVVAEEKCEEMEPYLGLHYPESDIPKTARQMFLSNWIRVIPDAAATAVDLYPMDNPVTQQPTDLTHSILRSAYSCHLEYLHNMGVGASLTISLMKDNKLWGLIACHHRTAKYVPYELRKACEFLGRVIF

SEQ ID NO: 12011 - protein, 765 aa, Nostoc sp. PCC 7120
MRIDVESQNINVTSLKEAPIHLSGQIQPHGVLLVLEEPGLKILQVSNNTWGILGINAENILQKKLEDLLDSFQIERIQSGLSSGNLEFINPTKIWIRKKGDDYAVFDAVFHRNTEGFLILELEPAITQENIPFLSFYHLAKASINQLQKTANLRDFCQIIVQEVRKVTDFDRVMLYKFDDDGHGSVIAEEKLDSLEPYLGLHYPESDIPKPARKLFISNSIRVIPNAQAQAIQMIPALNPVSDRPVDLTNSILRSAANCHLEYLHNMGVGASLTISLIKDNKLWGLIACHHLSAKYVSYELRKACEFLGRVIFAEISAREETEDYDYRMNLTHIQSLLVEYMSQEDNFVDGLIKHQPSLLDLTSAQGAAVCFGDHCTLIGETPKAEDLVFLVQWLKNNVEEEVFYTDSLPQVYPDAERYKNVASGLLAIPISQRNYVLWFRPEVIQTVNWGGDPNQPFEVNKLDGNVRLCPRKSFELWKETVRLTSLPWRYVEIRAALELRKAIVNIVLRQADELAQLAHDLERSNAELKKFAYVASHDLQEPLNQVANYVQLLEMRYQDQLDADANEFITFAVEGVSLMQTLIDDVLAYSKVDTQAIAFQLTEVEKALDKALGNLRQRIAETGANITHDPLPTVMAGSTQLMQLFQNLIANAIKFRSEEAPQIHIGAERLEDEWLFSVRDNGIGIDPQFSDRIFVIFQRLHTRDEYHGTGMGLAICKKIIECHRGRIWVESQLGEGATFYFTIPVGGRERERRNGRKTQNNLFS

SEQ ID NO: 12012 - protein, 751 aa, Nostoc sp. PCC 7120
MNINDITIPFQVDLSNCSKEPIHIPGLIQPHGVLLVLQEVDLTILQVSNNTFNILGRHPEQLLNQHLSCLLEAEQLSLLKDCLAQEDLQIINPLEFIIKSHNESISFDVIAHRSNNLLILELEANLSDKTHSFFRFYHLVKLAMLKLQGTATTTEISQILAQEVRKITGFDRVMVYRFDEQWNGKVIAEVKPEYLTSYLGLNYPASDIPQQARKLYSQNWLRLIPDAKYQPVPIVPINNPLNDQPLDLSRSVLRSVSPLHIEYMQNMGVTASMSISIMKNQKLWGLIACHHQSPKYIPYEIRSACEFLGQMTSVEMSAKEDSEDTEDKIQVKSVHSKLVQYMSAENDFINALIDHQPNILDLVKAQGAAVCFNGNSCTVGQVPPMPDIQVLVEWMSQNIHEEIFATDSLATVYPDAEKLRDVASGLIALSISRSQKNYILWFRPEVVRTVDWGGNPHKPVEVIANGEIRLSPRKSFDLWKETVLLKSQPWKSHEVNAALELRSAIIGIVLQKADELAQLNIELERSNQELDAFAYIASHDLKEPLRGIHNYSNFLMEDYGEIIDAPGKEKLLTLIRLTQRMEDLIDSLLHFSRLGRVDLSMQDTDLNEIVHRILDMLSGRIEETGVEIRILQLLPVVYCDRIQIGEVFSNLIANSIKYNDKANKWIEIGYIDNPPLPPTFYVRDNGIGIREKHFETIFRIFKRLHSPSKYGGGTGAGLTIAKKIVERHGGKIWVESTYGEGSTFYFTLQDV

SEQ ID NO: 12013 - protein, 139 aa, Nostoc sp. PCC 7120
LYKFDDDGHGSVIAEEKLDSLEPYLGLHYPESDIPKPARKLFISNSIRVIPNAQAQAIQMIPALNPVSDRPVDLTNSILRSAANCHLEYLHNMGVGASLTISLIKDNKLWGLIACHHLSAKYVSYELRKACEFLGRVIF

SEQ ID NO: 12014 - protein, 920 aa, Nostoc sp. PCC 7120
MSPTAKPNSQVSLNQESVLRRITARIRQSLELEDIITATTAEVRALLGTDRVMIYKFHPDGSGQVIAESIYENRLPSLLGLNFPADDIPPQARELLVKSKVRSIVDVATGMIGQSPVHDLETGELISEDICYRPVDSCHVEYLTAMGVKSSVVAPIFCQDELWGLLVSHHSENRTVSEDELEAMQMIVDQLAVAIAQSHLLTQARKKAQKEAIINRIITLLHSLPTIVLKPALEAAVGAFAGVGGRLCLRNQAVESQHVVLRSLAECLIPGSNCVQLYTCGQQPITPEQTIYPLIEQYRVWQEHYTSHHDIWAIADIYQDSTLRSLQAVFQPTKIRGILIIPLEYRQQLLGYLSIFRNEIDTETLWAGRIDQDQRQMFPRVSFNLWRDAKKSQAQEWTSEEIELAKEIGQHFASAIQQYELYQQVQAFNENLEKQVQKRTLELRHTSEQQQAVFGVISKIRESLDTNTIFQITTKEACQLIKADRVSVYRFDNEWGGEFVGDFEATSPHWSNESKISINTVWNDTYLQNTQGGRYRYNETFAVDDIYKVGFTQCHVENLEQFQIYAFVLAPIFVGQKLWGLLATYQHSGPRQWKPSEVNFLTQIAAQLGIALQQAELLNQTQQQAQKLTQALHHLQQTQTQLIQTEKMSSLGQLVAGVAHEINNPVNFIYGNLSHVSEYAQNLLTMLELYQQELPNPSVEILEQADEIDLEFLAKDLPKTLSSMQIGVERIRQIVMSLRTFSRLDEAEMKAVNIHEGIDSTLLILQHRLKAKPETAGIKLTKKYAEIPLVECYAGQMNQVFMNVLSNAIDALEDCKETKSPNHNGEIIISTSFGQIRDSIQSIVIRIMDNGPGIPEDLRLRICDPFFTTKPVGKGTGLGLSISYKIVVDRHGGVFKCDSQLGSGTEFWIEIPIQQVNGNW

SEQ ID NO: 12015 - protein, 1333 aa, Nostoc sp. PCC 7120
MTEILSRTTQMPVSEVQEGMAVEPNHVYVIPPNTRMTIAQGVLKLIPLEKIRGVSMTVDSFLISLAEDRGNRAIGVILSGGDSDGARGLETIKAAGGITFAQCEESAKVSSMPNTAVASGHVDFILTPQKIAEELANISSHPYVNHPTPSKQVDIMPEGTDSLSIIFSLLRAATGVDFTYYKQTTLKRRIQRRMMLYKLEKLEDYAQYLQNNQAEVLALYQDLLIKVTGFFRDPEAFEALKTNVFPIITKNRTPDSPIRIWVAGCSTGEEAYSMAICLLEFLADKVANTPINIFATDINEVAIEKARIGVYKPSEVADVSPERLQRFFVQVEGGYQISKPVRELCIFARQNLISDPPFSRLDLITCRNVLIYLGATVQKKLLPIFHYGLKSTGFLMLGTSETVGEFFDLFNLVDRKNKIYSRKIAPARLGIDFISQNYPLEAFNPQPKINEDVLNNQEMQKEADRIVLNQYAPVGVIVNDDLEILQFRGQTSSYLQPAPGRPSFNLLKMAKEELRLELRTAIHQAKKQEMSVRKEGIELREGEQVRQVRIDAIPFQLTAGGERYFLVLFEDMPPSVTAAPQAASKNPNVSSRQRQQMNDEQEINRLGQELATTKEYLQSIIEEQQATNQDLRAANEEILSSNEELQSTNEELETAKEEIQATNEELNTINEELQRRNVESNQVSNDLQNLLSSINIPILMLGGDMRIRRFTPTAGRIFNLIVTDIGRPLSDINHKLTIPDLEAQILEVVGTLNLKTQEVQDNDGHWYDLRIRPYRTIDHKIDGAVVVLVDIDALKRSTEELRASKDYAEAIVATIRESLVILDIDLQVITANQFFYEKFQVTPEETEHHLIYEIGDGQWNIPQLRSLLEDVLPQQTQFQNLEVEHNFERIGQKIMRLNARKMTLLDNRRMILLVIEDITQQKQLEAERTHLLAQEQSARNAAEAANHAKDEFLSILSHELRNPLNSMLGWANLLRTHQLEEVTVNQGLEAIERSAQAQNHLISDLLDVSRISSGRLRMDAQEVELIPVIEAAIAVVRLAAEAKNIQIETKLDPTHTPMLGDPIRLQQVIWNLLSNAIKFTPTKGRIDVTLEYTYFQAQIQVKDTGAGIKADFLPYVFERFRQADGTRTRSNQGLGLGLSIVRHLVELHGGTVEVESQGEGQGSTFTIKLPVQANRKENPVATVQEPVTLTNVPEIPTDNLPSLEGVRVLIVDDEPDIRLLFKLVLEEYGVKVTEVASAREALSKLRENPGCYDILLSDIGLPEEDGYLLMRQVRALSAEEGGQIPAAALTAYAGDSEYTQALAAGFQTHIAKPIEPYQLVSLVASLAGRVRGV

SEQ ID NO: 12016 - protein, 614 aa, Nostoc sp. PCC 7120
MERESPRSDSWNPPFSKRGRMSTYRQAFAGISSRFEAPYGHRVYEVHVLPVRNDDGEIFAGMTITQEITERKQSELALQNALQLLNLHIDTTPLAVVQWDCHLCVTRWSSAAEKIFGWLAEEVIGKYIQDLHIVYEEDMTAVAEVSDRLLSGQEAQIIQYNRNYTKDGRVIYCEWYNSSITNEEGSVTSVLSLVLDVTERIQAEKALRQSELMVTEERAQALERERAARIELERASRMKDEFLAIVSHELRSPLNGILGWSRLLRTRKLSPEKIEQALESIERNAQAQTQLIEDLLDISRIIRGNIRLLVRPTKLIPVIQAALDTVRPIANTKSIQIISRLNFDIGLVSADPERLQQVIWNLLSNAVKFTPEGGRVEICLEQVETNVQIQVIDTGTGISPEFLPYVFDRFRQADATTTRNQGGLGLGLAIVRNLVELHNGKVSVASPGEGQGATFTVQLPLLATYSTLTPEEPLIQRQTAWDTKVQIKGLKILAVDDEPDTREFLKTALEQYGAIVTTAASTREALKLLQLVKPDVLLSDIGMPNEDGYALIRQIRALSSEQGGNVPAAALTAYTRQSDRLQALTAGFQIHISKPIEPIQLLKIVATLAGNNSN

SEQ ID NO: 12017 - protein, 374 aa, Crossosoma bigelovii
ALSIAGAVQSQKLAVRAISHLQSLPSGDIKLLCDTVVENVRELTGYDRVMVYKFHEDEHGEVVAESKRPDLVPYIGLHYPATDIPQASRFLFRQNRVRMIVDCNATPVKVIQDESLMQPLCLVGSTLRAPHGCHAQYMANMGSNASLAMAVIINGNEEEGVGGRSPMKLWGLVVCHHTSARCIPFPLRYACELLMQALGPQLNMELQLASQSSEKRVLRTQTLLCDMLLRDSPTGIVTQSPSIMDLVKCDGAALYYQGKYYPLGVTPTEPQIKDIVEWLLAFHGDSTGLSTDSLADAGYQGAATLGDAVCGMAVAYITKRDFLFWFRSHTAKEIKWGGAKHHPADKDDGQRMHPRSSFKAFLEVVKSRSLPWEN

SEQ ID NO: 12018 - protein, 1016 aa, Rhodobacter sphaeroides
MRLPSLAARPTGPRRTGVPSRLRWTGSVRHIPTRGRMCWPAPPRPSRRSSNGSPLLWQPGGYDRPPPPCRSLPHVCQNFVVRGCLMTISGGTFDPSICEMEPIATPGAIQPHGALMTARADSGRVAHASVNLGEILGLPAASVLGAPIGEVIGRVNEILLREARRSGSETPETIGSFRRSDGQLLHLHAFQSGDYMCLDIEPVRDEDGRLPPGARQSVIETFSSAMTQVELCELAVHGLQLVLGYDRVMAYRFGADGHGEVIAERRRQDLEPYLGLHYPASDIPQIARALYLRQRVGAIADACYRPVPLLGHPELDDGKPLDLTHSSLRSVSPVHLDYMQNMNTAASLTIGLADGDRLWGMLVCHNTTPRIAGPEWRAAAGMIGQVVSLLLSRLGEVENAAETLARQSTLSTLVERLSTGDTLAAAFVAADQLILDLVGASAAVVRLAGQELHFGRTPPVDAMQKVLDSLGRPSPLEVLSLDDVTLRHPELPELLAAGSGILLLPLTSGDGDLIAWFRPEHVQTITWGGNPAEHGTWNPATQRMRPRASFDAWKETVTGRSLPWTSAERNCARELGEAIAAEMAQRTRAELARLRHYDPLTGLANRSYLQERLAQDGQSAAALLFIDLDRFKAVNDSMGHGVGDGLLIEVARSLVATVRPHDLVVRLGGDEFVVLCHRLDAAGIVSLAERLRQVLEQPFEVAGRKCHISASIGIAMADSIGDLDLVRAADIAMYAAKKNGGNRGELFRPSLYEETTQLVELDNDMRGAIESEQFHLVYQPIFALNPETERLVGFEALLRWDHPLHGALQPGIFIPLAERLGHIHAMGNWVLRRAILQLQAFRSAGPELDLKMNVNVSPLQLARPDFLARLADLLAQVPDLPRHALCLEITETSLSDEAVSEALISIRALGVRIAIDDFGTGFSSLACLRRLPVDVAKLDRAFLGGGHTAAQDHRFFAAVTGLVHAADLKVVQEGIETLDQLALVRAAGADFAQGFHLAAPLSIAAALGLIAASRKE

SEQ ID NO: 12019 - protein, 721 aa, Rhodobacter sphaeroides
MGAIADACYRPVPLLGHPELDDGKPLDLTHSSLRSVSPIHLDYMQNMHTAASLTIGLADGDRLWGMLVCHNTTPRIAGPEWRATAGMIGQVVSLLLSRLGEVENAAETLARQSTLSTLVERLSAGDTLAAAFVAADQLILDLVGASAAVVRLAGQELHFGRTPPVDAMQKALDILGRPSPLEVLSLDDVTLRHPELPELLAAGSGILLLPLTSGDGDLIAWFRPEHVQTITWGGNPAEHGTWNPATQRMRPRASFDAWKETVTGRSLPWTSAERSCARELGEAIAAEMAQRTRAELARLRHYDPLTGLANRSYLQERLAQDGQPAAALLFIDLDRFKAVNDSMGHSVGDGLLIEVARSLVATVRPHDLVVRLGGDEFVVLCHRLDAAGIVSLAERLRQALEQPFEVAGRKCHISASIGIAMADSIGDLDLVRAADIAMYAAKKNGGNRGELFRPSLYEETTQLVELDNDMRGAIESEQFHLVYQPIFALSPEAERLVGFEALLRWDHPHHGALQPGIFIPLAERLGHIHAMGDWVLRRAILQLQAFRSAGPELDLKMNVNVSPRQLAKPDFPARLADLLAQVPDLPRHALCLEITETSLSDEAVSEALISIRALGVRIAIDDFGTGFSSLACLRRLPVDVAKLDRAFLGGGHTAAQDHRFFAAVTGLVHAADLKVVQEGIETLDQLALVRAAGADFAQGFHLAAPLSIAAALDLIAASREE

SEQ ID NO: 12020 - protein, 775 aa, Rhodopseudomonas palustris
MSSRSDPGQPMASATDPSGRLALDLTECDREPIHIPGAIQPHGYLFVVSETDLRIASVSANVEDLLRQPPASLLNVPIAHYLTAASAARLTHALHGGDPAAINPIRLDVVTPDGERAFNGILHRHDSIVILELEPRDESRYTNEFFRSVRVAIRRLQTAADLPTACWIAASEVRRITGFDRIKVYQFAADWSGQVIAEDRDSGIPSLLDFHFPSSDIPAQSRALYTINPVRIIPDIGYRPSPLVPDINPRLGGPIDLSFSVLRSVSPTHLEYMVNMGMHAAMSISIVRDNRLWGMISCHNLTPRFVSYEVRQACELIAQVLTWQIGVLEEAEIVRHSVRMRAIQNRLLHELGDEQGLTAGLSRVSEEMLALMGASGFALCSFDGVAAFGRTPSDDEIQALASWLSHRESRGIFQTQQLSASFPEAEVYSDIASGLLAVPLGRASTTLMLWFRPEVAQTVTWGGDPHKPVQIGPRGRRLQTRASFEAWREEVRDRSRPWRSHEIVAAEEIRDLVVDVILGRAEELENANRELSRSNDELESFAYVAAHDLKEPLRHIEAFAGLLNDLLLPEARSRLSLMVNGIEASSRRLRALINDLAEYSRIGRQARPLQPVDLNQILTEVLSDLKPMLQDARAEVVSEPLPTVLCDGSQIRQLLQNLISNAVKYRDAERLPHVTIAATIDSPPPAAPAGANVRRARITIADNGIGFDEQYREQIFEPFQRLHGPDEYQGTGIGLAICRKIVHRHGGTISATSRVGEGSVFTFTLPLCDQDAAES

SEQ ID NO: 12021 - protein, 845 aa, Rhodopseudomonas palustris
MPRKVDLTSCDREPIHIPGSIQPCGCLLACDAQAVRITRISENAGAFFGRETPRVGELLADYFGETEAHALRNALAQSSDPKRPALIFGWRDGLTGRTFDISLHRHDGTSIVEFEPAAADQADNPLRLTRQIIARTKELKSLEEMAARVPRYLQAMLGYHRVMMYRFADDGSGKVIGEAKRSDLESFLGQHFPASDIPQQARLLYLKNAIRVISDSRGISSRIVPERDASGAALDLSFAHLRSVSPIHLEYLRNMGVSASMSLSIIIDGTLWGLIACHHYEPRAVPMAQRVAAEMFADFFSLHFTAAHHQRRFQSSLRTRRTLDSLTSEMSFDASVDDFLRGNLKRIADLIPSDGVGLWMNGVWTAHGSTPPADALPSILHLLTGRAGNEIVATHALTDRIAAATDYAGAAAGMLAIPLSQVAGDYLLFFRKEQVQTLNWAGDPNKTYDTGPLGDRLTPRKSFSIWKEQVDGQSVPWSPDDRDTAATIQVGLREVLLRQSEILSAERKKAEVRQRVLNEELNHRVKNILALIKSLVNQPAGEGKSLEEFASALRGRIMALSFAHDQVVRSDGGGALLDLIQAELSPYPASQITLEGPDVGVDARAYSVLALVLHELATNAAKYGALSRSSGRLKVAWTVGDDGRCDIEWTESCGPPVRPPTRQGFGTVLLSRSIPFDLGGWSEVDYLPGGVVARLGIPGQFVTETLQRLSSVQASGQSTDSSALNIADASILLVEDQLVIALDAEDMLGAIGAKLVTSVASAEEALQTIAQQPPTLAILDVNLGNGSSLPVADELERLGIPFIFATGYGDTAMIPERMRGLPIVRKPYSIDSLRGALSAMLDDRE

SEQ ID NO: 12022 - protein, 760 aa, Rhodopseudomonas palustris
MMDEADSGGIVTARNVDLSSCDRELVQYPEAIQPHGAMLTVDEQSDRVLHASANCAAFIGKPPEAVIGAPIAAVLGAGWHELLGSLHRMPLDSGPVNIARESFLGSDQGWHLFAHRCGGLIILEFEKAEPEAAGTTSNLYSEVRADLAALQATEGVQAFFDLAVERIRAFTGYDRVMAYRFAEDGSGQVIAEARRDDLEPYLGLHYPATDIPAPARRLFALSWVRHLPDVGYTPVPLLAAKSPLVTGPVDMSFASLRSVSVMYTGYLKNMGVQSTLVMPLVKEGRLWGLISAMHHAAPRHISHQMRMAAEFLAHTLSLLMSAKEDAEQFERSSARKAAAEALTRLLDSEADIGAALHAAGALDLLSALIDAGGVVVQTGDEVATRGEAPAAAPLHELTSWLRERARPVFATDRLPNLDPAAQAVASQASGVLALRPLPDQPMLIAWLRPEQIEDVQWAGDPRKPVEISDADGMQRLRPRNSFALWKESVQGRAVPWRDDEKDAATRLAAAIAEIAAARKGRIERINRALDASHSELSRYTDVASAELKEHLRGIHHLTTSLRRRQGEVLDEEGRQQVATILKLTQRMDALVDALLDRSRGGSEAASETVDLEAVVDDALAPFARRIAEDRIEVRRPMRLGTAQGHREWIGEVFTNLIGNAIRYNDKPERWIEIGVEAGSPPRYYVRDNGIGIADTDQQLVFQMFHRVDQSEQKAEGAGVGLAMTRRIVAHHGGRIWVQSRLGEGATFYFTLAPDEERHDA

SEQ ID NO: 12023 - protein, 758 aa, Rhodopseudomonas palustris
MTEGSVARQPDLSTCDDEPIHIPGAIQPHGLLLALAADMTIVAGSDNLPELTGLAIGALIGRSAADVFDSETHNRLTIALAEPGAAVGAPIAVGFTMRKDAGFVGSWHRHDQLVFLELEPPQRDVAEPQAFFRRTNSAIRRLQAAETLESACAAAAQEVREITGFDRVMIYRFASDFSGEVIAEDRCAEVESYLGLHFPASDIPAQARRLYTINPVRIIPDINYRPVPVTPDLNPVTGRPIDLSFAILRSVSPVHLEYMRNIGMHGTMSISILRGERLWGLIACHHRKPNYVDLDGRQACELVAQVLAWQIGVMEEQAITRQTLKGQAIQRSLINDIEQLHDHRAGLARNSEALLELMGASGLCLHSREGVITIGQTPPGPIIDQLAQLAGRSGGSELFQTDRLSTIIPEAGAFAEVASGVLAVPLSRTPPRRVMLWFRPEVAQTVYWAGNPDKSVTAESGRLRPRTSFAAWTEQTHGRAIAWQPHEVAAAVEIRDLIIDVILRNTEKLERINTQLARSNEELESFAHVASHDIKEPLRHIEAFAGLLADNIREMGDERLGVMVSGIEKSSRRLRNLINDLAEFSQLGRRSKPLSWVSLETVLNEVLADLQPRITEARAEIQADRLPFARCDHNQIRQVLQNLIANSLKYRDPARPCRIRIFAQPDDNGGRAEIGSAPAIRICVTDNGIGFDKKYIDQVFEPFQRLHGPDDYEGSGIGLAICRKIVQRHGGRVGVDTVPGQGSTFWFTLPVSDDHGQG

SEQ ID NO: 12024 - protein, 566 aa, Rhodopseudomonas palustris
MMVYRFDEQGHGEVFSERHVPGLESYFGNRYPSSDIPQMARRLYERQRVRVLVDVSYQPVPLEPRLSPLTGRDLDMSGCFLRSMSPIHLQYLKNMGVRATLVVSLVVGGKLWGLVACHHYLPRFIHFELRAICELLAEAIATRITALESFAQSQSELFVQRLEQRMIEAITREGDWRAAIFDTSQSILQPLHADGCALVYEDQIRTIGDVPSTQDVREIAGWLDRQPRAAVTSTASLGLDVPELAHLTRMASGVVAAPISDHRGEFLMWFRPERVHTVTWGGDPKKPFTMGDTPADLSPRRSFAKWHQVVEGTSDPWTAADLAAARTIGQTVADIVLQFRAVRTLIAREQYEQFSSQVHASMQPVLITDAEGRILLMNDSFRDMLPAGSPSAVHLDDLAGFFVESNDFLRNVAELIDHGRGWRGEVLLRGAGNRPLPLAVRADPVTRTEDQSLGFVLIFSDATDRRTADAARTRFQEGILASARPGVRLDSKSDLLHEKLLSALVENAQLAALEITYGVETGRIAELLEGVRQSMLRTAEVLGHLVQHAARTAGSDSSSNGSQNKK

SEQ ID NO: 12025 - protein, 771 aa, Rhodopseudomonas palustris
MMHSGLDNSAELRVSDFDPITLAGGTRTEVLPGAIQPHAALLALAPADLTIVHAAGATASLLGAAAELLPGTAASTAFSSDQIARLQALATAERWIERPQHAFTLNAPDATPIDVIVHHASGLLVVELDPRREPAPENSLALVQSMIRRARPAPNLQGFCDAMAAELRSVTGFDRVMVYRFARDGSADVIAEARGPETSPFLGLRDPQPDISNQPGSISRIRVQPDVHAPAAPLWPAHSPRNGLALDLSFSATRSASPEHRLYLAQLGVAASLSLSLVVEGELWGLIVCHHATPRFLPYRMREACALFAEMASLQLETRLAADQLAARLRSTRIHEELVTRMSQESDLAEGLIRFYPNLLDFIPAAGVGLWIDGQFTGIGATPGPAQVAAMMGWLHGVPHDGVYHTDCLALAYPPAKAFAGCASGLLALSLSNTPHNYVLWFRPEVVRVVTWAGMPNKPVGVDAGAPRTPKGCASSWQESVRLHGEPWLDTDVDAAHRLRESLLDVVLRRIDGIARERRSAQLLQEQLMRQVELGLSRSKDVAKTLQEEKRRRVLVEADLSKVLRRTVEDQEAERLRIARELHDTLGQSLTLLQLGFDKLGQAAGDNPELQQRIAEMKSLTADVGRQANRLAWEIRPTALDDLGIQTAIQNLLDSWSEKSSIEFDLHMTLGSRRLPSPVETTLYRVLQEALTNVVRHASARHVSVILQLGDDQVTMIVEDDGCGFVTAGRKPPSGRLGLLGIRERLSLVGGSLEIESAPGKGTALYARIPL

SEQ ID NO: 12026 - protein, 903 aa, Rhodopseudomonas palustris
MNDFKDAKRKFEGAPVPAPRRPVRRGGRALIRLFGVAVIVSLSVMAGRIASQHTRAWEPPGVGHGLDVPWWIFVISLAVGLSIAGLIELQLSRYERRNAHKLRQAHLAAIVEGSSYAIVGQSIDGTVLSWNKTAERLFGYTAEQAIGQNATELMVPDDLRDEEQQMLSGISDGTAFAYLWTKRKRANGTLVDVAVSISPIRADDGRLIGMAASMRDITDLVQAEREVHDLNAALERQVAERTCQLEKTLTLQTAILERAAYAVIATDVTGTITLFNPAAERMLGYKAEDLIGRASAMLFHDSDELAARAEAMRKEGISVSSNLGVLQARLARNDPDTAMWTYIDAMGNRIPTRLTLSRLRTKTGVNLGVLGIAVDLTEQLKYEDELKAARASAEQASAAKADFLANMSHEIRTPLNGIIGYADLVLEDETLAPDTRRQVMRIFEASDSLRVIIDDILDFSKIEACGLTLESKPLYINELIANCASIIEPKADEKGLKLIATAQATPPVLIGDAGRLRQVLLNLMNNAVKFTTAGSVELIVSCIGRVDHLVRLRISVADTGIGISPEAQKGLFKRFSQADETISRKFGGTGLGLAISQRIVQAMHGELKIDSQPGVGSTFYFEVELPVAERLDIERLDAQVHCSRSVKILVVDDVEMNRDLCKTMLTRAGHDVDLADSGATAIAMVASRTYDLVFMDVQMGEMDGLEATRRIRALGHAYRDVPIIALTANVLPEQVERYKAAGVDGHLGKPINRAELLACVARWIDGDIAHVPSEPLAPVELGSEPEHPVRDQAALEDLRMFASEHDIAGFAEQLRDTITRIRAQWPHHIDAMKLDHEARTALGAAAHKTVSLAGQLGFKQLAAACRRMEAACAPHRDIHDAFAALHAALDNAEPVLDAPHELT

SEQ ID NO: 12027 - protein, 897 aa, Rhodospirillum rubrum
MGFPVNHGNRGTNREAGTNPVRSAWRFQAGTGMCPCGLGAAMDTVHSTCDQEPIHVPGLVQPHGFLVVLDSKSGRIAQVTPGIEAVAGVVAQRLIGEPLERVLDPRSAQRCRHRIARPEYPHLIDPFPVRAPGGQSFSAVAHATDQADLVELWSDDQETTVEGVFGRLPFAIGHASRAASIEDLCGRAAATVADLTGYERVMVYRFAENWEGEVIAETLNGPVESYKGQRFPASDIPAQARALYSRNLLRSIPDVHYRPLPLVGRSPDGRELDMTFCNLRSVSPVHLEYLRNMGVAASFSVSLVVDGRLWGLVACHDRVPRRLSLATMGACQVYAETIAQQVLRLDNTRRSRHRSRTGDLIDDISVLLGSGRSLAEALDYTLDDTLALFGASRAVISLDGRQWTAEGPLEGAPIQVPPHQRLLLSERLGGRLRLPAELAGSFVGGVLLPLSDQPDRDFLLLGRPETLRSIEWAGRPEKQPEITPEGGLKIHPRTSFSLWREEVRGRSVAFDPLDRETAETLSLFLAERLAKQRRQQAVVALEETRQRLRDLAECSSDWLWETTGDGTLALVSDRINGLGDLRPEELVGRKLVDLVGGGDSGGAPGVDADEIASAFDEGRAFHGLTVSLALLGRGQWWVRLSGVPQYDGRGQLLGFRGTGTDVTPFKRLQEERVRTQRLEALGRLAGGIAHEIGNVLQPVLTMAHYASKRLDDRDFLEAALADICEGGARAKDIVRSVLTFARQTPAERRPLVLAPALARSVAFAAKGHPGLEIITDIPDTAGEIAANSTELSQIVLNLVGNAADAMGGRGRVFVSLAEAPDLGRMVITIRDEGPGMTLQTQARVFEPFFTTKPEGSGTGMGLAVVHGLVEAWGGTIGLESAPGSGTKFVISFPINNP

SEQ ID NO: 12028 - protein, 392 aa, Annona sp. SM-1999
PYEVPMTAAGALQSYKLAAKAIARLQALPSGNLQKLIDTVVEEVFELTGYDRAMAYKFHDDDHGEVISEITKPGLEPYLGLHYPATDIPQAARFLFMKNKVRMICDCNAKPVKVYQDEKLKLELTLCGSTLRAPHSCHLKYMENMGSIASLVMAVVINESDNEDDNSMVEQQQQQQPKRKRLWGLVVCHNTTPKFVPFPLRYACEVLMQVFAIHVNKELELENQIREKHLRTQTLLCDMLMRDAPLGIVTQSPNIMDLVKCDGAALLYNNKFWRLGLTPSEAHMRHIVSWLNEYHMDSTGLSTDSLHDAGYPGALALGDAVCGMAAVRITSKDILFWFRTHTAAEIRWGGAKHDPSDKDDGRRMHPRSSFKAFLEVVKSSSFPWKDYEMDAI

SEQ ID NO: 12029 - protein, 341 aa, Annona sp. SM-1999
EPVNPADVPVTAGGALKSYKLAAKAISRLQSLPSGNIPLLCDVLVREVSELTGYDRVKAYKFHEDEHGEVIAECRRSDLEPYLGLHYPATDIPQASRFLFMKNKVRMISDCLSPPVKVIQGKGLAQPLSLCGSTLRAPHGCHAQYMANMGSISSLVMSVTIDEDNDDTCSEQQQKGRRLWGLVVCHHTSPRFVPFPLRYACEFLMQVFGIQLNKEVELAAQSREKHILQMQTMLCDMLLRDAPVGILSQSPNVMDLVNCNGAALYYQNQFWLLGTTPTEAQIRDIVGWLLEYHNSTTGLSTDSLVEAGYPGAAELGDDVCGMAAVRITSKDFLFWFRSHTA

SEQ ID NO: 12030 - protein, 398 aa, Hernandia lychnifera
DFEPVKPYEVPMTAAGALQSYKLAAKAIARLQSLSSGSMQKLVDTVVEEVYELTGYDRVMAYKFHDDDHGEVISEIKKPDLEPYLGLHYPATDIPQASRFLFMKNKVRMICDCNMKPVKVYLDEKLTYDLTLCGSTLRAPHSCHLQYMANMGSIASLVMAVVINEGEEERIAQKLHNHHHSQKRKRLWGLVVCHHTTPRFVPFPLRYACEFLMQVVAIHVNKEFELENQIQEKNILRTQTLLCDMLLRDAPLGIVTQSPNIMDLVKCDGAALLYGNKIWKLGTTPTELQIRDISLWLSEYHMDSTGLSTDSLYDAGYPGALSLGDAICGMAAVTITPKDFLFWFRSHTAAKVRWGGAKHDPTDKDDGRTMHPRSSFKAFLEVVKTRSLPWKDYEMDAI

SEQ ID NO: 12031 - protein, 345 aa, Hernandia lychnifera
DLEPVNPAEVPVTAAGALKSYKLAAKAISLLLSLPSGNISVLCDVLVCEVSDLTGYDRVMAYKFHEDEHGEVIAECCRPDLEPYLGLHYPATDIPQASRFLFMKNKVRMICDCSAFPVKVVQDKRLAQPLSLCGSTLRAAHGCHAQYMANMDSVASLMMSVTIIEDDDEVGSDPQQQQKGRKLWGLVVCHHTSPRFVPLPLRYACELLIQVFGMQLNKEVELANQMREKHILRMQAVPCDMLLRDTPVGIMTRSPNIMDLVKCDGAALYYHNQFWLLGINPTEAQIRDIARWLLERHNGSTGLSTDSLMEAGYPGASFLGNAVCGMAAVRISSNDFLSWFRSHTA

SEQ ID NO: 12032 - protein, 394 aa, Sagittaria sp. Mathews 383
PYEVPMTAAGALQSYKLAAKAISRLQSLPGGSMQKLCDTVVQEVFELTGYDRVMAYKFHEDDHGEVVSEVTKPGLDPYLGLHYPATDIPQAARFLFMKNKVRMICDCRAKPVKVYQDEKLAFDLTFCGSTLRAPHSCHLQYMENMDSIASLVMAVIVNEGDEEDEVLGSRAQQQQQQQQRRKRLWGLVVCHNRTPRFIPFPLRYACEFLMQVFAIHVNKEFELENQMREKNILRTQTLLCDMLFRDALLGIISQNPNIMDLVRCDGAALVYQSKIWRLGMAPTESQICDIAAWLSEYHMDSTGLSTDSLHDAGYPGVLALGDSVCGMAAARITSKDILFWFRSHTAAEIRWGGAKHDPADEDDGRRMHPRSSFKAFLEVVKTRSMPWKDYEMDA

SEQ ID NO: 12033 - protein, 397 aa, Sagittaria sp. Mathews 383
DLEPVNLSDVPVTAAGALKSYKLAAKAISRLQSLSSGNISLLCDVLVREVRDLTGYGRVMAYKFHEDEHGEVISESRRSDLEPYLGLHYPATDIPQASRFIFMKNKLRMICDCTAQPVKVIQDKKFTQPLSLCGSTLRAPHGCHAQYMANMGSIASLVMSATISDEDEDDASSGQQRKRRKLWGLVVCHLTSPRFVPFPIRYACEFFMQVFAIQLNKEVELAAQTMEKYIFRTQTFLCDMLLRDAPVGIFTQSPNAMDIVKCDDAALYYKNQFWLLGITPAEGQIRGIAGWLRDCHNTTTGLSTDSLTAFSEAGYRGASTLGDAVCGMTAIKFTSRDFIFWFRSHTAKEIKWRGAKHDPVDKDDDGRKMHPRSSLKAFLDVVKRRSLPWEDVEMDAI

SEQ ID NO: 12034 - protein, 139 aa, Geitlerinema sp. PCC 9228
VYKFNHEEHGVVVGEDCGQDIPSYLGLHYPSTDIPPQARALYLKNWLRIIPDANYAAVSVVPERHAHTGQPLDLSYSVLRSVSPRHVRYLQNMGVSASMSISIIKDGQLWGLVACHHYQRKYIPYEIRTACEFLAQVLS

SEQ ID NO: 12035 - protein, 142 aa, Oscillatoria sp. PCC 7821
IYRFNEGGDGNIIAEIKQPEQKAFLGLRYPDSDIPKQAKHLYTLNWLRLIPDMDYQPCQLVTSPTANPEVEIQPLDMSYCGLRSISPLHIEYLKNMEVAASLTISLIQQQKLWGLIACHHNSPKFIPYEVRTVCEFLGQLMS

SEQ ID NO: 12036 - protein, 139 aa, Stanieria cyanosphaera str. PCC 7437
LYKFDEDDHGSVIAEEKRSDLVSYLGLHYPESDIPRPARKLFSYNWIRLIPDAQTQPVEMIPAINPISDRPLDLTHSILRSAFPCHLEYLHNMGVGASLTISLIKDQKLWGLIACHHQTPKHVPYELRKACEFLGRVVF

SEQ ID NO: 12037 - protein, 136 aa, Leptolyngbya sp. PCC 7376
VYRFDRDGVGIIEAESKAEHMTSYLGLHFPNVDIPVSARELFQMNALRLISDVEDEPIPLLALNDSELLDLSYAILRPPSPCHVQYLQNMDVAASMVMPLIKDGQLWGLINCHHSSPKHIPCDIRTACVFLGKLMC

SEQ ID NO: 12038 - protein, 390 aa, Aquilegia sp. SM-1999
PYEVPMTAAGALQSYKLAAKAIARLQSLPSGSIDRLCDTVVEEVFQLTGYDRVMAYKFHDDDHGEVVSETTKEGLPPYLGLHYPATDIPQAARFLFMKNKIRMICDCRAKHVRVLQDEKLPFELTLCGSTLRAPHSCHLQYMENMDSIASLVMAVVINDGDEEEGTVEGASQSRKRKRLWGLVVCHNTTPRFVPFPLRYACEFLIQVFAIHVNKEFELENQILEKNILRTQTLLCDMLMRNAPIGIVSQSPNIMDLVKCDGAALLYQNKIWRLGLSPSESHIRDIASWLSEYHMDSTGLSTDSLYDAGFPGALSIGDTVCGMAAVRINSKDMLFWFRSHTAGEIRWGGAKHDPGEKDDGRKMHPRSSFKAFLEVVKTRSFPWKDYEMDAI

SEQ ID NO: 12039 - protein, 392 aa, Aquilegia sp. SM-1999
DLEPVNPADVPVTAAGAMKSYKLAAKAISKLQSLPSGNIPFLCEVLVQEISDLTGYDRVMVYKFHEDDHGEVIAEWKISDLEPYLGLHYPATDIPQASRFLFMKNKVRMIWDCTAAPVKVIQDTNLPQPLSLGGSTLRAPHGCHAQYMANMGSVASLVMSVTINDDDDDEVVNGQQKGRKLWGLVVCHHTCPRFVPFPLRYACEFLIQVFSMQINKEVELARQLREKHILQTKTVLCDMLLRDAPIGIFTQSPNVMDLVKCNGAALYYHQKFWLLGVTPTEAQIRDIVEWLVEYHNASTGLSTDSLVEAGYPGASILGNAVCGMAAAKITSKDFLFWFRSHTANEIKWGGAKHDPTEKDDGWKMHPRSSFKAFLDVVKHRSVPWEDIEMDAI

SEQ ID NO: 12040 - protein, 352 aa, Cabomba sp. SM-1999
DLEPVNPADMPSTAAGALKSYKLAAKAISRLQVLPSGNIGLLCDVLVREVSELTGYDRVMAYKFHEDEHGEVIAECKRPDLESYLGLHYPATDIPQASRFLFIKNKVRMICDCTAAPVKVIQNENLEPPLSLCGSTLRFPHGCHVQYMTNMGSIASLVMSVVINESDEATANDQPEAAATSEQPQKGRKLWGLVVCHHRKPRFIPYPLRYACEFLIQVFSVRLNKEVELAIQVREKHILRTQTVLCDMLLRDAPVGIVTQSPNIMDLVKCNGAALYYGKQFWLLGTTPTEAQIRDIIAWLHESHGSSTGLSTDSLMEAGYPRALVLGNAVCGMAAVKITSRDFLFWFRSHTA

SEQ ID NO: 12041 - protein, 374 aa, Siphonodon celastrineus
ALSIAGAVQSQKLAVRAISQLQSLAGGDIKLLCDTVVESVRDLTGHDRVMVYKFHEDEHGEVLAESKRPDMEPYIGLHYPATDIPQASRFLFKQNRVRMIVDCHASPVRVIQDDGLMRPLCLVGSTLRAPHGCHAQYMENMGSTTSLVMAAYINGNDEKATGGRNATKLWGLAVCHHTSARCIPFPLRYACEFLMQAFGLQLNMELQLAAQLSEKHVLKTQTLLCDMLLRDSPTGIVTQSPSIMDLVRCDGAALYYQGNYYPLGVTPTEAQIKDIVEWLLAVHGDSMGLSTDCLADAGYPGSALLGDAVCGMAVAHITNRDFLLWFRSHTAEEIKWGGAKHRPKDKDDGQRMHPRSSFKAFLEVVKSRSLPWEN

SEQ ID NO: 12042 - protein, 374 aa, Siphonodon celastrineus
ALSIAGAVQSQKLAVRAISQLQSLAGGDIKLLCDTVVESVRDLTGHDRVMVYKFHEDEHGEVLAESKRPDMEPYIGLHYPATDIPQASRFLFKQNRVRMIVDCHASPVRVIQDDGLMRPLCLVGSTLRAPHGCHAQYMENMGSTASLVMAAYINGNDKKATGGRNATKLWGLAVCHHTSARCIPFPFRYACEFLMQAFGLQLNMELQLAAQLSEKHVLKTQTLLCDMLLRDSPTGIVTQSPSIMDLVRCDGAALYYQGNYYPLGVTPTEAQIKDIVEWLLAVHGDSMGLSTDCLADAGYPGSALLGDAVCGMAVAHITNRDFLLWFRSHTAEEIKWGGAKHRPKDKDDGQRMHPRSSFKAFLEVVKSRSLPWEN

SEQ ID NO: 12043 - protein, 391 aa, Androstachys johnsonii
DLEPVNPADVPVTAAGALKSYKLAAKAISRLQSLPSGNISLLCDVLVKEVSDLTGYDRVMVYKFHEDEHGEVVAECRRPDLEPYLGLHYPATDIPQASRFLFMKNKVRMICDCLAPPVEVVQDGKLSQPLGLCGSTLRSPHGCHSQYMRNMGTIASLVMSVTINENDDEMEGDQQKGRKLWGLVVCHHTSPRFVPFPLRYACEFLIQVFGVQINKEVELAAQMREKHILRTQTLLCDMLLRNAPVAIITQSPNVMDLVKCDGAALYYRKKFWLLGITPTEAQIRDIAEWLLEYHSGTTGLSTDSLMEAGYPGASILGDAVCGMAAVRITSKDFLFWFRSHTAKEIKWGGAKHDPNDKEDGRKMHPRSSFKAFLEVVKRRSLPWEDMEMDAI

SEQ ID NO: 12044 - protein, 392 aa, Galphimia gracilis
DLEPVNPADVPVTAAGALKSYKLAARAISRLQSLPSGNISLLCDVLVKEVRDLTGYDRVMVYRFHDDEHGEVVSECCGPDLEAYLGLHYPATDIPQASRFLFMKNKVRMICDCLAPPVKVLQDERLPQPLSLCGSTLRSPHGCHAQYMANMGTMASLVMSVTINEDDNMLDGDQQHMARKLWGLVVCHHTSPRFVPFPLRYACEFLIQVFGVQINKEVELAAQMTEEHILRTQTLLCDMLLRDAPVAIITQSPNVMDLVKCDGAALYYRKKFWLLGVTPTEAQIRGIAEWLLEYHGGNTGLSTDSLMEAGYPGASVLGDAVCGMAAVKITSRDFLFWFRSNTAKEIKWSGAKHDPGDKDDIKKMHPRSSFKAFLEVVKWRSLPWEDVEMDAI

SEQ ID NO: 12045 - protein, 192 aa, Dacrydium franklinii
DDHGEVISEIRKSDLEPYLGLHYPATDIPQASRFLFMKNRVRMICDCQAPPIRVVEGKRLPRELNLCGSTLRAPHGCHAQYMSNMGSIASLVIAVIVNEKDEEEGDSEGQHQQKGKRLWGLVVCHHTSPRFVPLPLRYACEFLMQVFGIQLNKEVELAAQTREKHILRTQTLLCDMLLRDAPTGIVTRKPNI

SEQ ID NO: 12046 - protein, 189 aa, Dacrydium franklinii
DDHGEVIAEMRRSDLEPYLGLHYPATDIPQAARFLFMKNKVRMICDCRGMPVKMIQSKKLEQPLSLSGSTLRAPHGCHAQYMANMGSVASLVMSVTINDNNGNDEDRENGGSRRLWGLVVCHHTSPRFVPFPVRYACEFLMQVFGIQLNKELELAAQLREKHILRTQTVLCDMLLRDAPVGIVTQNPNI

SEQ ID NO: 12047 - protein, 189 aa, Dacrydium franklinii
DEHGEVVAEIRRSDLEPYLGLHYPATDIPQASRFLFMQNRVRMICDCSATPVQVIQSEELRQPLCLVGSTLRAPHGCHAQYMANMGSIASLVMAVVINGNDEEGAGTSGRSSMKLWGLVVCHHTSPRAVPFPLRYACEFLMQAFGLQLNMELQLAAQLTEKHILRTQTLLCDMLLRDAPIGIVTQSPSI

SEQ ID NO: 12048 - protein, 192 aa, Macrozamia communis
DDHGEVVAEIRRSDLEPYLGLHYPATDIPQACKFLFMKNRVRMICDCCPAPVRVVQDKKLARDLTLCGSTLRAPHGCHSQYMSNMGSIASLVMAVIINEKEEEEGDNGDQQQLKGRRLWGLVVCHHASPRFVPFPLGYACEFLMQVFGIQLNKEVELAAQLREKHILRTQTLLCDMLLRDAPIGIVTQSPSI

SEQ ID NO: 12049 - protein, 189 aa, Macrozamia communis
DDHGEVVAEIRRSDLEPYLGLHYPATDIPQASRFLFMRNRVRMICDCSSPPVKVVQDKRCPKPLSLCGSTLRAPHGCHAQYMANMASIASLVMAVTINDDDDDIGSSGQQKGRRLWGLMVCHHTSPRFVPFPLRYACQFLMQVFGIQLNREVELAAQLREKHILRTQTVLCDMLLRDAPDGIVAQTPNI

SEQ ID NO: 12050 - protein, 187 aa, Macrozamia communis
DEHGEVVAEIRRSDLEPYLGLHYPATDIPQASRFLFMQNRVRMICDCRATPVRVIQAAELRQPLCLVGSTLRAPHGCHAQYMANMGSIASLVMAVVINGNDEAGGSGRSSMKLWGLVVCHHTSPRAVPFPLRYACEFLMQAFGLQLNMELQLAAQLTEKHILKTQTLLCDMLLRDAPIGIVTQSPSI

SEQ ID NO: 12051 - protein, 190 aa, Blechnum spicant
DEHGEVVAEIRKSDLEPYLGLHYPATDIPQASRFLFMKNRVRMISDCLAIPVKVIQDRELRQPLSLAGSTLRAPHGCHSQYMANMGSAASLVMAVTVNDNEEASSSRNHQPKQRKLWGLVVCHHTTPRAVSFPLRSACEFLMQVFGLQLNMEVELAAQMREKHILRTQTLLCDMLLRDAPIGIVSESPNI

SEQ ID NO: 12052 - protein, 188 aa, Blechnum spicant
DEHGEVVAEIRRADLEPYMGLHYPATDYPQAARFVFMKNRVRMICDCTLPPVKISQDKNLAQPLSLTGSTLRAPHGCHAQYMSNMGSIASLVMAVIVNDSDVDSAGHTSQGIKLWGLVVCHHTSPRYVPFPVRSACEFLMQVFSLQLNMEVGMAAQVREKHILRTQTLLCDMLLRDAPIGIVSQSPSI

SEQ ID NO: 12053 - protein, 190 aa, Marattia laevis
DEHGEVVAEIRRSDLEPYLGLHYPATDIPQASRFLFMKNKVRMICDCTIPPVGVIQHKGLRQPLSLAGSTLRAPHGCHTQYMENMGSIASLVMAVLVNDNDEESSKSSYHTKYRKLWGLIVCHHTKPRAVPFPLRSACEFLMQVFGLQLNMEVELAAQMREKHVLRTQTLLCDMLLRDAPIGIVSRSPNI

SEQ ID NO: 12054 - protein, 190 aa, Marattia laevis
DDHGEVVAEIRRSNLEPYLGLHYPATDIPQASRFLFMKNRVRMICDCSAPPVKVIQDKKLGQPLSLTSSTLRAPHGCHSLYMGNMGSIASLVMAVVINDNEDDIIKNGHAYQGRRLWGMVVCHHTSPRFVPFPVRSACEFLMQVFGLQLNMEVGMAAQLREKHILKTQTVLCDMLLRDAPIGIVSKSPNI

SEQ ID NO: 12055 - protein, 724 aa, Bradyrhizobium sp. ORS278
MPVPLTTPAFGHATLANCEREQIHLAGSIQPHGILLAVKEPDNVVIQASINAAEFLNTNSVVGRPLRDLGGDLALQILPHLNGPLHLAPMTLRCTVGSPPRRVDCTVHRPSNGGLIVELEPATKTTNVAPALDGAFHRITSSSSLIGLCDETATIFREITGYDRVMVYRFDEEGHGEVLSERRRPDLEAFLGNRYPASDIPQIARRLYERNRVRLLVDVNYTPVPLQPRISPLNGRDLDMSLSCLRSMSPIHQKYLQNMGVGATLVCSLMVSGRLWGLIACHHYEPRFVPFDIRAAGEALAETCAIRIAALESFAQSQSELVVRRLEQRLVEAVSRDGEWQAALFDGSQSLLQPLGASGAALLFEGQVMTAGDVPSTQRIRDLATWLDRRRKAPDAPPQGLTVTASLTLDDPSFADIRSIASGLIAAPLSASEGEYLLWFRPEQVRTVTWGGDPLKAVIIGDDPSDLSPRRSFAQWHQLVEGKSEPWSPAELASARLVSETVADVALQLRSVRMVIAQDQLATISAQVLRSEQPVIIADVEGRILLLNEAFEQQLRASHPHIPHLRDLGAYCTAPAEFRANLDDLMRNKRSWRGELTLTGGATPQRPLMVRADPVIAPHDRVLGFVLIFSDLTERKTAEAARARFQEEIDGARRPSLRLDQSASLIYKELAASTVENAQLAALEVTHGAEAGSMPEMLESIRNSTARTLGILEHLVWYRSQSEE

SEQ ID NO: 12056 - protein, 748 aa, Synechocystis sp. PCC 6803
MATTVQLSDQSLRQLETLAIHTAHLIQPHGLVVVLQEPDLTISQISANCTGILGRSPEDLLGRTLGEVFDSFQIDPIQSRLTAGQISSLNPSKLWARVMGDDFVIFDGVFHRNSDGLLVCELEPAYTSDNLPFLGFYHMANAALNRLRQQANLRDFYDVIVEEVRRMTGFDRVMLYRFDENNHGDVIAEDKRDDMEPYLGLHYPESDIPQPARRLFIHNPIRVIPDVYGVAVPLTPAVNPSTNRAVDLTESILRSAYHCHLTYLKNMGVGASLTISLIKDGHLWGLIACHHQTPKVIPFELRKACEFFGRVVFSNISAQEDTETFDYRVQLAEHEAVLLDKMTTAADFVEGLTNHPDRLLGLTGSQGAAICFGEKLILVGETPDEKAVQYLLQWLENREVQDVFFTSSLSQIYPDAVNFKSVASGLLAIPIARHNFLLWFRPEVLQTVNWGGDPNHAYEATQEDGKIELHPRQSFDLWKEIVRLQSLPWQSVEIQSALALKKAIVNLILRQAEELAQLARNLERSNADLKKFAYIASHDLQEPLNQVSNYVQLLEMRYSEALDEDAKDFIDFAVTGVSLMQTLIDDILTYAKVDTQYAQLTFTDVQEVVDKALANLKQRIEESGAEIEVGSMPAVMADQIQLMQVFQNLIANGIKFAGDKSPKIKIWGDRQEDAWVFAVQDNGIGIDPQFFERIFVIFQRLHTRDEYKGTGMGLAICKKIIEGHQGQIWLESNPGEGSTFYFSIPIGN

SEQ ID NO: 12057 - protein, 1276 aa, Synechocystis sp. PCC 6803
MNPNRSLEDFLRNVINKFHRALTLRETLQVIVEEARIFLGVDRVKIYKFASDGSGEVLAEAVNRAALPSLLGLHFPVEDIPPQAREELGNQRKMIAVDVAHRRKKSHELSGRISPTEHSNGHYTTVDSCHIQYLLAMGVLSSLTVPVMQDQQLWGIMAVHHSKPRRFTEQEWETMALLSKEVSLAITQSQLSRQVHQQQVQEALVQRLETTVAQYGDRPETWQYALETVGQAVEADGAVLYIAPDLTGSVAQHYQWNLRFDWGNWLETSLWQELMRGQPSAAMEPMAAVQSTWEKPRPFTSVAPLPPTNCVPHGYTLGELEQRSDWIAPPESLSAENFQSFLIVPLAADQQWVGSLILLRKEKSLVKHWAGKRGIDRRNILPRLSFEAWEETQKLVPTWNRSERKLAQVASTQLYMAITQQFVTRLITQQTAYDPLTQLPNWIIFNRQLTLALLDALYEGKMVGVLVIAMDRFKRINESFGHKTGDGLLQEVADRLNQKLSPLAAYSPLLSRWHGDGFTILLTQISDNQEMIPLCERLLSTFQEPFFLQGQPIYLTASMGISTAPYDGETAESLLKFAEIALTRAKCQGKNTYQFYRPQDSAPMLDRLTLESDLRQALTNQEFVLYFQPQVALDTGKLLGVEALVRWQHPRLGQVAPDVFIPLAEELGLINHLGQWVLETACATHQHFFRETGRRLRMAVNISARQFQDEKWLNSVLECLKRTGMPPEDLELEITESLMMEDIKGTVVLLHRLREEGVQVAIDDFGTGYSSLSILKQLPIHRLKIDKSFVNDLLNEGADTAIIQYVIDLANGLNLETVAEGIESEAQLQRLQKMGCHLGQGYFLTRPLPAEAMMTYLYYPQILDFGPTPPLPKVALPETETEAGQGNVGDRPLPNSLNRENPWTEKLHDYVLLKERLQQRNVKEKLVLKIANKIRASLNINDILYSTVTEVRQFLNTDRVVLFKFNSQWSGQVVTESHNDFCRSIINDEIDDPCFKGHYLRLYREGRVRAVSDIEKADLADCHKELLRHYQVKANLVVPVVFNENLWGLLIAHECKTPRYWQEEDLQLLMELATQVAIAIHQGELYEQLETANIRLQQISSLDALTQVGNRYLFDSTLEREWQRLQRIREPLALLLCDVDFFKGFNDNYGHPAGDRCLKKIADAMAKVAKRPTDLVARYGGEEFAIILSETSLEGAINVTEALQVEVANLAIPHTVSGTGHVTLSIGIAVYTPERHINPNALVKAADLALYEAKAKGRNQWLAYEGSQLPHVDGEV

SEQ ID NO: 12058 - protein, 765 aa, Tolypothrix sp. PCC 7601
MLQLIYNNFIVSLSPENSPENAAIAPFEVDLTNCDREPIHIPGSIQPHGMLLALTEPELTIVQVSRNTDEILGVAATEFINQPLSRLLDAQQIDFFRNCLAQEDLTLVNPIELTIAVGENARAFDGIIHRSDRLLILELEPVLHQKNYTFFNFYHLVKAALSKVQNASTLDELCQIIVKHVRQMNGFDRVMIYRFDENWHGTVIAEDKSAHLSPYLSLRYPASDIPKQARQLYRDNWLRLIPDVDYQPVALLPHHNPVTNQPTDLSHSVLRSVSPLHIEYLHNMGVKASMSISLLKNQKLWGLIACHHESPKYVPYEIRSACEFLGQMTSLELAAKEDSENTEYKMQLKAVQSKLVEYMAAANNFVDGLIGQEPNLLDLVNATGAAVCINGEYQTLGRTPQHREIEQLINWLSQHTQEEVFHTNCLSELLPEASEWKDVASGLMALSISKSQKSYLLWFRPEALQTVDWAGNPHKPVELADDGSLRLSPRKSFDLWKEIVQRQSLPWESYEIEAVWNFRSAIVGVVLRKADELAKMNVELQRSNDELDAFAYIASHDLKEPLRGIHHYSSFLIEDYGNRLDDEGIGRLRTLIRLTQRMENLIDSLLHFSRLGRVELGIQPTDLNDLVQRVIDVLSARIQETGATIRIPRPLPTIMCDRVQVSAIFTNLIANGIKYNDKPEIWVEIGYLEPITLYVRDNGIGIRDRHFESIFRIFKRLHGPTQYGGGTGAGLTIAKKVVERHGGKIWVESTYGEGSTFYFTLQEVK

SEQ ID NO: 12059 - protein, 767 aa, Tolypothrix sp. PCC 7601
MVSEFQAQSINVNSLKEAAIHVCSQIQPHGVLLVLGEPELNILQISSNTWSVFGILPEDVLQKKLEDLLDPFQIERIKAGILEGNLDYINPTKIWVRKKGDEYVVFDAVFHRNPEGLLILELEPAISQENIPFLSFYHLARASINQLEKTTNLRDFCQIIVQEVRKVTGFDRVMLYKFDDDGHGSVIAEEKLDSMEPYLGLHYPESDIPKPARKLFASNFIRLIPDAHAEPVQILPINHPQSQQPIDLTNSILRTAANCHLEYLHNMGVGASLTISLIKDGKLWGLIACHHQTPKYVSYEFRKACEFLGRVIFTEISTREETEDYDYRMNLAYIQTVLVEYMSQEENFIDGLVKHQPNLLNLTSAQGAAVCFGDRCTVIGQTPKEEDLNFLLQWLKNNVREEVFYTDSLPRIYPDAEKFKNVASGLLAIPISKRNYVLWFRPEVIQTVNWGGNPNEAFEVSQTEGNLRLVPRKSFELWKENVQLTSLRWKAVEIKAALELRKAIINIVLRQADELAQLAHDLERSNAELKKFAYVASHDLQEPLNQVANYVQLLEMRYENELDEDAKEFINFAVEGVSLMQTLIDDVLAYSKVDMQASAFQLTEVETPLNRSLSNLRGRIHETGAMITHDPLPTVMADSTQLMQLFQNLIANAIKFRSEQPPKIHIGAERLEDEWLFSVQDNGIGLEPRFSDRIFVIFQRLHTREEYPGTGMGLAICKKIIECHRGRIWVESQLGEGATFYFTIPVGGRERERRNGRQTQKDLFGRG

SEQ ID NO: 12060 - protein, 139 aa, Tolypothrix sp. PCC 7601
LYKFDDDGHGSVIAEEKLDSMEPYLGLHYPESDIPKPARKLFASNFIRLIPDAHAEPVQILPINHPQSQQPIDLTNSILRTAANCHLEYLHNMGVGASLTISLIKDGKLWGLIACHHQTPKYVSYEFRKACEFLGRVIF

SEQ ID NO: 12061 - protein, 139 aa, Tolypothrix sp. PCC 7601
IYRFDENWHGTVIAEDKSAHLSPYLSLRYPASDIPKQARQLYRDNWLRLIPDVDYQPVALLPHHNPVTNQPTDLSHSVLRSVSPLHIEYLHNMGVKASMSISLLKNQKLWGLIACHHESPKYVPYEIRSACEFLGQMTS

SEQ ID NO: 12062 - protein, 681 aa, Ralstonia metallidurans
MRIQHAFRLITLAMVATIVGFGSYLWTEEWRAYAVAQHSEAMLQAFRATLVAAEKVSAERGPSNAALGAAPGVAAGALLRAREQSDASLTAAIAMLHGANCPECGAAKGSLEHARAQLAAARSQIDRLIARPLSERHDVQRAVSGMFTIVDEILRVADGPLSRLQRSAPVAAQHAVSARFAAELREYAGRAGSEFTSALVSNRPMHSEERERLAGDLGRVQTLGDQIQQRVSFQLASKPGLRDADTALHKRFFGDGLAYLQKVEAIGPAEPRPTTAELASTYVPLMAPIVAMRDAVLDVAQAEVQADTTRAKRRLGGLLAILAIITSFVAATFWLFAKRVLRPLTLATEATVELAEGRYDGPTHVWPKTDEIGAIFVALEQLRAGLLRKVALEHERTTLIARLQAAVTHERAQMMALAQARDAAEASARTKSSFLAMMSHEIRTPLQGILGLLELVEYSPLSAEQRRQVRLASEAGQALRQILDDVLDYAKMDAGRLRLALAPLDLRGLFANVLSLLAPRAQAKGLQLQQWVQPDVPVQLVADGARLRQILLNLVGNAIKFTECGSVDLLASVEPTSAGEDVLVVSVADTGIGIAPEDIARLFTPFVQGESGPARRFDGTGLGLAISRQLAQLMGGELMLDSTLGVGTQVMLRVPMPGCPDAGSPLSNSERREHRAEFRLA

SEQ ID NO: 12063 - protein, 364 aa, Dicarpellum baillonianum
VQSQKLAVRAISQLQSLPGGDIKLLCDTVVECVGDLTGYDRVMVYRFHEDEHGEVVAESKRPDLEPYLGLHYPATDIPQASRSLFKQNRVRMIVDCHASPVRVIQDDGLMQALCLVGSTLRAPHGCHAQYMENMGSIASLAMAVIINVNDEEATAGRNPTRLWGLVVCHHTSARCIPFPLRYACEFIMQAFGLQLNMELQLAAQLLEKHVLKTQTLLCDMLLRDSPTGIVTQSPSIMNLVKCDGAALYYQGNYYPLGVTPAEAQIKDIVEWLLAFHGDSTGLSTDSLADAGYPGAALLGDAVCGMAVAYITNRDFLFWFRSHTAKETKWGGAKHHPEDKDDGQRMHPRSSFKAFLEVVKSRSLP

SEQ ID NO: 12064 - protein, 362 aa, Dicarpellum baillonianum
QSQKLAVRAISQLQSLPGGDIKLLCDTVVECVGDLTGYDRVMVYRFHEDEHGEVVAESKRPDLEPYLGLHYPATDIPQASRSLFKQNRVRMIVDCHASPVRVIQDDGLMQALCLVGSTLRAPHGCHAQYMENMGSIASLAMAVIINVNDEEATAGRNPTRLWGLVVCHHTSARCIPFPLRYACEFIMQAFGLQLNMELQLAAQLLEKHVLKTQTLLCDMLLRDSPTGIVTQSPSIMNLVKCDGAALYYQGNYYPLGVTPAEAQIKDIVEWLLAFHGDSTGLSTDSLADAGYPGAALLGDAVCGMAVAYITNRDFLFWFRSHTAKETKWGGAKHHPEDKDDGQRMHPRSSFKAFLEVVKSRSL

SEQ ID NO: 12065 - protein, 364 aa, Dicarpellum pancheri
VQSQKLAVRAISQLQSLPGGDIKLLCDTVVECVGDLTGYDRVMVYRFHEDEHGEVVAESKRPDLEPYLGLHYPATDIPQASRFLFKQNRVRMIVDCHASPVRVIQDDGLMQALCLVGSTLRAPHGCHAQYMENMGSIASLAMAVIINGNDEEATAGRNPTRLWGLVGCHHTSARCIPFPLRYACEFIMQAFGLQLNMELQLAAQLLEKHVLKTQTLLCDMLLRDSPTGIVTQSPSIMNLVKCDGAALYYQGNYYPLGVTPAEAQIKDIVEWLLAFHGDSTGLSTDSLADAGYPGAALLGDAVCGMAVAYITNRDFLFWFRSHTAKETKWGGAKHHPEDKDDGQRMHPRSSFKAFLEVVKSRSLP

SEQ ID NO: 12066 - protein, 365 aa, Dicarpellum pancheri
QSQKLAVRAISQLQSLPGGDIKLLCDTVVECVGDLTGYDRVMVYRFHEDEHGEVVAESKRPDLEPYLGLHYPATDIPQASRFLFKQNRVRMIVDCHASPVRVIQDDGLMQALCLVGSTLRAPHGCHAQYMENMGSIASLAMAVIINGNDEEATAGRNPTRLWGLVGCHHTSARCIPFPLRYACEFIMQAFGLQLNMELQLAAQLLEKHVLKTQTLLCDMLLRDSPTGIVTQSPSIMNLVKCDGAALYYQGNYYPLGVTPAEAQIKDIVEWLLAFHGDSTGLSTDSLADAGYPGAALLGDAVCGMAVAYITNRDFLFWFRSHTAKETKWGGAKHHPEDKDDGQRMHPRSSFKAFLEVVKSRSLPGR

SEQ ID NO: 12067 - protein, 374 aa, Acanthothamnus aphyllus
ALSIAGAVQSQKLAVRAISHLQSLPGGDIKLLCATVVDSVRDLTGYDRVMVYKFHEDEHGEVVAESKRPDLEPYIGLHYPATDIPQASRFLFKQNRVRMIVDCRASPVGVRQDDGLMQPLCLVGSTLRAPHGCHAQYMENMGSKASLAMAVIINGNDEESIGGRNATRLWGLVVCHHTSARCIPFPLRYACEFLMQAFGLQLNMELQLAAQLSEKHVLKTQTLLCDMLLRDSPTSIVTQSPSIMDLVKCDGAALYYQGKYCPLGVTPAEAQIKDIVEWLLAFHGDSTGLSTDSLGDAGYPGAALLGNAVCGMAVAYITNRDFLLWFRSHTTKEIKRGGAKHHPEDKDDGQRMHPRSSFKAFLEVVKSRSLPWEN

SEQ ID NO: 12068 - protein, 360 aa, Acanthothamnus aphyllus
AVQSQKLAVRAISHLQSLPGGDIKLLCATVVDSVRDLTGYDRVMVYKFHEDEHGEVVAESKRPDLEPYIGLHYPATDIPQASRFLFKQNRVRMIVDCRASPVGVRQDDGLMQPLCLVGSTLRAPHGCHAQYMENMGSKASLAMAVIINGNDEESIGGRNATRLWGLVVCHHTSARCIPFPLRYACEFLMQAFGLQLNMELQLAAQLSEKHVLKTQTLLCDMLLRDSPTSIVTQSPSIMDLVKCDGAALYYQGKYYPLGVTPAEAQIKDIVEWLLAFHGDSTGLSTDSLGDAGYPGAALLGNAVCGMAVAYITNRDFLLWFRSHTTKEIKWGGAKHHPEDKDDGQRMHPRSSFKAFLEVVK

SEQ ID NO: 12069 - protein, 363 aa, Campylostemon angolense
QSQKLAVRAISQLQSLPGGDIKLLCDTAVESVRNLTGYDRVMVYKFHEDEHGEVVAESRRPDLEPYIGLHYPATDIPQASRFLFKQNRVRIIVDCHASPVSVIQDDGLMQPLCLVGSTLRAPHGCHAQYMENMGSIASLAMAVIINGNDEDGIGGRNPTRLWGLVVCHHTSVRCIPFPLRYACEFLMQAFGLQLNMELQLAAQLLEKHVLKTQTLLCDMLLRESPTGIVTQSPSIMDLVKCDGAALYYQGNYYPSGVTPTEAQIKDIVNWLLAFHGDSTGLSTDSLADAGYPGATLLGDAVCGMAVAYITNRDFLFWFRSHTAKEIKWGGAKHHPEDKDDGQRMHPRSSFKAFLEVVKSRSLP

SEQ ID NO: 12070 - protein, 361 aa, Campylostemon angolense
QKLAVRAISQLQSLPGGDIKLLCDAAVESVRNLTGYDRVMVYKFHEDEHGEVVAESRRPDLEPYIGLHYPATDIPQASRFLFKQNRVRIIVDCHASPVSVIQDDGLMQPLCLVGSTLRAPHGCHAQYMENMGSIASLAMAVIINGNDEDGIGGRNPTRLWGLVVCHHTSVRCIPFPLRYACEFLMQAFGLQLNMELQLAAQLLEKHVLKTQTLLCDMLLRESPTGIVTQSPSIMDLVKCDGAALYYQGNYYPSGVTPTEAQIKDIVNWLLAFHGDSTGLSTDSLADAGYPGATLLGDAVCGMAVAYITNRDFLFWFRSHTAKEIKWGGAKHHPEDKDDGQRMHPRSSFKAFLEVVKSRSLP

SEQ ID NO: 12071 - protein, 374 aa, Catha edulis
ASSIAGAVQSQKLAVRAISQLQSLPGGDIKLLCDTVVESVRDLTGYDRVMVYKFHEDEHGEVVAESKRPDLEPYIGLHYPASDIPQASRFLFKQNRVRMIVDCRASPVRVIQDDGLMRPLCLVGSTLRAPHGCHAQYMENMGSLASLAMAVIINGNDEEVTGGRNPTRLWGLVVCHHTSARCIPFPLRYACEFLMQAFGLQLNMELQLAAQSLEKHVLKTQTLLCDRFLRDPPTGIVTQSPSIMDLVKCDGAALYYQGNYYPLGVTPTEVQIKDIVEWLLAFHGDSTGLSTDSLADAGYPGAALLGDAVCGMAVAYITNKDFLFWFRSHTAKEIKWGGAKHHPEDKDDGQRMHPRSSFKAFLEVVKSRSLPWEN

SEQ ID NO: 12072 - protein, 373 aa, Celastrus scandens
ALSIAGAVQSQKLAVRAISRLQSLPGGDIKLLCDTVVESVRDLTSYDRVMVYKFHEDEHGEVVAESKRPDLEPYFGLHYPSTDIPQASRFLFKQNRVRMIADCRASPVGVIQDDGLMQPLCLVGSTLRAPHGCHAQYMENMGSKSSLAMAVIINGTDEEVIGGRNATRLWGLVVCHHTSARCIPFPLRYACEFLMQAFGLQLNMELQLAAQLSEKHVLKTQTLLCDMLLRDSPTGIVTQSPSIMDLVKCDGAALYYQGKYYPIGVTPVEAQIKDIVEWLLTFHGDSTGLSTDSLADAGYPGAALLGDAVCGMAVAYITKKDFLFWFRSHTTKEIKWGGAKHHPEDKDDGQRMHPRSSFKAFLEVVKSRSLPCE

SEQ ID NO: 12073 - protein, 370 aa, Celastrus scandens
ALSIAGAVQSQKLAVRAISRLQSLPGGDIKLLCDTVVESVRDLTSYDRVMVYKFHEDEHGEVVAESKRPDLEPYFGLHYPSTDIPQASRFLFKQNRVRMIADCRASPVGVIQDDGLMQPLCLVGSTLRAPHGCHAQYMENMGSKSSLAMAVIINGTDEEVIGGRNATRLWGLVVCHHTSARCIPFPLRYACEFLMQAFGLQLNMELQLAAQLSEKHVLKTQTLLCDMLLRDSPTGIVTQSPSIMDLVKCDGAALYYQGKYYPIGVTPVEAQIKDIVEWLLTFHGDSTGLSTDSLADAGYPGAALLGDAVCGMAVAYITKKDFLFWFRSHTTKEIKWGGAKHHPEDKDDGQRMHPRSSFKAFLEVVKSRSL

SEQ ID NO: 12074 - protein, 364 aa, Celastrus scandens
VQSQKLAVRAISRLQSLPGGDIKLLCDTVVESVRDLTSYDRVMVYKFHEDEHGEVVAESKRPDLEPYFGLHYPSTDIPQASRFLFKQNRVRMIADCRASPVGVIQDDGLMQPLCLVGSTLRAPHGCHAQYMENMGSKSSLAMAVIINGTDEEVIGGRNATRLWGLVVCHHTSARCIPFPLRYACEFLMQAFGLQLNMELQLAAQLSEKHVLKTQTLLCDMLLRDSPTGIVTQSPSIMDLVKCDGAALYYQGKYYPIGVTPVEAQIKDIVEWLLTFHGDSTGLSTDSLADAGYPGAALLGDAVCGMAVAYITKKDFLFWFRSHTTKEIKWGGAKHHPEDKDDGQRMHPRSSFKAFLEVVKSRSLP

SEQ ID NO: 12075 - protein, 374 aa, Cuervea integrifolia
ALSIAGAVQSQKLAVRAISQLQSLPGGDIKLLCDTAVESVRNLTGYDRVMVYKFHEDEHGEVVAESRRPDLEPYIGLHYPATDIPQASRFLFKQNRVRIIVDCHASPVSVIQDDGLMQPLCLVGSTLRAPHGCHAQYMENMGSIASLAMAVIINGNDEDGIGGRNPTRLWGLVVCHHTSARCIPFPLRYACEFLMQAFGLQLNMELQLAAQLLEKHVLKTQTLLCDMLLRESPTGIVTQSPSIMDLVKCDGAALYYQANYYPLGVTPTEAQIRDIVEWLLAFHGDSTGLSTDSLADAGYPGATLLGDAVCGMAVAYITNRDFLFWFRSHTAKEIKWGGAKHHPEDKDDGQRMHPRSSFKAFLEVVKSRSLPWEN

SEQ ID NO: 12076 - protein, 363 aa, Cuervea kappleriana
SQKLAVRAISQLQSLPGGDIKLLCDTAVESVRNLTGYDRVMVYKFHEDEHGEVVAESRRPDLEPYIGLHYPATDIPQASRFLFKQNRVRIIVDCHASPVSVIQDDGLMQPLCLVGSTLRAPHGCHAQYMENMGSIASLAMAVIINGNDEDGIGGRNATRLWGLVVCHHTSARCIPFPLRYACEFLMQAFGLQLNMELQLAAQLLEKHVLKTQTLLCDMLLRESPTGIVTQSPSIMDLVKCDGAALYYQANYYPLGVTPTEAQIRDIVEWLLAFHGDSTGLSTDSLADAGYPGATLLGDAVCGMAVAYITNRDFLFWFRSHTAKEIKWGGAKHHPEDKDDGQRMHPRSSFKAFLEVVKSRSLPG

SEQ ID NO: 12077 - protein, 361 aa, Elaeodendron orientale
QKLAVRAISQLQSLPGGDIKLLCDTVVECVRDLTGYDRVMVYKFHEDEHGEVVAESKRPDLEPYIGLHYPSTDIPQASRFLFKQNRVRIIVDCHASPVCVIQDDGLMQPLCLVGSTLRAPHGCHAQYMENMGSIASLAMAVVINGNDEEVIRGKNLTRLWGLVVCHHTSARCIPFPLRYACEFLMQAVGLQLNMELQLAAQLLEKHVLKTQTLLCDMLLRDSPIGIVTQSPSIMDLVKCDGAALYYQGNYYPLGVTPSEVQIKDIVEWLLAFHGDSTGLSTDSLADAGYPRAALLGDAVCGMAVAYITNRDFLFWFRSHTAKEIKWGGAKHHPEEKDDGQRMHPRSSFKAFLEVVKSRSLP

SEQ ID NO: 12078 - protein, 362 aa, Elaeodendron orientale
QSQKLAVRAISQLQSLPGGDIKLLCDTVVECVRDLTGYDRVMVYKFHEDEHGEVVAESKRPDLEPYIGLHYPSTDIPQASRFLFKQNRVRIIVDCHASPVCVIQDDGLMQPLCLVGSTLRAPHGCHAQYMENMGSIASLAMAVVINGNDEEVIRGKNLTRLWGLVVCHHTSARCIPFPLRYACEFLMQAVGLQLNMELQLAAQLLEKHVLKTQTLLCDMLLRDSPIGIVTQSPSIMDLVKCDGAALYYQGNYYPLGVTPSEVQIKDIVEWLLAFHGDSTGLSTDSLADAGYPRAALLGDAVCGMAVAYITNRDFLFWFRSHTAKEIKWGGAKHHPEEKDDGQRMHPRSSFKAFLEVVKSRSC

SEQ ID NO: 12079 - protein, 374 aa, Elaeodendron xylocarpum
ALSIAGAVQSQKLAVRAISQLQSLPGGDIKLLCDTVVESVRDLTSYDRVMVYKFHEDEHGEVVAESKRPDLEPYIGLHYPSTDIPQASRFLFKQNRVRIIVDCHASPVRVIQDGGLTQPLCLVGSTLRAPHGCHAQYMENMGSIASLAMAVVINGNDEEVIGGRNPTRLWGLVVCHHTSARCIPFPLRYACEFLMQAFGLQLNMELQLAAQLLEKHVLKTQTLLCDMLLRDSPIGIVTQSPSIMDLVKCDGAALYYQGNYYPLGVTPSEAQIKDIVEWLLAFHGDSTGLSTDSLADAGYPGAALLGDAVCGMAVAYITNRDFLFWFRSHTAKEIKWGGAKHHPEDKDDGERMHPRSSFKAFLEVVKSRSLPWEN

SEQ ID NO: 12080 - protein, 374 aa, Elaeodendron xylocarpum
ALSIAGAVQSQKLAVCAISQLQSLPGGDIKLLCDTVVESVGDLTGYDRVMVYKFHEDEHGEVVAESKRPDLEPYIGLHYPSTDIPQASRFLFKQNRVRIIVDCHASPVRVIQDGGLTQPLCLVGSTLRAPHGCHAQYMENMGSIASLAMAVVINGNDEEVIGGRNPTRLWGLVVCHHTSARCIPFPLRYACEFLMQAFGLQLNMELQLAAQLLEKHVLKTQTLLCDMLLRDSPIGIVTQSPSIMDLVKCDGAALYYQGNYYPLGVTPSEAQIKDIVEWLLAFHGDSTGLSTDSLADAGYPGAALLGDAVCGMAVAYITNRDFLFWFRSHTAKEIKWGGAKHHPEDEDDGERMHPRSSFKAFLEVVKSRSLPWEN

SEQ ID NO: 12081 - protein, 374 aa, Euonymus europaeus
ALSIAGAVQSQKLAVRAISRLQSLPGGDIKLLCDTVVESVRDLTGYDRVMVYKFHDDEHGEVVAESKRHDLEPYFGLHYPATDIPQASGFLFKQNRVRMIVDCHASPVRVIQDDRLIQPLCLVGSTLRAPHGCHAQYMENMGSKASLAMAVIINGNDEEVIGGRNATRLWGLVVCHHTSARCTPFPLRYACEFLLQAFGLQLNMELQLAAQLSEKHVLKTQTLLCDMLLRDSPTGIVTKSPSIMDLVKCDGAALYYQGKYYPLGVTPAEAQIKDIVEWLLAFHGDSTGLSTDSLADAGYPGAASLGDSVCGMAVAYITNRDFLFWFRSHTTEEIKWGGAKHHPEDKDDGQRMHPRSSFQAFLEVVKSRSFPWEN

SEQ ID NO: 12082 - protein, 374 aa, Euonymus europaeus
ALSIAGAVQSQKLAVRAISQLQSLPGGDIKLLCDTVVESVRDLTGYDRVMVYKFHDDEHGEVVAESKRPDLEPYFGLHYPATDIPQASRFLFKQNRVRMIVDCHASPVCVIQDYRLIQPLCLVGSTLRAPQGGHAQYMENMGSKASLAMPVIINGNDEEVIGGRNATRLWGLVVCHHTSARCTPFPLRYACEFLLQAFGLQLNMELQLAAQLSEKHVLKTQTLLCDMLLRDSPTGIVTKSPSIMDLVKCDGAALYYQGKYYPLGVTPAQAQMKDIVEWLLAFHGDSTGLSTDSLADAGYPGAALLGDAVCGMAVAYITKRDFLFWFRSHTAKEIKWGGAKHHPEDKDDGQRMHPRSSFKAFLEVVKSKSLPWEN

SEQ ID NO: 12083 - protein, 374 aa, Gyminda tonduzii
ALSIAGAVQSQKLAIRAISQLQSLPGGDIKLLCDTVVESVRELTGYDRVMVYKFHEDEHGEVAAESKRTDLEPYFGLHYPATDIPQASRFLFRQNRVRMIVDCHASPVRVIQDDGLMQPLCLVGSTLRAPHGCHAQYMENMGSKASLAMAVIINGNDEEVIGGRNATRLWGLVVCHHTSARCIPFPLRYACEFPMQAFGLQLNMELQLAAQLSEKHVLKTQALLCDMLLRDSPTGIVTQSPSIMDLVKCDGAALYYQGKYFPIGVTPTEAQIKDIVEWLLVFHGDSTGLSTDSLADAGYPGAALLGDAVCGMAVAYITKKDFLFWFRSHTTKEIKWGGAKHHPEDKDDGQRMHPRSSFKAFLEVVKSRSLPWES

SEQ ID NO: 12084 - protein, 245 aa, Gymnosporia polyacantha
ALSIAGAVQSQKLAVRAISQLQSLPGGDIKLLCDTVVESVRNLTGYDRVMVYKFHEDEHGEVVAESKRSDLEPYMGLHYPASDIPQASRFLFKQNRVRMIVDCHASPVRVIQDDGLMQPLCLVGSTLRAPHGCHAQYMENMGSLASLAMAVIINGNEEEAIGGRSPTRLWGLVVCHHTSARCIPFPLRYACEFLMQAFGLQLNMELQLAAQLLEKHVLKTQTLLCDMLLRDSPTGIVTQSPSIMD

SEQ ID NO: 12085 - protein, 245 aa, Gymnosporia polyacantha
ALSIAGAVQSQKLAVRAISQLQSLPGGDIKLPCDTVVESVRNLTGYDRVMVYKFHEDEHGEVVAESKRSDLEPYIGLHYPASDIPQASRFLFKQNRVRMIVDCHASPVRVIQDDGLMQPLCLVGSTLRAPHGCHAQYMENMGSLASLAMAVIINGNEEEAIGGRSPTRLWGLVVCHHTSARCIPFPLRYACEFLMQAFGLQLNMELQLAAQLLEKHVLKTQTLLCDMLLRDSPTGIVTQSPSIMD

SEQ ID NO: 12086 - protein, 374 aa, Hippocratea volubilis
ALSIAGAVQSQKLAVRAISQLQSLPGGDIKLLCDTAVESVRDLTGYDRVMVYKFHEDEHGEVVAESKRPDLEPYIGLHYPATDIPQASRFLFKQNRVRIIVDCHASPVNVIQDDGLMQPLCLVGSTLRAPHGCHAQYMENMGSIASLAMAVVINGNDEDGIGGRNPTRLWGLVVCHHTSARCIPFPLRYACEFLMQAFGLQLNMELQLAAQLLEKHVLKTQTLLCDMLLRESPTGIVTQSPSTMDLVKCDGAALYYQANYYPLGVTPTEAQIKDIVEWLLVFHGDSTGLSTDSLADAGYPGATLLGDAVCGMAVAYITNRDFLFWFRSHTAEEIKWGGAKHHPEDKDDGLRMHPRSSFKAFLEVVKSRSLPWEN

SEQ ID NO: 12087 - protein, 374 aa, Hippocratea volubilis
ALSIAGAVQSQKLAVRAISQLQSLPGGDIKLLCDTAVESVRDLTGCDRVMVYKFHEDEHGEVVAESKRPDLEPYIGLHYPATDIPQASRFLFKQNRVRIIVDCHASPVNVIQDDGLMQPLCLVGSTLRAPHGCHAQYMENMGSIASLAMAVVINGNDEDGIGGRNPTRLWGLVVCHHTSARCIPFPLRYACEFLMQAFGLQLNMELQLAAQLLEKHVLKTQTLLCDMLLRESPTGIVTQSPSTMDLVKCDGAALYYQANYYPLGVTPTEAQIKDIVEWLLVFHGDSTGLSTDSLADAGYPGATLLGNAVCGMAVAYITNRDFLFWFRSHTAKEIKWGGAKHHPEDKDDGLRMHPRSSFKAFLEVVKSRSLPWEN

SEQ ID NO: 12088 - protein, 358 aa, Hippocratea volubilis
QSQKLAVRAISQLQSLPGGDIKLLCDTAVESVRDLTGYDRVMVYKFHEDEHGEVVAESKRPDLEPYIGLHYPATDIPQTSRFLFKQNRVRIIVDCHASPVNVIQDDGLMQPLCLVGSTLRAPHGCHAQYMENMGSIASLAMAVVINGNDEDGIGGRNPTRLWGLVVCHHTSARCIPFPLRYACEFLMQAFGLQLNMELQLAAQLLEKHVLKTQTLLCDMLLRESPTGIVTQSPSTMDLVKCDGAALYYQANYYPLGVTPTEAQIKDIVEWLLVFHGDSTGLSTDSLADAGYPGATLLGDAVCGMAVAYITNRDFLFWFRSHTAKEIKWGGAKRHPEDKDDGLRMHPRSSFKAFLEVVK

SEQ ID NO: 12089 - protein, 363 aa, Maytenus fournieri
QSQKLAVRAISQLQSLPGGDVKLLCETVVESVKDLTGYDRVMVYKFHDDEHGEVVAERKRPDLEPYIGLHYPATDIPQASRFLFKQNRVRMIVDCHALPVRVIQDDGLMQPLCLVGSTLRAPHGCHAQYMENMGSIASLAMAVIINGNDEEVIGGRNPTRLWGLVVCHHTSARCIPFPLRYACEFLMQAFGLQLNMELQLAAQLLEKHVLKTQTLLCDMLLRDSPTGIVTQSPSIMDLVKCDGAALYYQGSYYPLGVTPTEAQIKDIVEWLLAFHGDSTGLSTDSLADAGYPGAALLGDAVCGMAVAYITNRDFLFWFRSHTAKEIKWGGAKHHPEDKDDGQRMHPRSSFKAFLEVVKSRSMP

SEQ ID NO: 12090 - protein, 364 aa, Maytenus fournieri
VQSQKLAVRAISQLQSLPGGDVKLLCETVVESVKDLTGYDRVMVYKFHDDEHGEVVAERKRPDLEPYIGLHYPATDIPQASRFLFKQNRVRMIVDCHALPVRVIQDDGLMQPLCLVGSTLRAPHGCHAQYMENMGSIASLAMAVIINGNDEEVIGGRNPTRLWGLVVCHHTSARCIPFALRYACEFLMPAFGLQLNMELQLAAQLLEKHVLKTQTLLCDMLLRDSPTGIVTQSPSIMDLVKCDGAALYYQGSYYPLGVTPTEAQIKDIVEWLLAFHGDSTGLSTDSLADAGYPGAALLGDAVCGMAVAYITNRDFLFWFRSHTAKEIKWGGAKHHPEDKDDGQRMHPRSSFKAFLEVVKSRSMP

SEQ ID NO: 12091 - protein, 358 aa, Maytenus undata
SQKLAVRAISQLQSLPGGDIKLLCDTVVESVRDLTGYDRVMVYKFHEDEHGEVMAESKRPDLEPYIGLHYPASDIPQASRFLFKQNRVRMIVDCHASPVLVIQDDRLMQPLCLVGSTLRAPHGCHAQYMENMGSIASLAMAVIINVNDGEGIGGRNPTRLWGLVVCHHTSARCIPFPLRYACEFLMQAFGLQLNMELQLAAQLLEKHVLKTQTLLCDMLLRDSPTGIVTQSPSIMDLVKCDGAALYYQGNYYPLGVTPTEAQIKDIVEWLLAFHGDSTGLSTDSLADAGYPGAALLGDAVCGMAVAYITNRDFLFWFRSHTAKEIKWGGAKHHPEDKDDGQRMHPRSSFKAFLEVVKS

SEQ ID NO: 12092 - protein, 245 aa, Maytenus undata
ALSIAGAVQSQKLAVRAISQLQSLPGGDIKLLCDTVVESVRDLTGYDRVMVYKFHEDEHGEVMAESKRPDLEPYIGLHYPASDIPQASRFLFKQNRVRMIVYCHASPVLVIQDDRLMQPLCLVGSTLRAPHGCHAQYMENMGSIASLAMAVIINVNDGEGIGGRNPTRLWGLVVCHHTSARCIPFPLRYACEFLMQAFGLQLNMELQLAAQLLEKHVLKTQTLLCDMLLRDSPTGIVTQSPSIMD

SEQ ID NO: 12093 - protein, 245 aa, Mortonia greggii
ALSIAGAVQSQKLAVRAISQLQSLPGGDIKLLCDAVVENVRNLTGYDRVMVYKFHEDEHGEVVAESKRPDLEPYIGLHYPATDIPQASRFLFKQNRVRMIVDCHSTPVSVIQDDGLMQPLCLVGSTLRAPHGCHAQYMANMGSIASLAMAVIINGNDEDGIGGRNTTRLWGLVVCHHTSARCIPFPLRYACEFLMQAFGLQLNMELQLASQLLEKHVLKTQTLLCDMLLRDSPTGIVTQSPSIMD

SEQ ID NO: 12094 - protein, 245 aa, Mortonia greggii
ALSIAGAVQSQKLAVRAISQLQSLPGGDIKLLCDAVVENVRNLTGYDRVMVYKFHEDEHGEVVAESKRPDLEPYIGLHYPATDIPQASRFLFKQNRMRMIVDCHSTPVSVIQDDGLMQPLCLVGSTLRAPHGCHAQYMANMGSIASLAMAVIINGNDEDGIGGRNTTRLWGLVVCHHTSARCIPFPLRYACEFLMQAFGLQLNMELQLASQLLEKHVLKTQTLLCDMLLRDSPTGIVTQSPSIMD

SEQ ID NO: 12095 - protein, 245 aa, Paxistima canbyi
ALSIAGAVQSQKLAVRAISQLQSLPGGDIKLLCDTVVESVRDLTGYDRVMVYKFHEDEHGEVVAESKRPDLEPYIGLHYPATDIPQASRFLFKQNRVRTIVDCHASPVRVIQDDGLMQPLCLVGSTLRAPHGCHAQYMENMGSIASLAMAVIINGNDEEVIGGRNATRLWGLVVCHHTSARCIPFPLRYACEFLMQAFGLQLNMELQLAAQLSEKHVWKTRTLLCDMLLRDSPPAIVTQSPSIMD

SEQ ID NO: 12096 - protein, 245 aa, Paxistima canbyi
ALSIAGAVQSQKLAVRAISQLQSLPGGDIKLLCDTVVESVRDLTGYDRVMVYKFHEDEHGEVVAESKRPDLEPYIGLHYPATDIPQASRFLFKQNRVRTIVDCHASPVRVIQDDGLMQPLCLVGSTLRAPHGCHAQYMENMGSIASLAMAVIINGNDEEVIGGRYATRLWGLVVCHHTSARCIPFPLRYACEFLMQAFGLQLNMELQLAAQLSEKHVWKTRTLLCDMLLRDSPPAIVTQSPSIMD

SEQ ID NO: 12097 - protein, 245 aa, Paxistima myrsinites
ALSIAGAVQSQKLAVRAISQLQSLPGGDIKLLCDTVVESVRDLTGYDRVMVYKFHEDEHGEVVAESKRPDLEPYIGLHYPATDIPQASRFLFKQNRVRTIVDCHASPVRVIQDDGLMQPLCLVGSTLRAPHGCHAQYMENMGSIASLAMAVIINGNDEEIIGGRNATRLWGLVVCHNTSARCIPFPLRYACEYLLQLFGLQLNMELQLAAPLSKKHVLKTQTILYDMLLHDSPTGIVTQSPSIMD

SEQ ID NO: 12098 - protein, 361 aa, Peripterygia marginata
QKLAVRAISHLQSLPGGDIKLLCDTVVESVRDLTGYDRVMVYKFHEDEHGEVVAESKRPDLEPYIGLHYPATDIPQASRFLFKQNRVRMIVDCHASPVRVIQDDGLMQPLCLVGSTLRAPHGCHAQYMENMGSIASLAMAVIINGNDEEVIGGRNATRLWGLVVCHHTSARCIPFPLRYACEFLMQAFGLQLNMELQLAAQLSEKHVLKTQTLLCDMLLRDSPTGIVTQSPSIMDLVKCDGAALYYQGNYYPLGVTPTEPQIKDIVEWLLAFHGDSTGLSTDSLADAGYAGAALLGDAVCGMAVAYITNRDFLFWFRSHTAKEIKWGGAKHHPEDKDDGQRMHPRSSFKAFLEVVKSRSLP

SEQ ID NO: 12099 - protein, 374 aa, Perrottetia ovata
ALSIAGAVQSQKLAVRAISQLQSLPGGDIKLLCDAVVENVRNLTGYDRVMVYKFHEDEHGEVVAESKRPDLEPYIGLHYPATDIPQASRFLFKQNRVRMIVDCHSTPVSVIQDDGLMQPLCLVGSTLRAPHGCHAQYMANMGSIASLAMAVIINGNDEDGIGGRNTTRLWGLVVCHHTSARCIPFPLRYACEFLMQAFGLQLNMELQLASQLLEKHVLKTQTLLCDMLLRDSPTGIVTQSPSIMDLVKCDGAALYHQGKYYPLGVTPTEAQIKDIVEWLLAFHGESTGLSTDSLADAGYPGAALLGDAVCGMAVAYITDRDFLFWFRSNTAKEIKWGGAKHHPEDKDDGQRMHPRSSFKAFLEVVKSRSLPWEN

SEQ ID NO: 12100 - protein, 374 aa, Perrottetia ovata
ALSIAGAVQSQKLAVRAISQLQSLPGGDIKLLCDAVVENVRNLTGYDRVMVYKFHEDGHGEAVAESKRPDLEPYIGLHYPATDIPQASRFLFKQNRVRMIVDCHSTPVSVIQDDGLMQPLCLVGSTLRAPHGCHAQYMANMGSIASLAMAVIINGNDEDGIGGRNTTRLWGLVVCHHTSARSIPFPLRYACEFLMQAFGLPLNMELQLASQLLEKHVLKTQTLLCDMLLRDSPTGIVTQSPSIMDLVKCDGAALYHQGKYYPLGVTPTEAQIKDIVEWLLAFHGESTGLSTDSLADAGYPGAALLGDAVCGMAVAYITDRDFLFWFRSNTAKEIKWGGAKHHPEDKDDGQRMHPRSSFKAFLEVVKSRSLPWEN

SEQ ID NO: 12101 - protein, 365 aa, Pleurostylia opposita
VQSQKLAVRAISQLQSLPGGDIKLLCDTVVESVRDLTGYDRVMVYKFHEDEHGEVVAESKRPDLEPYIGLHYPATDIPQASRFLFKQNRVRIIVDCHASPVRVLQDDGLMQPLCLVGSTLRAPHGCHAQYMENMGSIASLAMAVIINGNDEEAIDGKNPTRLWGLVVCHHTSARCIPFPLRYACEFLMQAFGLQLNMELQLAAQVLEKHVLKTQTLLCDMLLRDSPIGIVTQSPSIMDLVKCDGAALYYRGNYYPLGVTPTEAQIKDIEEWLLAFHGDSSGLSTDSLADAGYPGAALLGDAVCGMAVAYITNRDFLFWFRSHTAKEIKWGGAKHHPEDKDDGQRMHPRSSFKAFLEVVKSRSLPW

SEQ ID NO: 12102 - protein, 374 aa, Pristimera andina
ALSIAGAVQSQKLAVRAISQLQSLPGGDIKLLCDTAVESVRDLTGYDRVMVYKFHEDEHGEVVAESKRPDLEPYIGLHYPATDIPQASRFLFKQNRVRIIVDCHASPVNVIQDGGLMQPLCLVGSTLRAPHGCHAQYMENMGSIASLAMAVVINGNDEDGIGGRNPTRLWGLVVCHHTSARCIPFPLRYACEFLMQAFGLQLNMELQLAAQLLEKHVLKTQTLLCDMLLRESPTGIVTQSPSIMDLVKCDGAALYYQANYYPLGVTPTEAQIKDIVEWLLVFHGDSTGLSTDSLADAGYPGATLLGDAVCGMAVAYITNRDFLFWFRSHTAKEIKWGGAKHHPEDKDDGLRMHPRSSFKAFLEVVKSRSLPWEN

SEQ ID NO: 12103 - protein, 374 aa, Pristimera andina
ALSIAGAVQSQKLAVRAISRLQSLPGGDIKLLCDTAVESVRDLTGYDRVMVYKFHEDEHGEVVAGSKRPDLEPYIGLHYPATDIPQASRFLFKQNRVRIIVDCHASPVNVIQDDGLMQPLCLVGSTLRAPHGCHAQYMENMGSIASLAMAVVINGNDEDGIGGRNPTRLWGLVVCHHTSARCIPFPLRYACEFLMQAFGLQLNMELQLAAQLLEKHVLKTQTLLCDMLLRESPTGIVTQSPSIMDLVKCDGAALYYQANYYPLGVTPTEAQIKDIVEWLLVFHGDSTGLSTDSLADAGYPGATLLGDAVCGMAVAYITNRDFLFWFRSHTAKEIKWGGAKHHPEDKDDGLRMHPRSSFKAFLEVVKSRSLPWEN

SEQ ID NO: 12104 - protein, 374 aa, Psammomoya choretroides
ALSIAGAVQSQKLAVRAISQLQSLPGGDIKLLCDTVVESVADLTGYDRVMVYRFHEDEHGEVVAESKRPDLEPYIGLHYPATDIPQASRFLFKQNRVRMIVDCHASPVHVIQDDGLMQPLCLVGSTLRAPHGCHAQYMENMGSIASLAMAVIINGNDEEVIGGRNPTRLWGLVVCHHTSARCVPFPLRYACEFLMQAFGLQLNMELQLAAQLLEKHVLKTQTLLCDMLLRDSPTGIVTQSPSIMDLVKCDGAALYYRGNYYPLGVTPTEAQIKDIVEWLLAFHGDSTGLSTDSLADAGYPGAALLGDAVCGMAVAYITNRDFLFWFRSHTAKETKWGGAKHHPEDKDDGQRMHPRSSFKAFLEVVKSRSLPWEN

SEQ ID NO: 12105 - protein, 374 aa, Psammomoya choretroides
ALSIAGAVQSQKLAVRAISQLQSLPGGDIKLLCDTVVESVADLTGYDRVMVYRFHEDEHGEVVAESKRPDLEPYIGLHYPATDIPQASRFLFKQNRVRMIVDCHASPVHVIQDDGLMQPLCLVGSTLRAPHGCHAQYMENMGSIASLAMAVIINGNDEEVIGGRNPTRLWGLVVCPHTSARCIPFPLRYACEFLMQAFGLQLNMELQLAAQLLEKHVLKTQTLLCDMLLRDSPTGIVTQSPSIMDLVKCDGAALYYRGNYYPLGVTPTEAQIKDIVEWLLAFHGDSTGLSTDSLADAGYPGAALLGDAVCGMAVAYITNRDFLFWFRSHTAKETKWGGAKHHPEDKDDGQRMHPRSSFKAFLEVVKSRSLPWEN

SEQ ID NO: 12106 - protein, 374 aa, Pterocelastrus tricuspidatus
ALSIAGAVQSQKLAVRAISQLQSLPGGDIKLLCDTVVESVRDLTGYDRVMVYKFHEDEHGEVMAESRRPDLEPYIGLHYPASDIPQASRFLFKQNRVRMIVDCHASPVLVIQDDGLMQPLCLVGSTLRAPHGCHAQYMENMSSIASLAMAVIINGSDEEGVGGRNPTRLWGLVVCHHTSARCIPFPLRYACEFLMQAFGLQLNMELQLAAQLLEKHVLKTQTLLCDMLLRDSPTGIVTQSPSIMDLVKCDGAALYYQGNYYPLGVTPTEAQIKDIVEWLLAFHGDSTGLSTDSLADAGYPGAALLGDAVCGMSVAYITNRDFLFWFRSHTAKEIKWGGAKHHPEDKDDGQRMHPRSSFKAFLEVVKSRSLPWEN

SEQ ID NO: 12107 - protein, 245 aa, Putterlickia verrucosa
ALSIAGAVQSQKLAVRAISQLQSLPGGDIELLCDTVVESVRDLTGYDRVMVYKFHEDEHGEVVAESKRSDLEPYIGLHYPASDIPQASRFLFKQNRVRMIVDCHASPVRVIQDDGLMQPLCLVGSTLRAPHGCHAQYMENMGSLASLAMAVIINGNEEEAIGGRSPTRLWGLVVCHHTSARCIPFPLRYACEFLMQAFGLQLNMELQLAAQLLEKHVLKTQTLLCDMLLRDSPTGIVTQSPSIMD

SEQ ID NO: 12108 - protein, 374 aa, Quetzalia occidentalis
ALSIAGAVQSQKLAVRAISQLQSLPGGDIKLLCDTVVESVRDPTGYDRVMVYKFHEDEHGEVVAESKRPDLEPYIGLHYPAADIPQASRFLFKQNRVRMIVDCHATPVSVIQDDGLMQPLCLVGSTLRAPHGCHAQYMANMGSMASLAMAVVINGNDEEGIGGRNTTRLWGLVVCHHPSARGIPFPLRYACEFLLQALGLQLNMELQLAAQLSEKHVLRTQTLLCDMLLRDSPTGIVTQNPSIMDLVKCDGAALYYQGKYYPLRVTPTEAQIKGIVEWMLAFHGDSTGLSTDSLADAGYPGAASLGDAVCGMAVAYITNRDFLFWFRSNTAKEIKWGGAKHHPKDKDDGQRMHPRSSFKAFLEVVKSRSLPWEN

SEQ ID NO: 12109 - protein, 374 aa, Quetzalia occidentalis
ALSIAGAVQSQKLAVCSISQLQSLPGGDIKLLCDTVVESVRDLTGYDRVMVYKFHEDEHGEVVAESKRPDLEPYIGLHYPATDIPQASRFLFKQNRVRMIVDCHATPVRVIQDDGLLQPLCLVGSTLRAPHGCHAHYMANMGSMASLAMAVIINVNDEEGIGGRNATRLWGLVVCHHTSTRCIPFPLRYACEFLMQAFGLQLNMELQLALQLSEKHVLRTQTLLCDMLLRDSPTGIVTQSPSTMDLVKCDGAALYHQGKYYPLGVTPTEAQIKDIVEWLLAFHGDSTGLSTDSLADAGYPGAVSLGDAVCGMAVAYITNRDFLFWFRSHTGKEMKWGGAKHHPEDKDDGQRMQPRSSFKAFLEVVKSRSLPWEN

SEQ ID NO: 12110 - protein, 374 aa, Reissantia indica
ALSIAGAVQSQKLAVRAISQLQSLPGGDIKLLCDTAVESVRNLTGYDRVMVYKFHEDEHGEVVAESRRPDLEPYIGLHYPATDIPQASRFLFKQNRVRIIVDCHASPVSVIQDDGLMQPLCLVGSTLRAPHGCHAQYMENMGSIASLAMAVIINGNDEDRMGGRNPTRLWGLAVCHHTSARCIPFPLRYACEFLMQAFGLQLNMELQLAAQLLEKHVLKTQTLLCDMLLRESPTGIVTQSPSIMDLVKCDGAALYYQANYYPLGVTPTEAQIKDIVEWLLAFHGDSTGLSTDSLADAGYPGATSLGDAVCAMAVAYITNRDFLFWFRSHTAKEIKWGGAKHHPEDKDDGQRMHPRSSFKAFLEVVKSRSLPWEN

SEQ ID NO: 12111 - protein, 374 aa, Reissantia sp. Chase 2095
ALSIAGAVQSQKLAVRAISQLQSLPGGDIKLLCDTAVESVRNLTGYDRVMVYKFHEDEHGEVVAESRRPDLEPYIGLHYPATDIPQASRFLFKQNRVRIIVDCHASPVSVIQDDGLMQPLCLVGSTLRAPHGCHAQYMENMGSIASLAMAVIINGNDEDGMGGRNPTRLWGLVVCHHTSARCIPFPLRYACEFLMQAFGLQLNMELQLAAQLLEKHVLKTQTLLCDMLLRESPTGIVTQSPSIMDLVKCDGAALYYQANYYPVGVTPTEAQIKDIVEWLLAFHGDSTGLSTDSLADAGYPGATSLGDAACGMAVAYITNRDFLFWFRSHTAKEIKWGGAKHHPEDKDDGQRMHPRSSFKAFLEVVKSRSLPWEN

SEQ ID NO: 12112 - protein, 245 aa, Rzedowskia tolantonguensis
ALSIAGAVQSQKLAIRAISQLQSLPGGDIKLLCDTVVESVRELTCYDRVMVYKFHEDEHGEVVAESKRPDLEPYIGLHYPATDIPQASRFLFKQNRVRMIVDCHASPVRVIQDDGLMQPLCLVGSTLRAPHGCHAQYMENMGSKASLAMAVIINGNDEEVIGGRNATRLWGLVVCHHTSARCIPFPLRYACEFLMQAFGLQLNMELQLAAQLSEKHVLKTQTLLCDMLLRDSPTGIVTQSPSIMD

SEQ ID NO: 12113 - protein, 245 aa, Salacia impressifolia
ALSIAGAVQSQKLAVRAISQIQSLPGGDIKLLCDTVVESVRDLTGYDRVMVYKFHEDEHGEVVAESKRPDLEPYIGLHYPATDIPQASRFLFKQNRVRMIVDCNASPVRVIQDDGLMQPLCLVGSTLRAPHGCHAQYMENMGSIASLAMAVIINGNDEEVIGGRNPTRLWGLVVCHHTSARCIPFPLRYACEFLMQAFGLQLKMELQLAAQLLEKHVLKTQTLLCDMLLRDSPTGIVTQSPSIMD

SEQ ID NO: 12114 - protein, 245 aa, Salacia impressifolia
ALSIAGAVQSQKLAVRAISQIQSLPGGDIKLLCDTVVESVRDLTGYDRVMVYKFHEDEHGEVVAESKRPDLEPYIGLHYPATDIPQASRFLFKQNRVRMVVDCNASPVRVIQNDGLMQPLCLVGSTLRAPHGCHAQYMENMGSIASLAMAVIINGNDEEVIGGRNPTRLWGLVVCHHTSARCIPFPLRYACEFLMQAFGLQLKMELQLAAQLLEKHVLKTQTLLCDMLLRDSPTGIVTQSPSIMD

SEQ ID NO: 12115 - protein, 364 aa, Salacia nitida
VQSQKLAVRAISQIQSLPGGDIKLLCDTVVESVRDLTGYDRVMVYKFHEDEHGEVVAECKRPDLEPYIGLHYPATDIPQASRFLFKQNRVRMIVDCHASPVRVIQDDGLMRPLRLVGSTLRAPHGCHAQYMENMGSIASLAMAVIINGNDEEVIGGRNPTRLWGLVVCHHTSARCIPFPLRYACEFLMQAFGLQLKMELQLAAQLLEKHVLKTQTLLCDMLLRDSPTGIVTQSPSIMDLVKCDGAALYFQGNYYPLGVTPTEAQIKDIVEWLLAFHGDSTGLSTDSSADAGYPGAALLGDAVCGMAVAYITNRDFLFWFRSHTAKEIKWGGAKHHPEDKDDGQRMHPRSSFKAFLEVVKRRSLP

SEQ ID NO: 12116 - protein, 361 aa, Salacia nitida
QSQKLAVRAISQIQSLPGGDIKLLCDTVVESVRDLTGYDRVMVYKFHEDEHGEVVAECKRPDLEPYIGLHYPATDIPQASRFLFKQNRVRMIVDCHASPVRVIQDDGLMRPLRLVGSTLRAPHGCHAQYMENMGSIASLAMAVIINGNDEEVIGGRNPTRLWGLVVCHHTSARCIPFPLRYACEFLMQAFGLQLKMELQLAAQLLEKHVLKTQTLLCDMLLRDSPTGIVTQSPSIMDLVKCDGAALYFQGNYYPLGVTPTEAQIKDIVEWLLAFHGDSTGLSTDSSADAGYPGAALLGDAVCGMAVAYITNRDFLFWFRSHTAKEIKWGGAKHHPEDKDDGQRMHPRSSFKAFLEVVKRRS

SEQ ID NO: 12117 - protein, 374 aa, Salaciopsis glomerata
ALSIAGAVQSQKLAVRAISQLQSLPGGDIKLLCDAVVESVRDLTGYDRVMVYKFHEDEHGEVVAESKRSDLEPYIGLHYPATDIPQASRFLFKQNRVRMIADCHASPVRVIQDDGLMQPLCLVGSTLRAPHGCHAQYMENMGSVASLAMAVIVNGNDEEVIGGRNATRLWGLVVCHHASVRCIPFPLRYACEFLMQAFGLQLNMELQLAAQLSEKPVLKTQSLLCDMLLRDSPTGIVTQSPSIMDLVKCDGAALYYQGNYYPLGVTPAEPQIKDIVGWLLAFHGDSKGLSTDSLADAGYPGAALLGDAVCGMAVAYITNRDFLFWFRSHTAKEIKWGGAKHHPEEKDDGQRMHPRSSFKAFLEVVKSRSFPWEN

SEQ ID NO: 12118 - protein, 369 aa, Schaefferia frutescens
ALSIAGAVQSQKLAIRSISQLQSLPGGDIKLLCDTVVESVRELTGYDRVMVYKFHEDEHGEVVAESKRPDLEPYIGLHYPATDIPQASRFLFKQNRVRMIVDCHASPVLVIQDDGLMQPLCLVGSTLRAPHGCHAQYMENMGSKASLAMAVIINGNDEEVTGGRNATRLWGLVVCHHTSARCIPFPLRYACEFLMQAFGLQLNMELQLAAQLSEKHVLKTQTLLCDMLLRDSPTGIVTQSPSIMDLVKCDGAALYYQGKYYPIGVTPAEAQIKDIVEWLLAFHGDSTGLSTDSLADAGYPGATLLGDAVCGMAVAYITNRDFLFWFRSHTTKEIKWGGAKHHPEDKDDGPRMHPRSSFKAFLEVVKSRS

SEQ ID NO: 12119 - protein, 309 aa, Schaefferia frutescens
ALSIAGAVQSQKLAIRSISQLQSLPGGDIKLLCDTVVESVRELTGYDRVMVYKFHEDEHGEVVAESKRPDLEPYIGLHYPATDIPQASRFLFKQNRVRMIVDCHASPVLVIQDDGLMQPLCLVGSTLRAPHGCHAQYMENMGSKASLAMAVIINGNDEEVTGGRNCTRLWGLVVCHHTFARCIPFPLRYAWEFLMQAFGLQLNMELQLAAQLSEKHVLKTQTLLCDMLLRDSPTGIVTQSPSIMDLVKCDGAALYYQGKYYPIGVTPAEAQIKDIVEWLLAFHGDSTGLSTDSLADAGYPGATLLGDAV

SEQ ID NO: 12120 - protein, 363 aa, Simicratea welwitschii
QSQKLAVRAISQLQSLPGGDIKLLCDTAVESVRDLTGYDRVMVYRFHEDEHGEVVAESKRPDLEPYIGLHYPATDIPQASRFLFKQNRVRIIVDCHASPVSVIQDDGLMQPLCLVGSTLRAPHGCHAQYMENMGSIASLAMAVIINGNDEEGMGGRNPTRLWGLVVCHHTSSRCIPFPLRYACEFLMQAFGLQLNMELQLAAQLLEKHVLKTQTLLCDMLLRESPTGIVTQSPSIMDLVKCDGAALYYQANYYPLGVTPTEAQIRDIVEWLLACHGDSTGLSTDSLADAGYPGATLLGDAVCGMAVAYITNRDFLFWFRSHTAKEIKWGGAKHHPEDKDDGQRMHPRSSFKAFLEVVKSRSLP

SEQ ID NO: 12121 - protein, 363 aa, Simicratea welwitschii
QSQKLAVRAISQLQSLPGGDIKLLCDTAVESVRDLTGYDRVMVYRFHEDEHGEVVAESKRPDLEPYIGLHYPATDIPQASRFLFKQNRVRIIVDCHASPVSVIQDDGLMQPLCLVGSTLRAPHGCHAQYMENMGSIASLAMAVIINGNDEEGMGGRNPTRLWGLVVCHHTSSRCIPFPLRYACEFLMQAFGLQLNMELQLAAQLLEKHVLKTQTLLCDMLLRESPTGIVTQRPSIMDLVKCDGAALYYQANYYPLGVTPTEAQIRDIVEWVLACHGDSTGLSTDSLADAGYPGATLLGDAVCGMAVAYITNRDFLFWFRSHTAKEIKWGGAKHHPEDKDDGQRMHPRSSFKAFLEVVKSRSLP

SEQ ID NO: 12122 - protein, 245 aa, Tontelea attenuata
ALSIAGAVQSQKLAVRAISQIQSLPGGDIKLLCDTVVESVRDLTGYDRVMVYKFHEDEHGEVVAESKRPDLEPYIGLHYPATDIPQASRFLFKQNRVRMIVDCHASPVRVIQDDGLMQPLCLVGSTLRAPHGCHAQYMENMGSIASLAMAVIINGNDEEVIGGRNPTRLWGLVVCHHTSARCIPFPLRYACEFLTQAFGLQLKMELQLAAQLLEKHVLKTQTLLCDMLLRDSPTGIVTQSPSIMD

SEQ ID NO: 12123 - protein, 245 aa, Tontelea attenuata
ALSIAGAVQSQKLAVRAISQIQTLPGGDIKLLCDTVVESVRDLTGYDRVMVYKFHEDEHGEVVAESKRPDLEPYIGLHYPATDIPQASRFLFKQNRMRMIVDCHASPVRVIQDDGLMQPLCLVGSTLRAPHGCHAQYMENMGSIASLAMAVIINGNDEEVIGGRNPTRLWGLVVCHHTSARCIPFPLRYACEFLMQAFGLQLKMELQLAAQLLEKHVLKTQTLLCDMLLRDSPTGIVTQSPSIMD

SEQ ID NO: 12124 - protein, 374 aa, Tripterygium regelii
ALSIAGAVQSQKLAVLAISQLQSLQGGDIKLLCDTVVESVRDLTGYDRVMVYKFHEDEHGEVVAESKRPDLEPYIELHYPATDIPQASRFLFKQNRVRTIVDCHALPVRVIQDDGLMQPLCLVGSTLRAPHGCHAQYMENMGSMASLAMAVVINGNDEEVIGGRNTTRLWGLVVCHHTSARCIPFPLRYACEFLMQAFGLQLNMELQLAAQLMEKHVLKTRTLLCDMLLRDSPTGIVTQSPSIMDLVKCDGAALHYQGNYYPLGVTPTEAQIKDIVGWLLDFHGDSTGLSTDSLADAGYPEAALLGDAVCGMAVAYITNRDFLFWFRSHTAKEIKWGGAKHHPGDKDDGQRMHPRSSFKAFLEVVKSRSLPWEN

SEQ ID NO: 12125 - protein, 371 aa, Tripterygium regelii
ALSIAGAVQSQKLAVLAISQLQSLQGGDIKLLCDTVVESVRDLTGYDRVMVYKFHEDEHGEVVAESKRPDLEPYIGLHYPATDIPQASRFLFKQNRVRTIVDCHALPVRVIQDDGLMQPLCLVGSTLRAPHGCHAQYMENMGSMASLAMAVVINGNDEEVIGGRNTTRLWGLVVCHHTSARCIPFPLRYACEFLMQAFGLQLNMELQLAAQLMEKHVLKTRTLLCDMLLRDSPTGIVTQSPSIMDLVKCDGAALHYQGNYYPLGVTPTEAQIKDIVGWLLDFHGDSTGLSTDSLADAGYPEAALLGDAVCGMAVAYITNRDFLFWFRSHTAKEIKWGGAKHHPEDKDDGQRMHPRSSFKAFLEVVKSRSLP

SEQ ID NO: 12126 - protein, 371 aa, Tripterygium regelii
ALSIAGAVQSQKLAVLAISQLQSLQGGDIKLLCDTVVESVRDLTGYDRVMVYKFHEDEHGEVVAESKRPDLEPYIGLHYPATDIPQASRFLFKQNRVRTIVDCHALPVRVIQDDGLMQPLCLVGSTLRAPHGCHAQYMENMGSMASLAMAVVINGNDEKVIGGRNTTRLWGLVVCHHTSARCIPFPLRYACEFLMQAFGLQLNMELQLAAQLMEKHVLKTRTLLCDMLLRDSPTGIVTQSPSIMDLVKCDGAALHYQGNYYPLGVTPTEAQIKDIVGWLLDFHGDSTGLSTDSLADAGYPEAALLGDAVCGMAVAYITNRDFLFWFRSHTAKEIKWGGAKHHPEDKDDGQRMHPRSSFKAFLEVVKSRSLP

SEQ ID NO: 12127 - protein, 374 aa, Tripterygium regelii
ALSIAGAVQSQKLAVLAISQLQSLQGGDIKLLCDTVVESVRDLTGYDRVMVYKFHEDEHGEVVAESKRPDLEPYIGLHYPATDIPQASRFLFKQNRVRTIVDCHALPVRVIQDDGLMQPLCLVGSTLRAPHGCHAQYMKNMGSMASLAMAVVINGNDEEVIGERNTTRLWALVVCHHTSARCIPFPFRYACEFLMQAFGLQLNMELQLAAQLMEKHVLKTRTLLCDMLLRDPPTGIVTQSPSIMDLVKCDGAALHYQGNYYPLGVTPTEAQIKDIVGWLLDFHGDSTGLSTDSLADAGYPEAALLGDAVCGMAVAYITNRDFLFWFRSHTAKEIKWGGAKHHPEDKDDGQRMHPRSSFKAFLEVVKSRSLPWEN

SEQ ID NO: 12128 - protein, 374 aa, Wimmeria concolor
ALSIAGAVQSQKLAVRAISQLQSLPGGDIKLLCDTVVESVRHLTGYDRVMVYKFHEDEHGEVVAERKRPDLEPYIGLHYPATDIPQASRFLFKQNRVRTIVDCHASPVRVIQDDGLMQPLCLVGSTLRAPHGCHAQYMENMGSIASLAMAVIINGNDEEVIGVRNATRLWGLVVCHHTSARCIPFPLRYAWEFLMQAFGLQLNMELQLAAQLSEKHVWKTRTLLCDMLLRDSPTGIVTQSPSIMDLVKCDGAALYYQGNYYPLGVTPTEAQITDIVGWLLDFHGDSTGLSTDSLADAGYPGAALLGDAVCGMAVAYITNRDFLFWFRSHTAKEIKWGGAKHHPEDRDDGQRMHPRSSFQAFLEVVKSRSLPWEN

SEQ ID NO: 12129 - protein, 374 aa, Zinowiewia concinna
ALSIAGAVQSQKLAVRAISQLQSLPGGDIKLLCDTVVETVRVLTGYDRVMVYKFHEDEHGEVVAESKRPDLEPYIGLHYPATDIPQASRFLFKQNRVRMIVDCHATPVSVIQDAGLMQPLCLVGSTLRAPHGCHAQYMENMGSIASLAMAVIINGNDEEGIGGRNTTRLWGLVVCHHTTARCIPFPLRYACEFLLQALGLQLNMELQLAAQLSEKHVLRTQTLLCDMLLRDSHTGIVTQSPSIMDLVKCDGAALYYQGKYYPLEVTPTEAQIKDIVEWLLAFHGDSTGLSTDSLADAGYPGAASLGDAVCGMAVAYITDRDFLFWFRSNTAKEIKWGGAKHHPEDKDDGQRMHPRSSFKAFLEVVKSRSLPWEN

SEQ ID NO: 12130 - protein, 374 aa, Zinowiewia concinna
ALSIAGAVQSQKLAVRAISQLQSLPGGDIKLLCDTVVETVRVLTGYDRVMVYKFHEDEHGEVVAESKRPDLEPYIGLHYPATDIPQASRFLFKQNRVRMIVDCHATPVSVIQDAGLMQPLCLVGSTLRAPHGCHAQYMENMGSIASLAMAVIINGNDEEGIGGRNTTRLWGLVVCHHTTARCIPFPLRYACEFLLQALGLQLNMELQLAAQLSEKHVLRTQTLLCDMLLRDSHTGIVTQSPSIMDLVKCDGAALYYQGKYYPLEVTPTEAQIKDIVEWVLAFHGDSTGLSTDSLADAGYPGAASLGDAVCGMAVAYITDRDFLFWFRSNTAKEIKWGGAKHHPEDKDDGQRMHPRSSFKAFLEVVKSRSLPWEN

SEQ ID NO: 12131 - protein, 374 aa, Crossopetalum rhacoma
ALSIAGAVQSQKLAVRAISQLQSLPGGDIKLLCDTVVESVRHLTGYDRVMVYKFHEDEHGEVVAERKRPDLEPYIGPHYPATDIPQASRFLFKQNRVRTIVDCHASPVRVIQDDGLMQPLCLVGSTLRAPHGCHAQYMENMGSIASLAMAVIINGNDEEVIGGRNTTRLWGLVVCHHTSARCIPFPLRYACEFLMQAFGLQLNMELQLAAQLSEKHVWKTRTLLCDMLLRDSPTGIVTQSPSIMDLVKCDGAALYYQGNYYPLGVTPTEAQITDIVGWLLDFHGDSTGLSTDSLADAGYPGAALLGDAVCGMAVAYITNRDFLFWFRSHTAKEIKWGGAKHHPEDRDDGQRMHPRSSFQAFLEVVKSRSLPWEN

SEQ ID NO: 12132 - protein, 374 aa, Crossopetalum rhacoma
ALSIAGAVQSQKLAVRAISQLQSLPGGDIKLLCDTVVESVRHLTGYDRVMVYKFHEDEHGEVVAERKRPDLEPYIGPHYPATDIPQASRFLFKQNRVRTIVDCHASPVRVIQDDGLMQPLCLVGSTLRAPHGCHAQYMENMGSIASLAMAVIINGNDEEVIGGRNTTRLWGLVVCHHTSARCIPFPLRYACEFLMQAFGLQLDMELQWRAQLSKKHVWKTRTLLCDMVLRDSPTGIVTQSPSIMDLVKCDGAALYYQGNYYPLGVTPTEAQITDIVGWLLDFHGDSTGLSTDSLADAGYPGAALLGDAVCGMAVAYITNRDFLFWFRSHTAKEIKWGGAKHHPEDRDDGQRMHPRSSFQAFLEVVKSRSLPWEN

SEQ ID NO: 12133 - protein, 245 aa, Eucryphia billardieri
ALSIAGAVQSQKLAVRAISQLQSLPGGHIKLLCDTVVESVRELTGYDRVMVYKFHEDEHGEVVAESKRPDLEPYIGLHYPATDIPQASRFLFKQNRVRMIVDCHATPVRVIQDEGLIQPLCLVGSTLRAPHGCHAQYMANMGSTASLAMAVIINGNDEEAIGGRNSMRLWGLVVCHHTSARSIPFPLRYACEFLMRAFGLQLNMELQLALQLSEKHILRTQTLLCDMLLRDSPTGIVTQSPSIMD

SEQ ID NO: 12134 - protein, 245 aa, Eucryphia billardieri
ALSIAGAVQSQKLAVRAISQLQSLPGGHIKLLCDTVVESVRELTGYDRVMVYKFHEDEHGEVVAESKRPDLEPYIGLHYPATDIPQASRFLFKQNRVRMIVDCHATPVRVIQDEGLIQPLCLVGSTLRAPHGCHAQYMANMGSTASLAMAVIINGNDEEAIGGRNSMRLWGPVVCHHTSARSIPFPLRHACEFLMQAFGLQLNMELQLALQLSEKHILRTQTLLCDMLLRDSPTGIVTQSPSIMD

SEQ ID NO: 12135 - protein, 245 aa, Aleurites moluccana
ALSIAGAVQSQKLAVRAISRLQSLPGGDIKLLCDTVVECVKELTGYDRVMVYKFHEDEHGEVVAESKRPDLEPYIGLHYPSTDIPQASRFLFKQSRVRMIVDCHATAVSVIQDEALMQPLCLVGSTLRAPHGCHAQYMANMGSIASLAMAVIINGNDEEAIGGRNSMRLWGLVVCHHTSARSIPFPLRYACEFLMQAFGLQLNMDLQLASQFSEKHVLRTQTLLCDMLLRDSPTGIVTQSPSIMD

SEQ ID NO: 12136 - protein, 245 aa, Aleurites moluccana
ALSIAGAVQSQKLAVRAISRLQSLPGGDIKLLCDTVVECVKELTGYDRVMVYKFHEDEHGEVVAESKRPDLEPYIGLHYPSADIPQASRFLFKQSRVRMIVDCHATAVSVIQDEALMQPLCLVGSTLRAPHGCHAQYMANMGSIASLAMAVIINGNDEEAIGGRNSMRLWGLVVCHHTSARSIPFPLRYACEFLMQAFGLQLNMDLQLASQFSEKHVLRTQALLCDMLLRDSPTGIVTQSPSIMD

SEQ ID NO: 12137 - protein, 245 aa, Reinwardtia trigyna
ALSIAGAVQSQKLAIRAISQLQSLPGGDIKLLCNTVVDCVRELTGYDRVMVFKFHEDEHGEVVAENKRADLEPYLGLHYPATDVPQASRFLFKQNRVRMIVDCHASAVRVVQDEGLVQPLCLVGSTLRAPHGCHAQYMANMGSIASLAMAVVITGNDEEGTGGRNSTRLWGLVVCHHTSARCIPFPLRYACEFLMQAFGLQMNVELQLASQLLEKHVMRTQTLLCDMLLRDSPTGIVTQSPSIMD

SEQ ID NO: 12138 - protein, 392 aa, Barnebya dispar
DLEPVNPADVPVTAAGALKSYKFAAKAISRLQSLPSGNIFLLCDVLVKEVRDLTGYDRVMVYKFHEDEHGEVVSECRRSDLESYLGLHYPATDIPQASRFLFMKNKLRMICDCLAPPVKVIQDENLPQPLSLCGSTLRSPHGCHAQYMTNMGTIASLVMSVTINEDDDMKDCEQPQMPRKLWGLVVCHHTSPRFIPFPLRYACEFLIQVFGVQINKEVELAAQVREKHILRIQTLLCDMLLRDAPVAIITQSPNVMDLVRCDGAALYYKNKFWLLGVTPTEAQIRDIAEWLLECHSGNTGLSTDSLMEAGYPGASVLGDAVCGMAAISITSRDFLFWFRSHTAKEIKWGGAKHDPDDKDDGRKMHPRSSFKAFLEVVKWRSLPWEDVEMDAI

SEQ ID NO: 12139 - protein, 392 aa, Barnebya dispar
DLEPVNPADVPVTAAGALKSYKFAAKAISRLQSLPSGNIFLLCDVLVKEVRDLTGYDRVMVYKFHEDEHGEVVSECRRSDLESYLGLHYPATDIPQVSRFLFMKNKLRMICDCLAPPVKVIQDENLPQPLSLCGSTLRSPHGCHAQYMTNMGTIASLVMSVTINEDDDMKDCEQPQMPRKLWGLVVCHHTSPRFIPFPLRYACEFLIQVFGVQINKEVELAAQVREKHILRIQTLLCDMLLRDAPVAIITQSPNVMDLVRCDGAALYYKNEFWLLGVTPTEAQIRDIAEWLLECHSGNTGLSTDSLMEAGYPGASVLGDAVCGMAAISITSRDFLFWFRSHTAKEIKWGGAKHDPDDKDDGRKMHPRSSFKAFLEVVKWRSLPWEDIEMDAI

SEQ ID NO: 12140 - protein, 206 aa, Anemia phyllitidis
VMVYKFHEDEHGEVVAEIRRSDLEPYLGLHYPATDIPQASRFLFMKNRVRMICNCAATPVRVIQDKGLRQPLSLAGSTLRAPHGCHSQYMANMGTIASLVMAVIVNDNDEEVEQQNTSPKQEKLWGLVVCHHTTPRAVPFPLRSACEFLMQVFGLQLNMEMELAAQMREKHILRTQTLLCDMLLRDAPIGIVSESPNIMDLVKGSI

SEQ ID NO: 12141 - protein, 204 aa, Anemia phyllitidis
VMAYKFHDDEHGEVVAEIRRSDLEPYMGLHYPATDIPQAARFLFMKNRVRLIYDCRLPPVKVIQDKNLVQPLSLAGSTLRAPHRCHAEYMGNMGSIASLGMAVIVNDDDSSDAGNMQQRTRLWGLVVCHHTSTRYVPFPLRSACEFLMQVFSLELNMEVELAAQRREKHILQTQTLLCDMLLRDAPIGIVSQSPNIMDLVKGSI

SEQ ID NO: 12142 - protein, 755 aa, Deinococcus radiodurans
MSRDPLPFFPPLYLGGPEITTENCEREPIHIPGSIQPHGALLTADGHSGEVLQMSLNAATFLGQEPTVLRGQTLAALLPEQWPALQAALPPGCPDALQYRATLDWPAAGHLSLTVHRVGELLILEFEPTEAWDSTGPHALRNAMFALESAPNLRALAEVATQTVRELTGFDRVMLYKFAPDATGEVIAEARREGLHAFLGHRFPASDIPAQARALYTRHLLRLTADTRAAAVPLDPVLNPQTNAPTPLGGAVLRATSPMHMQYLRNMGVGSSLSVSVVVGGQLWGLIACHHQTPYVLPPDLRTTLEYLGRLLSLQVQVKEAADVAAFRQSLREHHARVALAAAHSLSPHDTLSDPALDLLGLMRAGGLILRFEGRWQTLGEVPPAPAVDALLAWLETQPGALVQTDALGQLWPAGADLAPSAAGLLAISVGEGWSECLVWLRPELRLEVAWGGATPDQAKDDLGPRHSFDTYLEEKRGYAEPWHPGEIEEAQDLRDTLTGALGERLSVIRDLNRALTQSNAEWRQYGFVISHHMQEPVRLISQFAELLTRQPRAQDGSPDSPQTERITGFLLRETSRLRSLTQDLHTYTALLSAPPPVRRPTPLGRVVDDVLQDLEPRIADTGASIEVAPELPVIAADAGLLRDLLLHLIGNALTFGGPEPRIAVRTERQGAGWSIAVSDQGAGIAPEYQERIFLLFQRLGSLDEALGNGLGLPLCRKIAELHGGTLTVESAPGEGSTFRCWLPDAGPLPGAADA

SEQ ID NO: 12143 - protein, 391 aa, Chloranthus spicatus
PYEVPMTAAGALQSYKLAAKAIARLQSLPGGSMEKLCDTVVQEVFELTGYDRAMAYKFHEDDHGEVISETTKPGLEPYLGLHYPATDIPQAARFLFMKNKVRMICDCHAKPVKVFKMKKLAFDLTLCGSTLRAPHSCHSQYMVNMNSIASLVMAVVVNEGEEGDSSEPGQQQLQQKKKRLWGLVICHNTTPRFVPFPLRYACEFLMQVFAIHVNKELELENQIQEKNIFRTQTLLCDMLMRDAPLGIVSQNPNIMDLVKCDGAALLYNKKIWRLGLTPSESQIHDISFWLSENHMDSTGFSTDSLNDAGYPGAVAIGNAVCGMAAVWITSKDMLFWFRSHTAAEVRWGGAKHDPEDKDDNRRMHPRSSFMAFLEVVKTRSLPWKDAEMDAI

SEQ ID NO: 12144 - protein, 397 aa, Chloranthus spicatus
DLEPVNPADVPVTAAGALKSYKLAAKAISRLQSLPSGNISLLCDVLVREVSELMGYDRVMAYKFHEDEHGEVIAECRRVDLEPYLGLHYPATDIPQASRFLFMKNKVRMICDCSAAPVKVIQDKRLGQPLSLCGSTLRAPHGCHALYMANMGSIASLVMSVTINEDDDETKSDPQQQQQENRRKLWGLVVCHHTSTRFAPFPLRYACEFLLQVFSLQLNKEVELAAQLREKNMLRMQTLLCDMLLRDTPTGILTQSPNVMDLVKCDGAALYYRNQFWLFGTTPTDVQIRDMAEWLLECHDGSTGLSTDSLMEAGYPCASILGNAVCGMAAVKITSKDFLFWFRSHTAKEVKWGGAKHDPIDKDGDGRKMHPRSSFKAFLEVMKQRSLPWEDMEMDAI

SEQ ID NO: 12145 - protein, 1124 aa, Mougeotia scalaris
MSSSKRSQSSGRSSTQTRIQNRVTQASADAKLSTAFEVSSSSGGDSFDYTKSVTASLNPTEPLAAKSVTAYLQRMQRGSIIQSFGCMMAVEPGTFRIIAYSENVSEMLGVTPQSVPTGDHQNAIGIGTDVRSLLSPSSVSVVEKAVAANDVSMMNPIAVYSLATQKLFFAILHMNDVGLVIDLEPISSSSDSAMFSAGAVQSHKLAAKAISRLQSLPGGDICGLCDVVVEEVRELTGYDRVMAYKFHDDEHGEVVAEIRRSDLEPYLGLHYPATDIPQASRFLFIKNRIRMICDCTSPQVKVVQDSRIPQEMSLAGSTMRGVHGCHTQYMMNMGSTASLVMSVTINDTNEIAGGPGMKGRKLWGLIVCHHSTPRHIPFPIRSACEFLMQVFGLQLNMEVELAAQHREKHILRTQTLLCDMLLRDAPMGIVSQSPNVMDLVKCDGAALLFGGRCWLLGISPTQEQVKDIATWLISSHTDTTGLSTDSLVDAGYPKARELGVDVCGMAAARITENDFLFWFRGHAQKEVKWAGAKDGGSEEDGSRMHPRSSFKAFLEVVKQRSLPWEDVEMDAIHSLQLILRGSFQDIEDKEDRKIVHARLKEMHLQGMEELSSVASEMVRLIETATAPILAVDTAGCVNGWNFKISELTGLSIPEVMGKSLVKDLTHPSSKDTVEKLLYMALNGEEEQNVEIRLKTWGMQQGKGPVILMVNACASRDVSEKVVGVCFVAQDVTGEKIVQDKFTRIQGDYTTIVRSHNSLIPPIFGSDESGFCVEWNPAMERLSGVKREEAIGKMLTRELFGGILRLKNVDGLTKFMIVLNAAMSSHDTDKFPFTFYDRSGKIVEVLLTTSKRCNSEGVVTGVFCFLHTASSELQQALTVQKAAERVAEVKAKELAYIRQEIQNPLDGIHFARSFMEHTVLSEDQKQLIETSATCEKQLRRILADMDLASIEKGYLELETGEFSMATVMNSVVSQGMIQSTQKNLQLYCDTPPDFKSLSVFGDQVRLQQVLADFLLNAVQFTPPSGWVEIKVEPVVKKLPGGVSVANVDFRVSHPGEGLPEDLIDQMFDRADARVKSQEGLGLSICRKLVRLMNGEVQYRREGERNFFLLQLELPLAQRDDQASMK

SEQ ID NO: 12146 - protein, 188 aa, Mougeotia scalaris
DDEHGEVVAEIRRSDLEPYLGLHYPATDIPQASRFLFIKNRIRMICDCTSPQVKVVQDSRIPQEMSLAGSTMRGVHGCHTQYMMNMGSTASLVMCVTINDTNEIAGGPGMKGRKLWGLIVCHHSTPRHIPFPIHSACEFLMQVFGLQLNMEAELAAQHREKHILRTQTLLCDMLLRDAPMGIVSQSPN

SEQ ID NO: 12147 - protein, 448 aa, Piper nigrum
SGKPFYAIVHRVTGSLIVDFEPVKPLEVPMTAAGALQSYKLAAKAISRLQSLPSGGMERLVDTVVQEVFELTGYGRVMAYKFHEDDHGEVISEVTAPDLDPYLGLHYPATDIPQAARFLFMKNKVRMICDCHAKPVKVYQDEKLPFDLTLCGSTLRAPHSCHLHYMANMGSIASLVMAVVINEGACSSATDHAVEQHSSSSSSSASYAAATATAAAAGGGGGSNIDTTSATSRRKMLWGLVVCHNTKPRFVPFPLRYACEFLMQVFAIHVNKELELERQIREKNILRTQTLLCDMLLRDAPMGIVNQSPNIMDLIKCDGAALLYKQQVFPLGVAPSDAELRQLARWLSSSHRDSTGLSTDSLHDAGYPNASCLGNVVCGMAAVKITPSDLLFWFRRHTAAEVRWGGAKHHPTDRDDGKRMHPRSSFKAFLEVVKTRSLPWQNYEMDAI

SEQ ID NO: 12148 - protein, 341 aa, Piper nigrum
DLEPVNPADVPVTAAGALKSYKLAAKAISRLQSMPNGDIALLCDVLAREVSDLTGYDRVMAYKFHEDEHGEVIAECKRSDLEPYLGLHYPATDIPQASRFLFMKNKVRMICDCLAPPVKVVQDKRLGQPLSLAGSTLRAPHGCHSQYMSNMGSIASLVMSVMVCEGDEDSNGEKTARKLWGLVVCHHTSPRFIPFPLRYACEFLIQVFAIQLSKEVELAAQVKEKHVLRMQTVLCDMLLRDAPMGIMTQSPNVMDLVMCDGAALYYHSQCWLLGATPTENMVRDIAEWLQQYHGTSTGLSTDSLVEAGYPGAHELSDAVCGMAAITITNRDFSFWFRSHTA

SEQ ID NO: 12149 - protein, 392 aa, Saruma henryi
PYEVPMTAAGALQSYKLAAKAISRLQSVPSGCLDRLIDTVVQEVYELTGYDRVMAYKFHEDDHGEVISEVTKPDLEPYLGLHYPATDIPQAARFLFMKNKVRMICDCRAKSVKVYQDEHLSFDLTLCGSTLRAPHSCHLQYMGNMSSIASLVMAVVINEGEEDDDGPDSTQQQAQPKRKRLWGLVVCHNTTPRFVPFPLRYACEFLMQVFAIHVNKELELENQIREKNILRTQTLLCDMLLRDAPLGIVTQSPNIMDLIKCDGAALLYENKVYRLGVTPTESQLHEIVQWLSEHHMDSTGLSTDSLHEAGYPKALSLGDIVCGMAAVRITTHDMLFWFRSHTAAEVKWGGAKHDPSDKDDGRRMHPRSSFKAFLEVVKTRSLPWKDYEMDAI

SEQ ID NO: 12150 - protein, 391 aa, Saruma henryi
DLEPVNPDDVPVTAAGALKSYKLAAKAISRLQSLPSGNISLLCDVVVREVSDLTGYDRVMAYKFHEDEHGEVIAECKRSDLEPYHGLHFPASDIPQASRFLFMKNKVRMICDCSAPPVKVIQDKRLAQPISLGGSTLRAPHGCHAQYMANMGSIASLVLSVTISEDDDETCSKQKGRKLWGLVVCHHTSPRFIPFPLRYACEFLIQVFGIQLNKEVELAAQMRETHILRTQTMLCDMLLRDAPMTIVTQSPNVMDLVKCDGAALYYRKESWLLGVTPTKAQIQDLAEWLLKDHNGTTGLSTDSLVEAGYPRAHNLGDMVCGMAAVRITNQDFLFWFRSHTAKEVKWGGAKHDPADKDDDRGKMHPRSSFKAFLEVVKRRSLPWEDVEMDAI

SEQ ID NO: 12151 - protein, 414 aa, Saururus cernuus
SGKPFYAIVHRVTGSLIIDFEPVKPFEVPMTAAGALQSYKLAAKAISRLQSLPSGSMERLVDTVVQEVFELTGYDRVMAYKFHEDDHGEVISEVTIPHLEPYIGLHYSATDIPQAARFLFMKNKVRMICDCHAKPVKVYQDDKLSFDLTLCGSTLRAPHSCHLQYMENMGSIASLVMAVVVNEGGDEDKGPDSSQQLGDNRRKRLWGLVVCHNTRPRFVPFPLRYACEFLTQVFAIHVSKELELERQIREKNILRTQTLLCDMLLRDAPMGIVNQSPNIMDLIKCDGAALFYKDKVFRLGNAPSETDIRDIAQWLFAHHMDSTGLSTDSLHDAGYPKAAFLGNLVCGMAAVKITCSDMLFWFRTHTAAEIRWGGAKHDHSERDDGKRMHPRSSFKAFLEVVKTRSLPWKDYEMD

SEQ ID NO: 12152 - protein, 391 aa, Saururus cernuus
DLEPVNPSDVPVTAAGALKSYKLAAKAISRLQSLPSGNISLLCDVLVREVSDLTGYDRVMAYKFHEDEHGEVVSECKRADLEPYLGLHYPATDIPQASRFLFMKNKVRMICDCLAQPVKVIQDKRLAQPLSLAGSTLRAPHGCHAQYMANMGSIASLVMSVMVSEGDDDSNEEKTGRKLWGLVVCHHTSPRFIPFPLRYACEFLIQVFAIQLSKEVELAAQMREKHILRMQTVLCDMLLRDAPMGIMTQSPNVMDLVKCDGAALYYRYQCCLLGTTPTENQIRDITEWLLQYHNSSTGLSTDSLVEAGYPGAHELSDAVCGMAAIRITSKDFLFWFRSHTAKEIKWGGEKHDPLDKDAFESKMNPRTSFKTFLEVVKRRSLPWEDVEMDAI

SEQ ID NO: 12153 - protein, 467 aa, Pseudowintera axillaris
SGKPFYAIIHRVTGSLIVDFEPVKPYESPMAAAGALQSYKLTAKAISRLQSLPGGSLKRLIDTVVQGVFELTGYDRVMAYKFHEDDHGEVISEVTKPDLEPYLGLHYPATDIPQAARFLFMKNKVRMICDCNAKPMKVYQDEKLTFDLTLCGSTLRAPHSCHLQYMENMGSIASLVMAVVINEREEKDENSGSEQQQEQPKRKRLWGLVVCHNTTPRFVPFPLRYACEFLAQVFAIHVNKELELENQIQEKNILRTQTLLCDMLMRAAPLGIVTQSPSILDLVKCDGAVLLYQNKIWRLGIAPTESQILDIALWLSEYHMDSTGLSTDSLHDAGYPGALSLGDVVCGMAAVRINSKDTLFWFRSHTAAEIRWGGAKHDPNQKDDGRKMHPRSSFKAFLDVVKTRSSPWADYEMDATHSLQLILRGSLKEAEKVDTGTMIHSRLNDLKLEGVVELQAVTNQMVRLMET

SEQ ID NO: 12154 - protein, 395 aa, Pseudowintera axillaris
  unsure (1)..(395): unsure at all Xaa locations
DLEPVNPADVPVTAAGALKSYKLAAKAISKLQSLPSGNISLLCDVLVREVSELTGYDRVMTYKFHEDEHGEVIAECRRNDMEPYLGLHYPATDIPQASRFLFMKNKVRMICDCTARPVEVIQDKKLAQPLSLCGSTLTAPHGCHAQYMANMGSXASLVMSVTISEDDDEASSEEHRQKGRKLWGLVVCHHMTPRFVPFPLRYACEFLIQVFGIQLNKEVELAAQLREKNMLRTQTMLCDMLLRDAPVGIVTQSPNVMDLVKCDGAALYYRNQFWLLGTTPTEVQIRDIAEWLLEYHNNTTGLSTDSLMEAAYPGASILGDAVCGMAAVKITNKDFLFWFRSHTAKEIKWGGAKHDPSDKDGDGRKMHPRSSFMAFLDVVKRRSLPWEDVEMDAIQ

SEQ ID NO: 12155 - protein, 465 aa, Akebia quinata
SGKPFYAIVHRVTGSLIIDFEPVKPYEVPMNAAGALQSYKLAAKAIARLQSLPNASMDRLCDTVVQEVFELTGYDRVMAYKFHDDDHGEVVSEITKPGLEPYLGLHYPATDIPQAARFLFMKNKIRMICDCNATHVKVFQDEKLPLDLTLCGSTLRAPHSCHSQYMENMGSIASLGMAVVINEGDEEDNGSGSAQPQRRKRLWGLVVCHNTTPRFVPFPLRYACEFLIQVFAIHINKELELGNQVLEKSVLRTQTLLCDMLMRNAPLGIVSQSPNIMDLVKCDGATLLYKNKIWRLGLSPSEFHIRDIASWLYEYHMDSTGLSTDSLHDAGFPGALSLGDGICGMAAVRITSKDMIFWFRSHTAAEVRWGGAKHDPCEEDDGRKMHPRSSFKAFLEVAKTRSLAWKDYEMDAIHSLQLILRNAFKDGDTADLNPSVIHSRLDNLKIEGMEELEAVTNEMVRLMET

SEQ ID NO: 12156 - protein, 392 aa, Akebia quinata
DLEPVNPAEDPVTAAGALKSYKLAAKAISRLQSLPSGDISLLCDVLVHEVSDMTGYDRVMVYKFHEDEHGEAVAECLRSDLEPYLGLHYPATDIPQASRFLFLKNKVRMICDCSARSVEIVQDKRLTQPLSLGGSTLRAPHGCHAQYMENMGSVASLVMSVTINEDDDEMETNQQKGRKLWGLVVCHHSSPRFVPFPLRYACEFLIQVFGIQLNKEVELAAQLREKHILRIQTVLCDMLLRDAPVGIFTQSPNVMDLVKCDGAALYYKNKLWLLGVTPTEAQIREIAAWILEYHDRSTGLSTDSLMEAGYPGASVLGDAVCGMAAINITSKDFIFWFRSHTAKEIKWGGAKHDTVDKDDGRKMHPRSSFKAFLEVVQWRSLPWEDMEMVAIQ

SEQ ID NO: 12157 - protein, 385 aa, Amborella trichopoda
PYEVPMTAAGALQSYKLAAKAISRLQSLPSGNIDRLCHTVVQEVHELTGYDRTMAYKFHEDDHGEVISEITKGGLEPYLGLHYPATDIPQAARFLFMKNGVRMICDCRARHVRVFQDEKLASDLTLCGSTLRAPHSCHLQYMENMDSIASLVMAVVVNEDEEENIADGPKRKRLWGLVVCHNTSPRFVPFPLRYACEFLMQVFAIHVNKEVELEALVREKNILRTQTMLCDMLLRDALLGIVTKNPNVMDLVKCDGATLLYENKLWRLGVTPSEVHIRDLARWLSEYHTDSTGLSTDSLVEAGYPDGVSLGDLVCGMAAVKITETDMLFWSRSHTASEIRWGGAKHDPNDKDDKRRMHPRSSFKAFLEVVKTRSFPWKDYEMDAI

SEQ ID NO: 12158 - protein, 394 aa, Amborella trichopoda
DLEPVNPADVPVTAAGALKSYKLAAKAISKLQSLPSGNIELLCDVLVREVRELTGYDRVMAYKFHEDEHGEVVAEYRRADLDPYLGLHYPATDIPQASRFLFLKNKVRMICDCTASPVKVIQDKKLDKPLSLCGSTLRAPHGCHAQYMANMGSIASLVMSVTINENDEDSSPNEPSFHKGRKLWGLVVCHHTTPRFVPFPLRYACEFLLQVFGIQLNKEVELAAQLREKHILRTQTVLCDMLLRDAPVGIVTQSPNIMDLVKCDGAALYYQKQVWLLGTTPLEAQIRDISGWLLEYHCGSTGLSTDSLMEAGYPGALALGDAVCGMAAVKITSKDFLFWFRSHTAKVIKWGGAKHDPVDRDDGRKMHPRSSFKAFLEVVKQRSLPWEDVEMDAI

SEQ ID NO: 12159 - protein, 345 aa, Austrobaileya scandens
TGYDRVMAYRFHEDDHGEVVSEIRKSELEPYLGLHYPATDIPQAARFLFMKNKVRMICDCHAKSVTVHQDEKLQFDLTLCGSTLRAPHSCHLQYMANMGSIASLVMAVVVNEGEQDEEETAEPNQQPQLKRKRLWGLVVCHNTTPRFVPFPLRYACEFLIQVFAIHVNKEMELQNQLQEKNILRMQTLLCDMLLRDAPLGIVTQSPNIMDLVKCDGAAVLYGNKVWLLGVTPTESQIQDIASWLSESHMDSTGLSTDSLFEAGYPGALALGAKVCGMAAVKITLKDMLFWFRSHTAAEVRWGGAKHDPVDRDDGRRMHPRSSFKAFLEVVKSRSLPWKEYEMDGI

SEQ ID NO: 12160 - protein, 360 aa, Austrobaileya scandens
PFYAILHRIDAGLIIDLEPVNPADVPITAAGALKSYKLAAKAISRLQSLPSGNIGLLCDVLVQEVSELTGYDRVMAYKFHEDEHGEVIAEYRRSNLEPYIGLHYPATDIPQASRFLFMKNKVRMICDCFAPPIKVIQDKKLAQPLSLCGSTLRAPHGCHAQYMANMGSVASLVMSITVNDDDDETIGEQQNQQKGRKLWGLVVCHHTSSRFVPFPLRYACEFLIQVFGIQLNKEVELAAWMREKHILQMQTLLCDMLLRDAPVGIMTQSPNVMDLIKCDGAALYYGKQLWLLGTTPTEAQIRDIAGWLLEYHGGTTGLSTDSLMEAGYPAAAALGDGVCGMAAAKLTSKDFLFWFRSHTA

SEQ ID NO: 12161 - protein, 744 aa, Burkholderia fungorum
MKITVTQPFDTAHTGKALLVVFARVAVADRPASLAPTGVDSDLWHLESELRTTQVELGSTIEELEESNSELRVSNEEILSMNEELRSANEELETSKEELQALNEQLNVVNSQLGQKVHELEMLSEDVTNLLASTEIATLLLDGHAVIKRFTPRAARIFGLALADIDRPITNVLGNPLGDALLEDVQRVLSAQTGQAEKEIETVTGEWYVRRITPYIAVKGASPAGVVVTWNDITHVKASDERSRRLAAVVQDSNDAMTVFDLNGRLMAWNRAATAMYGYTEAEALGMTVSDMLPPGARQDHLDFIRYAAHNEALHSYETQRVTKGGRVVDIWITLSILSDDQGHAVAIATTERELTDRSLSNAQLRERAERLAQADRRKNEFLAMLGHELRNPLAALCSSGDLLASETIDPRQKSWAVGVIQRQGRSMTQLVNEMLDLTRITSGSIELRRQAVTLKAVIQSAVEVCQPIIDERHHTLSVSLPDEPVLMYVDPTRLSQVVENIVINAARYTEPGGHISLTATRTGRRLSLRVKDNGRGIPASMLSTLFDMFVQGPVPYGQLHNGLGVGLSVVRRLVELHGGSVRAISDGRTGSEFIVDLPLGMIPPGVEQAGTPQEPVNAGPRKILIIDDNADASEALAMLLAAEGHVVETRLDGPGGLEAASTFRPDVVLLDIGLPGMDGYEVAKQLRDSVATYDTMLIAVTGYGQPGDQLRSAEAGLDYHLVKPVDINALTRLLAVQVKPRGR

SEQ ID NO: 12162 - protein, 1490 aa, Burkholderia fungorum
MSSVNFPPDVAMRRALERVRLCLLAWCLIAAAQTATAAQLFDNRSNSQVVAAFPAKLTVGVLAGGWLPLDALQDGRLTGMSVDYLRALVGPNVVIEAKAFPDVSQLLAAACAGNVDLLTSVARTPERERCLSFTAPYFRSSSSAVVRRDGDSYASPALIAGARIAVEKGFALERVARERFPHAQISAFATTHAALSAVVRGDADVYLGFTPAVQYALATEEFRGLHVAFEESSRTANLRFAVPRSHAALRDQLDEALASMNPADEAAIRVRWLSGNFDAKPVPTAPRLVLTPQEQAWLRSLPPLQIGFDNGWSPFSYVDSSGRPAGIAADYLAYLSRTLGVVFNRARTADWPTAIESFQRGELAILATASIHDPRLKGARHTVAYESYPLVIVGREDEPAARSLSDFASRRVVVSSHVAGSIPLAFERIPADHVVIAPSLDDALDMVAAGEADVLVGNVAAIDILLKQRYDSVLKILGTVGESDALDFAVRTDLSPLAGLIDRALLAMPPAEKQRIRQKWVTGNSPESGLWSVTAVRLLPLLIGIGVALLITLRAYLLLQREVRLRKKTELELELQLNFQETMMKMVPYPLVAIDLDGRYIAVNEAYEQACGMSREAVIGRNTVDVQTWGEANSRILTDMTREMLNGRETAQLELQFERGAGNVRHGLFWASVCRDGDGQPACVLGTVVDITDIRRAEMRARETERRLFDVTRSLPAVVFQLRRTSDGAYSFPYIGGDTRHLLGGKDGSLNRSDHVDFQRVCEEDRAFVLAELERSALCETPVNMEFRFEGDEEIKWARAELVPRREADDSVVWSGYWVDASVEHARSDELARARDLAEAAARAKDDFFAMMSHEIRTPMNGVLGLVEVLERTPLNTDQGEMLGMIHESAGALLQILDDLLDYSKIEAGRLTIEAESIDIRELVDNAVGLLAGRAHEKGLKVRVDIAPDVAATLRGDSVRLRQILFNLLGNAIKFTPQGEVDVRVSVFAQADGVQTLEMTVEDTGIGIAPEVQNRLFEPFVQAESSTTRRFGGTGLGLTICRKLIDLMGGSLALHSEPGSGTRMTVRLDMAVETQRYSVNGLRGKRGLVATGDARVAQALMHFGEALGLTLRRVPPDAPELRDRVALANLDLLFVNEDVTLPADVRPRTRVICLTEKPKPTGYRILDDNVRLSINPISWRGLGAACAAAMTGLPSVPRSAGTPRAPEGGPPPPDRERAIASGRLILVAEDHPVNQELIRHQLALLGFACDVTNDGAEALAALQRTSYGCLITDCHMPNVSGYELTRRIREGEEGGAHRLPILGITANTAPEDLNLCRDAGMDDSLVKPTRLATLRDYLSRWFGSDSAAHAAPSESVGAPAIAATDVQGGADPFVPVDLGHMTQLWGSESTVKALLDSFVSSVREDVQSLSPLLERVGSERTELERVREWLHRVAGAASVLQYPPLLMALEDYRREINVKPPERVRNDGMVLIDKCNAMLDGIEQQAALLV

SEQ ID NO: 12163 - protein, 1344 aa, Burkholderia fungorum
MNDANNISPTLGAATVPRIVAIGASAGALHALSLFFRAASTMPHDIAFAIVVHLAPGAESHLPELLAKDTSLAVSAIEDGATLCAGHVYVIPPKVSVVIEQGVFRLRPAVERPTIPMPIDEFFTSLAADQHDRAIGIVLTGANADGSAGLRAIKAAGGMVMAQSPATAEHDSMPAHAVATGLVDYVLPIEKMPAVLFDYIARSGEAMLPVSGKSGAMVDLEPVLRALAAAGSDFRGYKRGTLERRIARRMTVNQVDSLDAYCAVLRTSVEEAQALSLDMMIGVTEFFRDPEAWRALAERVLGPLLDEPGGDQPLRVWVPGCATGEEAYSMAMLLTEEIGKRKLTRSFMILASDVNRVALTRARQGIYSPGVALPVGEERLERFFRPHGNDYQIDQALRETILFTPQNLIADPPFSRVDLISCRNLLIYLEPEAQQRVFEVFHFALNPKRYLFLGRSESTDPDSGPFQEVSRAWRIYQRSPVTAAVVSGYRFSAPGGRRDEFPSASRGSNRSKGYAELVNSTLLEEHHAASVLINAAHQVLYTSGSTDEYLRQPTGEPTGNILDMAREGLRLKLRIVLRRASQDEAAGPVSEVVSDGGAPAVKITVTRPFDTAHTGKALLVIFARVPVAERPGSLAPTGVDSDLWHLESELRTTQVELGSTIEELEESNSELRVSNEEILSMNEELRSANEELETSKEELQALNEQLNLVNSQLGQKVHQLEVLSEDVANLLASTEIATLLLDRHAVIKRFTPSAARIFGLALADIDRPITNVLGNPLGDTLLEDVQRVMSAQTGQAEKEIQTLTGEWYVRRITPYIAVQGTPPAGVVVTWNDITHVKASDERSRRLAAVVQDSNDAMTVFDLNGRLIAWNRAATAIYGYTEAEALCMTVSDMLPSGARQDHLDFIRYAEHNEALHSYETQRVTKSGRVLDIWITLSILSDNQGHAVAVATTERELTDRSLSNTQLRERAERLAQADRRKNEFLAMLGHELRNPLAALCSAGDLLASESVDARQKVWAVGVIQRQGQAMTQLVNEMLDLTRIASGSIKLNRQAVTLETVVQSALEVCRPIVEERHHTLSVALPEEPVLMFVDPTRLSQVIENIVINAAKYTEPGGKIDLSATRTGRRLSLRVRDNGAGIAPSMLNTLFDMFVQGPLPHGQLHNGLGVGLSVVRRLVELHGGTVEAVSDGKTGSEFIVDLPLGLIPASPDQAGSPQNPGKAPPRRVLIIDDNADASEALAMILASEGHVVATRLDGQQGLEASTTFRPDVVLLDIGLPGMDGYEVAQKLRGSAATRDTLLVAVTGYGQPGDQLRSAAAGFDHHLVKPVDIEALKGLFAAKMKPRDA

SEQ ID NO: 12164 - protein, 192 aa, Cupressus sempervirens
DDHGEVISEIRRPDLEPYLGLHYPATDVPQASRFLFMKNKVRMICDCYANPVEVVEDKRLPRELILCGSSLRAPHGCHAEYMSNMGSIASLVIAVTINAKEEDVDTDAQQQQQKGRRLWGLVVCHHTSPRFVPFPLRYACEFLMQVFAIQLNKEVDLADQLREKHILRTQTLLCDMLLRDAPMGIIREKPNI

SEQ ID NO: 12165 - protein, 181 aa, Cupressus sempervirens
DDHGEVVAEMRRPDLEPYLGLHYPATDIPQSSRFLFLKNRVRTICDCRAPAVKVRHDESLGQVLSLQGSTLRAPFGCHAQYMANMGSIASLVMAVTVSDSEEGGRRLWGLVVCHHTTPRFVPYPLRYACEFLMQVFGIQLNKELELASRLRERHIFRTQTLLCDMLLRDAPVGIVTTTPNI

SEQ ID NO: 12166 - protein, 189 aa, Cupressus sempervirens
DEHGEVLAEIRRSDLEPYLGLHYPATDIPQASRFLFMQNKVRMISDCRADPVRIIQAEELPQRLCLVGSTLRAPHGCHAQYMANMGSIASLAMAVIVNNGNDEAGSSGRNTFKLWGLVVCHHTSPRAVPFPPLRSACEFLMQTFSLQINMEMQLATQLTENNILRTQTLLCDMLLRDAPIGIVTQSPSI

SEQ ID NO: 12167 - protein, 414 aa, Degeneria vitiensis
SGKPFYAIIHRVTGSLIIDFEPVKPYEVPMTAAGALQSYKLAAKAIAKLQALPSGSMEKLVDTIVQEVFELTGYDRAMAYKFHEDDHGEVISEVTKPGLEPYLGLHYPATDIPQAARFLFMKNKVRMICDCHAKPVEVYQDEKLTFDLTLCGSTLRAPHSCHLQYMENMDSIASLVMAVVINEGEDESGGPEQQQQQLKRKRLWGLVVCHNMTPRFVPCPLRYACEFLMQVFAIHVNKEFELENQIREKNILRTQTMPCDMLLRDAPLGIVTQSPNIMDLVKCDGAALLYNNKIWRLGFTPTESQIHDISIWLSEYHTDSTGLSTDSLRDAGYPDALALGDVVCGMAAVRISPKDMLFWFRSPTAAEVRWGGAKHDPCDKDDGRRMHPRSSFKAFLEVVKTRSLPWKDYEMDGI

SEQ ID NO: 12168 - protein, 393 aa, Degeneria vitiensis
DLEPVNPADVPVTAAGALKSYKLAAKAISRLQSLPSGNISLLCDVLVREVSELTGYDRVMAYKFHEDEHGEVIAESRRSDLEPYLGLHYPATDIPQASRFLFMKNKVRMICDCSAPPVKVIQDKRLAQPLSLCGSTLRAPHGCHTQYMANMGSISSLVMSVTINEDDDDMLSEQQQKGRKLWGLVVCHHTSPRFIPFPLRYACEFLIQVFGIQLNKEVELAAQMREKHILRMQTVLCDMLLRDTPVGIITQSPNVMDLVNCDGAALYYRNQFWLLGTTPTEAQIRDIAGWLVEYHDGTTGLSTDSLTEAGYPSAADLGDDVCGMATVKITSKDFLFWFRSHTGKEIKWGGAKHDPVDKDDDGRKMHPRSSFKAFLEVVKQRSLPWEDVEMDAI

SEQ ID NO: 12169 - protein, 105 aa, Flagellaria indica
QAARFLFMKNKVRMICDCRAKPVKIYQDESLPFDISLCGSTLRAPHSCHLQYMENMNSIASLVMAVVVNERGEEDEPEPGQPQQQKRKRLWGLVVCHNESPRFVP

SEQ ID NO: 12170 - protein, 107 aa, Flagellaria indica
QASRFLFMKNKVRMICDCSAPPVKVVQDDRLPQPLSLCGSTLRAPHGCHAQYMANMGSTASLVMSVTVNEEGDDDTGSDQQQQQQQQRGRKLWGLVVCHHTSPRFVP

SEQ ID NO: 12171 - protein, 98 aa, Flagellaria indica
SRFLIKQNRVRMIADCHAPSVRVIQEPSLPQPLCLVGSTLRSPHACHAQYMANMGSIASLVMAVIISSSSDDSSSAVSSGTKLWGLVVCHHTSPRCIP

SEQ ID NO: 12172 - protein, 414 aa, Idiospermum australiense
SGKPFYAIIHRVTGSLIIDFEPVKPYEAPMTAAGALQSYKLAAKAITRLQSLPSGSMERLVDTVVQEVFELTGYDRVMAYKFHEDDHGEVISEITKPGLEPYLGLHYPATDIPQAARFLFMKNKVRMICDCHARPVKVYQDEKLTFDLTLCGSTLRAPHSCHLQYMENMDSIASLVMAVVINEGEEDDEVESAQQQQQKRKRLWGLVVCHNTTPRFVPFPLRYACEFLMQVFAIHVSKEFELENQLREKNILRTQTLLCDMLLRDAPLGIVTQSPNIMDLVKCDGAALLYGSKIWRLGLTPTDSQIQDIAMWLSEYHMDSTGLSTDSLYDAGYPKALSIDDVVCGMAAVRITAKDMLFWFRSHAAAEVRWGGAKHDPSDKDDGRRMHPRSSFKAFLEVVKTRSLPWKDNEMDAI

SEQ ID NO: 12173 - protein, 395 aa, Idiospermum australiense
DLEPVNPADVLVTAAGGLKSYKLAAKAISKLQSLPSGNISLLCDVLVREVSELTGYDRVMAYKFHEDEHGEVIAECRRSDLEPYIGLHYPATDIPQASRFLFRKNKVRMICDCLAPPVKVIQDKRLAQPLSLCGSTLRAPHGCHAQYMANMNSIASLVISVTVHEDDNETGSEQQQQPKGRKLWGLVVCHHTSPRFVPFPLRYACEFLIQVFGIQLNKEIELAAQMNEKHILRTQTVLCDMLQRNAPVGIITQTPNVMDLVKCDGAALYYRNQFWLLGTTPTEAQIRDIVEWLMEYHSSSTGLSTDSLMEAGYQGAAILGDAVCGMAAIRITSKDFLFWFRSHTAKEIKWGGAKHDPVDQDDDGRKMHPRSSFKAFLEVVKRRSLPWEDVEMDAI

SEQ ID NO: 12174 - protein, 465 aa, Tetracentron sinense
SGKPFYAIVHRVTGSLIIDFEPVKPYEVPMTAAGALQSYKLAAKAIARLQSLPSGSIERLCDTVVQEVFELTGYDRAMVYKFHEDDHGEVVSEITKPGLEPYLGLHYPATDIPQAARFLFMKNKVRMICDCRAKHVKVLQDEKLPFDLTLCGSTLRAPHSCHLQYMENMNSIASLVMAVVVNEEDEEGESSSSEQSQKRKKLWGLLVCHHTTPRFVPFPLRYACEFLAQVFAIHVNKELELENQILEKNILRTQTLLCDMLMRDAPLGIVSQSPNIMDLVKCDGAVLLYKNRIWQLGSTPSEFHIHDITSWLSEYHMDSTGLSTDSLYDAGFPGALALGDGVCGMAAVRITSKDMLFWFRSHTAAEVRWGGAKHEPGEKDDGRKMHPRSSFKAFLEVVKTRSLPWKDYEMDAIHSLQLILRNAFKDVENEGLNTSTIRTQLNDLSIEGTEELEAVTNEMVRLMET

SEQ ID NO: 12175 - protein, 390 aa, Tetracentron sinense
DLEPVNPADVPVTAAGALKSYKLAAKAISRLQSLPSGNLSLLRDVLVQEVSDLTGYDRVMVYKFHEDEHGEVVAECLISDLEPYLGLHYPATDIPQASRFLFMKNKIRMICDCLAPPVKVIQDKRLVQPLSLCGSTLRAPHGCHAQYMENMGSIASLVMSVTINDDDDEIESDKRGRKLWGLVVCHHTSPRFVPFPLRYACEFLIQVFGIQLNKEVELVAQLREKQTLRTQTVLCDMLLRDAPVGIVTQSPNVMELVKCDGAALYYRSTFWLLGVTPTEAQIRDIAEWLLEYHNGSTGLSTDSFMEAGYPGAAVLGDAVCGMSAVKITSKDFLFWFRSHTAKEIKWGGAKHDPFDKDDGKKMHPRSSFKAFLEVVKWRSLPWEDMEMDAI

SEQ ID NO: 12176 - protein, 465 aa, Xanthorhiza simplicissima
SGKPFYAIVHRVTGSLIIDFEPVKPYEVPMTAAGALQSYKLAAKAIARLQSLPSGSIERLCDTVVQEVFELTGYDRAMVYKFHEDDHGEVVSEITKPGLEPYLGLHYPATDIPQAARFLFMKNKVRMICDCRAKHVKVLQDEKLPFDLTLCGSTLRAPHSCHLQYMENMNSIASLVMAVVVNEGDEEGESSSSEQSQKRKKLWGLLVCHHTTPRFVPFPLRYACEFLAQVFAIHVNKELELENQILEKNILRTQTLLCDMLMRDAPLGIVSQSPNIMDLVKCDGAVLLYKNRIWQLGSTPSEFHIHDITSWLSEYHMDSTGLSTDSLYDAGFPGALALGDGVCGMAAVRITSKDMLFWFRSHTAAEVRWGGAKHEPGEKDDGRKMHPRSSFKAFLEVVKTRSLPWKDYEMDAIHSLQLILRNAFKDVENEGLNTSTIRTQLNDLSIEGTEELEAVTNEMVRLMET

SEQ ID NO: 12177 - protein, 391 aa, Xanthorhiza simplicissima
DLEPVNPADVPVTAAGAMKSYKLAAKAISRLQSLPSGNITVLCDVLVQEVSDLTGYDRVMVYKFHEDDHGEVVAECRVPELEPYLGLHYPATDIPQASRFLFMKNKVRMICDCSAAPVKVIQDNKLAQPLSLGGSALRAPHGCHALYMANMGSVASLVMSVTINEDDDQMETDQQKGRKLWGLLVCHHTRPRFVPYPLRYACEFLIQVFGMQINKEVELATQFREKHILQTQTVLCDMLLRDAPIGIVTQSPNIMDLVKCNGGALYYRSRFWLLGVTPTEAQIKDIAEWLLQYHNASTGLSTDSLMEAGFPGASVLGNEVCGMAAIKITTKDFLFWFRSHTAKEVKWGGAKHNPTEKDDGWKMHPRSSFKAFLEVVKHRSLPWEDVEMDAI

SEQ ID NO: 12178 - protein, 197 aa, Chara foetida
DEHGEVIAEIRRADLEPYLGLHYPATDVPQAARFLFMKSRIRMIADCSAPQVKVLQDKSHVQLISLSGSTIRGVHGCHAQYMKNMGSAASLVMAVIINDAEDEGGGSGGGGASASITPRGRKLWGLVVCHHATPRVVPFPLRAACEFLMQVFGLQLNMEVELAAQIREKHILRTQTLLCDMLLRDAPTGIVTQSPNI

SEQ ID NO: 12179 - protein, 190 aa, Marsilea quadrifolia
DEHGEVVAEIRKSDLEPYLGLHYPATDIPQASRFLFMKNRVRMICDCRSNPVRVIQDKNLRQPLSLAASTLRAPHGCHSQYMANMGSIASLVMAVIVNDNEEETSNRNQQPKMRKLWGLVVCHHTTPRAVPFQLRSACEFLMQVFGLQLNMELELAAQMREKHILRTQTLLCDMLLRDAPIGIVSESPNI

SEQ ID NO: 12180 - protein, 190 aa, Angiopteris evecta
DEHGEVVAEIRRSDLEPYLGLHYPATDIPQASRFLFMKNRVRMICDCRTPPVRVLQDKELRQPLSLAGSTLRAPHGCHSQYMANMGSIASLVMAVVVNDNDEDSSNRASHQKSRKLWGVVVCHHTTPRAVPFPLRSACEFLTQVFGLQLNMEVELAAQMREKHILRTQTLLCDMLLRDAPIGIVTQSPNI

SEQ ID NO: 12181 - protein, 190 aa, Angiopteris evecta
DEHGQVVAEIRRLDLQPYLGLHYPATDIPQASRFLFMKNRVRMICDCCAPPVKVIQDKELRLPLSLAGSTLRAPHGCHAQYMATMGSIASLVMAVVVNDNDENSTTRAHQPKNRKLWGLVVCHHTTPRAVPFPLRSACEFLMQVFGLQLNMEVELAAQMREKHILRTQTLLCDMLLRDAPIGIVTQSPNI

SEQ ID NO: 12182 - protein, 190 aa, Angiopteris evecta
DDHGEIFAEIRRSNLEPYLGLHYPATDIPQASRFLFMKNRVRMICDCSASPVKVIQDEKLGQPLSLTSSTLRAPHGCHSLYMGNMGSIASLVMAVVINDNEDDISNNGHAYQGRRLWGLVVCHHTAPRFVPFPVRSACEFLMQVFGLQLNMEVGLAAQVREKHILKTQTVLCDMLLRDAPIGIVSKSPNM

SEQ ID NO: 12183 - protein, 466 aa, Aristolochia grandiflora
SGKPVYAIIHRVTGSLIIDFEPVKPYEAPMTAAGALQSYKLAAKAISRLQSLPSGSMERLVDTVVQEVYELTGYDRVMAYKFHDDDHGEVISEVTKPDLEPYLGLHYPATDIPQAARFLFMKNKVRMICDCYAKPVKVFQDEKLSFDLTLCGSTLRAPHSCHLQHMKNMSSIASLVMAVVVNEGEEDDNPDPNQQQQVPKRKRLWGLVVCHNTTPRFVPFPLRYACEFFMQVFAIHVNNEIELENQIREKNILRTQTLLCDMLLRDSPLSIVTRSPNIMDLVKCDGAALMYQNKVYTLGLSPTESQISEINRWLLEYHMDSTGLSTDSLHDAGYPNAPSLGDIVCGMAAVRITSTDMLFWFRSHTAGEVRWGGAKHDPSDKDDGRRMHPRSSFKAFLEVVKNRSLPWKDYEMDAIHSLQLILRGSTKETAAIDTKTVISSQLNNLKLDGLHELQAVTNEMVRLMET

SEQ ID NO: 12184 - protein, 392 aa, Aristolochia grandiflora
DLEPVNLADAQVSASGALKSYKLAAKAISRLQSLPSGNIVLLCDVLVREVRDLTGYDRVMAYKFHEDEHGEVIAECKRPDLEPYLGLHYPATDIPQASRFLFMKNKVRMIYDCSATPVSVIQDKGLAQPLCLGGSTLRAPHGCHSQYMANMGSIASLVMSVTINEDDDEKGSGQRGRKLWGLVVCHHCSPRFIPFPFRYACDFLMQVFGIQINKEVELAAQVREKHILRTQTLLCDMLLRDAPMGIVNKSPNVMDLVKCDGAALYYQNKFWLLGTTPTEAQIRDLAQWLLQYHNNTTGLSTDSLVEAGYPGAQDLGDAVCGMAAVKITSRDFLFWFRSHAGKEIKWGGAKHDPKEHDGDGKKLHPRSSFNAFLEVVKWRSTPWEDVEMDAIQ

SEQ ID NO: 12185 - protein, 463 aa, Dioscorea elephantipes
SGKPFYAIMHRIDVGLVIDLEPVNPADVPVTAAAALKSYKLAAKAISRLQSLPSGNIPLLCDVLVKEVSELIGYDRVMAYKFHEDEHGEVIAECRRSDLEPYLGLHYPATDIPQASRFLFMKNKVRMICDCSAPPVKVIQDKRLPQPLSLGGSTLRAPHGCHAQYMANMGSIASLVMSVTINEDDDETGSGDQQQNGMKLWGLVGCHHTSPRFVPFPLRYACEFLLQVFGIQLNKEVELATQQREHILRTQLSCDMLLRDAPIGYLLNSPNVMDLVKCDGAALYYKNQFWLLEITPTEAQIRDIFAWLLEYHNSTTGLSTNSLTEAGYPGAVELGDAVCSMAATKITSKDFIFWFRSHTSKEIKWGGAKHDPGDRTDEGRKMHPRSSFKAFLEVVKRRSLPWEDVDMDAIHSLQLILRGSLQDEPVTDNSKTIVNATPDDAKQIQHMDELRIVTTEMVRLMET

SEQ ID NO: 12186 - protein, 366 aa, Dioscorea elephantipes
SGKPFYAIVHRVTGCLIFDFEPVKLSDIPTSTTASGALQSYKLAAKAIARPQSLPGGSMDTLCETLVEEVFQFTGYDRVMVYKFHEDDHGEVYQEITKPGMVPYLGLHYPATDIPQAARFLFIKNKVRMICDCRAKHVNIHQDETLLFDITFCGSTLRAAHNCHLQYMSNMNSIASLTMAVVVNEGEEEDDHLEPGQSSQQQQQQQQQQQQQQQKRKHLWGLVVCHNESPRFLPFPMRYACQFLMQVFSVHVTKELELENQIREKNILRTQTLLCDMLLRDTAPVGIITQSPNIMDLVKCDGAALLYDDRIWRLGLTPTKEQIRSIAHWLAEHHMAPTALSTDSLQDAGYPDAQALGDLVCGMAAA

SEQ ID NO: 12187 - protein, 459 aa, Illicium oligandrum
SGKPFYAIMHRIDVGLVIDLEPVNPADVPITAAGALKSYKLAAKAISRLQSLPSGNIGILCDVLVREVSELTGYDRVMAYKFHEDEHGEVIAEYRRTDLEPYLGLHYPATDIPQASRFLFMKNKVRMICDCYAPPVKVIQDKKLAQPLSLGGSTLRAPHGCHAQYMANMGSIASLVMSVTINEDYDETSSNQQKGRKLWGLVVCHHTSPRFVPFPLRYACEFLLQVCGIQLNKEVELVAQMKEKHILKTQTLLCDMLLRDAPIGIMTKSPNVMDLVKCDGAALYYGKQLWLLGITPTEAQIRDITEWLLECHDSTTGLSTDSLMEAGYPGATTLGDTVCGMAAIKVASKDFLFWFRSHTAKEIKWGGSKHDPADKDGKKMHPRSSFKAFLEVVKRRSLPWEDVEMDAIHSLQLILRGSLQQVLESETKAIVDARLDDEQIQGPDELRIVTNEMVRLIET

SEQ ID NO: 12188 - protein, 374 aa, Canotia holacantha
ALSIAGAVESQKLAVRAISHLQSLPGGDIKLLCATVVESVRDLTGYDRVMVYKFHEDEHGEVVAESKRPGLEPYIGLHYPATDIPQASRFLFKQNRVRMIVDCCASPVGVIQDDGLMQPLCLVGSTLRAPHGCHAQYMENMGSKASLAMAVIINGKDEEIVGGRNATRLWGLVICHHTSARCIPFPLRYACEFLMQAFGLQLNMELQLAAQLSEKHVLKTQTLLCDMLLRDSPTGIVTQSPSIMDLVECDGAALYYQGKYYPSGVTPSEAQTKDIVEWLLAFHGDSTGLSTDSLADAGYPGAAFLGDAVCGMAVAYITNRDFLFWFRSHTTKEIKWGGAKHHPEDKDDGQRMHPRSSFKAFLEVVKSRSLSWEN

SEQ ID NO: 12189 - protein, 358 aa, Canotia holacantha
ESQKLAVRAISHLQSLPGGDIKLLCATVVESVRDLTGYDRVMVYKFHEDEHGEVVAESKRPDLEPYIGLHYPATDIPQASRFLFKQNRVRMIVDCCASPVGVIQDDGLMQPLCLVGSTLRAPHGCHAQYMENMGSKASLAMAVIINGKDEEIVGGRNATRLWGLVVCHHTSARCIPFPLRYACEFLMQAFGLQLNMELQLAAQLSERHVLKTQTLLCDMLLRDSPTGIVTQSPSIMDLVKCDGAALYYQGKYYPSGVTPSEAQIKDIVEWLLAFHGDSTGLSTDSLADAGYPGAAFLGDAVCGMAVAYITNRDFLFWFRSHTTKEIKWGGAKHHPEDKDDGQRMHPRSSFKAFLEVVK

SEQ ID NO: 12190 - protein, 245 aa, Gymnosporia mossambicensis
ALSIAGAVQSQKLAVRAISQLQSLPGGDIKLLCDTVVESIRNLTGYDRVMVYKFHEDEHGEVVAESKRSDLEPYIGLHYPASDIPQASRFLFKQNRVRMIVDCHASPVRVIQDDGLMQPLCLVGSTLRAPHGCHAQYMENMGSLASLAMAVIINGNEEEAIGGRSPTRLWGLVVCHHTSARCIPFPLRYACEFLMQAFGLQLNMELQLAAQLLEKHVLKTQTLLCDMLLRDSPTGIVTQSPSIMD

SEQ ID NO: 12191 - protein, 245 aa, Gymnosporia mossambicensis
ALSIAGAVQSQKPAVRAISQLQSLPGGDIKLLCDTVVESVRNLTGYDRVMVYKFHEDEHGEVVAESKRSDLEPYIGLHYPASDIPQASRFLFKQNRVRMIVDCHASPVRVIQDDGLMQPLCLVGSTLRAPHGCHAQYMENMGSLASLAMAVIINGNEEEAIGGRSPTRLWGLVVCHHTSARCIPFPLRYACEFLMQAFGLQLNMELQLAAQLLEKHVLKTQTLLCDMLLRDSPTGIVTQSPSIMD

SEQ ID NO: 12192 - protein, 360 aa, Wimmeria acuminata
AVQSQKLAVRAISQLQSLPGGDIKLLCDTVVESVRHLTGYDRVMVYKFHEDEHGEVVAERKRPDLEPYIGLHYPATDIPQASRFLFKQNRVRTIVDCHASPVRVIQDDGLMQPLCLVGSTLRAPHGCHAQYMENMGSIASLAMAVIINGNDEEVIGVRNATRLWGLVVCHHTSARCIPFPLRYACEFLMQAFGLQLNMDLQLAAQLSEKHVWKTRTLLCDMLLRDSPAGIVTQSPSIMDLVKCDGAALYYQGNYYPLGVTPTEAQITDIVGWLLDFHGDSTGLSTDSLADAGYPGAALLGDAVCGMAVAYITNRDFLFWFRSHTAKEIKWGGAKHHPEDRDDGQRMHPRSSFQAFLEVVK

SEQ ID NO: 12193 - protein, 465 aa, Heuchera canadensis
SGKPFYAIVHRVTGSLIIDFEPVKPYEVPMTAAGALQSYKLAAKAITRLQALPSGSVERLCDTMVQEVFELTGYDRVMAYKFHDDDHGEVVSEITKPGLEPYLGLHYPATDIPQAARFLFMKNKIRMICDCRAKHVKVLQDEKLPFDLTLCGSTLRAPHSCHLQYMENMNSIASLVMAVVVNDGDDESESSNPAQPSKRKRLWGLVVCHNTTPRFVPFPLRYACEFLAQVFAIHVSKELELENQILEKNILRTQTLLCDMLMRDAPLGIVSQSPNIMDLVKCDGAALLYKDKIWRLGVVPTDSQLQDIASWLSKYHMDSTGLSTDSLYDAGFSRALSLGDVVCGMAAVKINSNDILFWFRSHTAAEIRWGGAKHETGEKDDNRKMHPRSSFKAFLEVVKTRSLPWKDYEMDAIHSLQLILRNTFKDIETVDANTNKIHTKLSDLKIEGMQELEAVTSEMVRLIET

SEQ ID NO: 12194 - protein, 435 aa, Heuchera canadensis
SGKPFYAIIHRIDVGLVIDLEPVNPADVPITAAGALKSYKLAAKAISRLQSLPNGNITLLCDVLVKEVSDLTGYDRVMVYKFHEDEHGEVIAESCRPDLEPYLGLHYPATDIPQASRFLFMKNKVRMICDCLASSVKVIQDKRLPQPLSLCGSTLRSPHGCHTQYMANMGTIASLVMSVTINEEDDEMVTDQPKGRKLWGLVVCHHTSPRFVPFPLRYACEFLIQVFGVCINKEVELASQTREKHILQTQTVLCDMLLRNAPVGIVTQSPNVMDLVKCDGAALYYKKKAWLLGSTPTDAQIRDITDWLLEYHGGSTGLSTDSLVEAGYPDALNLGDAVCGMAAIKITSNDFLFWFRSHTAREIKWGGAKHDPDEKDDGRKMHPRSSFKAFLEVVKRRSLPWEDVEMDVIHSLQLILRGSLQDETVDDSKTIVNES

SEQ ID NO: 12195 - protein, 465 aa, Pachysandra americana
  unsure (1)..(465): unsure at all Xaa locations
SGKPFYAIVHRVTGSLIIDFEPVKPYEVPMTAAGALQSYKLAAKAIARLQSLPSGSMERLCDTMVQEVFELTGYDRVMAYKFHEDDHGEVVSEITKPGLEPYLGLHYPATDIPQAARFLFMKNKVRMICDCNAKHVKVLQDEKLPFDLTLCGSTLRAPHSCHLQYMDNMGSIASLVMAVVINEGDEDGEGSDPAQPQKRKRLWGLVVCHNTSPRFVPFPLRYACEFLAQVFXIHVNKEIGLENQILEKNILRTQTLLCDMLMRDAPLGTVSQSPNIMDLVKCDGAALLYKNKIWRLGMAPGDFQINDISSWLSEYHMDSTGLSTDSLYDAGYPGALALGDVVCGMAAVRITTKDMLFWFRSHTAGEVRWGGAKHERGEKDDGRRMHPRSSFKAFLEVVKTRSLPWKDYEMDAIHSLQLILRNAFRDVETMDLDTNTIRMQLNDLKIKGMEELEAVTNEMVRLMET

SEQ ID NO: 12196 - protein, 412 aa, Pachysandra americana
SGKPFYAIMHRIDVGLVIDLEPVNPADVPVTAAGALKSYKLAAKAISKLQSLPSGNISLLCDVLVKEVNELTGYDRVMVYKFHEDEHGEVVAECRRTDLEPYLGLHYPATDIPQASRFLFLKNKVRMICDCLAPPIRVIQDKRLEQPLSLCGSTLRAPHGCHAQYMENMGSIASLVMSVTINEDDDDDDVESDQQKGRKLWGLVVCHHTSPRFVPFPLRYACEFLIQVFGIQINKEVELAAQTKEKHILRNQTMLCDMLLRESPVGIVTKSPNVIDLVKCDGAALYYKNKFWLLGVTPTEAQIRDISEWLIEYHNGSTGLSTDSLMEAGYPGASVLGDAVCGMAAIKITSKEFLFWFRSQTAKEIKWGGAKHEPFNKDDARKMHPRSSFKAFLEAVKQRCLPWEDVEMDAIQ

SEQ ID NO: 12197 - protein, 466 aa, Hedyosmum sp. SM-2000
SGKPFYAIIHRVTASFIIDFEPVKPYEVPMTAAGALQSCKLAAKAISRLQSLPGGSMERLCETVVQEVFELTGYDRVMAYKFHEDDHGEVFSEITKPGLEPYLGLHYPATDIPQAARFLFMKNKVRMICDCHAKPVKVFQDEKLTFDLTLCGSTLRAPHSCHLQYMANMSSIASLVMAVVVNEGEDEGENVDSGQQQQQKRKRLWGLVVCHNTTPRFVPFPLRYACEFLIQVFAIHVNKEIELESQIREKNIFRTQTLLCDTLMRDAPLGIISQNPNILDLVKCDGAALLYKSKVWRLGLTPNEPQIHDISLWLSEYHMDSTGFSTDSLHEAGYQGAVALGNIVCGMAAVWITSKDMLFWFRSHTAAEVRWGGAKHDPDDTDDNRRMHPRSSFKAFLEVVKKRSIPWKDYEMDAIHSLQIILRGNFSDSEKTHANTTFDSRLNDLKLEGMEELQAVTNEMVRLIET

SEQ ID NO: 12198 - protein, 397 aa, Hedyosmum sp. SM-2000
DLEPVNPAEVPVIAAGALKSYKLAAKAISKLRSLPSGNISLLCDVLVREVSELTGYDRVMAYKFHEDEHGEVIAECRRSDLEPYLGLHYPATDIPQASRFLFMKNKVRMICDCSAPPVKVIQDKRLGQPLSLCGSTLRAPHGCHAQYMTNMGSIASLVMSITINEDDEETDNEQQLQQEKPKKLWGLVVCHHTSPRFIPFPLRYACEFLIQVFGIQLNKEVELAAQVREKHTLKTQTVLCDMLLRDAPMGILTQSPNVMDLVKCDGAALNYKNQFWLLGTTPTEAQIKDLAEWLLECHDGTTGLSTDSLTEAGYPGSYVLGDAVRGMAAVKITSKDFLFWFRSHSAKEIKWGGAKHDPIDKDDDGRKMHPRSSFKAFLEVVRQRSVPWEDIEMDAIQ

SEQ ID NO: 12199 - protein, 373 aa, Paspalum simplex
ALFVAGGLQAHKLAVRAISRLQALPGGDVKLLCDTVVELVRDLTGYDRVMVYRFHEDEHGEVVAESRRENLEPYLGLHYPATDIPQASRFLFRQNRVRMIDDCHATPVRVIQDPGLSQPLCLVGSTLRAPHGCHAQYMATWVQLHRLLWQSSFGGDDEQTRGGISSAMKLWGLVVCHHTSPRFIPFSLRYACEFLMQAFGLQLNMELQLARQLSEKHILRTQTLLCDMLLRDSPTGIVTQSPSIMDLVKCDGAALYYHGKYYPWGVTPTESQIKDIIEWLTVCHGDSTGLSTDSLADAGYLGAAALGDAVCGMAVAYITPSDYLFWFRSHTAKEIKWGGAKHHPEDKDDGQRMHPRSSFKAFLEVVKSRSLPW

SEQ ID NO: 12200 - protein, 392 aa, Acmanthera latifolia
DLEPVNPADVPVTAAGALKSYKLAARAISRLQSLPSGNISLLCDVLVKEVRDLTGYDRVMVYKFHEDEHGEVVSECRRPDLEAYLGLHYPATDIPQASRFLFMKNKVRMICDCLAPPVKVFQDKRLAQPLGLCGSTLRSPHGCHAQYMANMGAIASLVMSVTINEGDDMIDGDQQQMARKLWGLVVCHHTSPRFVPFPLRYACEFLIQVFGVQINKEVELAAQVREKHILRTQTLLCDMLLRDAPVAIVTQSPNVMDLVKCDGAALYYRKKFWLLGVTPTEVQIKEIAEWLIEYHSGNTGLSTDSLMEAGYPGASVLGDAVCGMAAVKITSKDFLFWFRSHTAKEIKWGGAKHDPDDKDDGRKMHPRSSFKAFLEVVKWRSLPWEDMEMDAI

SEQ ID NO: 12201 - protein, 392 aa, Acridocarpus natalitius
DLEPVNPADVPVTAAGALKSYKLAAKAISRLQSLPSGNISLLCDVLVKEVRDLTGYDRVMVYKFHEDEHGEVVSECRRSDLEAYLGLHYPATDIPQASRFLFMKNKVRMICDCLAPPIKVIQDERLPQPLSLGGSTLRSPHGCHAQYMANMGTIASLVMSVTINEDDDMMDGDQQQMARKLWGLVVCHHTSPRFVPFPLRYACEFLIQVFGVQINKEVELAAQVREKHILQIQTLLCDMLLRDAPVAIITQSPNVMDLVKCDGAALYYKKKFWLLGITPTEAQIRDIVEWLLEFHSGNTGLSTDSLMEAGYPGASVLGDAVCGMAAVSITSKDFLFWFRSHTAKEIKWGGAKHDPDVKDDGRKMHPRSSFKAFLEVVKWRSLPWEDVEMDAI

SEQ ID NO: 12202 - protein, 392 aa, Aspicarpa brevipes
DLEPVNPADVHVTAAGALKSYKLAAKAISRLQSLPSGNVSLLCDVLVKEVRDLTGYDRVMMYKFHEDEHGEVVSECRRSDLESYLGLHYPATDIPQASKFLFIKNKVRMICDCLAPSVKVIQDERLTQPLSLCGSTLRSPHGCHAQYMTNMGAIASLVMAVTVNEDEDTMDGDQQHMTRKLWGLVVCHHTSPRFVPFPLRYACEFLIQVFGVQVTKEVELAAQVREKHSLQIQTMLCDMLLRDALVAIITQSPNVMDLVKCDGAALYFKNKTWFLGVTPTEEQIRGIAEWLLKYHSGNTGLSTDSLMEAGYPGASGLGDAVCGMAAVSITSRDFLFWFRSHTAKEIKWGGAKHDPDDKDDLRKMHPRSSFKAFLEVVKWRSTPWEDIEMDAI

SEQ ID NO: 12203 - protein, 392 aa, Aspidopterys elliptica
DLEPVNPADVPVTAAGALKSYKLAAKAISRLQSLPSGNISLLCDVLVKEVRDLTGYDRVMVYKFHEDEHGEVVSECLRSDLESYLGLHYPATDIPQASRFLFMKNKVRMICDCVAPPVKVIQDERLPQPLSLCGSTLRSPHGCHAQYMTNMGIIASLVMSVTVNEDDDMVDGDQPQMARKLWGLVVCHHTSTRFVPFPLRYACEFLIQVFGVQINKEVELAAQVREKHILQIQTMLCDMLLRDAPVAIITQSPNVMDLVKCDGAALYFKNKTWLLGVTPTEEQIRDIAEWLLEYHSGNTGLSTDSLMEAGYPGASALGDAVCGMAAVSITSRDFLLWFRSHTAKEIKWGGAKHDPDDKDDGRKMHPRSSFKAFLEVVKWRSMPWEDIEMDAI

SEQ ID NO: 12204 - protein, 392 aa, Blepharandra heteropetala
DLEPVNPADVPVTAAGALKSYKLAARAISRLQSLPSGNISLLCDVLVKEVRDLTGYDRVMVYKFHEDEHGEVISECRRPDLEAYLGLHYPATDIPQASRFLFMKNKVRMICDCLAPAVKVIQDERLPQALSLCGSTLRSPHGCHAQYMANMGTIASLVMSVIINEDNDMMDGDQQHIARKLWGLVVCHHTSPRFVPFPLRYACEFLIQVFGVQINKEVELAAQVREKHILRTQTLLCDMLLRDAPVAIITQSPNVMDLVKCDGAALYYRKKFWLLGVTPTEVQIRDIAEWLLEYHGGNAGLSTDSLMEAGYPGASDLGNAVCGMAAVRITSRDFLFWFRSHTAKEIKWGGAKHHPNDKDDVRKMHPRSSFKAFLEVVKWRSLPWEDIEMDAI

SEQ ID NO: 12205 - protein, 392 aa, Blepharandra heteropetala
DLEPVNPADVPVTAAGALKSYKLAARAISRLQSLPSGNISLLCDVLVKEVRDLTGYDRVMVYKFHEDEHGEVISECCRPDLEAYLGLHYPATDIPQASRFLFMKNKVRMICDCLAPAVKVIQDERLPQALSLCGSTLRSPHGCHAQYMANMGTIASLVMSVIINEDNDMMDGDQQHIARKLWGLVVCHHTSPRFVPFPLRYACEFLIQVFGVQINKEVELAAQVREKHILRTQTLLCDMLLRDAPVAIITQSPNVMDLVKCDGAALYYRKKFWLLGVTPTEVQIRDTAEWLLEYHGGNAGLSTDSLMEAGYPGASDLGNAVCGMAAVRITSRDFLFWFRSHTAKEIKWGGAKHHPNDKDDVRKMHPRSSFKAFLEVVKWRSLPWEDIEMDAI

SEQ ID NO: 12206 - protein, 392 aa, Blepharandra heteropetala
DLEPVNPADVPVTAAGALKSYKLAARAISRLQSLPSGNISLLCDVLVKEVRDLTGYDRVMVYKFHEDEHGEVISECCRPDLEAYLGLHYPATDIPQASRFLFMKNKVRMICDCLAPAVKVIQDERLPQALSLCGSTLRSPHGCHAQYMANMGTIASLVMSVIINEDNDMMDGDQQHIARKLWGLVVCHHTSPRFVPFPLRYACEFLIQVFGVQINKEVELAAQVREKHILRTQTLLCDMLLRDAPVAIITQSPNVMDLVKCDGAALYYRKKFWLLGVTPTEVQIRDIAEWLLEYHGGNAGLSTDSLMEAGYPGASDLGNAVCGMAAVRITSRDFLFWFRSHTAKEIKWGGAKHHPNDKDDVRKMHPRSSFKAFLEEVKWRSLPWEDIEMDAI

SEQ ID NO: 12207 - protein, 392 aa, Blepharandra heteropetala
DLEPVNPADVPVTAAGALKSYKLAARAISRLQSLPSGNISLLCDVLVKEVRDLTGYDRVMVYKFHEDEHGEVISECCRPDLEAYLGLHYPATDIPQASRFLFMKNKVRMICDCLAPAVKVIQDERLPQALSLCGPTLRSPHGCHAQYMANMGTIASLVMSVIINEDNDMMDGDQQHIARKLWGLVVCHHTSPRFVPFPLRYACEFLIQVFGVQINKEVELAAQVREKHILRTQTLLCDMLLSDAPVAIITQSPNVMDLVKCDGAALYYRKKFWLLGVTPTEVQIRDIAEWLLEYHGGNAGLSTDSLMEAGYPGASDLGNAVCGMAAVRITSRDFLFWFRSHTAKEIKWGGAKHHPNDKDDVRKMHPRSSFKAFLEVVKWRSLPWKDVEMDAI

SEQ ID NO: 12208 - protein, 392 aa, Burdachia sphaerocarpa
DLEPVNPADVPVTAAGALKSYKLAAKAISRLQSLPSGNISLLCDVLVKEVRDLTGYDRVMVYKFHDDEHGEVVSECRRSDMESYLGLHYPATDIPQASRFLFMKNKVRMICDCLAPPVKVIQDERLPQPLSLCGSTLRSPHGCHAQYMVNMGAIASLIMSVTINEDDDTIDGDEQQMARKLWGLVVCHHTSPRFVPFPLRYACEFLIQVFGVQITKEVELAAQVREKHILRIQTLLCDMLLRDAPVAIITQSPNVMDLVKCDGAALYYKKKFWLLGVTPTEAQIRDIAEWPVEYHSGNTGLSTDSLMEAGYSGASSLGDAVCGMAAVSITSRDFLFWFRSHTAKEIKWGGAKHDPADKDDGRKLHPRSSFKAFLEVVKWRSLPWEDMEMDAI

SEQ ID NO: 12209 - protein, 392 aa, Callaeum septentrionale
DLEPVNPADVPVTAAGALKSYKLAAKAISRLQSLPSGNISLLCDVLVKEVRDLTGYDRVMVYKFHEDEHGEVVSECRRSDLESYLGLHYPATDIPQASRFLFMKNKVRMICDCLAPPVKVIQDERLPQPLSLCGSTLRSPHGCHAQYMTNMGTIASLVMSVTINEDDDMMDGDQQQMTRKLWGLVVCHHTSPRFVPFPLRYACEFLIQVFGVQINKEVELAAQVREKHILQIQTMLCDMLLRDAPVAIITQSPNVMDLVKCDGTALYFKNKTWLLGVTPTEEQIRDIAEWLLEYHSGNTGLSTDSLMEAGYPGASVLGDAVCGMAAVSITSRDFLFWFRSHTAKEIKWGGAKHDPDEKDDGRKMHPRSSFKAFLEVVKWRSMPWEDIEMDAI

SEQ ID NO: 12210 - protein, 392 aa, Caucanthus auriculatus
DLEPVNPADVPVTAAGALKSYKLAAKAISRLQSLPSGNISLLCDVLVKEVRDLTGYDRVMVYKFHEDEHGEVVSECHRSDLESYLGLHYPATDIPQASRFLFMKNKVRMICDCVAPPVKVIQEERLPQPLSLCGSTLRSPHGCHAQYMTNMGIIASLVMSVTVNEEDDMVDGDQPQMARKLWGLVVCHHTSTRFVPFPLRYACEFLIQVFGVQINKEVELAAQVREKHILQIQTMLCDMLLRDAPVAIITQSPNVMDLVKCDGAALYFKNKTWLLGVTPTEEQIRDIAEWLLEYHSGNTGLSTDSLMEAGYPGASALGDAVCGMAAVSITSRDFLLWFRSHTAKEIKWGGAKHDPDDKDDGRKMHPRSSFKAFLEVVKWRSMPWEDVEMDAI

SEQ ID NO: 12211 - protein, 392 aa, Caucanthus auriculatus
DLEPVNPADVPVTAAGALKSYKLAAKAISRLQSLPSGNISLLCDVLVKEVRDLTGYDRVMVYKFHEDEHGEVVSECHRSDLESYLGLHYPATDIPQASRFLFMKNKVRMICDCVAPPVKVIQEERLPQPLSLCGSTLRSPHGCHAQYMTNMRIIASLVMSVTVNEEDDMVDGDQPQMARKLWGLVVCHHTSTRFVPFPLRYACEFLIQVFGVQINKEVELAAQVREKHILQIQTMLCDMLLRDAPVAIITQSPNVMDLVKCDGAALYFKNKTWLLGVTPTEEQIRDIAEWLLEYHSGNTGLSTDSLMEAGYPGASALGDAVCGMAAVSITSRDFLLWFRSHTAKEIKWGGAKHDPDDKDDGRKMHPRSSFKAFLEVVKWRSMPWEDIEMDAI

SEQ ID NO: 12212 - protein, 392 aa, Caucanthus auriculatus
DLEPVNPADVPVTAAGALKSYKLAAKAISRLQSLPSGNISLLCDVLVKEVRDLTGYDRVMVYKFHEDEHGEVVSECHRSDLESYLGLHYPATDIPQASRFLFMKNKVRMICDCVAPPVKVIQEERLPQPLSLCGSTLRSPHGCHAQYMTNMGIIASLVMSVTVNEEDDMVDGDQPQMARKLWGLVVCHHTSTRFVPFPLRYACEFLIQVFGVQINKEVELAAQVREKHILQIQTMLCDMLLRDAPVAIITQSPNVMDLVKCDGAALYFKNKTWLLGVTPTEEQIRDITEWLLEYHSGNTGLSTDSLMEAGYPGASALGDAVCGMAAVSITSRDFLLWFRSHTAKEIKWGGAKHDPDDKDDGRKMHPRSSFKAFLEVVKWRSMPWEDMEMDAI

SEQ ID NO: 12213 - protein, 392 aa, Caucanthus auriculatus
DLEPVNPADVPVTAAGALKSYKLAAKAISRLQSLPSGNISLLCDVLVKEVRDLTGYDRVMVYKFHEDEHGEVVSECHRSDLESYLGLHYPATDIPQASRFLFMKNKVRMICDCVAPPVKVIQEERLPQPLSPCGSTLRSPHGCHAQYMTNMGIIASLVMSVTVNEEDDMVDGDQPQMARKLWGLVVCHHTSTRFVPFPLRYACEFLIQVFGVQINKEVELAAQVREKHILQIQTMLCDMLLRDAPVAIITQSPNVMDLVKCDGAALYFKNKTWLLGVTPTEEQIRDIAEWLPEYHSGNTGLSTDSLMEAGYPGASALGDAVCGMAAVSITSRDFLLWFRSHTAKEIKWGGAKHDPDDKDDGRKMHPRSSFKAFLEVVKWRSMPWEDVEMDAI

SEQ ID NO: 12214 - protein, 392 aa, Coleostachys genipifolia
DLEPVNPADVPVTAAGALKSYKLAARAISRLQSLPSGNISLLCDVLVKEVRDLTGYDRVMVYKFHEDEHGEVVSECRRPDLEAYLGLHYPATDIPQASRFLFMKNKVRMICDCLAPPVKVIQDKRLVQPLSLCGSTLRSPHGCHAQYMANMGAIASLVMSVTINEGDDTMDGDQQQMARKLWGLVVCHHTSPRFVPFPLRYACEFLIQVFGVQINKEVELAAQVREKHILRTQTLLCDMLLRDAPVAIITQSPNVMDLVKCDGAALYYRKKFWLLGVTPTEAQIKEIAQWLIEYHSGDTGLSTDSLMEAGYPSASVLGDAVCGMAAVKITSRDFLFWFRSHTAKEIKWGGAKHDPDDKDDGRKMHPRSSFKAFLEVVKWRSLPWEDVEMDAI

SEQ ID NO: 12215 - protein, 392 aa, Diacidia ferruginea
DLEPVNPADVPVTAAGALKSYKLAARAISRLQSLPSGNISLLCDVLVKEVRDLTDYDRVMVYKFHEDEHGEVISECCRPDMEAYLGLHYPATDIPQASRFLFMKNKVRMICDCLATPVKVIQDERLPQPLSLCGSTLRSPHGCHAQYMANMGAIASLVMSVTINEDDDMMDGDRQHRARKLWGLVVCHHTSPRFLPFPLRYACEFLIQVFGVQINKEVELAAQVREKHILRTQTLLCDMLLRDAPVAIITQSPNVMDLVKCNGAALYYKKKFWLVGLTPTEAQIRDIAEWLLEYHNGNTGLSTDSLMEAGYPGASELGDTVCGMAVVKITSRDFLFWFRSHTAKEIKWGGAKHDPDDKDDGRKMHPRSSFKAFLEVVKWRSLPWEDIEMDAI

SEQ ID NO: 12216 - protein, 380 aa, Diacidia ferruginea
ETPAGALKSYKLAARAISRLQSLPSGIISLLCDVLVKEVRDLTDYDRVMVYKFHEDEHGEVISECCRPDMEAYLGLHYPATDIPQASRFLFMKNKVRMICDCLATPVKVIQDERLPQPLSLCGSTLRSPHGCHAQYMANMGAIASLVMSVTINEDDDVMDGDRQHRARKLWGLVVCHHTSPRFLPFPLRYACEFLIQVFGVQINKEVELAAQVREKHILRTQTLLCDMLLRDAPVAIITQSPNVMDLVKCNGAALYYKKKFWLVGLTPTEAQIRDIAEWLLEYHNGNTGLSTDSLMEAGYPGASELGDTVCGMAVVKITSRDFLFWFRSHTAKEIKWGGAKHDPDDKDDGRKMHPRSSFKAFLEVVKWRSLPWEDVEMDA

SEQ ID NO: 12217 - protein, 392 aa, Dinemandra ericoides
DLEPVNPADVPVTAAGALKSYKLAAKAISRLQSLPSGNIPLLCDVLVKEVRDLTGYDRVMVYKFHEDEHGEVVSECRRSDMESYLGLHYPATDIPQASRFLFMKNKVRMICDCLSPPVEVIQDERLPQPLSLCGSTLRSPHGCHAQYMANMGTIASLVMSVTVNEDDDMMDGDQQRMARKLWGLVVCHHTSPRFVPFPLRYACEFLIQVFGVQINKEVDLAAQVREKHILRIQTMLCDMLLRDAPVAIITQSPNVMDLVKCDGAALYYKNKFWLLGVTPTEAQIRDIAEWLLEYHRGNTGLSTDSLMEAGYPGASVLGDAVCGMAAVSITSRDFLFWFRSHTAKEIKWGGAKHDPGDKDDGRKMHPRSSFKAFLEVVKWRSLPWKDVEMDAI

SEQ ID NO: 12218 - protein, 392 aa, Dinemandra ericoides
DLEPVNPADVPVTAAGALKSYKLAAKAISRLQSLPSGNIPLLCDVLVKEVRDLTGYDRVMVYKFHEDEHGEVVSECRRSDMESYLGLHYPATDIPQASRFLFMKNKVRMICDCLSPPVEVIQDERLPQPLSLCGSTLRSPHGCHAQYMANMGTIASLVMSVTVNEDDDMMDGDQQRMARKLWGLVVCHHTSPRFVPFPLRYACEFLIQVFGVQINKEVDLAAQVREKHILRIQTMLCDMLLRDAPVAIITQSPNVMDLVKCDGAALYYKNKFWLLGVTPTEAQIRDIAEWLLEYHRGNTGLSTDSLMEAGYPGASVLGDAVCGMAAVSITSRDFLFWFRSHTAKEIKWGGAKHDPGDKDDGRKMHPRSSFKAFLEVVKWRSLPWKDMEMDAI

SEQ ID NO: 12219 - protein, 392 aa, Dinemandra ericoides
DLEPVNPADVPVTAAGALKSYKLAAKAISRLQSLPSGNIPLLCDVLVKEVRDLTGYDRVMVYKFHEDEHGEVVSECRRSDMESYLGLHYPATDIPQASRFLFMKNKVRMICDCLSPPVEVIQDERLPQPLSLCGSTLRSPHGCHAQYMANMGTIASLVMSVTVNEDDDMMDGDQQRMARKLWGLVVCHHTSPRFVPFPLRYACEFLIQVFGVQINKEVDLAAQVREKHILRIQTMLCDMLLRDAPVAIITQSPNVMDLVKCDGAALYYKNKFWLLGVTPTEAQIRDIAEWLLEYHRGNTGLSTDSLMEAGYPGASVLGDAVCRMAAVSITSRDFLFWFRSHTAKEIKWGGAKHDPGDKDDGRKMHPRSSFKAFLEVVKWRSLPWEDMEMDAI

SEQ ID NO: 12220 - protein, 392 aa, Dinemandra ericoides
DLEPVNPADVPVTAAGALKSYKLAAKAISRLQSLPSGNIPLLCDVLVKEVRDLTGYDRVMVYKFHEDEHGEVVSECRRSDMESYLGLHYPATDIPQASRFLFMKNKVRMICDCLSPPVEVIQDERLPQPLSLCGSTLRSPHGCHAQYMANMGTIASLVMSVTVNEDDDMMDGDQQRMARKLWGLVVCHHTSPRFVPFPLRNACEFLIQVFGVQINKEVDLAAQVREKHILRIQTMLCDMLLRDAPVAIITQSPNVMDLVKCDGAALYYKNKFWLLGVTPTEAQIRDIAEWLPEYHRGNTGLSTDSLMEAGYPGASVLGDAVCGMAAVSITSRDFLFWFRSHTAKEIKWGGAKHDPGDKDDGRKMHPRSSFKAFLEVVKWRSLPWEDIEMDAI

SEQ ID NO: 12221 - protein, 392 aa, Dinemandra ericoides
DLEPVNPADVPVTAAGALKSYKLAAKAISRLQSLPSGNIPLPCDVLVKEVRDLTGYDRVMVYKFHEDEHGEVVSECRRSDMESYLGLHYPATDIPQASRFLFMKNKVRMICDCLSPPVEVIQDERLPQPLSLCGSTLRSPHGLHAQYMANMGTIASLVMSVTVNEDDDMMDGDQQRMARKLWGLVVCHHTSPRFVPFPLRYACEFLIQVFGVQIHKEVDLAAQVREKHILRIQTMLCDMLLRDAPVAIITQSPNVMDLVKCDGAALYYKNKFWLLGVTPTEAQIRDIAEWLLEYHRGNTGLSTDSLMEAGYPGASVLGDAVCGMAAVSITSRDFLFWFRSHTAKEIKWGGAKHDPGDKDDGRKMHPRSSFKAFLEVVKWRSLPWEDVEMDAI

SEQ ID NO: 12222 - protein, 390 aa, Echinopterys eglandulosa
DLEPVNPADVPVTAAGSLKSYKLAAKAISRLQSLPSGNISLLCDVLVKEVRELTGYDRVMVYKFLEDEHGDVVSECRRSDLESYLGLHYPATDIPQASRFLFMKNKVRMICDCLAPPVKVIQDERLPQPLSLCGSALRSPHGCHAQYMMGTIASLVMSVTINEDDDTMDGDQQQMARKLWGLVVCHHTSPRFVPFPLRYACEFLIQVFGVQINKEVGLAGQVREKHILRIQTMLCDMLLRDAPVAIITQSPNVMDLVMCDGAALYYKNKFWLLGVTPTEAQIRDIAEWLLKYHSQNTGLSTDSLMEAGYPGASVLGDAVCGMAAVSLTSKDFLFWFRSHTAEGIKWGGATHDPDDKDDGRKMHPRLSFKAFLEVVKWRSLPWEDVEMDAI

SEQ ID NO: 12223 - protein, 392 aa, Ectopopterys soejartoi
DLEPVNPADVPVTAAGALKSYKLAAKAISRLQSLPSGNISLLCDVLVKEVRDLTGYDRVMVYKFHEDEHGEVVSECRRSDLESYLGLHYPATDIPQASRFLFMKNKVRMICDCMAPPVEVIQDERLPQPLSLCGSTLRSPHGCHAQYMTNMGTTASLVMSVTINEDDHMMDGDQQQMTKKLWGLVVCHHTNPRFVPFPLRDACEFLIQVFGVQINKEVELAAQVREKHILQIQTMLCDMLLRDAPVAIITQSPNVMDLVKCDGAALYFKNKTWLLGVTPTEEQIRDIAEWLLEYHSGNTGLSTDSLMEAGYPGASALGDAVCGMAAVSITSRDFLFWFRSHTAKEIKWGGAKHDPDDKDDGRKMHPRSSFKAFLEVVKWRSMPWEDVEMDAI

SEQ ID NO: 12224 - protein, 392 aa, Gallardoa fischeri
DLEPVNPADVPVTAAGALKSYKLAAKAISRLQSLPSGNISLLCDVLVKEVRDLTGYDRVMVYKFHEDEHGEVVSECRRSDLESYLGLHYPATDIPQASRFLFMKNKVRMICDCLAPPVKVIQDEQLPQPLSLCGSTLRSPHGCHAQYMTNMGTIASLGMSVTVNEDDDMMDGDQHQMTRKLWGLVVCHHTSPRFVPFPLRYACEFLIQVCGVQINKEVELAAQVRKKHILQIQTMLCDMLLRDAPVAIITQSPNVMDLVKCDGAALYFKNKIWLLGVTPTEEQIRDIAEWLLKYHSGNTGLSTDSLMEAGYPGASALGDAVCGMAAVSITSRDLLFWFRSHTAKEIKWGGAKHDPDDKDDLRKMHPRSSFKAFLEVVKWRSKPWKDVEMDAI

SEQ ID NO: 12225 - protein, 392 aa, Gaudichaudia albida
DLEPVNPADVPVTAAGALKSYKLAAKAISRLQSLPSGNISLLCDVLVKEVRDLTGYDRVMVYKFHEDEHGEVVSECRRSDLESYLGLHYPATDIPQASRFLFMKNKVRMIYDCLAPPVKVIQDKRLPQPLSLCGSTLRSPHGCHAQYMTNMGTIASLVMSVTVNEDDDTMDGDQQHMTKKLWGLVVCHHTSPRFVPFPLRYACEFLIQVFGVQINKEVELAAQVREKHILQIQTMLCDMLLRDAPVTIITQSPNVMDLVNCDGAALYFKNKTWLLGVTPTEEQIRGIAEWLLKYHSGNTGLSTDSLMEAGYPGASGLGDAVCGMAAVSITSRDFLFWFRSHTAKEIKWGGAKHDPDDKDDLRKMHPRSSFKAFLEVVKWRSMPWEDIEMDAI

SEQ ID NO: 12226 - protein, 392 aa, Gaudichaudia mcvaughii
DLEPVNPADVPVTAAGALKSYKLAAKAISRLQSLPSGNISLLCDVLVKEVRDLTGYDRVMMYKFHEDEHGEVVSECCRSDLESYLGLNYPATDIPQASRFLFMKNKVRITCDCLAPSVEVIQDERLTQPLSLCGSTLRSPHGCHAQYMTNMGAIASLVMSVTVNEDDDTMDGDQQHMTRKLWGLVVCHHTSPRFVPFPLRYACEFLIQVFGVQVNKEVELAAQVRERHSLQIQTMLCDMLLREAPVAIITQSPNVMDLVKCDGAALYFKNKTWFLGVTPTEEQIRGIAEWPLKYHSGNTGLSTDGLMEAGYPGASGLGDAVCGMAAVSITSRDFLFWFRSHTAKEIKWGGAKHDPDDKDDLRKMHPRSSFKAFLEVVKWRSTPWEDIEMDAI

SEQ ID NO: 12227 - protein, 392 aa, Glandonia macrocarpa
DLEPVNPADVPVTAAGALKSYKLAAKAISRLQSLPSGNISLLCDVLVKEVRDLTGYDRVMVYKFHEDEHGEVVSECHRSDLESYLGLHYPATDIPQASRFLFMKNKVRMICDCLAPPVKVIQDERLPQPLSLCGSTLRSPHGCHAQYMANMGAIASLVMSVTINEDDDMIDGDEQQMARKLWGLVVCHHTSPRFVPFPLRYACEFLIQVFGVQITKEVELAAQVREKHIFRIQTLLCDMLLRDAPVAIITQSPNVLDLVKCDGAALYYKKKFWLLGITPTEAQIRDIAEWLLEYHSGNTGLSTDSLMEAGYPGASSLGDAVCGMAAVSITSRDFLFWFRSHTAKEIRWGGAKHDPDDKDDGRKMHPRSSFKAFLEVVKWRSLPWEDVEMDAI

SEQ ID NO: 12228 - protein, 392 aa, Heladena multiflora
DLEPVNPFDVPVTAAGALKSYKLAAKAISRLQSLPSGNISLLCDVLVKEVRDLTGYDRVMVYKFHEDEHGEVVSECRRSDLESYLGLHYPATDIPQASRFLFMKNKVRMICDCLAPPVKVIQDERLPQPLSLCGSTLRSPHGCHAQYMANMGTIASLVMSVTINEDDDTMDGDQQQMARKLWGLVVCHHTSTQFVPFPLRYACEFLIQVFGVQINKEVELAAQAREKHILQIQTTLCDMLLRDAPVAIITQSPNVMDLVKCDGAALYYKNKFRLLGVTPTEAQIRDIAEWLLEYHSGNTGLSTDSLMEAGYPGASVLGDAVCGMAAVSITSRDFLFWFRSHTAKEIKWGGAKHDPDDKDDGRKMHPRSSFKAFLEVVKWRSLPWEDMEMDAI

SEQ ID NO: 12229 - protein, 392 aa, Heteropterys thyrsoidea
DLEPVNPADVPVTAAGALKSYKLASKAISRLQSLPSGNISLLCDVLVKEVRDLTGYDRVMVYKFHEDEHGEVVSECRRSDLESYLGLHYPATDIPQASRFLFMKNKVRMICDCLAPPVKVIQDERLPQPLSLCGSTLRSPHGCHAQYMTNMGTIASLVMSVTINEDDDMMDGDQQQMTRKLWGLVVCHHTSPRFVPFPLRYACEFLIQVFGVQINKEVELAAQVREKHILQIQTMLCDMLLRDAPVAIITQSPNVMDLVECDGAALYFKNKTWLLGVTPTEEQIRDIAEWLLEYHSGNTGLSTDSLMEAGYPGASVLGDAVCGMAAVSITSRDFLFWFRSHTAKEIKWGGAKHDPDDKDDLRKMHPRSSFKAFLEVVKWRSMPWEDVEMDAI

SEQ ID NO: 12230 - protein, 392 aa, Hiptage benghalensis
DLEPVNPADVPVTAAGALKSYKLASKAISRLQSLPSGNISLLCDVLVKEVRDLTGYDRVMVYKFHEDEHGEVVSECRRSDLGSYLGLHYPATDIPQASRFLFMKNKVRMICDCLAPPVKVIQDERLPQPLSLCGSTLRSPHGCHAQYMTDMGTIASLVMSVTINEDDDMMDGDQQQMARKLWGLVVCHHTSPRFVPFPLRYACEFLIQVFGVQINKEVELAAQVREKHILQIQTMLCDMLLRDAPVAIITQSPNVMDLVKRDGAALYFKNKTWLLGVTPTEEQIRDIAEWLLEYHSGNTGLSTDSLMEAGYPGASVLGDAVCGMAAVSITSRDFLFWFRSHTAKEIKWGGAKHDPDDKDDGRKMHPRSSFKAFLEVVKWRSMPWEDVEMDAI

SEQ ID NO: 12231 - protein, 392 aa, Janusia anisandra
DLEPVNPADVPVTAAGALKSYKLAAKAISRLQSLPSGNISLLCDVLVKEVRDLTGYDRVMVYKFHEDEHGEVVSECRRSDLESYLGLHYPATDIPQASRFLFMKNKVRMICDCLAPPVKVIQDERLPQPLSLCGSTLRSPHGCHAQYMTNMGTIASLVMSVTVNEDDDTMDGDQQQMARKLWGLVVCHHSSPQFVPFPLRYACEFLIQVFGVQINKEVELAAQVREKHILQIQTMLCDMLLRDAPVAIITQSPNVMDLVKCDGAALYFKNKTWFLGVTPTEEQIRGIAEWLLKYHSGNTGLSTDSLMEAGYPGASGLGDAVCGMAAVSITSRDFLFWFRSHTAKEIKWGGAKHDPDDKDDLRKMHPRSSFKAFLEVVKWRSVPWEDVEMDAI

SEQ ID NO: 12232 - protein, 392 aa, Janusia californica
DLEPVNPADVPVTAAGALKSYKLASKAISRLQSLPSGNISLLCDVLVKEVRDLTGYDRVMVYKFHEDEHGEVVSECRRSDLESYLGLHYPATDIPQASRFLFMKNKVRMICDCLAPPVKVIQDERLPQPLSLCGSTLRSPHGCHAQYMTNMGTIASLVMSVTVNEDDDTMDGDQQQMTRKLWGLVVCHHTSPQFVPFPLRYACEFLIQVFGVQINKEVELAAQVREKHILQIQTMLCDMLLRDAPVAIITQSPNVMDLVKCDGAALYFKNKTWLLGVTPTEEQIRGIAEWLLKYHSGNTGLSTDSLMEAGYPGASGLGDAVCGMAAVSITSRDFLFWFRSHTAKEIKWGGAKHDPDDKDDLRKMHPRSSFKAFLEVVKWRSMPWEDVEMDAI

SEQ ID NO: 12233 - protein, 392 aa, Janusia californica
DLEPVNPADVPVTAAGALKSYKLASKAISRLQSLPSGNISLLCDVLVKEVRDLTGYDRVMVYKFHEDEHGEVVSECRRSDLESYLGLHYPATDIPQASRFLFMKNKVRMICDCLAPPVKVIQDERLPQPLSLCGSTLRSPHGCHAQYMTNMGTIASLVMSVTVNEDDDTMDGDQQQMTRKLWGLVVCHHTSPQSVPFPLRYACEFLIQVFGVQINKEVELAAQVREKHILQIQTMLCDMLLRDAPVAIITQSPNVMDLVKCDGAALYFKNKTWLLGVTPTEEQIRGIAEWLLKYHSGNTGLSTDSLMEAGYPGASGLGDAVCGMAAVSITSRDFLFWFRSHTAKEIKWGGAKHDPDDKDDLRKMHPRSSFKAFLEVVKWRSMPWEDIEMDAI

SEQ ID NO: 12234 - protein, 392 aa, Janusia californica
DLEPVNPADVPVTAAGALKSYKLASKAISRLQSLPSGNISLLCDVLVKEVRDLTGYDRVMVYKFHEDEHGEVVSECRRSDLESYLGLHYPATDIPQASRFLFMKNKVRMICDCLAPPVKVIQDERLPQPLSLCGSTLRSPHGCHAQYMTNMGTIASLVMSVTVNEGDDTMDGDQQRMTRKLWGLVVCHHTSPQFVPFPLRYACEFLIQVFGVQINKEVELAAQVREKHILQIQTMLCDMLLRDAPVAIITQSPNVMDLVKCDGAALYFKNKTWLLGVTPTEEQIRGIAEWLLKYHSGNTGLSTDSLMEAGYPGASGLGDAVCGMAAVSITSRDFLFWFRSHTAKEIKWGGAKHDPDDKDDLRKMHPRSSFKAFLEVVKWRSMPWEDVEMDAI

SEQ ID NO: 12235 - protein, 392 aa, Janusia californica
DLEPVNLADVPVTAAGALKSYKLASKAISRLQSLPSGNISLLCDVLVKEVRDLTGYDRVMVYKFHEDEHGEVVFECRRSDLESYLGLHYPATDIPQASRFLFMKNKVRMICDCLAPPVKVIQDERLPQPLSLCGSTLRSPHGCHAQYMTNMGTIASLVMSVTVNEDDDTMDGDQQQMTRKLWGLVVCHHTSPQFVPFPLRYACEFLIQVFGVQINKEVELAAQVREKHILQIQTMLCDMLLRDAPVAIITQSPNVMDLVKCDGAALYFKNKTWLLGVTPTEEQIRGIAEWLLKYHSGNTGLSTDSLMEAGYPGASGLGDAVCGMAAVSITSRDFLFWFRSHTAKEIKWGGAKHDPDDKDDLRKMHPRSSFKAFLEVVKWRKMPWEDIEMDAI

SEQ ID NO: 12236 - protein, 392 aa, Janusia linearis
DLEPVNPADVPVTAAGALKSYKLAAKAISRLQSLPSGNISLLCDVLVKEVRDLTGYDRVMVYKFHEDEHGEVVSECRRSDLESHLGLHYPATDIPQASRFLFMKNKVRMICDCLAPPVKVIQDERLPQPLSLCGSTLRSPHGCHAQYMTNMGTIASLVMSVTVNEDDDTMDGDQQQMTRKLWGLVVCHHTSPQFVPFPLRYACEFLIQVFGVQINKEVELAAQVREKHILQIQTMLCDMLLRDAPVAIITQSPNVMDLVKCDGAALYFKNKTWLLGVTPTEEQIRGIAEWLLKYHSGNTGLSTDSLMEAGYPGASGLGDAVCGMAAVSITSRDFLFWFRSHTAKEIKWGGAKHDPDDKDDLRKMHPRSSFKAFLEVVKWRSMPWEDMEMDAI

SEQ ID NO: 12237 - protein, 392 aa, Janusia mediterranea
DLEPVNPADVPVTAAGALKSYKLAAKAISRLQSLPSGNISLLCDVLVKEVRDLTGYDRVMVYKFHEDEHGEVVSECRRSDLESYLGLHYPATDIPQASRFLFMKNKVRMICDCLAPSVKVIQDERLPQPLSLCGSTLRSPHGCHAQYMTNMGTIASLVMSVTVNEDDDTMDGDQQQMARKLWGLVVCHHTSPQFVPFPLRYACEFLIQVFGVQITKKVELAAQVREKHILQIQTMLCDMLLRDAPVAIITQSPNVMDLVKCDGAALYFKSKTWFLGVTPTEEQIRDIAEWLLKYHSGNTGLSTDSLMEAGYPGASGLGDAVCGMAAVSITSRDFLFWFRSHTAKEIKWGGAKHDPDDKDDLRKMHPRSSFKAFLEVVKWRSMPWEDMEMDAI

SEQ ID NO: 12238 - protein, 392 aa, Lophanthera lactescens
DLEPVNPADVPVTAAGALKSYKLAARAISRLQSLPSGNISLPSDVLVKEVRDLTGYDRVMVYKFHEDEHGEVVSECCRPDLEAYLGLHYPATDIPQASRFLFMKNKVRMICDCLAPPVKVIQDERLPQPLSLCGSTLRSPHGCHAQYMANMGSIASLVMSVTVNEDDDMVDGDQQQMARKLWGLVVCHHTSPRFVPFPLRYACEFLIQVFGVQINKKVELAAQVREKHILRTQTLLCDMLLRDAPVAIVIQSPNVMDLVKCDGAALYYRKKFWLLGVTPTEAQIRDIAEWLLEYHSGNTGLSTDSLMEAGYPGTSVLGNAVCGMAAVKITSRDFLFWFRSHTAKEIKWGGAKHDPGDKDDIRKMHPRSSFKAFLEVVKWRSLPWEDIEMDAI

SEQ ID NO: 12239 - protein, 392 aa, Mascagnia anisopetala
DLEPVNPADVPVTAAGALKSYKLAAKAISRLQSLPSGNISLLCDVLVKEVRDLTGYDRVMVYKFHEDEHGEVVSECRRSDLESYLGLHYPATDIPQASRFLFMKNKVRMICDCLAPPVKVIQDERLPQPLSLCGSTLRSPHGCHAQYMTNMGTIASLVMSVTINEDDDMMDGDQQQMTRKLWGLVVCHHTSPRFVPFPLRYACEFLIQVFGVQINKEVELAAQVREKHILQIQTMLCDMLLRDAPVAIITQSPNVMDLVKCDGAALYFKNKTWLLGVTPTEEQIRDIAEWLLDYHSGNTGLSTDSLMEAGYPGASVLGDAVCGMAAVSISSRDFLFWFRSHTAKEIKWGGAKHDPDVKDDGRKMHPRSSFKAFLEVVKWRSMPWEDIEMDAI

SEQ ID NO: 12240 - protein, 392 aa, Mascagnia bracteosa
DLEPVNPADVPVTAAGALKSYKLAAKAISRLQSLPSGNISLLCDVLVKEVRDLTRYDRVMVYKFHEDEHGEVVSECRRSDLESYHGLHYPATDIPQASRFLFMKNKVRMICDCLAPPVKVIQDKRLPQPLSLCGSTLRSPHGCHAQYMTNMGTIASLVMSVTVNEEDDMMDGDQQQMTRKLWGLVVCHHTSPRFVPFPLRYACEFLIQVFGVQINKEVELAAQVREKHILQIQTMLCDMLLRDAPVAIITQSPNVMDLVKCDGAALYFKNKTWLLGVTPTEEQIRDIAEWLLEYHSGNTGLSTDSLMEAGYPGASVLGDAVCGMAAVSITSRDFLFWFRSHTAKEIKWGGAKHDPDDKDDGRKMHPRSSFKAFLEVVKWRSMPWDDVEMDAI

SEQ ID NO: 12241 - protein, 392 aa, Mascagnia chasei
DLEPVNPADVPVTAAGALKSYKLASKAISRLQSLPSGNISLLCDVLVKEVRDLTGYDRVMVYKFHEDEHGEVVSECRRSDLESYLGLHYPATDIPQASRFLFMKNKVRMICDCLAPPVEVIQDERLAQPLSLCGSTLRSPHGCHAQYMTNMGTIASLVMAVTINEDDDMMDGDQQQMTRKLWGLVVCHHTSPRFVPFPLRYACEFLIQVFGVQINKEVELAAQVREKHILQIQTMLCDMLLRDAPVAIIMQSPNVMDLVKCDGAALYFKNKTWLLGVTPTEEQIRDIAEWLLEYHSGNTGLSTDSLMEAGYPGASALGDAVCGMAAVSITSRDFLFWFRSHTAKEIKWGGAKHDPDVKDDGRKMHPRSSFKAFLEVVKWRKMPWENIEMDAI

SEQ ID NO: 12242 - protein, 392 aa, Mascagnia chasei
DLEPVNPADVPVTAAGALKSYKLASKAISRLQSLPSGNISLLCDVLVKEVRDLTGYDRVMVYKFHEDEHGEVVSECRRSDLESYLGLHYPATDIPQASRFLFMKNKVRMICDCLAPPVEVIQDERLAQPLSLCGSTLRSPHGCHAHYMTNMGTIASLVMAVTINEDDDMMDGDQQQMTRKLWGLVVCHHTSPRFVPFPLRYACEFLIQVFGVQIHKEVELAAQVREKHILQIQTMLCDMLLRDAPVAIIMQSPNVMDLVKCDGAALYFKKKTWLLGVTPTEEQIRDIAEWLLEYHSGNTGLSTDSLMEAGYPGSSALGDAVCGMAAVSITSRDFLFWFRSHTAKEIKWGGAKHDPDVKDDGRKMHPRSSFKAFLEVVKWRSMPWEDIEMDAI

SEQ ID NO: 12243 - protein, 392 aa, Mascagnia dipholiphylla
DLEPVNPADVPVTAAGALKSYKLAAKAISRLQSLPSGNISLLCDVLVKEVRDLTGYDRVMVYKFHEDEHGEVVSECRRSDWESYLGLHYPATDIPQASRFLFMKNKVRMICDCLAPPVKVIQDERLPQPLSLCGSTLRSPHGCHAQYMTNMGTIASLVMSVTINEDDDMMDGDQQQMTRKLWGLVVCHHAGPRFVPFPLRYACEFLIQVFGVQIHKEVELAAQVREKHILQIQTMLCDMLLRDAPVVIITQSPNVMGLVKCDGAALYFKNKIWLLGVTPAEEQIRDIAEWLLKYHSGNTGLSTDSLMEAGYPGASVLGDAVCGMAAVSITSRDFLFRFRSHTAKEIKWGGAKHDPDDKDDGRKMHPRSSFKAFLEVVKWRSTPWEDIEMDAI

SEQ ID NO: 12244 - protein, 392 aa, Mascagnia hippocrateoides
DLEPVNPADVPVTAAGALKSYKLAAKAISRLQSLPSGNISLLCDVLVKEVRDLTGYDRVMVYKFHEDEHGEVVSECRRSDLESYLGLHYPATDIPQASRFLFMKNKVRMICDCLAPPVKVIQDERLPQPLSLCGSTLRSPHGCHAQYMTNMGTIASLVMSVTINEDDDMMDGDQQQMTRKLWGLVVCHHASPRFVPFPLRYACEFLIQVFGVQINKEVELAAQVREKHILQIQTMLCDMLLRDAPVAIITQSPNVMDLVKCDGAALYFKNKIWLLGVTPTEEQIRDIAEWLLEYHSGNTGLSTDSLMEAGYPGASVLGDAVCGMAAVSITSRDFLFWFRSHTAKEVKWGGAKHDPHDKDDGRKMHPRSSFKAFLEVVKWRSMPWEDIEMDAI

SEQ ID NO: 12245 - protein, 392 aa, Mascagnia sepium
DLEPVNPADVPVTAAGALKSYKLAAKAISRLQSLPSGNISLLCDVLVKEVRDLTGYDRVMVYKFHEDEHGEVVSECRGSDLESYLGLHYPATDIPQASRFLFMKNKVRMICDCLAPPVKVIQDERLPQPLSLCGSTLRSPHGCHAQYMTNMGTIASLVMSVTVNEDDDMVDGDQPQMTRKLWGLVVCHHTSPRFVPFPLRYACEFLIQVFGVQINKEVELAAQVGEKHILQIQTMLCDMLLRDAPVAIITQSPNVMDLVKCDGAALYFKNKTWLLGVTPTEEQIRDIAEWLLEYHSGNTGLSTDSLMEAGYPGASALGDAVCGMAAVSITSGDFLFWFRSHTAKEIKWGGAKHDPDDKDDGRKMHPRSSFKAFLEVVKWRSMSWEDIEMDAI

SEQ ID NO: 12246 - protein, 393 aa, Mascagnia stannea
VIEPVNPADVPVTAAGALKSYKLAAKAISRLQSLPSGNISLLCDVLVKEVRDLTGYDRVMVYKFHEDEHGEVVSECRRSDLESYLGLHYPATDIPQASRFLFMKNKVRMICDCLAPPVEVIQDERLPQPLSLCGSTLRSPHGCHAQYMTNMGTIASLVMSVTINEDDDMMDGDQQQQMTRKLWGLVVCHHTSPRFVPFPLRYACEFLIQVFGVQINKEVELAAQVREKHILQIQTMLCDMLLRDAPVAIITQSPNVMDLVKCDGAALYFKNKTWLLGVTPTEEQIRDIAEWLLEYHSGNTGLSTDSLMEAGYPGASVLGDGVCGMAAVSITSRDFLFWFRSHTAKEIKWGGAKHDPGDKDDGRKMHPRSSFKAFLEVVKWRSMPWEDVEMDAI

SEQ ID NO: 12247 - protein, 392 aa, Mcvaughia bahiana
DLEPVNPADVPVTAAGALKPYKLAAKAISRLQSLPSGNISLLCDVLVKEVRDLTGYDRVMVYKFHEDEHGEVVTECRRSDLESYLDLHYPATDIPQASRFLFMKNKVRMICDCLAPPVKVIQDKRLSQPLSLCGSTLRSPHGCHAQYMANMGAVASLVMSVTINEDDDTVDGDQQQMARKLWGLVVCHHTSPRFVPFPLRYACEFLIQVFGVQITKEVELAAQVREKHILRIQTLLCDMLLRDAPVAIITQSPNVMDLVKCDGAALYYRKKFWLLGVTPTEAQIRDIAEWLLEYHSGNTGLSTDSLLEVGYPGASALGEVVCGMAAVSITSRDFLFWFRSHTAKEIKWGGAKHDPDDKDDSRKMHPRSSFKAFLEVVEWRSLPWEDVEMDAI

SEQ ID NO: 12248 - protein, 392 aa, Mionandra camareoides
DLEPVNPADVPVTAAGALKSYKLAAKAISRLQSLPSGNISLLCDVLVKEVRDLTGYDRVMAYKFHEDEHGEVVSECRRSDLESYLGLHYPATDIPQASRFLFMKNKVRMICDCLAPPVKVIQDERLPQPLSLCGSTLRSPHGCHAQYMTNMGTIASLGMSVTVNEDDDTMDGDQQQMTRKLWGLVVCHHTSPRFVPFPLRYACEFLIQVFGVQINKEVELAAQVREKHILQIQTMLCDMLLRDAPVAIITQSPNVMDLVKCDGAALYFKNKTWLLGVTPTEEQIRDIAEWLLKYHCGNTGLSTDSLMEAGYPGASALGDAVCGMAAVSITSRDFLFWFRSHTAKEIKWGGAKHDPDDKDDLRKMHPGSSFKAFLEVVKWRSMPWKDVEMDAI

SEQ ID NO: 12249 - protein, 392 aa, Peixotoa glabra
DLEPVNPSDVPVTAAGALKSYKLAAKAISRLQSLPSGNISLLCDVLVKEVRDLTGYDRVMVYKFHEDEHGEVVSECRRSDLESYLGLHYPATDIPQASRFLFMKNKVRMICDCLAPPVQVIQDERLPQPLSLCGSTLRSPHGCHAQYMTNMGTIASLVKSVTVNEDDDTMDGDQQQMTRKLWGLVVCHHTSPRFVPFPLRYACEFLIQVFGVQINKEVELAAQVREKHILQIQTMLCDMLLRDAPVAIITQSPNVMDLVKCDGAALYFKNKTWLLGVTPTEEQIRDIAEWLLKYHSGNTGLSTDSLMEAGYPGASTLGDAVCGMAAVSITSRDFLFWFRSHTAKEIKWGGAKHDPDDKDDLRKMHPRSSFKAFLEVVKWRSMPWEDVEMDAI

SEQ ID NO: 12250 - protein, 392 aa, Peixotoa glabra
DLEPVNPADVPVTAAGALKSYKLAAKAISRLQSLPSGNISLLCDVLVKEVRDLTGYDRVMVYKFHEDEHGEVVSECRRSDLESYLGLHYPATDIPQASRFLFMKNKVRMICDCLAPPVQVIQDERLPQPLSLCGSTLRSPHGCHAQYMTNMGTIASLVMSVTVNEDDDTMDGDQQQMTRKLWGLVVCHHTSPRFVPFPLRYACEFLIQVFGVQITKEVELAAQVRKNHTLQIQTMLCDMLLRDAPVAIITQSPNVMDLVKCDGAALYFKNKTWLLGVTPTEEQIRDIAEWLLKYHSGNTGLSTDSLMEAGYPGASTLGDAVCGMAAVSITSRDFLFWFRSHTAKEIKWGGAKHDPDDKDDLRKMHPRSSFKAFLEVVKWRSMPWEDVEMDAI

SEQ ID NO: 12251 - protein, 392 aa, Pterandra arborea
DLEPVNPADVPVTAAGALKSYKLAARAISRLQSLPSGDISLLCDVLVKEVRDLTGYDRVMVYKFHEDEHGEVVSECRRPDLEAYFGLHYPATDIPQASRFLFMKNKVRMICDCLAPPVQVIQDKRLAQPLSLCGSTLRSPHGCHAQYMANMGAIASLVISVTINEGDDMMDGDQQQMARKLWGLVVCHHTSPRFVPFPLRYACEFLIQVFGVQITKEVELAAQVREKHILRTQTLLCDMLLRDAPVAIITQSPNVMDLVKCDGAALYYRKKFWLLGVTPTEAQIKEIAEWLLEYHSGNMGLSTDSLMEAGYPGASVLGNAVCGMAAVKITSRDLLFWFRSHTAKEIKWGGAKHDPDDKDDGRKMHPRSSFKAFLEVVKWRSLPWEDVEMDAI

SEQ ID NO: 12252 - protein, 392 aa, Ptilochaeta bahiensis
DLEPVNPADVPVTAAGALKSYKLAAKAISRLQSLPGGNISLLCDVLVKEVRDLTGYDRVMVYKFHEDEHGEVVSECRGSDLESYLGLHYPATDIPQASRFLFMKNKVRMICDCLAPPVKVIQDKRLSQPLSLCGSTLRSPHGCHAQYMANMGTIASLVMSVTVNEDDDMMDGDQQQMARKLWGLVVCHHTSPRFVPFPLRYACEFLIQVFGVQINKKVDLAAQVREKHILRIQTMLCDMLFRNAPVAIITQSPNVMDLVKCDGAALYYKNKFWLLGVTPTEAQIREIAEWLLEYHSGNTGLSTDSLMEAGYPGASVLGDAVCGMAAVSITSRDFLFWFRSHTAKEIKWGGAKHDPEDKDDGRKMHPRSSFKAFLEVVKWRSLPWEDVEMDAI

SEQ ID NO: 12253 - protein, 392 aa, Ryssopterys timorensis
DLEPVNPADVPVTAAGALKSYKLAAKAISRLQSLPSGNISLLCDVLVKEVRDLTGYDRVMVYKFHEDEHGEVVSECRRSDLESYLGLHYPATDIPQASRFLFMKNKVRMICDCLAPPVKVLQDERLPQPLSLCGSTLRSPHGCHAQYMTNMGTIASLVMSVTINEDDDMMDGDQQQMTRKLWGLVVCHHNSPQFVPFPLRYACEFLIQVFGVQINKEVELAAQVREKHILQIQTMLCDMLLRDAPVAIITQSPNVMDLVKCDGAALYFKNKTWLLGVTPTEEQIRDIAQWLLEYHSGNTGLSTGSLMEAGYSGASALGDAVCGMAAVSITLRDFLFWFRSHTAKEVKWGGAKHDPDDKDDLRKMHPRSSFKAFLEVVKWRSMPWEDIEMDAI

SEQ ID NO: 12254 - protein, 392 aa, Spachea correae
DLEPVNPADVPVSAAGALKSYKLAARAISRLQSLPSGNISLLCDVLVKEVRDLTGYDRVMVYKFHEDEHGEVVSECRRPDLEAYLGLHYPATDIPQASRFLFMKNKVRMICDCLAPPVKVIQDEKLPQSLSLCGSTLRSPHGCHAQYMANMGSIASLVMSVTVNEDDDMVDGDQQRMARKLWGLVVCHHTSPRFVPFPLRYACEFLIQVFGVQINKEVELAAQGREKHIMQTQTLLCDMLLRDAPVAIVTQSPNVMDLVKCDGAALYYRKKFWLLGVTPTEAQIRDIAEWLLEYHSGNTGLSTDSLMEAGYPGTSVLGNAVCGMAAVKITSRDFLFWFRSHTAKEIKWGGAKHDPDDKDDIRKMHPRSSFKAFLEVVKWRSLPWEDMEMDAI

SEQ ID NO: 12255 - protein, 392 aa, Stigmaphyllon paralias
DLEPVNPADVPVTAAGALKSYKLAAKAISRLQSLPSGNISLLCDVLVKEVRDLTGYDRVMVYKFHEDEHGEVVSECRRSDLESYLGLHYPATDIPQASRFLFMKNKVRMICDCLAPPVKVIQDERLPQPLSLCGSTLRSPHGCHAQYMTNMGTIASLVMSVTINEDDDTMDGDQQQMTRKLWGLVVCHHTSPRFVPFPLRYACEFLIQVFGVQINKEVELAAQIREKHILQIQTMLCDMLLRDAPVAIITQSPNVMDLVKCDGAALYFKNKTWLLGVTPTEEQIRDIAQWLLEYHSGNTGLSTDSLMEAGYPGASALRDAVCGMAAVSITSRDFLFWFRSHTAKEVKWGGAKHEPDDKDDLRKMHPRSSFKAFLEVVKWRSMPWEDVEMDAI

SEQ ID NO: 12256 - protein, 392 aa, Stigmaphyllon puberum
DLEPVNPVDVPVTAAGALKSYKLAAKAISRLQSLPSGNISLLCDVLVKEVRDLTGYDRVVVYKFHEDEHGEVVSECRISDLESYLGLHYPATDIPQASRFLFMKNKVRMICDCLAPPVKVIQDERLPQPLSFCGSTLRSPHGCHAQYMTNMGTIASLVMSVTINEDDDTMDGDQQQMTRKLWGLVVCHHNSPQFVPFPLRYACEFLIQVFGVQINKEVELAAQVREKHILQIQTMLCDMLLRDAPVAIITQSPNVMDLVKCDGAALYFKNKIWLLGVTPSKEQIRDIAQWLLEYHSGNTGLSTDSLMEAGYPGASALGDAVCGMAAVSITSRDFLFWFRSHTAKAVKWGGAKHDPDDKDDLRKMHPRSSFKAFLEVVKWRSMPWEDVEMDAI

SEQ ID NO: 12257 - protein, 392 aa, Stigmaphyllon sagraeanum
DLEPVNPADVPVTAAGALKSYKLAAKAISRLQSLPSGNISLLCDVLVKEVRDLTGYDRVMVYKFHEDEHGEVVSECRRSDLESYLDLHYPATDIPQASRFLFMKNKIRMICDCMAPPVKVIQDETLPQPLSLCGSTLRSPHGCHAQYMTNMGTIASLVMSVTINEDDDTMDGDQQQMTRKLWGLVVCHHTSPRFVPFPLRYACEFLIQVFGVQINKEVELAAQVREKHILQIQTMLCDMLLRDAPVAIITQSPNVMDLVKCDGAALYFKNKTWLLGVTPTEEQIRDMAQWLLEHHSGNTGLSTDSLMEAGYPGASALGDAVCGMAAVSITSRDFLFWFRSHTAKEVKWGGAKHDPDDKDDLRKMHPRSSFKAFLEVVKWRSMPWEDIEMDAI

SEQ ID NO: 12258 - protein, 392 aa, Tetrapterys microphylla
DLEPVNPADVPVTAAGALKSYKLAAKAISRLQSLPSGNISLLCDVLVKEVRDLTGYDRVMVYKFHEDEHGEVVSECRRSDLESYLGLHYPATDIPQASRFLFMKNKVRMICDCLAPPVKVIQGERLPQPLSLCGSTLRSPHGCHAQYMTNMGTIASLVMSVTINEDDDMMDGDQQQMTRKLWGLVVCHHTSPRFVPFPLRYACEFLIQVFGVQINKEVELAAQVREKHILQIQTMLCDMLLRDAPVAIITQSPNVMDLVKCDGAALYFKNKTWLLGVTPTEEQIRDIAEWLLEYHSGNTGLSTDSLMEAGYPGASVLGDVVCGMAAVSITSRDFLFWFRSHTANEIKWGGAKHDPDDKDDGRKMHPRSSFKAFLEVVKWRSMPWEDVEMDAI

SEQ ID NO: 12259 - protein, 392 aa, Tricomaria usillo
DLEPVNPADVPVTAAGALKSYKLASKAISRLQSLPSGNMSLLCDVLVKEVRDLTGYDRVMVYKFHEDEHGEVVSECRRSDLESYLGLHYPATDVPQASRFLFMKNKVRMICDCLAPPVKVIQDERLPQPLSLGGSTLRSPHGCHSQYMTNMGTIASLVMSVTINEEDERMDGDQQQMTTKLWGLVVCHHTSPRFVPFPLRYACEFLIQVFGVQIDKEVELVAQVREKHILQIQTMLCGMLLRDAPVAIVTQSPNVMDLVKCDGAALYFKSKTWLRGVTPTEEQIKDIAEWLLKYHSGNTGLSTDSLMEAGYPGASVLGDAVCGMAAVGITSRDFLFWFRSHTAKEINWGGAKHDPDDKDDGRKMHPRSSFKAFLEVVKWRSMPWEDMEMDAI

SEQ ID NO: 12260 - protein, 392 aa, Triopterys rigida
DLEPVNPADVPVTAAGALKSYKLAAKAISRLQSLPSGNISLLCDVLVKEVRDLTGYDRVMVYKFHEDEHGEVVSESRRSDLESYLGLHYPATDIPQASRFLFMKNKVRMICDCLAPPVKVIQDERLSQPLSLCGSTLRSPHGCHAQHMTNMGTIASLVMSVTVNEDDDMVDGDQPQMTRKLWGLVVCHHTSPRFVPFPLRYACEFLIQVFGLQINKEVELAAQVREKHILQIQTMLCDMLLRDAPVAIITQSPNVMDLVKCDGAALYFKNKTWLLGVTPTEEQIRDIAEWLLEYHSGNTGLSTDSLMEAGYPGASAVGDAVCGMAAVSITSRDFLFWFRSHTAKEIKWGGAKHDPDDKDDGRKMHPRSSFKAFLEVVKWRSMPWEDVEMDAI

SEQ ID NO: 12261 - protein, 392 aa, Tristellateia madagascariensis
DLEPVNPADVPVTAAGALKSYKLAAKAISRLQSLPSGNISLLCDVLVKEVRDLTGYDRVMVYKFHEDEHGEVVSECRRSDLESYLGLHYPATDIPQASRFLFMKNKVRMICDCLAPPVKVIQDERLPQPLSLCGSTLRSPHGCHAQYMANMGTIASLVMSVTINEDDDTMDGDQQQMARKLWGLVVCHHTSPRFVPFPLRYACEFLIQVFGVQINKELELAAQVREKHILRIQTMLCDMLLRDAPVGIITQSPNVMDLVKCDGAALFYKNKFWLLGITPTEAQIRDIAEWLLEYHSGNTGLSTDSLMEAGYPGASVLGDAVCGMASVSITSRDFLFWFRSHTAKEIKWGGAKHDPDDKDDGRKMHPRSSFKAFLEVVKWRSLPWKDMEMDAI

SEQ ID NO: 12262 - protein, 392 aa, Tristellateia madagascariensis
DLEPVNPADVPLTAAGALKSYKLAAKAISRLQSLPSGNISLLCDVLVKEVRDLTGYDRVMVYKFHEDEHGEVVSECRRSDLESYLGLHYPATDIPQASRFLFMKNKVRMICDCLAPPVKVIQDERLPQPLSLCGSTLRSPHGCHAQYMANMGTIASLVMSVTINEDDDTMDGDQQQMARKLWGLIVCHHTSPRFVPFPLRYACEFLIQVFGVQINKELELAAQVREKHILRIQTMLCDMLLRDAPVGIITQSPNVMDLVKCDGAALFYKNKFWLLGITPTEAQIRDIAEWLLEYHSGNTGLSTDSLMEAGYPGASVLGDAVCGMASVSITSRDFLFWFRSHTAKEIKWGGAKHDPDDKDDGRKMHPRSSFKAFLEVVKWRSLPWEDVEMDAI

SEQ ID NO: 12263 - protein, 392 aa, Tristellateia madagascariensis
DLEPVNPADVPVTAAGALKSYKLAAKAISRLQSLPSGNISLLCDVLVKEVRDLTGYDRVMVYKFHEDEHGEVVSECRRSDLESYLGLHYPATDIPQASRFLFMKNKVRMICDCLAPPVKVIQDERLPQPLSLCGSTLRSPHGCHAQYMANMGTIASLVMSVTINEDDDTMDGDQQQMARKLWGLVVCHHTSPRFVPFPLRYACEFLIQVFGVQINKELELAAQVREKHILRIQTMLCDMLLRDAPVGIITQSPNVMDLVKCDGAALFYKNKFWLLGITPTEAQIRDIAEWLLEYHSGNTGLSTDSLMEAGYPGASVLGDAVCGMASVSITSRDFLFWFRSHTAKEIKWGGAKHDPDDKDDGRKMHPRSSFKAFLEVVKWRSLPWEDVEMDAI

SEQ ID NO: 12264 - protein, 392 aa, Tristellateia madagascariensis
DLEPVNPADVPLTAAGALKSYKLAAKAISRLQSLPSGNISLLCDVLVKEVRDLTGYDRVMVYKFHEDEHGEVVSECRRSDLESYLGLHYPATDIPQASRFLFMKNKVRMICDCLAPPVKVIQDERLPQPLSLCGSTLRSPHGCHAQYMANMGTIASLVMSVTINEDDDTMDGDQQQMARKLWGLVVCHHTSPRFVPFPLRYACEFLIQVFGVQITKELELAAQVREKHILRIQTMLCDMLLRDAPVGIITQSPNVMDLVKCDGAALFYKNKFWLLGITPTEAQIRDIAEWLLEYHSGNTGLSTDSLMEAGYPGASVLGDAVCGMASVSITSRDFLFWFRSHTAKEIKWGGAKRDPDDKDDGRKMHPRSSFKAFLEVVKWRSLPWEDVEMDAI

SEQ ID NO: 12265 - protein, 392 aa, Triaspis hypericoides
DLEPVNPADVPVTAAGALKSYKLAAKAISRLQSLPSGNISLLCDVLVKEVRDLTGYDRVMVYKFHEDEHGEVVSECRRSDLESYLGLHYPATDIPQASRFLFMKNKVRMICDCVAPPVKVIQDKRLPQPLSLCGSTLRSPHGCHAQYMTNMGIIASLVMSVTVNEEDDMVDGDQLQMARKLWGLVVCHHTSTRFVPFPLRYACEFLIQVFGVQINKEVELAAQVREKHILQIQTMLCDMLLRDAPVAIITQSPNVMDLVKCDGAALYFKNKTWLLGVTPTEEQIRDIAEWLLEYHSGNTGLSTDSLMEAGYPGASALGDAVCGMAAVSITSTDFLLWFRSHTAKEIKWGGAKHDPDDKDDGRKMHPRSSFKAFLEVVKWRSMPWEDVEMDAI

SEQ ID NO: 12266 - protein, 392 aa, Tetrapterys discolor
DLEPVNPADVPVTAAGALKSYKLAAKAISRLQSLPSGNISLLCDVLVKEVRDLTGYDRVMVYKFHEDEHGEVVSECRRSDLESYLGLHYPATDIPQASRFLFMKNKVRMICDCLAPPVKVIQDERLPQPLSLCGSTLRSPHGCHAQYMTNMGTIASLVMSVTVNDDDDMMDGDQQQMTRKLWGLVVCHHTSPRFVPFPLRYACEFLIQVFGVQINKEVELTAQVREKHILQIQTMLCDMLLRDAPVAIITQSPNVMDLVKCDGAALYFKKKTWLLGVTPMEEQVRDIAEWLLEYHSGSTGLSTDSLMEAGYPGASDLGDAVCGMAAVSITSRDFLFWFRSHTAKEIKWGGAKHDPDDKDDGRKMHPRSSFKAFLEVVKWRSVPWEDIEMDAI

SEQ ID NO: 12267 - protein, 392 aa, Tetrapterys discolor
DLEPVNPADVPVTAAGALKSYKLAAKAISRLQSLPSGNISLLCDVLVKEVRDLTGYDRVMVYKFHEDEHGEVVSECRRSDLESYLGLHYPATDIPQASRFLFMKNKVRMICDCLAPPVKVIQDERLPQPLSLCGSTLRSPHGCHAQYMTNMGTIASLVMSVTVNDDDDMMDGDQQQMTRKLWGLVVCHHTSPRFVPFPLRYACEFLIQVFGVQINKEVELTAQVREKHILQIQTMLCDMLLRDAPVAIITQSPNVMDLVKCDGAALYFKKKTWLLGVTPMEEQVRDIAEWLLEYHSGNTGLSTDSLMEAGYPGASDLGDAVCGMAAVSITSRDFLFWFRSHTAKEIKWGGAKHDPDDKDDGRKMHPRSSFKAFLEVVKWRSVPWEDVEMDAI

SEQ ID NO: 12268 - protein, 376 aa, Bothriochloa odorata
ALSIAGAVQSQKLAVRAISRLQALPGGDVKLLCDTVVEHVRELTGYDRVMVYRFHEDEHGEVVAESRRDNLEPYLGLHYPATDIPQASRFLFRQNRVRMIADCRATPVRVIQDPGLSQPLCLVGSTLRAPHGCHAQYMANMGSIASLVMAVIISSGGDHEQTGRGGISSAMKLWGLVVCHHTSPRCIPFPLRYACEFLMQAFGLQLNMELQLAHQLSEKHILRTQTLLCDMLPRDSPTGIVTQSPSIMDLVKCDGAALYYHGRYYPLGVTPTESQIKDIIEWLTVCHGDSTGLSTDSLADAGYLGAAALGDAVCGMAVAYITPSDYLFWFRSHTAKEIKWGGAKHHPEDKDDGQRMHPRSSFKAFLEVVKSRSLPW

SEQ ID NO: 12269 - protein, 102 aa, Bromus inermis
SRFLFMKNKVRMICDCASTPVKLIQGDNLSQPISLCGSTMRAPHGCHAQYMANMGSIASLVMSITINEDEDEDGDTGSDQQPKGRKLWGLVVCHHTSPRFVP

SEQ ID NO: 12270 - protein, 104 aa, Bromus inermis
QASRFLFRQNRVRMIADCHAAPVRVIQDPAMPQPLCLVGSTLRSPHGCHAQYMANMGSIASLVMAVIISSGGEDEHNMTRGVIPSAMKLWGLVVCHHTSPRCIP

SEQ ID NO: 12271 - protein, 874 aa, Magnetococcus sp. MC-1
MMSFRLKTVLGIALIQAFVLLTLVSSALDDLRQSHQNNLLAHAKTLTTLMDTATKAPILEKNHSALQAIAHEIVQKNAITYLSIYDNQQQILYQFGPAPTPHIKPDINLRDIDDATFDLRHPMLHEQSVYATLALGLPVTPIIKALHAAQNQQLRLALLAMSASILVSWLLGSYLTRQLVHLREAATAIGHGHFNHRIPVQGQDELALTATAFNRMSGELDKTYQRLKKSLYTSNRMAKLEATIMHTVMDGLITMDSSGKVLSFNHAAEGIFGYAAAEVVGEQITMLMPEPYRSQHDDYVQRYLQGAAPRVIGSAGRHVTAQRKDGALLPIRLSVNEMVFEGERLFVGLVADVSERLQEERALIEAKEQAEAANMAKSRFLAVMSHEVRTPMNGILGMLGLLNDRRLDGQQQEWLATAQESAESMLTLLNDILDFSKIEAGHLELEQSAFSPEQILKGVHDLFLPRATAKGITLELEQGANLPAWVQGDPGRLRQVLMNLVSNGIKFTHQGGVTMRVAQQAKREDSLLLQFEVQDSGIGIPPQQLTQLFQPFNQLDPSYSRKYGGSGLGLAICRHLVDLMGGEIRLESPPSGGSRFTFTARFGYAHAPQDEVLDNSEQEVQLHGVRVLLAEDSPTNQMVAVAMLARVGCHVDVAVNGLEVLEALTRAPYDLILMDLAMPEMDGWQAIARIRGMNAPLRDIPIIALTANAYPEVRAQCLAAGAQDFITKPIQRNILLNGILALVTQAQQTGQQGVGAKRCHSNAPIRDEKVLERLAEDTHCSLLPRILEVFIDEADARLQAISTALDNEAWQTVALEVHPLKSSAATFGAARLAACAMQLDAACKAQQWTQMHDLCNCLIEVYRETRGLYKGQQV

SEQ ID NO: 12272 - protein, 764 aa, Magnetococcus sp. MC-1
MLIMLLLTRTLMGSLESNYLLAKQRQANENNIEILLASATEALENRNIIGLKKIFAQALRSQPQLLELTILNDDGKPLFSSTREQAPNTTLTHFRTPIMVQGSFQGILVGAWDLAPDLRAIDTHVNHILLLTSLLFGLITLMVIFMVHRLAIQPVDAIYNRLIKQISPPQSKPETFHAARELRRLHQTVESFSRTAASHLENARTLQESEALLKQRVERRTRELRLAKEAAEQANLAKTEFLATMSHEIRTPLNGVLGMSDLLLESDLNSYQRHHVETIHRSGRTLLRVINDILDLSRIQAGRMPLEVTAFKLRACLEDVQALFKDQARRKGLSFSINCQEELPQRLLGDATRLNQILFNLVGNALKFTERGFVRVSVQAEQVREADLLLRIQVEDSGIGISDEYKNRLFEIFSQQDSSISRRYGGSGLGLVITRKLAQIMGGKLGFSSRSGAGSTFWVTARFGRVPDTLPDHPLLPREEQQSNLLNQRFRAHILLAEDNPVNQDVARLNLERLGCRVTLVENGQQAVTVFQENRFDLVLMDCEMPIMDGYTATRTIRDLERQQGRRATPIIAVTAHALASHRNKAIATGMNDFLSKPFSTTKLIKLLATYLPPHTVIAQPDPAPPVVTQETAPSADPAHKTLDHRALDQIRALDPADPQGMLNRMIDLYFEQSAKDFKAIENGLATQNAELIRFHAHKLKSSSAQMGGQQLSLLCRTIEEQCHTFTRVEESMSQASKAQHELCAALHALRQTAPPTPPSEGEI

SEQ ID NO: 12273 - protein, 890 aa, Magnetococcus sp. MC-1
MLTRDYRCSTPPWIMATWRSLGLPCPRSKLAPALWLFRGAAALGGGLTALMLIPLGWWFIRRQLVSPLHTLLHEIQQFHQEGRIPPRQIRYGASEFRTLTLEFRTLAHSIIEREKRLRTLSTGLEQAPISVLISDTQGNIEYVNPYFEQLTGYYSHEVLGKNPNLLKSDLNPPELFRDLWRTISAGAPWRGEFINRKKNGALHWQMAHIAPVLDNDGQITHFIALSEEITARKQADAALNESNERFRTLAQVSPVGIFQTDHDGEYIYVNTTWESITGTTSPQALSSQWDIHLHPDDQPRVQQRWQETVLHGNAFHEEYRFLRGDGTIRWVIGSAAPQRDPDRVIQGFVGTLTDITERKQMELELGKERALLRSLIDSIPDLIFYKRADGTYMGCNRAFELFCKRPEAALIGHTDQALFSPELAQLLKSGDELVINKNSCFSHEATGLFGDGHQVPFLIQKSPMHGYQGELLGLIGVARDITQRLRVEQELQQAKEDAEAANRSKSEFLAAMSHEIRTPMNVVIGMGEILLETPLNAEQTRYINSMQHAGDALLELIDNILDLSKIEAGRMTLEERAFRLDTMVISITDFFRLQALNHNLSLVVEIAPELEQQYVLGDAGRVRQVLYNLLGNALKFTEEGGVSLHLSLDANQHIHTRVSDTGIGIAPQQLERIFDNFTQEDSSVTRRFGGTGLGLAICRRFTELMGGRIWVESIEGQGSTFHMTLPLVLSHTPLHETPTTAVITPYNQGIVEAPCAFTPEHPQRPLSILLVEDSEDNRTLFKAFLQHTPHALVMVENGADALERVIVERFDLIFMDMQMPIMDGYSATRAIRQWEQQRGVPPHIIYALTAHALSGDRERSLQAGCDDHLTKPIKKRKLLEIIQQHAQPVE

SEQ ID NO: 12274 - protein, 847 aa, Magnetococcus sp. MC-1
MLKMAEQAPKESQESSPSLTLPPDPGPLRLVRSVGVQMLLMLVVLSGLVLSALLLSESAFEHMQRRVDYMVTTDLESLVATAELANESAAHAAAAPALAAAKNDFSRMAVMDQLMDWQRLLARSISGVKKMQRVAADEERGRYLKAVISHRDDLLDNLYALDGVVARRIALDQQLAEKMLILQRNDESLARLLPTVKTQQTPQFQVNLLAFGATFHSMSAILHSAMQSDSRGRLKRLQKRVMDAHQLAHDYYDSLHLESEQLAPFFDAIHELLEGPANLFQLRLEALDVLKKQRGLLQRNKQLASQFNETVARLFDLVRSDVRRQTAQVKEVAKQSSQHLRGIAAVALVAIVIGVMMVRWRLVVPLDQLHSAIVEHLRGNTRSTVRQSGKNEIARISQGLAYFIALIDQRERALRWAKEAAEQAAQAKSEFLANMSHEIRTPMNAITGLTGLCLKTDLNSKQRDYLTKVEGAARSLLRIVDDILDFSKVEAGCLVLEETDFELESVFDHLSTMISQKAHEKGLEVVYGVPRSVPTYLRGDPLRLSQILINLASNAVKFTEEGDIVVQVAVDRYLEEQVVLHFSVRDSGMGMSQPQLERLFHSFTQADSSTTRRFGGTGLGLTISKRLVEMMQGKIWVESSLGQGSAFHFTACFRYDPERALAPCMLTWALQDKRALLVDNNPTSRGFLREMIASFSLKVQLACGLDEGMQKCHQARDEGHPFDVVVLNFSAEQDSATGLAVLQDLQRLGGDEALRRTLVIVPVTQEALIRAADRLDVGVLQFKPIYPAALQSGLTAILCPQQDDDGAAQKLTRRCIWIYTACICYWSRIMRLINWLPAKSSKGLGPR

SEQ ID NO: 12275 - protein, 948 aa, Magnetococcus sp. MC-1
MNIRSIVFLFGFSGSAILAAGIWSFSVSYGEVTALFQRQNIISQITDQGYRLALLTNEVLLQREIRAEQQWLSLYRMLEQFLEKNAAQLTPVQSYVQGIQHSLQNLHQLFERVTEGFKIGPLEGNAYQAQQRLYLLQMSQISIRIAELQTRLGELTNISNDAAEKTAGSSYEGVLFQFGLFLFALILYAVLAILFFYTRLLEPLNRLHKGIQRIQQGDVKHRPSHRVMDELGALFAAFSHLLDELQIAITYRKNNEEHLRQLLKLNEEASHLSERELCDRGLGIVVSLTQSEVGYLHMVHSDQETLTRVTWNHPRMALGHALDDALVFLNQAGVLTDWAAREKPIIQNNKPNFQDDQEVSADRFTFFRHLSVPVIEGNNVRMVMGVGNKAEDYNQNDVRQLQTVANEVGKFVQRRRSEIALRIASDEALKANRAKSDFLAVMSHEIRTPMNAIMGMTELLEETELTTIQRNYLSICRSSGQNLLQLINDILDISKVEAGRMEVAVAPFHLHRIIHDANQVILFRAQEKGLNQIVYIDPAVPTILLGDQARIRQILINFLGNSVKFTQSGTIATLVTTRAHANKEDQLVIHVVDTGIGIEQSEQEAIFKAFHQVDSSNQRQQGGTGLGLAICLKLVALMQGSVSLSSRAGKGSTFTLTLPLTVAPAEQIQSLKVERGLTGYHMVIWHTHPISTLYIEEMFKERGAKVRSCNQSMTLANCAIQGDAVLATTDMMIIHYHEEDKTNPLELINTIRSEQSLHEIPVLVYGRCYDPALLKQLNQLGVRFLPESLMQDVLCEQIVTELSKRPRSAVTSGQGGTLPMHILLVDDSPDNIFLIQAFLKKTSYQISTVYNGKEAVEYVMQADTPPDLILMDIQMPIMDGYAATRQIRLLEQQQGQSRIPIIALTAHAMAEEAEKLKAAGCDLHMAKPVSKRILLEVLGRYHEKMAYS

SEQ ID NO: 12276 - protein, 701 aa, Magnetococcus sp. MC-1
MEMERDILNQKVLICEYIDLNSRLENFVSAFNFHILVVDDTTANRYTMKAILGGLEHVVILEANSGEQALALTIEQQVDLILLDIQMPGMDGFETAHLLKMSASTRDIPIIFITAIYRSEHFYKQGYQVGAVDYLTKPVDENLLLNRILSYMRLLQREKSLQRTMAELQRKEHALQTAHDEIAETLRERTVALDRASDAIISADQQGHVIFWNHGAERIFGYPKQTILHTPLLRLIPDQLHETFLSHFSEVIASGEIKNSDSIYEFSGLRANGEVFPIEVSVSYWQGAERHFFSAVVRDISQRKQLETQLRHAQQISESANRAKSTFLATMSHEIRTPLNTILGMGQLLEETDLTEMQHWCVNILGNSGRALLTLINDILDLSKIEEGHLSLEHTPFDLHQLLQEVEELFTFSALAKGITLRGHFSESLPQWVMGDPTRLRQVLLNLLGNAIKFTKQGFVELSAQTMAEDEICFSVFDSGPGIAKERQQEIFLPFTQADSSTTRKYGGSGLGLTISRRLVKLMHGQIQLESRLGKGSRFYFSLNLPQAPTERIPPPSLPATTVVHSSPQRALTILVADDSDDNRILIEAFLKKSPYKLVMASNGLEALEEFKKQPFDLVLTDIQMPIMDGYEAIRQIRQWESSQKMTTRTPIIALTAHVMKEEAEQIEQAGGDLHLSKPIQKKRLLEVIQTLTHDNRLSVR

SEQ ID NO: 12277 - protein, 1059 aa, Magnetococcus sp. MC-1
MKLSHKFILTLLPPILLALFGLGWWHHHTTMAEVTKANERYLQTLLDGFMENALQRRFVILQENNLNDIASFVQTYRREIYADAERIAQKHEVQLIIYDTRGNVQYATSKPITKQPPIELKQLLLPDSTGRLTALPPSGDEATGALYLQQGFSPWRWQILLLASDAQLTAAVRNIRHTTLLVAALLTAAFILLVYGLLRHLVLQPVALLRQASKCIAHHEPLPKLPLTEGDEISHLAIAIAAMSRSIGEYHRHLQTQRNRFETLLAANPDLISLKNRVGIYQVVNPAFCHFLGLPKEAILGQDDARLFTPHQAARIRQADQWVLSSGAPSAQEEEAVGPDNLPLWLHVIRTPITQATGEVSGILTTVRNISARRMAEEALRTAHEGLEQEVAQRTQALRESETRLRIVTENLPAVVWMSDPLLTSMHFVSPAYEQIWGKSRESLLQDPQSLWTSIHPSDRSFVLKRILNSNGQPWEAEYRILHPDGTTRWIREQGAAFRDTHKQILFLIGCAFDVTPLKETERALSTAKQEAESANHAKSAFLATMSHEIRTPLNGITGMIELLQRSALSVEQRQQVETISKCSVVLMDILNDILDLSKIEAGQLVLERAPFSPTQLLLNLLEVMQPQARNKELDLQLNMDEKLPSTMLGDATRLRQVALNLIGNAIKFTPRGWVKISLLVHERIDDIVWVELAVQDQGIGIADEKLVHLFNPFTQADSSITRNYGGTGLGLAISKRLVEAMAGAISVTSIEGKGTHFRVTLPMQVAHTPLPADAFAPQETLALRPLQMLLVEDETVNQQVVCALLEDEGHHVDVANHGEEAVLMCQQRAYQVILMDLRMPKMDGLSATEQIRQQGMNQQTPIIALTADVLKSTLDRCLEVGMQQVLTKPIRLVQLNHALAHIGLPMAPPRPPAQALSEPAPEATESALPTESEEDTCLNLTRLRYLVSNMDQDHLLNIIQAFKTTSENCLSGMQQALENGDEGALRHTAHKLAGSAATLGLQRVMEMAKIMEEHSSQPSVQHNQLSLLRYQVELGFSAIAKETGLSLQMQETEHVASL

SEQ ID NO: 12278 - protein, 192 aa, Ephedra foeminea
DDHGEVISEIRRSDLEPYLGLHYPATDVPQASRFLFMKNRVRMICDCYSPPVRVIHDKRLKKELSFCGSTLRAPHGCHAQYMANMGSVASLVMAVIVNEKEDEEAENEGQSQPKGRKLWGLVVCHHTSPRFVPFPLRYACEFMMQVFSIQLNKEVELACQMREKQILRTQTLLCDMLLRDTPLGIISQKPSI

SEQ ID NO: 12279 - protein, 205 aa, Ephedra foeminea
DEHGEVVSEIRRSDLVPYLGLHYPATDIPQASRFLFMQNRVRMICDCRALPVKVIQSGELKQPLCLVGSTLRAPYGCHAHYMANMGSIASLVMAVIVRNEDDGGNNNTGSGGGGSGGEGSGSHIGRNTMKLWGLVVCHHTSPRTVPFPLRYACEFLMQAFGLQLNMELQLAAQLTEKHILKTQTLLCDMLLRDTPMGIVTQSPSI

SEQ ID NO: 12280 - protein, 376 aa, Urochloa mutica
ALSIAGAVQSQKLAVRAISRLQALPGGDVKLLCDTVVEHVRELTGYDRVMVYRFHEDEHGEVVAECRRDNLEPYLGLHYPATDIPQASRFLFRQNRVRMIADCHATPVRVIQDPGLSQPLCLVGSTLRAPHGCHAQYMANMGSIASLVMAVIISSGGDDEQTARGGISSSMKLWGLVVCHHTSPRFIPFPLRYACEFLMQAFGLQLNMELQLAHQLSEKHILRTQTLLCDMLLRDSPTGIVTQSPSIMDLVKCDGAALYYHGKYYPLGVTPTESQIKDIIEWLTVCHGDSTGLSTDSLADAGYHGATALGDAVCGMAVAYITPSDYLFWFRSHTAKEIKWGGAKHHPEDKDDGQRMHPRSSFKAFLEVVKSRSLPW

SEQ ID NO: 12281 - protein, 755 aa, Pseudomonas putida KT2440
MTGAFSIMTADNSLADAMERCAQEPIQVPGSIQPHGFLLVLDATDLRVLQASENVEHWLGLPARELIGCHFADLVHEGFDLHAHLTRLPEDEVFPFHIGDVRLRQGAPISALLHMLVHCHDQVLIAEFEPPRLPADLVGQGDYYPLVRSFVASLQVASSIEDLLQQTVLQLKRITGFGRVKAYRFDAEGNGQVLAEVVDPGYPSYAGLCFPAADIPRQARELYRVNRIRVIEDANYQPSPLLPATNPRTGKPLDMSFAALRSVSPVHLQYMRNMGTLASMSLSIVVDGQLWGLISCHHQQPRPVDLRTRTACELLASVLSLQIESRESHASTRKLLTLRQHIVRMISSMADHDSVSDGLRDLPEVLLAFADAQGAAVISAERCDLIGQTPPEAQVTALVHWLGQRDEDKVFHSDNLRRDITELPELANHAGGVLAVAISQIHSHYLLWFRPEQIRTVNWAGQPTKQVGPQGNLDPRHSFERWQEEQRGYSQAWDPLVIEGVIELRAAVLGIVLRKAEELAQLAGELRRSNKELEAFSYSVSHDLRAPLRHIAGYTELLGEIEGQGLSERGKRFLQHIGEAAHFAGSLVDNLLNFSQMGRSALRLSDVDLNALVEAIRSELAPDYEGRAIVWDIAPLPKVIGDPAFINMALHNLIANAIKYTRGRTPARIEISAVQHPEETEVCIRDNGVGFDMAYANKLFGVFQRLHRMEDFEGTGIGLASVRRIIERHDGRVWATGQVDQGASFHFTLPRNTAT

SEQ ID NO: 12282 - protein, 847 aa, Pseudomonas putida KT2440
MTYNPQVNLTNCDREPIQIPGSIQPHGCLLACDASATVVLRHSVNAPQMLGVANDINGQKLHAVLGDEVTHTLRNALARTRDASRPALSFGVTLPNGAAVDIAAHLYKGTAILEFEPAGASIAEPIELARTLIAQLREIDQTHKLFRDAARFVRAVLGYDRVMIYQLGADGAGKVVAESKRSDLESFMGQYFPASDIPQQARALYLRNPIRVISDAQFNTVAINPVLDPSGEPLDLSYAHLRSVSPIHCEYLCNMGVGASMSISVIVNGELWGMIACHHYAPRTLAMGQRVAAEMFGEFFSLHIETLRSRQKLEAAVRIHKALDSLLRDANQAADIDGFFHARLPRLMSLIPCDGIGMSLLGRWSCAGLAPPQTAVPDLLRLADMVSEGRIWASNRLSTVLPSAQAYFNDVSGVLIIPMSQHPRDYLIFFRKEVVETLDWAGDPNKTYDSGALGDRLTPRKSFAIWKETVHQQSLPWTEQDRQFGDAIRTAIVEVVLHNSELLASERAKADVRQRMLNEELNHRVKNILSLIGALVAHPTPESQTLQDYVATLKGRIQALSLAHDQVVRGDGGGRLAKLLEAELSPYRTAADVIELQGPNVILDARAYSVMALVLHELATNAAKYGALSRAGGKLSVSWAIDASNACAISWREMGGPTVRPPSRSGFGTVLIDRSIPFDLGGTSAVEYHPEGLQGFFRIPAKHLSVAEAAETALPATPLARANGAFAARSGLCVLILEDQLVIAVGLEQILNDAQIKDVITASSEDQAMQLLGSHKPDAAILDVNLGTGTSISVADELVRRQVPFLFATGYGDGISIPEHLQHVPVARKPYDANAILASLQSLLELG

SEQ ID NO: 12283 - protein, 643 aa, Pseudomonas putida KT2440
MSKRLSWDIHTRTQIISLGPALLLTLLLISFFTFVRIQDLRQELNHTGQLIANQLAPASEYGVISGNNEVLEGLMRATLSIPHVRFLEVQDSRNHILVYVEQSDESANRAQQVEVFQAPIRLQQIRLDNDFLQQGKATSPAIGDDYLGRVIVGMSDDAFSQRQQEIVIKAGILALFALLFTFLLARRLALSLAKPISDMGHAVKAIQQGEYNTPLPVVDDSELGHLARHINNLASALEQASDEQKQAIAELIQAREEAEQANRAKSDFLAMMSHELRTPMNGVLGMLQLLETTPLSSEQADYTAVASESTGHLLKVINDILDFSRIERAALQLEHIDFNLGELITNSVQSFQHSAQQRGLGLHLQLPAGIEQLQVNGDPTRIRQILLNLIGNALKFTERGQVQVDARWQVLDRQLIWLTCSVRDTGIGIDSDRLEMMFVAFQQADSSISRRYGGTGLGLSIARTLAERMGGKLRGESREGLGSTFTLEMPLALANPAPVPLTPPTTVRTTVPDNDQVLLVEDNPVNRSVVEAMLRSLGLAVCTAEDGLEAVELVGRQRFAAVLMDCRLPHLDGYEATRRIRQLPNGAGLPIIALTANALQGDRERCMAAGMDDYLSKPLRRTELQQVLQRWLPGQTTATGDKC

SEQ ID NO: 12284 - protein, 392 aa, Aspicarpa hirtella
DLEPVNPADVPVTAAGALKSYKLAAKAISRLQSLPSGNISLLCDVLVKEVRDLTGYDRVMVYKFHEDEHGEVVLECRRSDLESYLGLHYPATDIPQASRFLFMKNKVRMICDCLAPPVKVIQDKRLPHPLSLCGSTLRSPHGCHAQYMTNMGTIASLVMTVTVNEDDDMMDGDQQHMTKKLWGLVVCHHTSLRFVPFPLRYACEFFIQVFGVQINKEVELAAQVREKHILQIQTMLCDLLLRDAPVTIITQSPNVMDLVKCDGAALYFKNTTWLLGVTPTEEQIRGIAEWLLKYHSGNTGLSTDSLMEAGYPGASGLGDAVCGMAAVSITSRDFLFWFRSHTAKEIKWGGAKHNPDDKDDLRKMHPRSSFKAFLEVVKWRSMPWEDIEMDAI

SEQ ID NO: 12285 - protein, 392 aa, Lasiocarpus sp. Anderson 13834
DLEPVNPADVPVTAAGALKSYKLAAKAISRLQSLPGGNISLLCDVLVKEVRDLTGYDRVMVYKFHEDEHGEVVSECRRSDLESYLGLHYPAIDIPQASRFLFMKNKVRMICDCLAPPVKVIQDKRLSQPLSLCGSTLRSPHGCHAQYMANMGTIASLVMSVTVNEDDDMIDGDQQQMARKLRGLVVCHHTSPRFVPFPLRYACEFLIQVFGVQINKEVELAAQVREKHILRIQTMLCDMLLRDAPVAIITQSPNVMDLVKCDGAALYYKNKFWLLGVTPTEAQIRDIAEWLLEYHSGNTGLSTDSLMEAGYPGASVLGDAVCGMAAVSITSRDFLFWFRSHTAKEIKWGGAKHDPEDKDDGRKMHPRSSFKAFLEVVKWRSLPWEDVEMDAI

SEQ ID NO: 12286 - protein, 392 aa, Lophopterys floribunda
DLEPVNPADVPVTAAGALKSYKLAAKAISRLQSLPSGNISLLCDVLVKEVRDLTGYDRVMVYKFHEDEHGEVVSECRKSDLESYLGLHYPATDIPQASRFLFIKNKVRMICDCLAPPVKVIQDERLPQPLSLCGSTLRSPHGCHAQYMTNMGTIASLVMSVTINEDDDTMDGDQQQTTRKLWGLVVCHHTNPRFVPFPLRYACEFLIQVFGVQINKEVELAAQVREKHILQIQTMLCDMLLRDAPVAIITQSPNVMDLVKCDGAALYFKNKIWLLGVTPTEEQIRDIAEWLLEYHSGNTGLSTDSLMEAGYPGASVLGDAVCGMAAVSITSRDFLFWFRSHTAKEIKWGGAKHDPDDKDDGRKMHPRSSFKAFLEVVKWRSMPWEDVEMDAI

SEQ ID NO: 12287 - protein, 392 aa, Rhynchophora phillipsonii
DLEPVNPADVPVTAAGALKSYKLAAKAISRLQSLPSGNISLLCDVLVKEVRDLTGYDRVMVYKFHEDEHGEVVSECRRSDLESYLGLHYPATDIPQASRFLFMKNKVRMICDCVAPPVKVIQDERLPQPLSLCASTLRSPHGCHAQYMTNMGIVASLVMSVTVNEEDDMVDSDQPQMARKLWGLVVCHHTSTRFVPFPLRYACEFLIQVFGVQINKEVELAAQVREKHILQIQTMLCDMLLRDAPVAIITQSPNVMDLVKCDGAALYFKNKTWLLGVSPTEEQIRDIAEWLLEYHSGNTGLSTDSLMEAGYPGAAALGDAVCGMAAVSITSRDFLLWFRSHTAKEIKWGGAKHDPDDKDDGRKMHPRSSFKAFLEVVKWRSMPWEDMEMDAI

SEQ ID NO: 12288 - protein, 392 aa, Rhynchophora phillipsonii
DLEPVNPADVPVTAAGALKSYKLAAKAISRLQSLPSGNISLLCDVLVKEVRDLTGYDRVMVCKFHEDEHGEVVSECRRSDLESYLGLHYPATDIPQASRFLFMKNKVRMICDCVAPPVKVVQDERLPQPLSLCASTLRSPHGCHAQYMTNMGIVASLVMSVTVNEEDDMVDSDQPQMARKLWGLVVCHHTSTRFVPFPLRYACEFLIQVFGVQINKEVELAAQVREKHILQIQTMLCDMLLRDAPVAIITQSPNVMDLVKCDGAALYFKNKTWLLGVSPTEEQIRDIAEWLLEYHSGNTGLSTDSLMDAGYPGASALGDAVCGMAAVSITSRDFLLWFRSHTAKEIKWGGAKHDPDDKDDGRKMHPRSSFKAFLEVVKWRSMPWEDVEMDAI

SEQ ID NO: 12289 - protein, 578 aa, Houttuynia cordata
  unsure (1)..(578): unsure at all Xaa locations
SGKPFYAIVHRVTGSLIIDFEPVKPFEVPMTAAGALQSYKLAAKAISRLQSLPSGSMERLIDTMVQEVFELTGYDRVMAYKFHEDDHGEVISEVTIPHLDPYLGLHYPATDIPQAARFLFMKNKVRMICDCRAKPVKVYQDDKLSFDLTLCGSTLRAPHSCHLQYMENMGSIASLVMAVVVNEGGEEDRGGPADSSQQQLGRYRRKKLWGLVVCHNTRPRFVPFPLRYACEFLTQVFAIHVSKELELEETNSRKEILRTQTLLCDMLLRDAPMGIVNQTPNIMDLIKCDGAALFYKDKVFRLGIAPSETDIREIAQWLSAYHMDSTGLSTDSLHDAGYPKAAFLGDLVCGMAAVKITCSDMLFWFRTHTAAEIRWGGAKHDHSDRDDGKRMHPRSSFRAFLDVVKTRSLPWKDYEMDGIHSLQLILRTSVKEPEQVDSNKVIHAQLGDLKLDEMNELHAVTTEVVRLIETATVPILAVDVXGLINGWNAKISELTGMSLEQVMXKHLLTLVEDCSINVVRRMLCLALKGEEEQNIEFQVKTHGTRSDHGPVVLVVNACASRDVHGNVVGVCFVXQDVT

SEQ ID NO: 12290 - protein, 392 aa, Houttuynia cordata
  unsure (1)..(392): unsure at all Xaa locations
DLEPVNPSDVPVTAAGALKSYKLAARAISRLQSLPSGDISLLCDVLVREVSDLTGYDRVMAYKFHEDEHGEVVAECKRADLEPYLGLHYPATDIPPASRFLFMKNKMRMICDCLAQPVKVIQDKRLPQPLSLAGSTLRAPHGCHAQYMSNMGSIASLVMSVVVSEGDDDSNNGEKTGRKLWGLVVCHHTSPRFIPFPLRYACEFLIQVFAIQLSKEVELAAQMKEKHILRMQTVLCDMLLRDAPMGIXTQSPNVMDLVKCDGAALYYRCQCWLLGTTPTENQIRDLAEWLLQYHNSSTGLSTDSLVDAGYPGAHELGDAVCGMAAIRITSRDFLIWFRSHTAKEIKWGGEKHDPSDKDAFESKMNPRTSFKTFLEVVKRRSLPWEDVEMDAI

SEQ ID NO: 12291 - protein, 392 aa, Acridocarpus macrocalyx
DLEPVNPADVPVTAAGALKSYKLAAKAISRLQSLPSGNISLLCDVLVKEVRDLTGYDRVMVYKFHEDEHGEVVSECRRSDLEAYLGLHYPATDIPQASRFLFMKNKVRMICDCLAPPVKVIQDERLPQPLSLCGSTLRSPHGCHAQYMANMGTIASLVMSVTVNEDDDMMDGDQQQMARKLWGLVVCHHTSPRFVPFPLRYACEFLIQVFGVQINKEVELAAQVREKHILQIQTLLCDMLLRDAPVAIITQSPNVMDLVKCDGAALYYKKKFWLLGITPTEAQIRDIVEWLLEYHSGNTGLSTDSLMEAGYPGVSVLGDAVCGMAAVSITSKDFLFWFRSHTAKEIKWGGAKHDPDDKDDGRKMHPRSSFKAFLEVVKWRSLPWEDMEMDAI

SEQ ID NO: 12292 - protein, 384 aa, Brachylophon curtisii
DLEPVNPADVPVTAAGALKSYKLAAKAISRLQSLPSGNISMLCDVLVKEVRDLTGYDRVMVYKFHEDEHGEVVSECRRPDLEAYLGLHYPATDIPQASRFLFMKNKVRMICDCLAPPVKVIQDERLPQPLSLCGSTLRSPHGCHAQYMANMGTIASLVMSVTINEDDDMMDGDQRQMARKLWGLVVCHHTSARFVPFPLRYACEFLIQVFGVQINKEVELAAQVREKHILRIQTLLCDMLLRDAPVAIITQSPNVMDLVKCDGAALYYKKKFWLLGITPTEAQIRDIAEWLLEYHNGNTGLSTDSLMEAGYPGASVLGDAVCGMAAVSITSRDFLFWFRSHTAKEIKWGGAKHDPDDKDDGRKMHPRSSFKAFLEVVKWRSLPW

SEQ ID NO: 12293 - protein, 392 aa, Diplopterys cabrerana
DLEPVNPADVPVTAAGALKSYKLAAKAISRLQSLPSGNISLLCDVLVKEVRDLTGYDRVMVYKFHEDEHGEVVSECRRSDLEPYLGLHYPATDIPQASRFLFMKNKVRMICDCLAPPVKVIQDDRLPQPLSLCGSTLRSPHGCHAQYMTNMGTIASLVMSVTINEDDDTMDGDQQQMTRKLWGLVVCHHTSPRFVPFPLRYACEFLIQVFGVQINKEVDLAVQMREKHILQIQTMLCDMLLRDAPVAIITQSPNVMDLVKCDGAALYFRNKTWLLGVTPTEEQIRDIAEWLLKYHSGNTGLSTDSLMEAGYPGASALGDAVCGMAAVSITSGDFLFWFRSHTAKEIKWGGAKHDPDDKDDLRKMHPRSPFKAFLEVVKWRSMPWEDVEMDAI

SEQ ID NO: 12294 - protein, 381 aa, Heteropterys leona
ETPAGALKSYKLASKAISRLQSLPSGNISLLCDVLVKEVRDLTGYDRVMVYKFHEDEHGEVVSECRRSDLESYLGLHYPATDIPQASRFLFMKNKVRMICDCLAPPVKVIQDETLPQPLSLCGSTLRSPHGCHAQYMTNMGTIASLVMSVTINEDDDMMDGDQQQMTRKLWGLVVCHHASPRFVPFPLRYACEFLIQVFGVQITKEVELAAQVREKHILQIQTMLCDMLLRDAPVAIITQSPNVMDLVKCDGAALYFKNKTWLLGVTPTEEQIRDIAEWLLEYHGGNTGVSTDSLMEAGYPGASILGDAVCGMAAVSITSRDFLFWFRCHTAKEIKWGGAKHDPDDKDDLRKMHPRSSFKAFLEVVKWRSMPWEDIEMDAI

SEQ ID NO: 12295 - protein, 392 aa, Hiraea fagifolia
DLEPVNPADVPVTAAGALKSYKLAAKAISRLQSLPSGNISLLCDVLVKEVRDLTGYDRVMVYKFHEDEHGEVVSECRRPDLESYLGLHYPATDIPQASRFLFMKNKVRMICDCLAPPVKVIQDKRLPQPLSLCGSTLRSPHGCHAQYMTNMRTIASLVMSVTINEDDDTMDGDQQQMTRKLWGLVVCHHTSPRFVPFPLRYACEFLIQVFGVQINKEVELAAQVREKHILQIQTMLCDMLLRDAPVAIITQSPNVMDLVKCDGAALYFKNKIWLLGVTPKEEQIRDIAEWLLEYHSGNTGLSTDSLMEAGYPGASVLGDAICGMAAASITSRDFLFWFRSHTAKEIKWGGAKHEPGDKDDGRKMHPRSSFKAFLEVVKWGSMPWEDIEMDAI

SEQ ID NO: 12296 - protein, 392 aa, Hiraea fagifolia
DLEPVNPADVPVTAAGALKSYKLAVKAISRLQSLPSGNISLLCDVLVKEVRDLTGYDRVMVYKFHEDEHGEVVSECRRPDLESYLGLHYPATDIPQASRFLFMKNKVRMICDCLAPPVKVIQDKRLPQPLSLCGSTLRSPHGCHAQYMTNMRTIASLVMSVAINEDDDTMDGDQQQMTRKLWGLVVCHHASPRFVPFPLRYACEFLIQVFGVQINKEVELAAQVREKHILQIQTMLCDMLLRDAPVAIITQSPNVMDLVKCDGAALYFKNKIWLLGVTPKEEQIRDIAEWLLEYHSGNTGLSTDSLMEAGYPGASVLGDAVCGMAAVSITSRDFLFWFRSHTAKEIKWGGAKHDPGDKDDGRKMHPRSSFKAFLEVVKWRSMPWEDVEMDAI

SEQ ID NO: 12297 - protein, 392 aa, Hiraea fagifolia
DLEPVDPADVPVTAAGALKSYKLAAKAISRLQSLPSGNISLLCDVLVKEVRDLTGYDRVMVYKFHEDEHGEVVSECRRPDLESYLGLHYPATDIPQASRFLFMKNKVRMICDCLAPPVKVIQDKRLPQPLSLCGSTLRSPHGCHAQYMTNMRTIASLVMSVTINEDDDTMDGDQQQMTGKLWGLVVCHHTSPRFVPFPLRYACEFLIQVFGVQINKEVELAAQVREKHILQIQTMLCDMLLRDAPVAIITQSPNVMDLVKCDGAALYFKNKIWLLGVTPKEEQIRDIAEWLLEYHSGNTGLSTDSLMEAGYPGASVLGDAVCGMAAVSITSRDFLFWFRSHTAKEIKWGGAKHDPGDKDDGRKMHPRSSFKAFLEVVKWRSMPWEDVEMDAI

SEQ ID NO: 12298 - protein, 392 aa, Hiraea fagifolia
DLEPVNPADVPVTAAGALKSYKLAAKAISRLQSLPSGNISLLCDVLVKEVRDLTGYDRVMVYKFHEDEHGEVVSECRRPDLEPYLGLHYPATDIPQASRFLFMKNKVRMICDCLAPPVKVIQDKRLPQPLSLCGSTLRSPHGCHAQYMTNMRTIASLVMSVTINEDDDTMDGDQQQMTRKLWGLGCCHHTSPRFVPFPLRYACEFLIQVFGVQINKEVELAAQVREKHILQIQTMLCDMLLRDAPVAIITQSPNVMDLVKCDGAALYFKNKIWLLGVTPKEEQIRDIAEWLLEYHSGNTGLSTDSLMEAGYPGASVLGDAVCGMAAASITSGDFLFWFRSHTAKEIKWGGAKHEPGDKDDGRKMHPRSSFKAFLEVVKWRSMPWEDVEMDAI

SEQ ID NO: 12299 - protein, 392 aa, Hiraea fagifolia
DLEPVNPADVPVTAVGALKSYKLAAKAISRLQSLPSGNISLLCDVLVKEVRDLTGYDRVMVYKFHEDEHGEVVSECRRPDLESYLGLHYPATDIPQASRFLFMKNKVRMICDCLAPPVKVIQDKRLPQPLSLCGSTLRSPHGCHAQYMTNMRTIASLVMSVTINEDDDTMDGDRQQMTRKLWGLVVCHHASPRFVPFPLRYACEFLIQVFGVQINKEVELAAQVREKHILQIQTMLCDMLLRDAPVAIITQSPNVMDLVKCDGAALYFKNKIWLLGVTPKEEQIRDIAEWLLEYHSGNTGLSTDSLMEAGYPGASVLGDAVCGMAAVSITSRDFLFWFRSHTAKEIKWGGAKHDPGDKDDGRKMHPRSSFKAFLEVVKWRSMPWEDIEMDAI

SEQ ID NO: 12300 - protein, 392 aa, Malpighia stevensii
DLEPVNPADVPVTAAGALKSYKLAAKAISRLQSLPSGNISLLCDVLVKEVRDLTGYDRVMVYKFHEDEHGEVVSECRRSDLESYLGLHYPATDIPQASRFLFMKNKVRMICDCVAPPVKVIQDDRLPQPLSLCGSTLRSPHGCHAQYMTNMGIIASLVMSVTVNEDDDMVDGDQPQMARKLWGLVVCHHTSTRFVPFPLRYACEFLIQVFGVQINKEVELAAQVREKHILQIQTMLCDMLLRDAPVAIITQSPNVMDLVKCDGAALYFKNKTWLLGVTPTEEQIRDIAEWLLEYHSGNTGLSTDSLMEAGYPGASALGDVVCGMAAVSITSRDFLFWFRSHTAKEIKWGGAKHDPDDKDDGRKMHPRSSFKAFLEVVKWRSMPWEDVEMDAI

SEQ ID NO: 12301 - protein, 392 aa, Peregrina linearifolia
DLEPVNPADVPVTAAGALKSYKLAAKAISRLQSLPSGNISLLCDVLVREVRDLTGYDRVMVYKFHEDEHGEVVSECRRSDLESYLGLHYPATDIPQASRFLFMKNKVRMICDCLAPPVKVIQHERLPQPLSLCGSTLRSPHGCHAQYMTNMATIASLVMSVTVNEDDETMDGDQQQMTRKLWGLVVCHHTSPRFVPFPLRYACEFLIQVFGVQINKEVELAAQVREKHILQIQTMLCDMLLRDAPVAIITQSPNVMDLVKCDGAALYFKNKTWLLGVTPTEEQIRGIAEWLLEYHSGNTGLSTDSLMEAGYPGASGLGDAVCGMAAVSITSRDFLFWFRSHTAKEIKWGGAKHDPDDKDDLRKMHPRSSFKAFLEVVKWRSMPWEDMEMDAI

SEQ ID NO: 12302 - protein, 392 aa, Ptilochaeta nudipes
DLEPVNPVDVPVTAAGALKSYKLAAKAISRLQSLPGGNISLLCDVLVKEVRDLTGYDRVMVYKFHEDEHGEVVSECRRSDLESYLGLHYPATDIPQASRFLFMKNKVRMICDCLAPPVKVIQDERLSQPLSLCGSTLRSPHGCHAQYMANMGTIASLVMSVTVNEDDDMMDGDQQQMARKLWGLVVCHHTRPRFVPFPLRYACEFLIQVFGVQINKEVELAAQVREKHILRIQTMLCDMLLRDAPVAIITQSPNVMDLVKCDGAALYYKNKFWLLGVTPTEAQIREVAEWLLEYHSGNTGLSTDSLMEAGYPGASVLGDAVCGMAAASITSRDFLLWFRSHTAKEIKWGGAKHDPEDKDDGRKMHPRSSFKAFLEVVKWRSLPWEDVEMDAI

SEQ ID NO: 12303 - protein, 392 aa, Thryallis longifolia
DLEPVNPADVPVTAAGALKSYKLAAKAISRLQSLPSGNISLLCDVIVKEVRDLTGYDRVMVYKFHEDEHGEVVSECRRSDLESYLGLHYPATDIPQASRFLFMKNKVRMICDCLAPPVKVIQDERLPQPLSLCGSTLRSPHGCHAQYMANMGTIASLVMSVTINEDDDMMDGDQQQMARKLWGLVVCHHTSPRFVPFPLRYACEFLIQVFGVQINKEVEFAAQVSEKHILRIQTMLCDMLLRDAPVAIITQSPSVMDLVKCDGAALYYKNRFWLLGVTPTEAQIRDIAEWLLEYHSGNTGLSTDSLLEAGYPGASVLGDAVCGMAAVSITSRDFLFWFRSHTAKEIKWGGAKHDPDDKDDGRKMHPRSSFKAFLEVVKWRSLPWEDVEMDAI

SEQ ID NO: 12304 - protein, 392 aa, Tristellateia africana
DLEPVNPADVPVTAAGALKSYKLAAKAISRLQSLPSGNISLLCDVLVKEVRDLTGYDRVMVYKFHEDEHGEVVSECRRSDLESYLGLHYPATDIPQASRFLFMKNKVRMICDCLAPQVKVIQDERLPQPLSLCGSTLRSPHGCHAQYMANMGTIASLVMSVTINEDDDTMDGDQQQMARKLWGLVVCHHTSPQFVPFPLRYACEFLIQVFGVQINKEIELAAQVREKHILRIQTMLCDMLLRDAPVGIITQSPNVMDLVKCDGAALFYKNKFWLLGITPTEAQIRDIAEWLLEYHSGNTGLSTDSLMEAGYPGASVLGDTVCGMASVSITSRDFLFWFRSHTAKEIKWGGAKHDPDDKDDGRKMHPRSSFKVFLEVVKWRSLPWEDMEMDAI

SEQ ID NO: 12305 - protein, 376 aa, Tristachya superba
ALSIAGAVQSQKLAVRAISRLQALPGGDVKLLCDTVVEHVRELTGYDRVMVYRFHEDEHGEVVAECRRDNLEPYLGLHYPATDIPQASRFLSRQNRVRMIADCHATPVRVIQDPGLSQPLCLVGSTLRAPHGCHAQYMANMGSIASLVMAVIISSGGDDEQTARGGISSSMKLWGLVVCHHTSPRFIPFPLRYACEFLMQAFGLQLNMELQLAHQLSEKHILRTQTLLCDMLLRDSPTGIVTQSPSIMDLVKCDGAALYYHGKYYPLGVTPTESQIKDIIEWLTVCHGDSTGLSTDSLADAGYHGATALGDAVCGMAVTYITPSDYLFWFRSHTAKEIKWGGAKHHPEDKDDGQRMHPRSSFKAFLEVVKSRSLPW

SEQ ID NO: 12306 - protein, 376 aa, Andropogon ternarius
ALSIAGAVQSQKLAVRAISRLQALPGGDVKLLCDTVVEHVRVLTGYDRVMVYRFHEDEHGEVVAESRRDNLEPYLGLHYPATDIPQASRFLFRQNRVRMIADCHATPVRVIQDPGLSQPLCLVGSTLRAPHGCHAQYMANMGSIASLVLAVIISSGGDDEQTGRGGISSAMKLWGLVVCHHTSPRCIPFPLRYACEFLMQAFGLQLNMELQLAHQLSEKHILRTQTLLCDMLLRDSPTGIVTQSPSIMDLVKCDGAALYYHGKYYPLGVTPTESQIKDIIEWLTVCHGDSTGLSTDNLADAGYLGAAALGDAVCGMAVAYITPSDYLFWFRSHTAKEIKWGGAKHHPEDKDDGQRMHPRSSFKAFLEVAKSRSLPW

SEQ ID NO: 12307 - protein, 736 aa, Agrobacterium tumefaciens str. C58 (U. Washington)
MSSHTPKLDSCGAEPIHIPGAIQEHGALLVLSAREFSVVQASDNLANYIGVDLPIGAVATEANLPFISVLSAWYSGEESNFRYAWAEKKLDVSAHRSGTLVILEVEKAGVGESAEKLMGELTSLAKYLNSAPSLEDALFRTAQLVSSISGHDRTLIYDFGLDWSGHVVAEAGSGALPSYLGLRFPAGDIPPQARQLYTINRLRMIPDVDYKPVPIRPEVNAETGAVLDMSFSQLRSVSPVHLEYMRNMGTAASMSVSIVVNGALWGLIACHHATPHSVSLAVREACDFAAQLLSMRIAMEQSSQDASRRVELGHIQARLLKGMAAAEKWVDGLLGGEGEREDLLKQVGADGAALVLGDDYELVGNTPSREQVEELILWLGEREIADVFATDNLAGNYPTAAAYASVASGIIAMRVSELHGSWLIWFRPEVIKTVRWGGDPHKTVQESGRIHPRKSFEIWKEQLRNTSFPWSEPELAAARELRGAIIGIVLRKTEEMADLTRELQRTNKELEAFSYSVSHDLRAPFRHIVGFAQLLRERSDALDEKSLHYLQMISEAALGAGRLVDDLLNFSQLGRTQLTLKPVDMQKVVSEVRRSLSHAVSDRQIEWRIGALPVIFGDPTLLRQVWYNLIENAIKYSSREPVSIITISAVETEDDVTYSVEDNGVGFDMAYYNKLFGVFQRLQRVEDFEGTGIGLALVRRIVERHHGLVGAEGTVGEGATFSFTLPVTKVEEEKIA

SEQ ID NO: 12308 - protein, 745 aa, Agrobacterium tumefaciens str. C58 (Cereon)
MQRERLEKVMSSHTPKLDSCGAEPIHIPGAIQEHGALLVLSAREFSVVQASDNLANYIGVDLPIGAVATEANLPFISVLSAWYSGEESNFRYAWAEKKLDVSAHRSGTLVILEVEKAGVGESAEKLMGELTSLAKYLNSAPSLEDALFRTAQLVSSISGHDRTLIYDFGLDWSGHVVAEAGSGALPSYLGLRFPAGDIPPQARQLYTINRLRMIPDVDYKPVPIRPEVNAETGAVLDMSFSQLRSVSPVHLEYMRNMGTAASMSVSIVVNGALWGLIACHHATPHSVSLAVREACDFAAQLLSMRIAMEQSSQDASRRVELGHIQARLLKGMAAAEKWVDGLLGGEGEREDLLKQVGADGAALVLGDDYELVGNTPSREQVEELILWLGEREIADVFATDNLAGNYPTAAAYASVASGIIAMRVSELHGSWLIWFRPEVIKTVRWGGDPHKTVQESGRIHPRKSFEIWKEQLRNTSFPWSEPELAAARELRGAIIGIVLRKTEEMADLTRELQRTNKELEAFSYSVSHDLRAPFRHIVGFAQLLRERSDALDEKSLHYLQMISEAALGAGRLVDDLLNFSQLGRTQLTLKPVDMQKVVSEVRRSLSHAVSDRQIEWRIGALPVIFGDPTLLRQVWYNLIENAIKYSSREPVSIITISAVETEDDVTYSVEDNGVGFDMAYYNKLFGVFQRLQRVEDFEGTGIGLALVRRIVERHHGLVGAEGTVGEGATFSFTLPVTKVEEEKIA

SEQ ID NO: 12309 - protein, 850 aa, Agrobacterium tumefaciens str. C58 (Cereon)
MASTDYHVDLTNCDREPIHIPGYIQPHGCLIACDNAMRMVLRHSENCGELLGLEGDLNGRTAEDVLGKKLVHDLRNALTVTGRTTRPAMLPAMETSDGRSFDISLHRYKSTTIIEFEPSGSDAQPLGTARKMVDRIREADSVESLISRTTRLVKATLGYDRVMIYRFQEDGAGKVVSEAKQPELESFLGQYFPASDIPQQARALYLKNTLRIISDASGTRIPVLPAVDVSGEPLDLSYAHLRSVSPIHCEYLRNMGVAASMSISVIVDGALWGLIACHHYSPRVLSMPVRIAAEMFGEFFSMHLQVLKQKRRLDTINHAHAALDRFLRLAAHHANIEELLVDSFQDFADLMPCDGVGLWVGNNWHGHGATPPHDAIPRLARFVASASEGRVWATHALSQAIPEAEIYAGTAAGMLAIPLSQVKSDYLLFFRKEIVQNLNWAGNPEKSYETGPMGDRLTPRKSFAIWKETVRLQAQPWSEADREIAEAARIALVEVAFHHSELMAGERERAEVRQRMLNEELNHRVKNVLAIIKSLVGNPSQEGKTLQEYVTALKGRIQALSFAHDQIIRGEGGGALRDLLEAELSPHRSPETTVKLEGPQITLDSRAFSVMALVLHELATNAAKYGALSQNGGQLHVRWDVNENRDCEISWRETLLTTLPAPSRAGFGTALISRSIPYDLGGRSTIRYLPNGLEAEILLPFRHVSSVSAAFETKTEAETLPQPRRYNREEPLKVLLVEDQMLIAMDVENMLEDNGIKAIETATSSAMAIEKLKTYLPDVAILDINLGSDTSIPVARELHRRGIPFLFATGYADGSMVPDEFGAVPVIRKPYDEDALMAGIGVLVGDTERV

SEQ ID NO: 12310 - protein, 929 aa, Yersinia pestis KIM
MTLLMGVTLTVIWLILIATTAFFSYENTRQILINELTHMASMRADLSNHQFEGAERDAASLISRRESLQSTSPLPEISIKHYDSYYIPFNLDSCNINQHKNDLWIIQAYGTAGQTYYLDSFIIKQKEGIVLFPPQKSSSDYLNQRRKDLLLLPKFPTHNNIYWGAPTYTPQGGWHVSVAVCDKVGTLAGFALKLNDLIAYNHPVEQRDINLLLDKNGELLPISQQATSSNQLHEILNQLKNSKLHDGWQQTPDYLVLRTQLKGPGWQQLVIYPRMGFAWEALKPALYQLPFALAILLLLTSVLSLLLRYYLAIPLWNFINIIGATGPQAMEPRLPINRIDELGHIARAYNNLLDTLNEQYDTLEMKVKERTLALAEAKRAAEQANRRKSDHLTTISHEIRTPLNGALGAVELLQNTPLDAGQMRLAETAHQCSLSLLAIINNLLDFSRIESGQMTLSLEKTALLPLLDQAMLTIHSQALSKSLALSTFISANIPLELELDTLRLRQILVNLLGNAVKFTPQGRIQLRVRRQNQTLCFTVEDTGCGIDVQHQQTIFQPFMQTSDHEQGTGLGLAIADNLAKMMGGHLTVFSEPGQGSCFSLCLPFNAITPPMPFHGELFAPQRLHAQLSAWGMTCQPELANQPSRHFVDNALCYLPGRLYAKLKQYLQGAETEALKSLPLQPWQMHILLVDDSETNRDITGMMLQQLGHQVTRADSGTTALAIGRQHRFDLVLMDIRMPVLDGLATTARWRHDPANIDSHCMITALSANASPDEQIKTSQAGMNHYLSKPVTLGQLAEMLDLTAQFQLERGVDLSPQLSEPQPLLDLADSALSLKLYQSLQVLIQQAKDAIENLPVLSHTLHTIKGCAGQAGLIELQDAVIQLEHALDTHETLTQQEIIQLDEIIHVLLQPPTTCESTFIISQGQSLMVK

SEQ ID NO: 12311 - protein, 296 aa, Magnetospirillum magnetotacticum
MTMPRDGSRRRCWPKTSGGATMADARDIDSLSAIVTEAIATISGFERVLVYRFDTDGCGDVVGESLAPDWPQSFLGLRFPDTDIPAQARALYRQTADRWIPTRDYVPVPLVPAANDRDRPISLALSRYRSVSPIHRMYQGNIGVDGSMSISVMRDGELWGLIIGHHRKPHRVPVAIQHLIVALGRAFSLRLDSLLNYTAKVDQEREMQAFSAMLGKLAAADDFLMALTEGKPNIVDLLPGCVGAAVVWESDHEPLHLRALGVTCRGLPVAPGWGGGRVRRPVMAVSTAQPKTLIYC

SEQ ID NO: 12312 - protein, 1043 aa, Magnetospirillum magnetotacticum
MEEELRAANQESRRQAKAHLQAILNTVGEGIVIADQTGTVVSVNPALLSIFGYERDEVIGNNIDMLIPLAALKAAGSSGMERIFDLGRESMALRRGGTSFPIELAAGDLTPTGSAQFVVIMRDISERKRIEREMAESEERFRDFAQSTSDWFWEMGPDLRFTGFSGQFTEHTRALPSHYVGHTRDEMISDDTPMEARLQNLADMEARRPFRDFVYHTKNMDGPGRFLRVNGKPVFDPSGEFKGYRGTASDITEEIEAADRLKASQAEIERLAERNNSILESVDDGIVGIDLNGRATFVNRAAAKLLDFEPAELVGSDILPLMALDMETAESLYQILLRLADSIRDDTASFKRRDGSPLPVEYIASPVMDKGNQVGVVLGFRDITQRRLVERQLREAKEAAEAGNRTKSEFLATMSHEIRTPMNGVIGMTGLLLDTKLTEEQRHFAETIRDSGESLLTVINDILDFSKMEAGKLDLDYTEFELVPLVESVVDILAPRAHAKGIEIASLIDPRLRMLVRSDPGRLRQVLMNLGGNAVKFTEKGGVSIEVTLLERPGAQPMVHFDVRDTGIGIPPEAQGRLFSMFMQVDASTARRYGGTGLGLAICRRLAELMGGEVGLESQPGKGSRFWMSVPMELLAPQSAAPPDLTGHRVLVVDDNPVNCDVIERQLRAFGVEVHACLDAGSGMGELTRAAAMGTPWEVAVIDSQMPVVTGSEMVRMMRAIPMLGGSRIIVTSSQGMPAEQQDGQPAIDAFLHKPLRQSTLLDTIGRVLGLSGPEEQPAAPAEEHNAPDSTAKRLRILVAEDNPVNQQVALGLLRKLGHTVDVVGDGAEALEAVRLLPYDVVLMDVQMPEMDGLEATRAIRSLASAAARIPIVAMTANAMRGDDQMCFDAGMDGYISKPIDRHKLAEALAKYSGAPEPKPAEPTSAQDSKAVDLDVLDALAADIEADTVVEILVKFMEDARTRHANAAVAAPEGDLEKVRREAHTIKGAAASLGLMAVRDACLALEQAARAGEGVAPLVVQLHDRIEALPGQLSTTAYALPPS

SEQ ID NO: 12313 - protein, 478 aa, Magnetospirillum magnetotacticum
  unsure (1)..(478): unsure at all Xaa locations
MARYRALRPVEGERQANRRVPQDRCQPXXXRIQSLKKKGAPELVKQGLLGLDCRYLNHAPQCTGWMDLTSQGGSGSFEISWSGLWKLTTAATIPYYTGPYGKSQRGFGFVTIGANVDDFHAAASREKEHTDQILALRNRDLEAQYNAVMALITSQVESLARELSISTVIMIALVVGIAVWMASFLTRRITAVVGGIHRFSEQETEYRLPVQGHDEMASLAISFNQMADRIGESFVRLDEARKRAEEASRMKSEFLANMSHELRTPLNGIIGFSELIRDEAADDETRENADIIEKSSRHLLELVNSILDIAKIEAGAMTLAVQDVKLAPLVAEAASVHHSAAQAKGITLSSQVSDNCPETIRADPLRLRQIIHNLLSNAVKFTEKGEVSLSVELEPGHLIFRVSDTGAGIPEGMLHAIFEKFRQVDSFLTRSHSGTGLGLTLARHLVELMGGTIGVQSTVGKGTVFHFTLPLHQPESSS

SEQ ID NO: 12314 - protein, 1000 aa, Methanosarcina acetivorans C2A
MCGLKKRLFIDCYEGESIEEIRGKKRADREETEVQEKSHLEEKLVRLEWQADSAVTGLITMDFDGTLSYVNPFFVRMWGYGSAEEPPGRQVSELWASPAEFLQAERECREKGEWIGELQARRRDGTFFYVHTSLSLIRNREGLPLGISGSFVDITRLKQVEEELRNRTLELSEAKARLDLALEATEMGTWDWDVLTNGMTWDDNLFRLVGISREEFLQTHDSLLELSNRILSPEDNRRMLEVMQAVADGKTDSYEFEHDVLRPDGTVRHFLVKGRAHRDSEGKLLRVTGTTTDITDQKIAEDALRRSEANLARSQAMAHLGSYSFDAHTGEIYWSEELKTIWDYDPGPNYSFETVISRIHPEDRKRILEALKNAGQGKHPFNSEYGILKPDGSIRYVHDQGEISLDGNGVPVRMFGTLQDITHRKLMEEQLLKAKEAAESANKAKGDFLANMSHEIRTPMNAVLGMLEMLLETSLTDEQREYLQLAHASAESLLSIIDDVLDFSKIEQNKLELEQISFELESLISHIINLLSGKAGSKGLKLAFHIEKDLPSTFIGDPVRLKQVLFNILGNAIKFTKKGEIALSVEVYMPSERNSGLSNSDFPEEVALLFKVKDTGIGIPPEKLSQIFDPFIQADASVTREYGGTGLGLAISSQLVELMEGRIWVESEVGKGCTFYFTVRVKRGESSENYGQGNNIPEESLLVCMEAKESYGNGITSGESLNVLFAEDHPINQKLILGLLEKKGHKLTLVTSGKDALDALSRRDFDAVLMDIQMPGMDGLEATRRIRDPSSGVRRHNIPIIAFTARALKEDREKCFEAGMNYYISKPLKKEKLLNILEDIRVGKNTREKTARERTVQDRIVQEKNIQERAATPLDLESIAFDFPEDQVFNLEEVLERTEGDEVLLKEMVKIFLGMAPELLDSINSALRKGEAEALRENAHILKSAAGSIGANRVFRVAYYLEQVGRRDRMELASDKFEEIKARFKELEPVLVRYLEKQIC

SEQ ID NO: 12315 - protein, 887 aa, Methanosarcina acetivorans C2A
MKKSNELIFILVLGFIFTLVASNYNLFESVVLFVEEYNLDGLGLLLILSIYTSFGMGIFSLGRWMELENTLTLYRKAEEDLREKDQMYRALFEMSNDAVIISDGKKVLDINNKGCEIFGFREERPLNVSLISFIPPEYLSELQQALKETFKQASSCFEMRYQKAEGEIVDIEVSLSLIDRNNNIIHIVAQDITGVKNAERLEQENRERFKTVLDNTLCSILLIEASSRKIVDANPVALKTTGYSEKELIGMVCSRLICQAGEERCNVPSLDPAGELSESILFKAGGDKISILRNVVPVSIGGNGYFVESFIDLSERKKVEEELLQAKLAAEGANRAMSEFLATMSHELRTPLTAIIGFSELMLGEATGEFDELNRKFLGHISNSGKHLLSLINSVIDLSRIEAGKMDLEPDFFSLYDIFADTKSISSPLALKKNISMDFNVESDFLIYADRTRFKQIMYNLVSNAIKFTPAGGSVEVVGRRSENRIRVTVSDTGIGISQDEIKHLFKPFKQINFALSREYESTGLGLVLSKNFVEMHGGRIWVESEPGKGSTFTFEVPVEILNSGEKMKIPEICGINGANNFEIPAETGEAGNSEIGSQTEKSEEKDFVEIFEPEGSDGSEPLVMIVEDDKLSRELLIFTLKEAGYRVVRALSGKQALSLAQKLNPFVITLDLMLPEMNGWDVLKNLKKDSETAGIPILLLSIDERDECNMVWGAFDHLVKPVEKSILLSTLERLNKKTKKGSPKILIADDQEDMVELMVSLVKEEGYIISRAYGGKEAIDKALTELPDAIILDLMMPEVSGFEVIRTLKKDPETVDIPVIVCTARDLSAEETELLNSNVSVVMQKEDLNKQILMQLIRSLESREEGCRTCILSAPREDRSFCKAEE

SEQ ID NO: 12316 - protein, 869 aa, Leptospira interrogans serovar lai str. 56601
MNIFKIESQSSGFFAIIHLTIKKELLSKMIKSLRISCIFFILISFLTFLLNCSQFKQNNPIASNGVIDLSTWNPNIESINLKGNWEFCWDQWIPPNAEESQWKENCNGFYPAPAYWKFYNIPGKNLSPFGKATYRLKVILPTSFHDSYGIRWTEILSAFQIFINNKSVAQIGVLGTDFNTMTPKLKPDRTEIGPQNNQMTIVIWVSNFNHQNHGFWQPIYLGKWEIIRNTQVSHLMMDIASFASVALIGFYHLVLFLFRTRSKEYLFFGLFCISMGIRQLSVEDHAFIIFFPDIDFDFYIRFIYFTVLSIGIFMCMFIKSLFPEEVSSFFINSAIGVFGCSSFTLALPVRVFTEFFSIIFVLISFLPLGLTTYLFKAHKMKRKGATLILIAYLIFSTVVLNDILFTLGYISTGYISYIGITVFIFFQAGVLAQQLTQAFNHSEDLALELKSTLQENIETHNELLALKELQNTNLEFQVQSRTRELLKARDDAEFANKVKSQFLASMSHEIRTPLNGIIGLIEQFKSTPLDESQQHIRNLIQKSGENLLKIINDILDFSKLEEDKINLELHEFYWKETVEETIGIFLYQATQKGLVLSVDYSPDFIDKSVGDKRRITQVLSNLISNAVKFTDSGKIQIRAFSEKIETKIEYKIQVIDSGIGIPREKIDLLFQKFFQLDSSISRKYGGTGLGLAISKKLVELMNGKIHVSQNKSKGSTFEFTVLLSEFVSKDHSTYLPEITDLSSLSPDTFILIAEDDSTNIFLLSGILKKLKIKFELAKDGLEAITKVRVSRFDLIFMDINMPHLDGISASNFILTDPMISPKPVIIAVTADVLQEDKIKCRQAGMSDFLGKPYYKKDIEQMIYKWLVIH

SEQ ID NO: 12317 - protein, 634 aa, Xanthomonas campestris pv. campestris str. ATCC 33913
MSTATNPLDLDVCAREPIHIPGLIQPYGVLLVIDPADGRIVQASTTAADLLGVPMAALLGMPYTQVLTLPEAQPFAVDDQPQHLMHAEVRFPQRATPPDSAWVAAWHLYPQQWLVEMEPRDARLLDVTLREAMPLLRSVERDPGIAEAAVRVAKGLRSLIGFDRVMIYRFDEEWNGDIIAEARKPELEAYLGLHYPASDIPAQARALYLRNRVRQIADVGYQPSPIQPTVHPQLGTPVDLSDVSLRSVSPVHLEYLANMGVTATLVASIVVNDALWGLISCHHYSPHFTNHAMRDVTDAVARTLAGRIGALQAVARARLESVLLTVREKLITDFNDAEHMTVELLDDMAPDLMDVVDADGVAIFHGNDISRHGTTPDVAALRRIRDHIESEHHDALREDAVGALHVDAIGEVFPELADLAPLAAGFIFVPLMPQSRSALLWTRREQIQQIKWAGNPQLAKLEDIPNSRLSPRKSFDLWQQTVRGRARRWSPLHLESARSLRVLIELMERKRFQQDFTLLEASLSRLRDGVAIIERGTANAAHRLLFVNTAFADVCGSDVAELIGRELQTLYASDAPRANVELLQDALRNGRAAYVTLPLQVSDGAPVYRQFHLEPLPSPSGVTAHWLLQLRDPE

SEQ ID NO: 12318 - protein, 1364 aa, Xanthomonas campestris pv. campestris str. ATCC 33913
MPHGRWDLRRKYGRRASIGAVLLLSAGLIAAFLVGFAVHRHNELERERRFDMVVRVLARNISERMYTFEHGLRGARGAVIGAGSDVISRDRFTRYSRSRDYPREFPGVLGYGYIHRVAAADEAAFLDAARADGAPDIQRRLLAPWDGERFIVLYFEPESSGNRPLGLDVASEPRRRIAAIAAARSGQPTMTSPVSLSGYQTPSEGGFLVLLPVYREGMPLQTPQQRMDATTGWAYAPLSVKQMLESTLGDRDDVAISLSDREDTQHTFYRSGIAAPESMRRAAHTQLLPIYGRTWVLTARPTLHFIGSLNQNSPWLMGSLVLGTAILLAALLGLYFSNGLRREEVLRKQMELAALVSHSSEAIVAETPDGEITHWNPAAEAMFGYPADVAIGQDLTTLLSPQPYAMPQIDQDEAPPVAALSAAQTMRHRDGHQVFVLASKAPIIEHDNAVSGHSHFFRDISERVRSHQRIVDLNASLEHQVAERTSELVQFSVLQRAILAHAGYAIIATDSSGFVTMFNPAAEKLLGYSADDVIGRRKASQFIEADELQERALRLAEQTGTPVAGTLEAVAALTSLGRSDTSEWTYVSQDGRRLPVLLTLSTLRDDNDQVIGYLGVAVDLTEQKLHEKQLRLAMDAARSANQSKSDFLANMSHEIRTPMNAILGMLYLLQRSELPGAAQDMVTKIDRSARSLLEIINDILDFSKIEAGRIDLERAPFDLNQLFDNIADLMRSSLSAKPVEMIVEPLPRECRWLLGDALRINQVLVNLVGNAIKFTEQGEVVLSVRRFPSGDPNKIKLLFSVRDTGIGISKEKQSLIFSPFLQADTSTSRRYGGSGLGLTISRRLIELMGGALEVESVPGRGSEFYFVITLERTDPPKAQQEAALLPPESMPRVLIADDHDAALNNLVRIATELGWRVDAVASGQAAMQAIEDATEPYDIFLLDWRMPDIDGVAIARQVRARATPGRHPVIVMVTAYERRLLEQHPEQQDLDAVMTKPVTSAALHRLVEQLVDERPNARPATPTFVARRLEGAQLLLVDDSEINCEVAQRILEGEGAMVTVAHDGEQAVNTLKRAPDLFHLVLMDVQMPVVDGYEATRRLRQIPSLASLPVIALTAGAFRPQQEKALEAGMNGFIAKPFNVEELVTAIRHFLQPGSRRVSSLPHERAPAAGPEWAHTDPLLLDAARAQSLWREREPYERYLLKLLRDNPDPAETAAAHLRNNELPAIGALAHKLRGAAGSLALPALAGASGDLESRVEQGHDLTAALLALKDTMAQTTAAIHAFLQTSPSTQDTGQTGAALDDDSALILENALRSDDADKIDHALLICAPRLPPPLQEDLQRAVDDFDFRRAEATLRDWQANHPR

SEQ ID NO: 12319 - protein, 767 aa, Xanthomonas campestris pv. campestris str. ATCC 33913
MAARAGGLRGWSTLVALAALVAASAAALQWLGVAGPWRIVTTAASVLALVCGICTAVAAYRASRTLSALTRQLDDTNTAQARMQQELQRHGELEQELLRAKQAAEAASLAKGEFLATMSHEIRTPLNGIIPMLELISRGQLSLDQRDMLQTATGSSLQLLRIVDDILDYSKLEANKLELEITTFNLRELLDGVAQLMQRTAEGKQLRLGLDIEPSVRLLVRGDPIRLRQVLGNLIGNAIKFTERGSVDIQLRRLGETRAQHLLRFQVRDTGIGIAADQQARLFRSFAQADASTTRLYGGTGLGLAICKRIIDLMGGRIGVESEPGRGATFWFEIPLLKVIGDLQQTTGADAARVMVISSDARLSQRLKRLLDSWGISHVLMETTQEALERVRRHTDDEGFRCVIADHETLRYSARAVHRALARPEDLSGSRLIWLYGDEPVPDELQANATLVPRQSPDETLRALVLPPEPKPSVAPTLASAMIPEPLPPPVAHARDVRILLVEDNPVNLLVAQKLLGVLGFEADTATDGEAALSSMESTRYDMVFMDCQMPVLDGYAATRRWRAMETESGGRPIPIVAMTANAMAGDRERCLAAGMDDYLSKPVAREQLNACLQRWLPRQALLPGPSTGAPSADAESAASAAQARALPILESGVIDELYEVAGADTIRILQLFLEDAPGIIEGLEAAASNRDSMHLRDLAHTLKSSSANVGAQALANAARRIELAARTGTIERPSVMVALVIAEYARARLALLGQVTRLQAASRAAG

SEQ ID NO: 12320 - protein, 634 aa, Xanthomonas axonopodis pv. citri str. 306
MNQPTEPLDMDVCAQEPIHIPGLIQPYGVLLVIEPADGRIVQASSTAADLLGVPMDALLGTPYTQVLELPDAQPFAVDDQPQHLLHADVRFPQRSAPTDHPWVAAWHLYPEQWLVEIEPRDARLMDVTLREALPLLRSIERDAGIDEAAVRAAKGLRSMIGFDRVMVYRFDEEWNGDVIAEARQPELEAYLGLHYPASDIPAQARALYLRNRVRQIADVRYQPSPIQPTLHPRLGTPVDLSDVSLRSVSPVHLEYLANMGVSATLVSSIVVNDALWGLISCHHYSPHFTSHAMRDATDAVTRALAGRIGALQAVGRARLESVLLTIREKLITDFNDAEHLTVDMLADMAPDLMDVVDADGVAIFHGNEISRHGSVPDAEALRRIREHLESEHHDALREDAVGALHVDAIGEVFPELADLAPLAAGFIFVPLMPQSRSALLWTRREQVQQVKWAGNPQLAKLQDIPNSRLSPRKSFDLWQQTVRGRARRWSPLHLESARSLRVLIELMERKRFQQDFTLLEASLSRLRDGVAIIERGAKGAAHRLMFVNPAFAELSQTEVADLIGCDILALLDDDAARGKVELLEEALRLGRAAYVTLPLRTRDGAPVYRQFHLEPLPSPSSITAHWLLQLRDPE

SEQ ID NO: 12321 - protein, 769 aa, Xanthomonas axonopodis pv. citri str. 306
MRERAAGLRAWSILAVLAALAAALGAGLQWSSLQGPWRAVSAVSAALAVVCGLCAAFAAHRAAHAQHALAQRLEEADLARERLQQELRRHGELEQELLRAKQAAEAATLAKGEFLATMSHEIRTPLNGIIPMLELISSGQLSLDQRDMLQTATGSSLQLLRIVDDILDYSKLEANKLELEITTFNLRELLDGVIQLLQRTAEGRQLRLSLDIEPSVRLLVRGDPIRLRQVLGNLIGNAIKFTERGSVDIQLRRLGETRAQHLLRFQVRDTGIGIAPDQQARLFRSFAQADASTTRLYGGTGLGLAICKRIIDLMGGRIGVESEPGRGSTFWFEIPLLKVIGDLQQATGADAARVMVISSDARLSQRLKRLLDSWGVSHVLMETTQEALERVRRHSDGEGFRCVIADHDTLRYSARAVHRALARPENASSARLIWLYGEEPVPAELQDHATLVPRLSPDETLRALVLPPEPKPAHATTLASAMIPEPLPPPMANAREVRILLVEDNPVNLLVAQKLLAVLGFEADTATDGEAALARMESTRYDMVFMDCQMPVLDGYAATRRWRAMETESGGRPVPIVAMTANAMAGDRERCLAAGMDDYLSKPVAREQLDACLQRWLPRQALLPGPSPAGQATHDPESASAAAQARALPILDNSVIDELYEVAGADTITILQLFLEDAPLIIEQLEAAAANRDSMQLRDLSHTLKSSSANVGAQAVSNAARRIELAARTGTIERPSVMVALVIAEYARARLALLGQVARLQADASTTNH

SEQ ID NO: 12322 - protein, 1191 aa, Xanthomonas axonopodis pv. citri str. 306
MRVLIVVLAVLLAIWPCAAKIPEVPRFRIVGPSEGLPSTMVVAIGQDRAGYLWLGTLDGLVRYDGAGFRTWRHDPADPGSLPCNAVQALHIDALDRVWVGCGKTLSVLDAGRGHFRHYRAADYPLLKDGEIFSIAAFDGGIWAGTTTGALVRIDASGGMSSVDLGGIEGALDRAMVMNLAVDNQHRLWIGTSNGLAYYDGKQLHRQFIADEPNRQSSIFGLQWTGDRLWLGSESGLHVLRADGHWQPLAWSTMFGNGNEFWGAVATPDGEFWLGSGRGLWRTRGERPPVPALSGEGPLSRRNVIGLMGAADGGLWVPMHGTGLGYLPADWKRSAVLKPAVPMGDAIYCNLAPARRSGGLWQVDAQGRLLRVDPSTGDSFQTGLQSPQLKGMELVSALEDRLQRVWLGNLTFGLSRMDLRTGDFVHWPSDGPEPSSSLSAPEWIMEHGDTVWMAFIDMVQQRDLRTGKVLQRMTQQDLHGLRAIDIQQLDQGPDGRVWVAGEGGMFAWDDATGRFVPVAGLEGMPIQAFASQSADTLWVYRASGAEQWQKLAAGWKRVRQVGEADGLNGFDASAMRIDPRGRVWISSLRGLWRIDPSVHPARVRNIGTRDGLTSQEFIQHCLLMSGDTLIGATSDGSTVLLDTAMPDVAPFVPALQLEHVSVLRNGARIALPMDRPFQLGPEDRQLQIVTRLLSYSDPLSNRYRSFLKGFDTDWQTIGNTGIREFASLPAGNYELALQGIDPLGNRSQVRSLQFSVRPPWWRSEIGIALICFSGLLLSALLAAAYRRRIRMRAQWQLAQHKRELAEQASLAKTRFLATLGHEVRTPMTGVLGMSELLLQTPLDGRQQGYASAIQLAGKHLLRLVNDALDLARIEAGKLPLDYRDFDLRQLVGQAVELVRPSAEQKQLAFHCELDDALPPALHGDASRVQQILLNLLFNAVKFTERGSVHLRVTTLSQHTRQGLRVEVRDTGPGMSAEQRGRLFQRFEQAEGALTLARHGGSGLGLAICRELAAAMGGAVTVASELGQGACFVVELPLHWVSTLPTVTPPAVRAPSLREQAPLQLLLVEDDATVAQVIVGLLQARGHHVTHALHGLAALAEVSTRSFDAGLCDLDLPGLDGAALVAQLRARGVRFPIVAVTARADTDAEPQAMAAGCNGFLRKPVTGELLAQALARVLADVDDGQRDNVAVDA

SEQ ID NO: 12323 - protein, 653 aa, Caulobacter crescentus CB15
MNAATLVDTHAVDTALQEAFEAAPEGFALFDAEDRCVIWNARYGELWSKWGVTLAVGATFESLLLAGLAAGRFPEANGDRAAWLAHQLGRRKLDRIEEIREEFGEYLRFESRRTPAGGLITTCANLTNLRRREAQALAARSFLDTIVENTPAMLFVKDGDTGAFLLVNRAAENQLGVPRAELLGKSDYDFFPKEQADAFAADDRRVIASGKLVTIDEEPLDTPHNGRRWLQTRKIAIPGEDGRRHLLVICEDITERKAGAAALAEALQKAEAGSVAKSEFLANMSHEIRTPLNGVIGMAEVLSRTALDDAQREMMEVILNSGRALNLLLSDILDLSKIEAGGLELSRDPLDLREAITAAVAVFKAVAESKGLVFRLTFADDFHDHVLGDALRVRQIVANLTSNAVKFTTAGSVIIEARTLVAEDGRIDLTVSVQDTGEGFDEDSADRLFERFQQADGSVTRKVGGTGLGLPIARRLARLMDGEISCVAHPGEGATFVFEALFLADGQRTPAASADPAGELALDRRLRVLLAEDHPTNQKVIGLMLADAADVTVAEDGQAAVEAFEKHAYDVVLMDTQMPVMDGLAAIAEIRRREREAQARRTPIISLTANAMPHQVRACLEAGADLHLAKPVSIQGLFATLGAALETRPGGEG

SEQ ID NO: 12324 - protein, 392 aa, Madagasikaria andersonii
DLEPVNPADVPVTAAGALKSYKLAAKAISRLQSLPSGNISLLCDVLVKEVRDLTGYDRVMVYKFHEDEHGEVVSECRRSDLESYLGLHYPATDIPQASRFLFMKNKVRMICDCVAPPVKVIQDERLPQPLSLCASTLRSPHGCHAQYMTNMGIVASLVMSVTVNEEDDMVDGDQPQMARKLWGLVVCHHTSTRFVPFPLRYACEFLIQVFGVQINKEVELAAQVREKHILQIQTMLCDMLLRDAPVAIITQSPNVMDLVKCDGAALYFKNKTWLLGVTPTEEQIRGIAEWLLEYHSGNTGLSTDSLMEAGYPGASALGDAVCGMAAVSINSRDFLLWFRSHTAKEIKWGGAKHDPGDKDDGRKMHPRSSFKAFLEVVKWRSMPWEDMEMDAI

SEQ ID NO: 12325 - protein, 392 aa, Microsteira sp. Davis et al. 38-01
DLEPVNPADVPVTAAGALKSYKLAAKAISRLQSLPSGNISLLCDVLVKEVRDLTGYDRVMVYKFHEDEHGEVVSECRRSDLESYLGLHYPATDIPQASRFLFMKNKVRMICDCVAPPVKVIQDERLPQPLSLCASTLRSPHGCHAQYMTNMGIIASLVMSVTVNEEDDMVDGDQLQMARKLWGLVVCHHTSTRFVPFPLRYACEFLIQVFGVQINKEVELAAQVREKHILQIQTMLCDMLLRDAPVAIITQSPNAMDLVKCDGAALYFKNKTWLLGVTPTEEQIRDIAEWLLEYHSGNTGLSTDSLMEAGYPGASALGDTVCGMAAVSITSRDFLLWFRAHTAKEIKWGGAKHDPDDKDDGRKMHPRSSFKAFLEVVKWRSMPWEDVEMDAI

SEQ ID NO: 12326 - protein, 392 aa, Sphedamnocarpus sp. Davis 3-01
DLEPVNPADVPVTAAGALKSYKLAAKAISRLQSLPSGNISVLCDVLVKEVRDLTGYDRVMVYKFHEDEHGEVVSECRRSDLESYLGLHYPATDIPQASRFLFIKNKVRMICDCLAPPVKVIQDERLPQPLSLCGSTLRSPHGCHSQYMTNMGTIASLVMPVTINEDDDTMDGDQQQMTRKLWGLVVCHHTSPRFVPFPLRYACEFLIQVFGVQINKEVELAAQVREKHILQIQTMLCDMLLRDAPVAIITQSPNEMDLAKSDGTDLYYKNKTWLLGVTPTEEQIRDIAEWLLQYHSGNTGLSTDSLMEAGYPGASALGDSVCGMAAVSITSRDFLFWFRSHTAKEIKWGGAKHDPDDKDDLRKMHPRSSFKAFLEVVKWRSMPWEDVEMDAI

SEQ ID NO: 12327 - protein, 315 aa, Stellaria longipes
MGLHYPATDIPQASRFLFKQNRVRMIVDCHADSVSVVQDERLRQPLCLVGSTLRAPHGCHSQYMANMGSIASLVMAVIINGNDDEGSTRNAMRLWGLVVCHHTSPRSIPFPLRYACEFLMQAFGLQLNMELQLSAQVLEKRVLRTQTLLCDMILRESPTGIVTQSPSIMDLVKCDGAALLFCGKYYPLGVTPTELQLKDIVQWLLSNHGDSTGLSTDSLADAGYPGALALADAVCGMAVAFITRSDFLFWFRSHPAKEIKWGGAKHHPEDKDDGRMHPRSSFKAFLECGSYKPELAWENAEMDAIHSLQLILRDS

SEQ ID NO: 12328 - protein, 902 aa, Clostridium thermocellum ATCC 27405
MDCRVKNEVRDDLNVNLEVMVAGNDEEFAASLKNALLDVGCKHSVKSAATFNEFKNYLRKNNFHIVFFDCSSDISFADVMESFENLKKEMPVVAVLEEDGSRHGFEMIKLGACEYLEKKDSSRLRSIIFKRCRELERERERIRFEKRLKEENERLLTTLESIGDGVIVTDKAGCVIMMNKAAQELTGYLSCNSIGKPLSEVFVIINGVNREPEPDPYERVLSERKTVGLRKNTMLVSKDGTLRYVSASTAPIKSSDREIMGVVVVFRDITRIRKAEEKLQKLSQAVEQSPGIIVMADTRGNIEYVNPRFTEVTGYSFDEVKGKSLFFMELEENGEEKCKDMIQAVFSGKEWRSEIRHKSKNNVVFWEYAYYSPIINSEGVVTNYLKVSEDITERKLMSENLFKAKEAAEAANRAKSEFLANMSHEIRTPLNGIIGMTNLTLQTELTDEQRENLNIVNSCAELLLRVINDILDYSKIEAGKMTLENVKFDFFNLLEKTYKAHIVQANEKGLRLSYTVQKGIPRILVGDPGRLQQVLNNLISNAVKFTDIGEVRIDVDIIEKRDDSVKLKFTVSDTGIGIDGDKMNMLFKSFSQVDSSITRKYGGTGLGLAISKQLVEMMGGEIWVESQKGKGSTFYFTAGFKRKAKSSVKAECTSNADERVLGRKLNILLAEDDKVNQQVIAGMLKKEQCSLTIAENGFEAIKLFEENEFDLILMDVQMPEMDGIEATKRIRKMEEGTFRHIPIIAVTAFAFENDREKILEAGMDDYISKPFSFDDIYAAINRVLYKDEQSSDDMQKEKEDEKGSLDPDEKVNETLSESGTVNETGPDYSLKDIMERLDLSILNGNFTAIDKSALAVKEFAQNRGFDKVKNLAFKIQLSARKNQLEDVKKLYEVLKQEISKFN

SEQ ID NO: 12329 - protein, 1653 aa, Microbulbifer degradans 2-40
MNKSSFNYLTRNSKWLIPTFAAIVLLTLAIAVDRVIYSRFALEERTAVHNEASKLRASIESTINSNLQAVQGLVLVLNAFPEPSQEEFASFAAPLFNQNTQLRNIAAAPGMVIKYMHPLEGNEAAIGLDFRATPAQKEAAERAERTGQLVLAGPVNLKQGGQGFIGRIPVFTYNKQNNTKSSWGLLSTVIDLDRFYSATGITQFNETLQLALRGKDAKGAQGQVFYGDEALFHADAVLLEVSVPSGSWQLAILPKQGWANSAEDSALLRIILLLIILAILIPIIISVNLLANRHDSDLKFRGLFELSPVGIALNRFTDGKYVETNTALENMLGYSADELHGKTYLEITSPVYEDHQKAVINSLKNYGRYGPYEKEFIRRDGTLLPVIMNGMLVTDSNGEKLIWSIVEDITSRKQAELALAQNRKQLEQIIDSTSVAIWDWNIVTGEIVINERWAEIIGYSLMDLEPVSIDTWTNFTHPEDLDKSSELLNAHWNGESNHYQCEARMHHKDGHWVWVLDSGKVIEWTSEGKPLRMVGTHLDITEQKESQRLIEQSQIELKNFFDLSPNFMCIIDREGFFERINDTFLSQLDFTRDDFFSCKYIDFVHPDDREITQDHFEKMKSGALTQVFTNRYMHSNGDYLYLQWYTFADPASGMVYTTALDITNQKLDEKRMARQQEMLLSMSEQGRIGAWEVNLEEQQMYWSTMTKDIHEVDANYTPHYESAIDFYKEGESRDTISRLLNLAINKGIPASIELPIITAKHNERWVSVTVQPEFRNKQCIRLFGSIQDIDARKRIEQGVQLANTKLEKQMTLVNAIAAAQASFIQQTDIAIAFRNLLDGVLELAESEYGFVSEILYTEKNEPYIRTHAIANRSTHDRYNAFFAAQGENPIEFFNLDSLLGAAVTSCKPVIANSPTTDSRRAGVPDGHPQLESYLGIPIILNGSIIGLIGLANNPNGYNQALVDWLAPLINTVGQMIENTRAIRERDNAQQALVKAKNAAELAARTKSEFLAMMSHEIRTPLNGVLGMLNLVKRTQLEDKQRYQIDIAKSSAESLLNLINDILDFSKVDAGKLDLEVVDFNIITLLEDIAHAMAGRALERGNELIIDTTKLEFTYLSGDPSRLRQILVNLIGNAIKFTQNGEVTVTASLTKNTSGFNLNISVADTGIGIAEEKIPLLFSAFTQVDASTTRKYGGTGLGLAICKKLCALMGGDINITSQEGNGSEFSFQILVKNSVKNIDLPPLIEQKVDLNDKTIFIAESNPKNTAILENMISSKRCIAVSSLPDSNLNLPNEPIDVAFIDRKLLTSMESITPLKNKPNFANTQWLMLTAINQTKDIENYTAKGFDTYLTKPITQSGLTLSLKSLKLDSNQAESEQQQTSEKLTLPQSPQGEASQFAARILLVDDNTVNQDVAKMMLEDFGLIIDVANNGLEAIAALDACSIREPYSLILMDCQMPELDGYETTKRIRKGATDFDNTKIPIIAMTANAMKGDKEKCIAAGMDDYLSKPIEADALEHMLKLWLPLHNFSQDSNTQATSQHPQVVEGFWQHDELLATLKGREDRLKILVASFTKRIPALLEEFEEATASNDLEALSFIAHSVKGSAGQLKCNLLFVCASELELTAKNGDLTTALELSQNFKQYTLDFYNLLNKYLA

SEQ ID NO: 12330 - protein, 1368 aa, Microbulbifer degradans 2-40
  unsure (1)..(1368): unsure at all Xaa locations
MSKQNKNKFTHSIQKTLIQWFLLLSLVPLFLVAFIGYQVARNSLVASAQDHLESDARNTMNFLNNWFEYRLMDSLSGAQDENNIKFLQELHEAAVQTELSIESFHKSIKWAEITASRQGGLVDISRNYDYIYDVFLIDVDGNILFTVAKESDLGTNLVHGKYANTKFGGTVRKTLATGQTLFADFEHYEPSAGIIAGFVVSPLVNSEGQRIGAYAMQFRIDRIINHLKLNSASMYRHYLVGPDGTLRTQRRQSEQLLITQINTAPVKRWLEANETAKHSDKPKLIKYSEADGTVYLGMHQNLTLRNLDWLLVSEVKEADALASSNWLAGVMLLSVWFTAMLLSVLAFFLSIRITNPIKAITIVANKLVKGDFSQRVQVQESNEFGLLANSFNELIQSRKYYELELLAAKNEAESSSRAKSEFLACMSHEIRTPMNGVLGMLGLVLNSSLTPEQERKLLLAQSSGQSLLSVINXXXXXXXXXXXXXXXXXSASMYRHYLVGPDGTLRTQRRQSEQLLITQINTAPVKRWLEANETAKHSDKPKLIKYSEADGTVYLGMHQNLTLRNLDWLLVSEVKEADALASSNWLAGVMLLSVWFTAMLLSVLAFFLSIRITNPIKAITIVANKLVKGDFSQRVQVQESNEFGLLANSFNELIQSRKYYELELLAAKNEAESSSRAKSEFLACMSHEIRTPMNGVLGMLGLVLNSSLTPEQERKLLLAQSSGQSLLSVINDILDYSKVEAGKLELEHLDFDPHRLLSDVVQSFNYSAQEKGIELVLDDIGLGGKVLRGDPSRLRQIINNLLSNALKFTSQGEIIVRAKLDSEINGLNQLRCSVTDTGIGIPSDKISGLFDSFTQVDSSTTRRYGGTGLGLSICKMLTRIMGGDIFVVSEVGKGTRFDFVVHVETGSCLPVDNAESDVTGLNVLLVDDNLTNLDVISGQLISWGIHVTKVAGPEQALVLVAEVQDTVFDLVLMDCHMPNINGIDLAERIQGSPCIKPNSVIILSSSADMASRFHMQEVGVVGCLMKPVSAPYLHQAIQYFIQIKKSNKQQFITPALLESVHATTESTANPNIVWGDNVRILVVEDNLVNQQVIAGILEDFGLAFTLVDDGQQAISALKENTGDLRYHFVFMDCQMPVLDGYNATKQIREGAAGEECKIVPIVALTANAMQGDRDKCLRAGMNDYVAKPVDADEVRLALVSWLPAELRTDEAAIENNPETPDTPDILEKKSPPAEENPVEPQVVKVDLGLLKLPKGLVIHTPAMLQPMFKNKPERYVKILTTLLNAHASFNTSLNEAFANNDTEQVRHLVHAMKGSSGNISMGKVHEYCKQVEAQIDADGAASAEYINKLQQLIEAMFDEANQIVELNS

SEQ ID NO: 12331 - protein, 109 aa, Ceratonia siliqua
LVMAVVVNDSDEDGDSSDSVQPQKRKRLWGLVVCHNTTPRFVPFPLRYACEFLAQVFAIHVNKELELEYQLIEKNILRTQTLLCDMLMRDAPLGIVSQSPNIMDLVKCD

SEQ ID NO: 12332 - protein, 103 aa, Caragana arborescens
QAARFLFMKNKIRMIVDCHAKHVKVLQDEKLPFDLTLCGSTLRAPHSCHLQYMANMNSIASLVMAVVVNDSDEDEDSSDAVHPQKRKRLWGLVVCHNTTPRFV

SEQ ID NO: 12333 - protein, 103 aa, Caragana arborescens
QATLFLFMKNKVHMMVDRRAKHVKVLQDQKIPFDLTLCGSTLRAPHSCHLQYMENMNTSASLVMAVVVNDSNEDEDSSDDVQLQKRKRLWGLVVCHHITPRFV

SEQ ID NO: 12334 - protein, 758 aa, Pseudomonas syringae pv. syringae B728a
MFRALARGSKGTVMSQLDKDAFEVLLANCADEPIQFPGAIQPHGLLFTLAEPELTILQVSANVQTVLGHVPEQLLGKGLDCVLGAGWAEVIRSASAHDSFIDAQRLLMSINGIEFEALLHRHQGVLVLELEIQGKDAQSVSYSERTGNMGRMLRQLHAASDLQTLYEVSVREIQKMTGYDRVLIYRFEEEGHGQVIAEASAPSMELFNGLFFPASDIPEQARELYRRNWLRIIPDADYIPVPLVPQLRPDTQQQLDLSFSTLRSVSPIHCQYMKNMGVLSSMSVSLIQSGKLWGLISCGNRTPLYVSHELRSACQAIGQVLSLQISAMEALEISRQREAKVRALEQLNLAMAGSEENVFDGLAQQPQLLMDLVGATGVAIIEDRQTHCFGICPEPSDIRALHAWMIAGGEPVYASHHLSSVYAPAEAYQPVASGVLAMSLPKPVDNGVIWFRPEVKETVQWSGDPKKPLNMESSAGGMRLRPRTSFEIWKVEMTGIATKWSYGDVFAANDLRRSALENDLARQVRREQQAVRARDELVAVVSHDLRNPMTVISMLCGMMQKSFSSDGPHTSRRISTAIDTMQQAASRMNVLLEDLLDTSKIEAGRYTITPQPLEVSQIFEEAYTLLAPLAMDKSIEISFNAEPDLKVQADPERLFQVLSNLIGNAIKFTPKMGTIGVAAMSNGTEIVFTVRDSGEGIPPEQLPHIFERYWTVKEGNPTGTGLGLYISQGIIKAHGGELAAQSQVGEGSEFRFTVPMAV

SEQ ID NO: 12335 - protein, 1003 aa, Pseudomonas syringae pv. syringae B728a
MEFTQLIKDMLDAKPDAALEAALAECAREPIRVPGAIQPHGVLLSVAGDPLCIEQVSANCATEFGMAADELLGKPLSWLLSPEQSALIDHAYGHPAAPHIDPIKLTIGTAHYSASLQRADDVLIIELEPFVETGHGQSRIITRVLRNLQAATTLETLFDISVHEIQALTGYDRVMIYRFEPEGHGQVVAQALTGPLPSYSGLNFPGSDIPAQARELYRLNWIRVIPDATYVPVPLIPTLRPATGQPLDLGFSTLRSVSPVHCEYLKNMGVRSSMSISLLDGGELWGLVACGHPEPLRVSRELRDACAMIGQLLSVKISAIVATNIQREREEKVVLLGQLADAMSRANHEVLDGLVSRPELLMSLTLADGAAVLIDDQVYLFGTCPSIEQVRELYTWIRDTGLASQRSRQRATGLQGLGVFHTNSMQRELADSAVYRDIASGVIAFTLPKPIDNAVMWFRAQLTSTMNWSGNPTHHVSTRPESSASHRLHPRQSFDVWEQEVTGIASPWSRADLYGAEDIRRSALESDLERQVQREQEAVRLRDELVAVVSHDLRNPMSIIIMQCGMMQSWAVGDTHFENRNIRRALGTIEKATTRMNSLLEDLLDTAQIEAGRYQLSRLPLSVTSLLEEACSLLVMLTTEKNIELNCTAAQGLVIDADPERIFQVLSNLVGNAIKFTPKGGRINIDAVADQNEVLFRVSDDGIGIPAEHLPFIFQRYWSVKEGNPRGNGLGLYICQGIITAHGGRLWADSSLDSGSVFSFTLPVHQGTDSIGETTFLKQSGTTHRLAQSISSKLERQQLEDRLTRAGLLNELNHRVKNTLATVQAIASLTVNSSASLESFHKSFGARLFALSQAHDALARAEWISTELVDLIEQLQEQDSGAHRISFEGDPVTLEPRFSLTLSMVLHELMANALQHGALSSASGQVTVTSTLTAEHTPPTLKIEWKETGGPPVVATTVKGFGLRLIRRSIERELKGQADIQFARTGIIWSMLIPWPDKPESRL

SEQ ID NO: 12336 - protein, 1353 aa, Pseudomonas syringae pv. syringae B728a
MKKSSLTWLVGWMAVVLLAGLSVSFIASHEQRRSIDARIGQALKEAGEGIGDNLQARLRVYEYRLRGLRGAVHMLDLQHINSSQMGRYSKGRNIEKEYPGARGFGFIRRVAASDEAEFVRRVREDGRPDFSLSRLSGPGTRQGDRFIIQFIDPLDRNVQALGLDITSEEHRRDAALQAMRSGAATLSAPITLLQDNDDHMRAFLFLLPVYSTPEIPTDIAQRETSLIGWTYAPLAMREVMSNLDPLNHRLHLKLYDVNEGRQLIYQTPENDHDQEVLQTYAFEREIYGRVWRMEVGAHPAFIAALDPVPAGRVFIIGTLVSLMLTVLVGTLLLSRQRKQQVVAGQARLATIVENSSDAIIGEALDGRIITWNRAAEQMFGYDEHEVLGRPLAPLLVPPELVHEDEQLLERVARGERGPTLETRRLHKNGQLIDVTITCSFIRETDGTLLGAAKMMHDITDRKRVERYLMEFNAQLEQQVSERTAELSRVAGLLQGVLDASSEVSIIATDTQGQIFVFNRGAELLLGYSNSEMLSGNGPGVFHLPEEVAARSAELSREYGTLIEGIDVFCYKASREGSETRQWTYVRKDGTTVPVLMIITPIRTADGELIGHLGIAQDITERLHHSAELHAAKSSAEAANAAKSLFLANMSHEIRTPMNAVIGISHLLHNTALNDQQRQLLTKLQIAGRTLLGIINDILDIAKIEAGEMRLEHNPFSPRQLLDELGELFTPQAQEKGLRFSVNVVASLPGQLIGDALRVNQILMNLVGNALKFTSVGGVDVTVSREDDHADTCCLRFSVQDTGCGIPGDVLGQLFSPFTQADASTTRRFGGTGLGLSVVRGLAEQMGGRIGVESELGTGSEFWVELPFQISQSDLEPSGPGSSLEVMLLSDDAQSSMALQRLCRGLGWRVASLTGEHDLRTALQERNHVNAALPDVLLVDWQQPQVEEVQQLIEATPLPVILVTSSEIRAELHPLVDKVLLKPLDSSALFNAVNACIARYQGSTERVIQATRMDTSMTLWLSGLHLLLVDDSEINLEVASLLLQQQGAVVQTCSNGLLALERLRQTPDFFDAVLMDVQMPEMDGYEATRRLRSELGLTRLPVLALTAGALAEERRQAELAGMDDFLTKPLDPAALIRAVRRAVERVRGAPLAVGTLLQEASTGSAWPVIEGIDTQEVAARLGNDVPLFLSSLRRFFSEFAAFGESESVLARARQNPDQTMADLHKLRGSALLLGATQVGLHAGQAETLLRNAADPEQAVRALSAAFRSLQERTPVLEERPLAPRIDADPDVSRQALSTLRELLENHDIAALDQFPLAAVALQELAGQALVEQLWQTIEGLEFEQALHLLERAEL

SEQ ID NO: 12337 - protein, 754 aa, Pseudomonas fluorescens PfO-1
MARKSGGSGMNPQDKEAFEELLANCADEPIRFPGAIQPHGLLLTLSEPDLSIIQISANVETLLARPAQELIGQPLQSLIGDAHAAQVREALQQAALSDAPPLHFRLNGTAFEGLLHRHQDVLILELEIHVENFQPRNVAGTETHLGRMLARLQKAQSLQALYDISVKEIQAMTGYDRVLIYRFEEEGHGQVIAEASDPSMEVFNGLFFPASDIPEQARELYRTNWLRIIPNADYQPVPLVPKLRPDTQTPLDLSFATLRSVSPIHCQYMKNMGVLSSMSISLLKGDKLWGLISCGNRQPLHVPHELRTACQTIGQVLSLQISAMEALEVSRQREEKLEALALLNQAMIDSPQNVFDGLANQPQVLMALANAGGIAIIEDKQLHRYGNCPEPEEIRALHKWLQERGEPVFASHHLASVYPPAAHYQQVASGVLAMSLPKPVDNGVLWFRPEVKENINWSGDPRKPLDLENSDAGLRLRPRTSFEIWKVEMAGISTKWSHGDLFAANDLRRSALENDLARQVRREQEAVRARDELVAVVSHDLRNPMTVISMLCGMMQKAFSSDGPHTSRRISTAIDTMQQAAGRMNTLLEDLLDTSKIDAGRYTIAPQKLDVAQMFEEAQSLLAPLALDKDISISFEADPDLSIHADPERLFQVLSNLVGNAIKFTPRLGTVDVYAKSVGDDIVFTVRDSGEGIPKDHLPHVFDRYWTVKEGNPTGTGLGLYITQGIVEAHGGQIVAESEPGQGSEFRFTVPRLD

SEQ ID NO: 12338 - protein, 633 aa, Pseudomonas fluorescens PfO-1
MIFRRWDINTRTQLISLGPALLLTLLLISFFTFVRIQDLRQELNHTGQLIANQLAPATEYGVISGNNEVLESLLKATLATPNVRFLEVQDSANRILSYVEQPADAHNRPHQVEVFQAPVRLQRIALHNDFFQDGKSSPGVASEDYLGRVIVGLSNDAFSQRQQEILLKAGILALFALLFTFVLARRLAGSLSQPIRDIGNAVKAIQDGDYKTPLPIVDDTELGALSQHINNLAQALEQASREQHQAMAQLIQTREEAEKANNAKSDFLAMMSHELRTPMNGVLGMLQLLETTDMTEEQVEYAALASESTEHLLKVINDILDFSRIERSELELEHIPFNLAEVIGACAQSFQHSAAQRGLALQLRIPEDLRDLQVQGDPTRIRQILVNLVGNALKFTEQGRVSIEAQWQSLDHELLWFTCAVRDSGIGISPESLELMFNAFQQADSSISRRYGGTGLGLPIARTLAERMGGTLRAQSEEGRGSVFTLEIPLALYKQALPALAAPRTLNGASHGEGRNVLLVEDNPVNQTVIEAMLRSLGFTVSVATDGVQAVRSAGDNRFEAILMDCRLPLIDGYEATRRIRQLPGCGQVPIIALTANALQGDRENCLAAGMNDYLAKPFKHNDLQQILQRWVQ

SEQ ID NO: 12339 - protein, 945 aa, Pseudomonas fluorescens PfO-1
MPGPPYCAGMRLKNYLHQISPVLSTPHAARRLLRIFALVLLAGILGGVYSFLLFTFNNEISQRRSYMSSAIAEAHTFFTGREALLESLSLSATRQTALSAPLSEEEIRLLLGHPPGKQWSIWLTQRMRDFLQARKLNLLYVSSGADAQVWRLYNTTPMADDFPHEMLDRLETLKCDNNGALKEIWLTHNWQGHSQLYIFIRLDERDLDSGWLGLEMDDREVSNALSDHSAGEFTMFNSQGMPLFSNSHKPPPGQNLPLLRQQDFFGFVGDGWLPEQLVLRKQLKSSDRQLTYSIDLLAVLWALWPQLLGALAFCLASISLVWLLIRRLEHRFITPTLQRIQALVESELFSRDVIQTAPVALCVLRRSDARVVLENTLARHWLGECGQQLGPGWIRAAFADKSPCLTDYFETADGRHLYLSCAPTRYKGEDVLLCAFSDISARRQIEAALERARQSADAANEAKTLFLATMSHEIRTPLYGVLGTLELLARTQLDTQQKSYLRAIEGSSATLLQLICDVLDVSKIEAGQLALELSDFSIVALAQEVVQGYAAAAQSKGLQLYACFDPQLPDSLIGDISRVRQILNNLLSNAVKFTDSGRVVLRVNVLSREGERVCVQWQVSDTGRGIAHDDQAFIFEPFYQTRGNSHVIAGTGLGLPICLRLTNLMNGTLRMVSEPGLGSSFSLTLPLEQRSGNTPPDIQPKLAGDIIYVVSPVRELADSLAGWLRRWGARPQVGAPASQVPADGGVLLELYPTPMDQRSELRWSGPRVLASGAGACEPQCTVDGWIANLNDLAAIRQALRQAQGGAVIEHQQTQTQALAPLHLHILVAEDNAINQLILRDQLQELGCTVALASDGEEALSLWQANTFDVVLSDVNMPRLNGYELAKTLRRLGCTTPIIGATANALRGEEALCLAAGMNHCLIKPFTLRALSIVLAPYQRVAHEVP

SEQ ID NO: 12340 - protein, 773 aa, Desulfovibrio desulfuricans G20
MNRTPLKRRFTVTLMLFTLLCCALYTVTASSFMHYHNAQITSRTERLLHALVLQRENDLANQIFVGHIRALRSTAADLQETDDVYSITVYDKSGKPLIHTRPERPLPLTGAEMAILAQGDVDARGTENGVPLLYHTSALMVIGELQGFVTVAYDLSHVRRDTILLSAMLTILLLGTVIAAGMVCSHFITQHIRRPLTALRDAMHRARSGELQHRAPIEAQDEVGRLAESFNAMVATLQRNESSLRHAQTIYKDIFENALEGIFQITGRGYLINANPALARMLGYSSVMELLAERGTTPLKSLVNRRDLARMLRMLRAKGAVDGYETRVYTKGGGITWISVSARTIAKEETGQPESFRYEGFVKDITEHRRLRELEQTRTAMIEADKAKSDFLAHMSHEIRTPMNSVLGMAEQMLRTPLSAEQKECMDVLKNSGESLLHLINDILDLTRVEGGQLALASAPFTVHAVVYGVRDMLSLQARQKNILLAATIAPDVRKNHMGDAQRLQQILVNLLGNAVKFTDNGEVSLHVSRAPDAVHDGDLLFTVRDTGIGITPAEQSRLFQKFSQASTAIHSRYGGSGLGLAISRHLVDLMGGTIRLESEPGVGTTVTFTARFAAVPEETARTGHEAEQPDTAGDDATALPALTVLLAEDTPSNRAVVRMMLQDTPCTVIEAEDGQQALHLFGQYDIDVVLMDINMPVMDGMEATRQLRRQEHGSGRRTPVIALTANAFQQDIIRYRQAGCDGHLVKPVTRKALLTALQSCAGGGATHSGSGA

SEQ ID NO: 12341 - protein, 728 aa, Pseudomonas aeruginosa PAO1
MTSITPVTLANCEDEPIHVPGAIQPHGALVTLRADGMVLAASENIQALLGFVASPGSYLTQEQVGPEVLRMLEEGLTGNGPWSNSVETRIGEHLFDVIGHSYKEVFYLEFEIRTADTLSITSFTLNAQRIIAQVQLHNDTASLLSNVTDELRRMTGYDRVMAYRFRHDDSGEVVAESRREDLESYLGQRYPASDIPAQARRLYIQNPIRLIADVAYTPMRVFPALNPETNESFDLSYSVLRSVSPIHCEYLTNMGVRASMSISIVVGGKLWGLFSCHHMSPKLIPYPVRMSFQIFSQVCSAIVERLEQGRIAELLRVSTERRLALARRARDADDLFGALAHPDDGIAALIPCDGALVMLGGRTLSIRGDFERQAGNVLQRLQRDPERDIYHTDNWPQPSEDSPDGGDCCGVLAIRFHRQESGWIFWFRHEEVHRIRWGGKPEKLLTIGPSGPRLTPRGSFEAWEEVVRGHSTPWSETDLAIAEKLRLDLMELCLNHAAEVDRMRQRLIAVLGHDLRNPLQSISMAAALLSSSDTRTTELRQHISASSSRMERLVSQILDMSRLQSGIGLTVNPVDTDVSQLVRQIVCETDVAYPGLVIEIAIDPQVRAVVDPDRYAQVAANLLSNARHHGLPGRPVLVTLTRQGDEVCLSVLNETSGLSEAQLANLFEPFKRESADNQRNRNGLGIGLYISQAIAQAHQGRIDVDCRDDVITFCLRLPVRQAETGSSS

SEQ ID NO: 12342 - protein, 1417 aa, Pseudomonas aeruginosa PAO1
MNVQQSKFRLSRWAGATLALGLLLSGLGAWGLALVNEQQARMALEREAELLAEAVTRRVELYQYGLRGVRGALLTAGEVHIDRELFRRYSLTRDIDREFPGARGFGFIRRVAAADEAGFLRQARADGQPEFRIQQLTPHDGERYVIQYIEPVARNGQALGLDIASEANRREAARAALETGQVRLTGPITLVQASGLRQQSFLILMPIYRSGITPPPGPQRELEGFGWSYAPLLTGEVLAGLPIDNAAIHLELSDVTGDGAAVPFFVNGAAAPAQRLFGHMLRREIYGRHWQMAFSALPLFVQRLHQPSPRILFLAGSLVSLLLAALVNASALGRLRRRREAATQARLAAIVGNSADGIIGVGLDGVISDWNRGAEALFGYREEQAVGRRVVDLLVPPSKENEELDILARIARKEQVVSFDTVRRHQDGHLLDVAVTVSPILGPDGGVVGASKTVRDISAKKAAEARIRELNTGLEHQIAERTAELRRLNVLLGSVLQAASEVSIITLDRDGIISGFNLGAERMLGYRADEVVGKASPTLLHSERELLARGQELGEEGFRVLVARAEQEGAETREWTYLRKDGSPLSVTLSVTVLRDEAGAINGYLGIAVDVTEWRNAEREMAAARDQLQMAADVARLGIWRWNLADDSLQWNERMCEMYGQPLALRDGGLVYEHWRSRLHPEDLERTEASLRAAVEGRGNYDVIFRVVLPDGGIRFIQAGAQVERDADGNPLQVTGINIDITSDQQLQARLREAKEQADAASAAKSSFLANMSHEIRTPMNAVLGMLQLARQTDLNERQRDYLDKASSAATSLLGLLNDILDYSKIEAGKLVLEMLPFELEPLMQDLAVVLSGNQGDKDVEVIFDIDPELPSAVVGDRLRLQQILINLAGNALKFTARGHVLVSLRRLAHDAHLVRLRVLVADTGIGISAEQQQRIFEGFTQAEASTSRRFGGTGLGLFICKRLVDLMGGELRVESAPGSGSRFWFDLDLDVAHDQPLRAACPGAGEPLRLLVADDNLVAGELLERTVGALGWRADCVGSGSEAVARVQAAMAEGRRYDVVLMDWRMPDLDGLSAAQLIRQLQGDLPPPMVIMITAYGREVLADARDHSAPPFVDFLTKPVTPKQLADSVLHALHGEQGAPANPPPRPVERTQRLRGVRLLVVEDNALNRQVAAELLSSEGARVALADGGLAGVQQVLEASVPFDAVLMDMQMPDIDGLEATRRIRADGRFAGLPILAMTANASLADREACLAAGMNDHVAKPIDKERLVLCLLGHLGRSGARGAPATAADAGELVEARGDIVGRFGGSLELIVQVLRRFVPDMQDLFAQLERQLGEGDVQGSAATLHTIKGSASTVGASALAGRASELEQALRRADPLRGMEILAGIRLDELRTLCDACLLRLQAMFGDVQAESAS

SEQ ID NO: 12343 - protein, 1141 aa, Shewanella oneidensis MR-1
MSAIQKIRYQLLCILSYLPLLCMTFITHAEQPNTTTISVGVLANGWGPFQQVNDQITTGFSVELIQLLAKNLHYQIDWKIYPDWMSLYSAGCNGEVDVLLDAFRTTERTQCLMFSRSYYTSPTVVVIRYDSRFFRDVSEFGQARIAVEKGFSTEKLVKLHYPTVTEVTFSNTEQALSSVIDKTTDAYIGNLHVANQYISAHPELLIVAQAPLMMENLHLGITKNNSLLVTQLDNALMALSVEERNALEVTWLGMGDLHFLGHSNFLLRPNEREWLAGLPSLRVGFVDDWMPFSSVNNNGILVGLIADYLEQFREKLGLDYAAQKTRTWNEIQSALINHEIDLAIIPTRLKAQYPDWHMSEVFTSFPIVIATARNSPRIAGLSELNFQRVVITDNLLLPSIKKAYPNIDVVVSANPDEGLTLVAKGNAAAYMGNLAVVAMLIDNKFIDELRVAAPTPYKDELAVAIREPYWQLIPLINRVFSSMSEKEKQQIRNTWLAVNYSEGISWHTLITTLLPIAIGLLLFIGGLTIAYLKLRQEINKRRIVENALAIAKENAELATKRKAEFLAAMSHEIRTPMNGLVGMAEQLSFTPLGIEQKQMVQIISNGAEEILQIINNILDFSKIDMGKMRLESTPILLREVLDSTLNMVMNDLRTKDLSLYLHVDQGVAARVTGDSLRIKQILFNWVSNAIKFTERGFIEVSVKLEAEEEGQQLLLIGVQDTGIGMNADTQARIFNIFEQADVSTTRSYGGAGLGLAISHTLAEMMGGDIILNSAPHLGTFIGLRIRLPVVAQDEFDEQLQGLQAYIAISDIKLRHTLSWHLASLGIVLTQNKANADLLFTDNASDDRQHILCTHFNEALGYRYQNDQCLLNVNPLTSQAVKDVCYINMGWIDTIVSTPQRDITLKVNWPECKILLIEDHQLNQILVQRQLKQLRLDCDIAEHGVQALDLMQQTHYDLILCDCRMPVMDGYTFTQQVRAQEIDGQHVPIIALTANVLNEQKQRCAAVEMDDLLAKPLHLNELHEMLLKWLPHSKPALIDIKILENAFGRREALSKMLLMFKDELESSLKDIQLTAPQLADNIHRTAGTISMLGLTSIAEQAWLLEEKIRQEDSNNGEVELTEFRAIIIQLISELNAIIHTSN

SEQ ID NO: 12344 - protein, 939 aa, Yersinia pestis CO92
MGKASSLVTRLTLLMGVTLTVIWLILIATTAFFSYENTRQILINELTHMASMRADLSNHQFEGAERDAASLISRRESLQSTSPLPEISIKHYDSYYIPFNLDSCNINQHKNDLWIIQAYGTAGQTYYLDSFIIKQKEGIVLFPPQKSSSDYLNQRRKDLLLLPKFPTHNNIYWGAPTYTPQGGWHVSVAVCDKVGTLAGFALKLNDLIAYNHPVEQRDINLLLDKNGELLPISQQATSSNQLHEILNQLKNSKLHDGWQQTPDYLVLRTQLKGPGWQQLVIYPRMGFAWEALKPALYQLPFALAILLLLTSVLSLLLRYYLAIPLWNFINIIGATGPQAMEPRLPINRIDELGHIARAYNNLLDTLNEQYDTLEMKVKERTLALAEAKRAAEQANRRKSDHLTTISHEIRTPLNGALGAVELLQNTPLDAGQMRLAETAHQCSLSLLAIINNLLDFSRIESGQMTLSLEKTALLPLLDQAMLTIHSQALSKSLALSTFISANIPLELELDTLRLRQILVNLLGNAVKFTPQGRIQLRVRRQNQTLCFTVEDTGCGIDVQHQQTIFQPFMQTSDHEQGTGLGLAIADNLAKMMGGHLTVFSEPGQGSCFSLCLPFNAITPPMPFHGELFAPQRLHAQLSAWGMTCQPELANQPSRHFVDNALCYLPGRLYAKLKQYLQGAETEALKSLPLQPWQMHILLVDDSETNRDITGMMLQQLGHQVTRADSGTTALAIGRQHRFDLVLMDIRMPVLDGLATTARWRHDPANIDSHCMITALSANASPDEQIKTSQAGMNHYLSKPVTLGQLAEMLDLTAQFQLERGVDLSPQLSEPQPLLDLADSALSLKLYQSLQVLIQQAKDAIENLPVLSHTLHTIKGCAGQAGLIELQDAVIQLEHALDTHETLTQQEIIQLDEIIHVLLQPPTTCESTFIISQGQSLMVK

SEQ ID NO: 12345 - protein, 857 aa, Vibrio vulnificus CMCP6
MTNEQLQRKHQSLATLITRIIFLVLGLITIGIFIQSYYFSNKIIKQEVMLTKQQTSALVKSLFNNHLSILQIHHDSNSKNEAIRRFFLDGDDEKLEYYFLSMDQADPTHTPEFRFLTTGEGLLWDDGNAHFYGVNEVLLEKISQSVLFGNNWHFMSLHTLMGLRNMLVRRSPVIDTTTGEVLGQYYISVVLDNNFPLVEMLESGSNSDNIVMLVGDKVISHSLSGNEPYDLDSLLAMRDEPSAFDDCLISQTPIEINSTDTLVSILAIQENSHVASLQRQHYLGLATSVVLMLMLSLAIRSWIQNRVANALESLMAYSRFAGTGEKYERFNGSDILEFAHIGHTLENTFEQLESQRRSFQDLFNFALSPMMVWSESGLLIQMNPAAMKELGIEHASPQDFSNPLFQLFKLKLSPHLKMAAQGATLTGINVPIGEKIFRWNLSPIVVENGISGIIVQGQDITTLIDAEKQSNLARREAEQSAKTRADFLAKMSHEIRTPLNGILGIAQLLKRSVNDAENLKQVDVLCNSGEHLLAVLNDILDFSKIEQGKFNIKKRDFNFYDTLNTLENIYRPICREKGVSFEIHNQIPLDCQLHTDQVRLNQIMFNLISNAVKFTPAGRIEVSFKLEKFARSEHSILSIQVSDTGIGIDESKLESIFEPFVQADSLSTREYGGSGLGLTIVKNLVEMLEGEISVQSELCKGSTFYLSIPVEKGECEEQKTPTNPKPEQLFGQGLKVLLVEDNHTNAFILKAFCQKYQMSVEWVQDGTQALEKLKEHAFDLILMDNQLPKMGGIEATREIRETLKLGTPIYACTADAQESTKQEFLSAGANRVIVKPIKEQELHDELLHFKAHYWVEH

SEQ ID NO: 12346 - protein, 390 aa, Lactoris fernandeziana
PYEVPMTAGALQSYKLAAKAISRLQSLPSGSMERLVDTVVQEVFELTGYDRIMAYKFHEDDHGEVISEVTKPDLEPYLGLHYPATDIPQASRFLFMKNKVRMICDCRAKPVKVYQDEKLSFDLTLCGSTLKAPHSCHLQYMENMGFIASLVMAVVVNEGEEEVDSQESSQQQAPKRKRLWGLVVCHNTTPRFVPFPLRYACEFLMQVFAIHVNKEFELENQILEKNILRTQTLLCDMLFRDAPMGIVTQSPNIMDLVKCDGAVLLYQNKVYRLGLAPTESQIHDIAQWLSEYHKDSTGLSTDSFHDAGYTRARSLGDIVCGMAAVRINSGDMLFWFRSHTAAEVRWGGAKHDPDEKDDGRRMHPRSSFKAFLEVVKYRSFPWKDYEMDAI

SEQ ID NO: 12347 - protein, 341 aa, Lactoris fernandeziana
DLEPVNPSDVPVTAAGALKSYKLAAKAISRLQSLPSGNIPLLCDVLVREVSDLTGYDRVMAYKFHEDEHGEVIAECKRSDLEPYLGLHYPATDIPQASRFLFTKNKVRMICDCSARPVKVIQDKRLAQPLSLGGSTLRAPHGCHAQYMLNMGSVASLVMSVTISEDDDDSASEQKGRKLWGLVVCHHTTPRFIPFPLRYACEFLIQVFGIQLNKEVELAAQVREKHILRTQTVLCDMLLRNAPVGIMTKSPNVMDLVNCDGAALYYRNRCWFLGTTPTESQIRDLAEWLLQYHNSTTGLSTDSLVEAGYPCAHGFGEAVCGMAAVKITSRDFLFWFRSHTA

SEQ ID NO: 12348 - protein, 745 aa, Pseudomonas syringae pv. tomato str. DC3000
MSQLDKDAFEVLLANCADEPIQFPGAIQPHGLLFTLKEPELTILQVSANVQSVLGKVPDQLAGQTLDCVLGAGWAEVIRSTSANDSLVDVPRLLMSVEGVEFEALLHRSQEALVLELEIQDKAAQAISYSERTGNMGRMLRQLHAAADLQTLYEVSVREIQRMTGYDRVLIYRFEEEGHGQVIAEASAPAMELFNGLFFPASDIPEQARELYRRNWLRIIPDANYTPVPLVPQLRPDTQQQLDLSFSTLRSVSPIHCQYMKNMGVLSSMSVSLIQGGKLWGLISCGHRTPLYVSHELRSACQAIGQVLSLQISAMEALEVSRQRETKIQTLQQLHQMMATSDTDVFDGLAQQPQLLMDLVGATGVAIIEDRQTHCYGNCPEPSDIRALHTWMMAGGEPVYASHHLSSVYPPGEAYQTLASGVLAMSLPKPVDNGVIWFRPEVKQSVQWSGDPNKPLNLDASDNTLRLQPRTSFEIWKVEMTGIATKWSHGDVFAANDLRRSALENDLARQVSKEQQAVRARDELVAVVSHDLRNPMTVISMLCGMMQKSFSSDGPHTSRRISTAIDTMQQAASRMNVLLEDLLDTSKIEAGRYTITPQPLEVSQIFEEAYTLLAPLAMDKSIEISFNAEPDIKVNADPERLFQVLSNLIGNAIKFTPKLGRIGVAAMSNGDEVVFTVRDSGEGIPPEQLPHIFERYWTVKEGNPTGTGLGLYISQGIIKAHGGELAAQSQVGHGSEFRFTVPIAH

SEQ ID NO: 12349 - protein, 993 aa, Pseudomonas syringae pv. tomato str. DC3000
MIEHTLDANPDAALEAALAECAREPIRIPGAIQPHGVLLSVAGDPLCIEQVSANCAKSLGLESAELLGQPLSILLSAAHSMLINQAYSQPAMPNSDPIRLTVRAVDYNASLSRAGDVLIIELEPFVEAAHEQSRIITRVLRNLQAATTLETLFDIGVHEIQALTGYDRVMIYRFEPEGHGKVVAQALTGPLPSYSGLNFPGSDIPAQARELYRLNWIRLIPDATYVPVALIPTLRPATGQPLDLSLSTLRSVSPVHCEYLKNMGVRSSMSISLLDGGELWGLITCSHPEPLLVSRELRDACAMIGQLLSVKISAIVATHIQREREEKVVLLGQLADAMNRADHEILHGLVSRPQLLQALTQADGAAVLIDDQVHLFGQCPTSEEVRALYQWIRDTGLTRQRSKERATGLQGLGVFHTDSMQRERPESAAYRETASGVIAFTLPKPVDNAVMWFRSQLASTMNWSGNPAHHVSTRAAGSASHGLRPRQSFDVWKQEVTGIARPWSRADLYGAEDIRRSALESDLERQVQREQEAVRLRDELVAVVSHDLRNPMSIIIMQCGMMQRWAVDDTNFENRNIRRALGTIEKATTRMNSLLEDLLDTAQIEAGRYQLSRLALSVTSLLEEACSLLVMLTTEKNIELNCTSAQGLVIDADPERIFQVLSNLVGNAIKFTPKGGRINIDAVADGDDVLFRVSDDGIGIPAQHLPYIFQRYWSVKEGNPRGNGLGLYICQGIITAHGGRLWADSSLDSGSVFSFTLPMHQGQDTIGESTFLKQSGTTHRLAQSISSKLERQQLEDRLTRAGLLNELNHRVKNTLATVQAIASLTVNSSTSLDSFRKSFDARLFALSQARAEWMSTELADLLAQLQDVNGGQHRITFTGDPVRLEPRISLTLSMVLHKLMANALQHGALSSPAGQVTVASTLNSHHNPPTLSIDWLETEGPPVVASNVKGFGLRLIRRSIERELKGKVDIKFASTGVSWSMLIPWPEKPESSL

SEQ ID NO: 12350 - protein, 858 aa, Vibrio parahaemolyticus RIMD 2210633
MTITSKLKKRRSLSTLITKIIILVLAPIILGIFVQSYYFSKQIIWQEVDRTKQQTSALILNIFESHFAAIQIHHDSNSKSDVILDFYSERNEEALNYFFLSIDQSDPSHTPEFRFLTDHQGIIWDDGNAHFYGINDSMLDGLTSKVTFSNNWYYVTSITSMGARHLLLRRVPVLEPKTGEVMGYSYNAVVLDNNFALMEKLKNEGNVDNVVLVANDIPVASSLAGDESYKIFDVLKRKETQKKLDQLLIIQTPIEVNAAITNLKLLTVQDNQSVVTLQIQHFLAMLASVIGMIMIALMTKEWIENRVVEELGSLMSYTRSAREEKGFERFGGSDIEEFDHIGSTLESTFEELEAQKRSFRDLFNFALSPIMVWSEAGVLIQINPAARKELVIENDIETMHPVFKGFKDKLVPHLRMAAQGATLTGVNVPIGDKVFRWNLSPIRVDGDISGIIVQGQDITTLIEAEKQSNLARREAEKSAQARADFLAKMSHEIRTPINGILGVAQLLKDSVEAEEQKNQIDVLRHSGEHLLAVLNDILDFSKIEQGKFNIQKHPFSFADTMRTLENIYRPICENKGVELVIENQLDGNVEIFTDQVRLNQILFNLVSNAVKFTPSGCVRLHAELEQFYGADNSVLVVEISDTGIGIESDKLDEMFEPFVQEEATTTREYGGSGLGLTIVKNLVDMLDGDVQVRSQKGQGTTFVVTLPVKDRERVLAPLDSSQRVKPAELFDESLKVLLVEDNHTNAFILKAFCTKYKMQVDWAKDGLEAMEFLKDHSYDLILMDNQLPHLGGIETTKEIRQNLKLGTPIYACTADTAQETSDAFMEAGANYVLLKPIKENALHEAFVDFKQRFLIERT

SEQ ID NO: 12351 - protein, 897 aa, Bradyrhizobium japonicum USDA 110
MNEQVDQGHLRTPPGRLFRKYLYSIVALAFAALAINTGFDVWFSYREQKQLLAATQREQAASAAIQIGQFIGQIENQIRWLSRLPPELSTNEDERLNAIRLLRLSPAIAEIAELDAQGREQVRVSRRVADRVGSKIDLSASPAFRGANESRTYYGPVYFIGDTEPFMTLAARGVGRGPNVIVAEVNLRFIWDLVAGIRVGNTGKAYVVDRMGLLIAHPDLWPALRRSDLSGHADVRAALDGAGPPSGGLVKEDLSGQRVLSTYATVPSLGWLVFVELPLTEAYAPIYASIGRSTFLLVALLACAVLVSLFLSRRMTVPIQILTQGARRIGSGDLGLRLAIKTGDELEALGDQFNRMAAHLRESYATLERKVIERTSELEKARDHALAEHDAAERARSIAVQANETKSRFLAVVSHELRTPLNGVMGVLQLLDDGSLGEAQRRHLATAAASGETLIALVDAILEYARLEASAETLEMRDFRLDQLIEAAADLMRPQAFGKGLTFDLASDVTVNTSVHGDPVRLNRILLNLIGNAIKFTPRGGIGLKASAEQHEDHILLSITVRDTGIGIAPDMHERIFEDFVQADDSIARRFGGTGLGLAIARRLTRLMRGELTVESTPGAGSTFALEVPLGLAASGIAQGALPPPSRRLRVLLVDDDPVNCQVGEAILNRLGHHPTIARNGASAVALARDQAFDIILMDLHMPDMDGVEAASQIGKLGLPRMPRIIAVTADVSRSARERLASAGIAKVVSKPILINALREAIEDDPPDQPAEVRLAAGALIDRHFLDDQKELLGATQIAKLHQLLRQTSQQRIEDIAEAAAIDDHLQLARSAHQLGSAASALGLVRLFERCREVELAVATMSASECHGAARELAALQKASMSALDELLLPVEQRSVS

SEQ ID NO: 12352 - protein, 683 aa, Coxiella burnetii RSA 493
MGRQNWKIKNLEVCMEVSTTRIHKPILKKLGSLFLNLAETSQDIFWIRSVDFYTHVYVSPAFENIFGISRQTLYANPNKWMNAVIIEDRDRLRHLIMEWQVKNKKGAAYTVDYRIIDAYGEMHWINETSYPVYEDDQCLGYAGVVKDVSSEKLRVKEFDNAVHYFRHFVERVSGVFWVKGSRGDKQIYISPTYEKIWGVSCESLYQNPKSWIDYVLPEDISNGKVNVNFYETAADQRTPDSKYEFHFRIRRPDGEIRWIKDTYFPIMENGKLVGFAGIAEDVTNDALREKELWEAKEFAEQANRTKSDFLAMMSHELRTPLNAILGMSQILKTHNLSDEQQGQIDVISQAGQNLLALLNDLLDFAKLEAGKLSFTEETMDLHELVMKIKGDMLLLAHKKGIQLKFDYPENIPSKVMGDAKRIRQVLVNLLSNALKFTEKGYVQLTANCLKKDHKKMTLCFTVKDTGIGMEKTKLSSIFNRFQQINSVYQRKYDGVGLGLSIVKELLEKMGGTISVTSEPGVGSEFTCIIPFRLQADSNPTLPARDLLEKQAVNNSTYDRESRFNMNVLVVEDNLINQRISKIMLEQVGCQVDIAGCGKDAIEKMKKHYDMVFMDIGLPDMDGFETTQCIRHNETPGQRVPIVAMTAHVFAQDRKRCFDVGMDEVMAKPIMQDDLIKVLKRWAA

SEQ ID NO: 12353 - protein, 220 aa, Pyrus communis
CDFEPVKPYEVPMTAAGALQSYKLAAKAIAAIARLQSLPSGSMERLCDTMVQEVSELTGYDRVMAYKFRDDDHGEVVSEITKPGLEPYLGLHYPSTDIPQASRFLFMKNKVRMIVDCCAKQVKVLQDEKVPFDLTLCGSTLRAPHSCHLQYMKNMDSIASLVMAVVVNEGDDEVASPDSVQPQKRKRLWGLVVCHNTSLRFVPFPLRYACEFLAQVFAIP

SEQ ID NO: 12354 - protein, 193 aa, Taxus baccata
DEHGEVVAEIRRSDLEPYLGLHYPATDIPQASRFLFMQNRVRMICDCRATPVKVIQSGELKQPLCLVGSTLRAPHGCHAQYMANMGSIASLVMAVIVNGNGNGNDEDGGGGSGRSSMKLWGLVVCHHTSPRAVPFPLRSACEFLMQTFGLQINMELQLAAQLIENNILRTQTLLCDMLLRDAPIGILTQSPSI

SEQ ID NO: 12355 - protein, 214 aa, Citrus limon
IDFRPVKPYEVPMTAAGALQSYKLAAKAITRLQSLPSGSMERLCDTMIQEVFELTGYDRVMAYKFHEDDHGEVVSEITKSGLEPYLGLHYPATDIPQAVRFLFMKNKVRMIVDCRARHVKVLQDEKLPFDLTLCGSTLRAPHSCHLQYMENMNSIASLVMAVVVNDEEEEGDNTLPQKRKRLWGLVVCHNTTPRFVPFPLRYACEFLAQVFAIH

SEQ ID NO: 12356 - protein, 148 aa, Citrus limon
VMVYKFHEDEHGEVVAESKRPDLEPYFGLHYPATDIPQASRFLFKQNRVRMIVDCHATPLCVIQDEGLMQPLCLVGSTLRAPHGCHAQYMANMGSIASLALAVIINGNDEEAVGGRSTTRLWGLVVCHHTSARCIPFPLRYACEFLTQ

SEQ ID NO: 12357 - protein, 1313 aa, Geobacter metallireducens
MNRRELMAGVLLGSAGFLVNWFKLSLFFNVDFLFGSVFSMFALLRFGPATGLLAAVIAAGCTWLQWHHPWAIVIFGCEALCAGWLRNRKRMDLMLGDIIYWFSGGLVLVWLFYHQVMGFNAGATLLVALKQGMNGIINTLIAEALFLLSWRLRGGTELPSLRKWLGVILEGVVLVPAFVFAFLDTSWYFRQQMTRLQESTARTAEVGNLTISSWLDEEQHKLGMLVKLVGDPDHNPSQEMQRLLERYHAAHGSDTYRLGVMDRNHVTRAFSPRVDEKGVSTIGVWLGDRPYIAELNDPSHPIVFDAFMGKIGVPGPRLIMLAPCMVGGEYRGAVFSVVSLGHPAALLKGIVGKRDVNLTLLDRHRRVVASTDSGKKFLEQFALPKGGQLHSVGSNVSQWVPDPQPGGGPMKRWNRSFYMTEIALEPKSGFRLVVQSSLAPSLKEINNRASILLGVLAILTLVVVGLSRYFSRRLLAPFAMLGKVTSQLPVRIAQGEQISWRPAEVREEQELQDNFRLMENALQNSFSELTAINEELEHRVTERTAELRIAKEAAENSELQLRSITNSAHDAILMMDHQGSISYWNPAAEQILGYSAAEALGKNLHDLLTPERYLADHLTAFSEFQQTGSGNAVGKTLELFARRKDGQEIEVALSLSAVFLNGAWNAVGLLRDITEQKRINASLRMLSAAVEHSPVSIIITDRDGRIEYVNPKSCQMTGYAFEELRGQNPRIMKGPTHPPEFYKNLWETILSGREWYGEFHNRRKDGSLVWVMASISPIYDEKGEITHFVGVREEIEKQKKLQEELANIAQLEKVARDRAEQANRAKSEFLAGMSHEIRTPLNAIIGMSDLLAETRLDGEQSGYLSVVHSAGETLQGLINDILDLSKIEAGMLQLDSVPFSLRDCIRQLTDITSVKASSKGVTYSFSVKSAVPDWLMGDSLRLRQVLINLVGNAVKFTDSGGSVLLEVEPVQQSDAEVLIRFSVADTGIGIAPEKLDTIFESFSQADSSTTRRYGGTGLGLAISRHLAGMMGGEIGVESTVGKGSCFRFTVPFAISRRTEEPLPKEQLPGDKLGRPLSILVVDDNLANRTVLTAYFRRTEHTVECAVNGEEALAKIKGGGYDVVFMDMEMPVMDGYTAVRLVREWERETGRAPLPVIALTANALKEDQLRSLDAGCTAHLTKPIKKDKLLEIVGEYQQRPRTNGKQGTNMDRDNVPDKIVVVCDPDLEDIIPAYLEGRKTEGSVIRELAVNGQFDEVRTIAHGLKGSGGCYGFSRITEIGRDMELAANDGNLVEVLKQLDTLEAYLQAIEVRYE

SEQ ID NO: 12358 - protein, 914 aa, Geobacter metallireducens
  unsure (1)..(914): unsure at all Xaa locations
MPEPGTTPTFDAFHRSAEGLLRAMNLETWRIRNWRLFTKIFLMSTVAVFVIIAGLLGFFLPLLESKLIHERTDNASHIVDAARSIAAHYHSLQLRGELSEPEARRLAVNTLRALRYNVNGYVWVHDLENRMVMHPLQPELEGHYLTRLADARGKPLFLTMNNLVRREGKGEVDYLWPRPGEQEPSRKVSYVSLFEPWQWVLGSGVYLDDVQDEISMLEARVITGALVTLLLSVVFSAYAAYRINRPLRQALFCAAAAMGHDTSVVEDKSHDETHQVLHTIERMVNDLKRSRDEAESASRMKGEFLANMSHEIRTPMNAIIGMTELTLETPLSPSQRENLEIIGSSAESLLGLLNDILDFSRIEAGRLLLEKVPFDLRNTVEGALDVVAPQAHGKGLELILDVARDLPEAFIGDPXXXXXXXXXXXXXXXXXGSGVYLDDVQDEISMLEARVITGALVTLLLSVVFSAYAAYRINRPLRQALFCAAAAMGHDTSVVEDKSHDETHQVLHTIERMVNDLKRSRDEAESASRMKGEFLANMSHEIRTPMNAIIGMTELTLETPLSPSQRENLEIIGSSAESLLGLLNDILDFSRIEAGRLLLEKVPFDLRNTVEGALDVVAPQAHGKGLELILDVARDLPEAFIGDPTRLRQVLINLLSNAVKFTAKGEVGLKVERAPSSGTDDGVMLLFTVSDTGIGIPADKLSLIFESFTQADGSTTRKYGGSGLGLAICRALVSMMGGDISVKSAVGVGSTFRFTARLGTCALQNREIRQAGIPRFGREVKILLAEDNPMNLKVSRLLLEMMGCQVVAVENGGDVVSAMKGERFDVVLMDIQMPVLDGLEATRVIRSGSERGIDQTTPVIAMTAHALKGYEKVCHEAGMNDFISKPVRAGELYNVILRNLPPAPGGGGVTPSAL

SEQ ID NO: 12359 - protein, 365 aa, Averrhoa carambola
ALSIAGAVQSQKLAVRAISQLQLLPGGDIKLLCDTVVESVRELTGYDRVMVYKFHEDEHGEVVAESKRPDLEPYIGLHYPATDIPQASRFLFKQNRVRMIVDCNAKPVRVIQDEGLMQPLCLVGSTLRAPHGCHAQYMANMGSIASLAMAVIINGNDEEAIGGRNSMRLWGLVVCHHTSARCIPFPLRYACEFLMQAFGLQLNMELQLASQLSEKHVLRTQTLLCDMLLRDSPTGIVTQSPSIMDLVKCDGAALYYQGKYYRLGVTPTEAQIKDIIEWLLAFHGDSTGLSTDSLADAGYPGATSLGDAVCGMAVAYITKTDYLFWFRSHTAKEIKWGGAKHHPEDKDDGQRMHPRSSFKAFLEVV

SEQ ID NO: 12360 - protein, 365 aa, Averrhoa carambola
ALSIAGAVQSQKLAVRAISQLQLLPGGDIKLLCDTVVESVRELTGYDRVMVYKFHEDEHGEVVAESKRPDLEPYIGLHYPATDIPQASRFLFKQNRVRMIVDCNAKPVRVIQDEGLMQPLCLVGSTLRVPHGCHAQYMANMGSIASLAMAVIINGNDEEAIGGRNSMRLWGLVVCHHTSARCIPFPLRYACEFLMQAFGLQLNMELQLASQLSEKHVLRTQTLLCDMLLRDSPTGIVTQSPSIMALVKCDGAALYYQGKYYRLGVTPTEAQIKDIIEWLLAFHGDSTGLSTDSLADAGYPGATSLGDAVCGMAVAYITKTDYLFWFRSHTAKEIKWGGAKHHPEDKDDGQRMHPRSSFKAFLEVV

SEQ ID NO: 12361 - protein, 193 aa, Sciadopitys verticillata
DDHGEVISEIRRSDLEPYLGLHYPATDIPQASRFLFMKNRIRMICDCCAPPVIVVEDKRLPRELSLCGSTLRAPHGCHAQYMSNMGSIASLVMAIVVNEKEEEDEDTDGEKQQQNGRRLWGLVVCHHTSARFVPFPLRYACEFLMQVFAIQLNKEVELAAQLREKHILRTQTLLCDMLLRDAPMGIVTQKPNI

SEQ ID NO: 12362 - protein, 187 aa, Sciadopitys verticillata
DEHGEVVSEIRRSDLEPYLGLHYPATDIPQASRFLFMQNRVRMICDCCATPVKAVQAEELKQPLCLVGSTLRAPHGCHAQYMANMGSIASLVMAVIINGNDEEGASGRSSMKLWGLVVCHHTSPRAVPFPLRYACEFLMQAFGLQLNMELQLAAQLTEKHILRTQTLLCDMLLRDAPIGIVTQSPSI

SEQ ID NO: 12363 - protein, 192 aa, Taxodium distichum
DNHGEVISEIRRSDLEPYLGLHYPATDLPQAARFLFMKNKVRMICDCYATPVKVVEDKRFPRELILCGSTLRAPHGCHAEYMSNMGSVASLVIAETINAKEEAEITDGQQQQQKGRRLWGLVVCHHSSPRFVPFPMRYACEFLMQVFAIHVNKEVELADQLREKHILRTQTLLCDMLLRDAPTGIIRQKPNI

SEQ ID NO: 12364 - protein, 189 aa, Taxodium distichum
DEHGEVVAEIRRSDLEPYLGLHYGATDIPQASRFLFMQNRVRMICDCRPNPVRVIQAEELKQPLCLVGSTLRAPHGCHAQYMANMGSIASLVMAVIVNGNGNDEEGSSGRSAVKLWGLVVCHHTSPRAVPFPPLSACEFLMQTFGLQINMEMQLAAQLTENNIVRTQTLLCDMLLRDAPIGIVTQSPSI

SEQ ID NO: 12365 - protein, 745 aa, Pseudomonas fluorescens
MNPQDKEAFEELLANCADEPIRFPGAIQPHGLLLTLSEPDLSIIQISANVETLLARPAQELIGQPLQSLIGDAHAAQVREALQQAALSDAPPLHFRLNGTAFEGLLHRHQDVLILELEIHVENFQPRNVAGTETHLGRMLARLQKAQSLQALYDISVKEIQAMTGYDRVLIYRFEEEGHGQVIAEASDPSMEVFNGLFFPASDIPEQARELYRTNWLRIIPNADYQPVPLVPKLRPDTQTPLDLSFATLRSVSPIHCQYMKNMGVLSSMSISLLKGDKLWGLISCGNRQPLHVPHELRTACQTIGQVLSLQISAMEALEVSRQREEKLEALALLNQAMIDSPQNVFDGLANQPQVLMALANAGGIAIIEDKQLHRYGNCPEPEEIRALHKWLQERGEPVFASHHLASVYPPAAHYQQVASGVLAMSLPKPVDNGVLWFRPEVKENINWSGDPRKPLDLENSDAGLRLRPRTSFEIWKVEMAGISTKWSHGDLFAANDLRRSALENDLARQVRREQEAVRARDELVAVVSHDLRNPMTVISMLCGMMQKAFSSDGPHTSRRISTAIDTMQQAAGRMNTLLEDLLDTSKIDAGRYTIAPQKLDVAQMFEEAQSLLAPLALDKDISISFEADPDLSIHADPERLFQVLSNLVGNAIKFTPRLGTVDVYAKSVGDDIVFTVRDSGEGIPKDHLPHVFDRYWTVKEGNPTGTGLGLYITQGIVEAHGGQIVAESEPGQGSEFRFTVPRLD

SEQ ID NO: 12366 - protein, 139 aa, Nostoc sp. PCC 8009
VYRFDENWNGIVIAEEKLEHLTAYLGLHYPASDIPQQARKLYSQNWLRIIPDATYQPVAIVPTNNPLTEQPLDLSNSVLRSVSPLHVEYMHNMGVAASMSISLKKNQKLWGLIACHHQTPKYIPYELRNTCEFLAQITS

SEQ ID NO: 12367 - protein, 144 aa, Pseudanabaena sp. PCC 7409
IYRFSEQGDGTVISEVKQPDLEPFLGLRYPDSDIPKQAKHLYTLNWLRLIPDVNYQPTGLVSHGLPEAASPLQNASLDMSYCTLRSVSPIHIKYLQNMGVTASMSVSLIQNKKLWGLIACHHYTPKFVPYETRTICEFLGQLMS

SEQ ID NO: 12368 - protein, 394 aa, Brachypodium pinnatum
EPARTEDPALSIAGAVQSQKLAVRAISRLQALPGGDVKLLCDTVVEHVRELTGYDRVMVYKFHDDEHGEVLAESRRTDLEPYLGLHYPATDIPQASRFLFRQNRVRMIADCHAAPVRVIQDPAMPQPLCLVGSTLRSPHGCHAQYMANMGSIASLVMAVIISSGGEDEHNMGRGAIPSAMKLWGLVVCHHTSPRCIPFPLRYACEFLMQAFGLQLNMELQLAYQLSEKHILRTQTLLCDMLLRDSPTGIVTQSPSIMDLVKCDGAALYYHGKYYPLGVTPTEVQIKDIIEWLTVSHGDSTGLSTDSLADAGYSGATALGDAVCGMAVAYITPSDYLFWFRSHTAKEIKWGGAKHHPEDKDDGQRMHPRSSFKAFLEVVKSRSLPWENAEMDAIH

SEQ ID NO: 12369 - protein, 376 aa, Cleistachne sorghoides
ALSIAGAVQSQKLAVRAISRLQALPGGDVKLLCDTVVEHVRELTGYDRVMVYRFHEDEHGEVVAESRRDNLEPYLGLHYPATDIPQASRFLFRQNRVRMIADCHATPVRVIQDPGLSQPLCLVGSTLRAPHGCHAQYMANMGSIASLVMAVIISGGGDDEQTGRGGISSAMKLWGLVVCHHTSPRCIPFPLRYACEFLMQAFGLQLNMELQLAHQLSEKHILRTQTLLCDMLLRDSPTGIVTQSPSIMDLVKCDGAALYYHGKYYPLGVTPTESQIKDIIEWLTVCHGDSTGLSTDSLADAGYLGAAALGDAVCGMAVAYITPSDYLFWFRSHTAKEIKWGGAKHHPEDKDDGQRMHPRSSFKAFLEVVKSRSLPW

SEQ ID NO: 12370 - protein, 393 aa, Hakonechloa macra
EPARTEDPALSIAGAVQSQKLAVRAISRLQALPGGDVKLLCDTVVEHVRELTGYDRVMVYRFHEDEHGEVVAESRRADLETYLGLHYPATDIPQASRFLFRQNRVRMIADCHATPVRVIQDPGLPQPLCLVGSTLRAPHGCHAQYMANMGSIASLVMAVIISSGGDDEQTARGGISSTMKLWGLVVCHHTSPRFIPFPLRYACEFLMQAFGLQLNMELQLAHQLSEKHILRTQTLLCDMLLRESPTGIVTQSPSIMDLVKCDGAALYYHGKYYPLCVTPTESQIKDIIEWLTVCHGDSTGLSTDSLADAGYLGAAALGDAVCGMAVAYITPSDYLFWFRSHTAKEIKWGGAKHHPEDKDDGQRMHPRSSFKAFLEVVKSRSLPWENAEMDAIH

SEQ ID NO: 12371 - protein, 394 aa, Lygeum spartum
EPARTEDPALSIAGAVQSQKLAVRAISRLQALPGGDVKLLCDTVVEHVRELTGYDRVMVYKFHDDEHGEVLAESRRTDLEPYLGLHYPATDIPQASRFLFRQNRVRMIADCHAAPVKVFQDPAMPQPLCLVGSTLRSPHGCHAQYMANMGSIASLVMAVIISSGGDDEHNMSRGVIPSAMKLWGLVVCHHTSPRCIPFPLRYACEFFMQAFGLQLNMELQLAHQLSEKHILRTQTILCDMLLRDSPTGIVTQSPSIMDLVKCDGAALYYHGKYYPLGVTPTESQIKDIIDWLTVCHGDSTGLSTDSLADAGYPGAAALGDAVCGMAVAYITPSDYLFWFRSHTAKEIKWGGAKHHPEDKDDGQRMHPRSSFKAFLEVVRSRSLPWENAEMDAIH

SEQ ID NO: 12372 - protein, 387 aa, Nardus stricta
PALSIAGAVQSQKLAVRAISRLQALPGGDVKLLCDTVVEHVRELTGYDRVIVYKFHDDEHGEVLAESRRTDLEPYLGLHYPATDIPQASRFLFRQNFVRMIADCHAAPVRVIQDPAMPQPLCLVGSTLRSPHGCHAQYMANMGSIASLVMAVIISSGGDDEHNMARGVVPSAMKLWGLVVCHHTSPRCIPFPLRYACEFLMQAFGLQPNMELQLAHQMSEKHILRTQTLLCDMLLRDSPTGIVTQSPSIMDLVKCDGAALYYHGKYYPLGVTPTESQIKDIIEWLTVCHGDSTGLSTDSLADAGYPGAAALGDAVCGMAVAYITQSDYLFRFRSHTAKEIKWGGAKHHPEDKDDGQRMHPRSSFKAFLAVVKSRSLPWENAEMDAIH

SEQ ID NO: 12373 - protein, 388 aa, Phragmites australis
EDPALSIAGAVQSQKLAVRAISRLQALPGGDVKLLCDTVVEHVRELTGYDRVMVYRFHEDEHGEVVAESRRADLETYLGLHYPATDIPQASRFLFRQNRVRMIADCHATPVRVIQDPGLPQPLCLVGSTLRAPHGCHAQYMANMGSIASLVMAVIISSGGDDEQTARGSISSTMKLWGLVVCHHTSPRFIPFPLRYACEFLMQAFGLQLNMELQLAHQLSEKHILRTQTLLCDMLLRDSPTGIVTQSPSIIDLLKCDGAALYYHGKYYPLGVTPTEFQIKDIIEWWTVCHGDSTGLSTDSVADAGYLGASALGDAVCGMAVAYITSSDYLFWFRSHTAKEIKWGGAKHHPEDKDDGQRMHPRSSFKAFLEVVKSRSLPWENAEMDAIH

SEQ ID NO: 12374 - protein, 104 aa, Phragmites australis
ARFLFMKNKVRMICDCRARSVKIIEDEGLSIDISLCGSTLRAPHSCHLQYMENMNSIASLVMAVVVNENEEDDEAEPGQPSQQLKKKKLWGLIVCHHESPRYVP

SEQ ID NO: 12375 - protein, 104 aa, Phragmites australis
QASRFLFMKNKVRMICDCSATPVKIIQDDSLSQPLSLCGSTLRAPHGCHAQYMANMGSVASLVMSVTINEDEEEDRDTGSDQQPKGRKLWGLVVCHHTSPRFVP

SEQ ID NO: 12376 - protein, 748 aa, Pseudomonas putida
MTADNSLADAMERCAQEPIQVPGSIQPHGFLLVLDATDLRVLQASENVEHWLGLPARELIGCHFADLVHEGFDLHAHLTRLPEDEVFPFHIGDVRLRQGAPISALLHMLVHCHDQVLIAEFEPPRLPADLVGQGDYYPLVRSFVASLQVASSIEDLLQQTVLQLKRITGFGRVKAYRFDAEGNGQVLAEVVDPGYPSYAGLCFPAADIPRQARELYRVNRIRVIEDANYQPSPLLPATNPRTGKPLDMSFAALRSVSPVHLQYMRNMGTLASMSLSIVVDGQLWGLISCHHQQPRPVDLRTRTACELLASVLSLQIESRESHASTRKLLTLRQHIVRMISSMADHDSVSDGLRDLPEVLLAFADAQGAAVISAERCDLIGQTPPEAQVTALVHWLGQRDEDKVFHSDNLRRDITELPELANHAGGVLAVAISQIHSHYLLWFRPEQIRTVNWAGQPTKQVGPQGNLDPRHSFERWQEEQRGYSQAWDPLVIEGVIELRAAVLGIVLRKAEELAQLAGELRRSNKELEAFSYSVSHDLRAPLRHIAGYTELLGEIEGQGLSERGKRFLQHIGEAAHFAGSLVDNLLNFSQMGRSALRLSDVDLNALVEAIRSELAPDYEGRAIVWDIAPLPKVIGDPAFINMALHNLIANAIKYTRGRTPARIEISAVQHPEETEVCIRDNGVGFDMAYANKLFGVFQRLHRMEDFEGTGIGLASVRRIIERHDGRVWATGQVDQGASFHFTLPRNTAT

SEQ ID NO: 12377 - protein, 994 aa, Ralstonia solanacearum
MATMLRRALPAPAHLWRRGRTALLLCATAIALLTTSDRAQADRTTRALPPMGHPLMPSAAAQMASGTPAAAIALWTLAVLSMRHVQLRRENRRRRRAEADLARQLDFHHRLLESLPFPLAAQDTQHRYVAVNAAFCHLFGQPREALLGRTPAHLGWRCAHTAARAQDIDRRATAASQGACEALTITAADGRERHVLYWVAPVHGPDGRPGGTVASLIDIDGIRDAQAPAEQRAQRLHELTESLPALVCQFEMRPGTAARGRMRHLAGNASETLGAPAGKARGRLPSPARLVHRDDRQRMRGAALQSAAQLTLLDQQFRHGNGDGPVRWLHIRARPRRGADGCTVWNGYLRDVTAERAQADALVSARQAAESALRAKDRFLATMSHEIRTPMNGVLGLVELLLQTRLEREQQRMMTLVQESSRALLHVLDDILDYAKIEADRLSITPAPTDLRALLDSTVGLLASRAHERSLAVRVDVDAAVPATVSVDGMRLRQVLCNLLSNAIKFTEHGSVRLSAKCMETAADTVHLIIRVTDTGIGIAPEAQATLFTPFVQADSTITHRQCGTGLGLAISRQLARLMGGSLDMDSTPNVGTTLTLRLEVPVVDARYRLPRLASATVRVAVDDDTCRHGLEQFAVAAGLRVVHTGTADLTLVDSVRAPADAPRIVPVTGDAPYTGPGRSIPRPEALSTNPLNWQAFVQACDTALARPADGHAANGMPKSRTVPEPAPAAETPGMHILVAEDHPINRELITRQLRLLGYRVTLAEDGAAALQRLCETRFDALLTDCCMPRLDGFDLARQIRQREQQAPGGRRLPILAITATTLAEEHARCRTVGMDGYVLKPTTLATLQDALSRLGNAAVSPDAAKAPATAPDNALAFRLDDLRQTLGDGPAAVSLIRVFTTALGDDARQLGGLLATADRPALRKWTHRTGGALALLHHTAIDAEMSAFRHAVHSADDTGLRQAGARMLQLLAHLQGVMRLAETPSPGTAPTCQ

SEQ ID NO: 12378 - protein, 744 aa, Pseudomonas syringae
MSQLDKDAFEVLLANCADEPIQFPGAIQPHGLLFTLKEPELTILQVSANVQSVLGKVPDQLAGQTLDCVLGAGWAEVIRSTSANDSLVDVPRLLMSVEGVEFEALLHRSQEALVLELEIQDKAAQAISYSERTGNMGRMLRQLHAAADLQTLYEVSVREIQRMTGYDRVLIYRFEEEGHGQVIAEASAPAMELFNGLFFPASDIPEQARELYRRNWLRIIPDANYTPVPLVPQLRPDTQQQLDLSFSTLRSVSPIHCQYMKNMGVLSSMSVSLIQGGKLWGLISCGHRTPLYVSHELRSACQAIGQVLSLQISAMEALEVSRQRETKIQTLQQLHQMMATSDTDVFDGLAQQPQLLMDLVGATGVAIIEDRQTHCYGNCPEPSDIRALHTWMMAGGEPVYASHHLSSVYPPGEAYQTLASGVLAMSLPKPVDNGVIWFRPEVKQSVQWSGDPNKPLNLDASDNTLRLQPRTSFEIWKVEMTGIATKWSHGDVFAANDLRRSALENDLARQVSKEQQAVRARDELVAVVSHDLRNPMTVISMLCGMMQKSFSSDGPHTSRRISRQSTHAASCQPHERVARDLLDTSKIEAGRTPSRRSRWKSARYSKRPIRCSPRWRMDKSIEISFNAEPDIKVNADPERLFQVLSNLIGNAIKFTPKLGRIGVAAMSNGDEVVFTVRDSGEGIPPEQLPHIFERYWTVKEGNPTGTGLGLYISQGIIKAHGGELAAQSQVGHGSEFRFTVPIAH

SEQ ID NO: 12379 - protein, 190 aa, Anthoceros punctatus
DEHGEVVAEIRRSDLEPYLGLHYPATDIPQASRFLFMKNRVRMIADCFSPPVKVIQSKDLPQPVSLAGSTLRAPHGCHAQYMGNMGSIASLVMAVVINDNDEDFNGRGYQQKGRKLWGLVVCHHTTPRAVPFPLRSACEFLMQVFGLQLNMEVELAAQMREKHILRTQTLLCDMLLRDAPIGIVTQSPNI

SEQ ID NO: 12380 - protein, 794 aa, Psilotum nudum
GSIGSLVMAVIVNDNDAEPSGRGNQPKNRRLWGMVVCHHTTPRAVPFSLRSACEFLMQVFGLQLNMEIELAAQMREKHILRTQTLLCDMLLRDAPIGIVTQSPNIMDLVKCDGAALYYGKKFWLLGTTPTEAQIKDLADWLLDVHRDSTGLSTESLADAGFPGAAALGDAVCGMAAVKITPRDYLFWFRSHTAKEIKWGGAKHNPDDKDDGKKMHPRSSFKAFLEVVKWRSSPWEDVEMDAVHSLQLILRGSFQDIDDSESKTMIHHRLNDLNLHGMDELSTVANEMVRLMETATAPILAVDSSGFINGWNGKAAELTGLPLEDAMNKSLVRDLVVDESVSTVERLLYLALQGEEERNVEIKLKTFGTQADKGPVILVVNACASRNITANVVGVCFVGQDVTGEKVVMDKFTRIQGDYRTIVQSPNPLIPPIFGSDEFGYCSEWNPAMVKLSGWKMEEVLGKMNVGEIFGSEMACCRLRGQDAMTKFMIVLNSAMGGQDSDRFPLGFFDRQGKYVEALLIANKRTDGAGAITGVFCFLHIASAEVQQALQVQKRSARTALDKLKEVAYMRQEIRNPLYGIMFTRRLLEGTNLSEEQKQIIDTSAVCEKQLHQILDEDNFENLDHGNIDLDTIEFTMGTVMDAVISQGMIRSREKGLQLIRETPVDIKNMRLYGDQLRLQQVLADFLTTAVRFTSSSDGWVGIKVVPTMKGLGGGLHVMRFDYRISHPGKGIPEDLVQQMFDCSREITQEGMGLSVSRKLVRLMNGDVSYIREAGVCYFLVNVEFPLADRDDSQN

SEQ ID NO: 12381 - protein, 190 aa, Psilotum nudum
DEHGEVVAEIRRSDLDPYLGLHYPATDIPQASRFLFLKNRVRMICDCSAPVIRIIQDKELKQPLSLAGSTLRAPHGCHAYYMRNMGSIGSLVMAVIVNDNDAEPSGRGNQPKNRRLWGMVVCHHTTPRAVPFSLRSACEFLMQVFGLQLNMEIELAAQMREKHILRTQTLLCDMLLRDAPIGIVTQSPNI

SEQ ID NO: 12382 - protein, 187 aa, Equisetum arvense
DEHGEVVAEIRRADLEPYLGLHYPATDIPQASRFLLMKNRVRMIHDCRAPPIRVIQDEHLPQPLSLAGSALRAPHGCHAQYMENMGSIASLVMAVTLNDNEFDNANESLKRRKLWGLIVCHHTSPRAVPFLRSACEFLMQVFGLQLNMEVELAAQMREKHILRTQTLLCDMLLRDAPIGIVTQSPNI

SEQ ID NO: 12383 - protein, 119 aa, Equisetum arvense
HYPATTIPQASRFLFMKNRVRMICDCRTNPVRVIQDKQLGQPISLAGSTLRAPHGCHAQYMANMGSIASLVMAVVVNDNEDESSSSSRLYQPKKRKLWGLIVCHHTSPRAVPYPFRYAC

SEQ ID NO: 12384 - protein, 190 aa, Dicksonia antarctica
DEHGEVVAEIRKSDLEPYLGLHYPATDIPQASRFLFMKNRVRMICDCRAIPVKVIQDRELRQPLSLAGSTLRAPHGCHGQYMANMGSAASLAMAVTVNDNEEESSSRNHLFKQRKLWGLVVCHHTTPRAVPFPLRSACEFLMQVFGLQLNMEVELSAQLREKHILRTQTLLCDMLLRDAPIGIVSKSPNI

SEQ ID NO: 12385 - protein, 187 aa, Osmunda regalis
DEHGEVVAEMRRSDLEPYLGLHYPATDIPQASRFLFMKNRIRMICDCCASPIQVIQDEKLRQPLSLAGSTLRAPHGCHSQYMVSMGSVASLVMAVIVNNNDEEPSSRSYQTKLWGLVVCHHTTPRAVPFPLRSACEFLMQVFGLQLNMEVKLSAQMREKHILRTQTLLCDMLLRDAPIGIVSQSPNI

SEQ ID NO: 12386 - protein, 189 aa, Osmunda regalis
DEHGEVVAEIRRSDLEPYIGLHYPATDIPQASRFLFMKNRVRMICDCTLPPVKVIQDRNLAQPLSSTGSTLRAPHGCHAQYMGNMNSIASLVMAVIVNDTAEVDANGRAYQGTRLWGLVVCRHTSPRAVPFPLRSACEFLMQVFGLQLNMEVGMAAQVREKHILRTQTVLCDMLLRDAPIGIVSQSPNV

SEQ ID NO: 12387 - protein, 188 aa, Osmunda regalis
DEHGEVVAETRRSDLEPFIGFHYPATDIPQASRFLFMKNKVRMICDCTMPPVKVIQDRNLAQSLSLTGSTLRAPHGCHAQYMGNMGSIASLVMAVIIYDGEVDANGRAYQAMKLWGMVVCHHTSARAVPFPLRSACEFLMQVFGLQLNMEVAMAAHVRENHILRTQTILCDMFLRDALVGVVSQSPNV

SEQ ID NO: 12388 - protein, 206 aa, Dryopteris filix-mas
VMAYKFHEDEHGEVLAEIRRSDLEPYLGLHYPATDIPQASRFLFMKNRVRMICDCRAIPVRVIQDKELRQPLSLAGSTLRAPHGCHGQYMANMGSIASLVMAVVVNDNDEDLSNRPHQPKMRRLWGLVVCHHTTPRAVPFALRSACEFLMQVFGLQINMELELAAQMREKHILRTQTLLCDMLLRDAPIGIVSESPNIMDFVKGSI

SEQ ID NO: 12389 - protein, 106 aa, Calamovilfa longifolia
QAARFVFMKNKVRMICDCRARSVKIIEDEAVSINISLCGSTLRAPNSCHLQYMENMNLIASLVMVVVVNENEEDDEAETEQPPQQQKKRKLWGLIVCHHESPRYVP

SEQ ID NO: 12390 - protein, 112 aa, Calamovilfa longifolia
HYPATDIPQASRFLFMKNKVRMICDCSAKPVKILQDDSLAQPLSLCGSTLRAPHGCHAQYMANMGSVASLVMSVTVNEDEDDDAETRSDQQPKGRKLWGLVVCHHTSPRFVP

SEQ ID NO: 12391 - protein, 393 aa, Panicum capillare
EPARTEAPALSIAGAVQSQKLAVRAISRLQALPGGDVKLLCDTVVEHVRELTGYDRVMVYRFHEDEHGEVVAECRRDNLEPYLGLHYPATDIPQASRFLFRQNRVRMIADCHATPVRVIQDPGLSQPLCLVGSTLRAPHGCHAQYMANMGSIASLVMAVIISSGGDDEQTARGGISSAMKLWGLVVCHHTSPRFIPFSLRYACEFLMQAFGLQLNMELQLAHQLSEKHILRTQSLLCDMLVRDSPTGIVTQSRSIMDLVKCDGAALYYHGKYYPLGVTPTESQIKDIIEWLTVCHGDSTGLSTDSLADAGYHGAAALGDAVCGMAVAYITPSDYLFWFRSHTAKEIKWGGAKHHPEDKDDGQRMHPRSSFKAFLEVVKSRSLPWENAEMDAIH

SEQ ID NO: 12392 - protein, 105 aa, Panicum capillare
QAARFLFMKNKVRMICDCRARSVKILEDEALSIDISLCGSTLRAPHSCHLQYMENMNSIASLVMAVVVNENEEDDEPNPEQPQQQQKKRLWGLLVCHHESPRYVP

SEQ ID NO: 12393 - protein, 113 aa, Panicum capillare
QAARFLFMKNKVRIISDCHARPVKIIEDAKLPLHVSLCGSTLRAPHTCRLQYMKNMKSVASLVIAVVVNEDAEDVEVVIKQQTQHHQKKKLWGLIICHHGSPRYVPFPLRYAC

SEQ ID NO: 12394 - protein, 192 aa, Ginkgo biloba
DDHGEVVAEIRRSDLEPYLGLHYPATDIPQASRFLFMKNRVRMISDCLAPPVKVIQDKGLPRDLSLCGSTLRASHGCHAQYMSNMGSIASLVLAVIINEKEDEEGDSEGPQQQKGRKLWGLVVCHHTSPRFVPFPLRYACEFLMQVFGIQLNKEVELAAQLREKHVLRTQTLLCDMLLRDAPMGIVTQIPNI

SEQ ID NO: 12395 - protein, 187 aa, Ginkgo biloba
DDHGEVVAEIRRSDLEPYLGLHYPATDIPQASRFLFMKNRVRMICDCCAPPVKVIQDKKLPQPLSLFGSTLRAPHGCHIQYMANMGSIASLVMSVTINENDDDNGQQQKGRKLWGLVVCHHTSPRFVPFPLRYACEFLMQVLGIQLYKEVELAAQLREKHILRTQTVLCDMLLRDAPVGIVAQTPNI

SEQ ID NO: 12396 - protein, 187 aa, Ginkgo biloba
DEHGEVVAEIRRSDLEPYLGLHYPATDISQASRFLFMQNRVRMICDCCATPVKVIQDEELRQPLCLVGSTLRAPHGCHAQYMANMGSIASLVMAVIINGTDEEGLSGRNSMKLWGLVVCHHTSPRAVPFPLRYACEFLMQAFGLRLNMELQLGAQLHEKHILRTQTLLCDMLLRDAPIGIVTQSPSI

SEQ ID NO: 12397 - protein, 113 aa, Ginkgo biloba
YSATDIPQASRFLFMQNRVRMICDCCATPVKVIQDEELRQPLCLVGSTLRAPHGCHAQYMANMGSIASLVMAVIINGTDEEGLSGRSSMKLWGLVVCHHTSPRASPFPLRYAC

SEQ ID NO: 12398 - protein, 114 aa, Ginkgo biloba
HYPATDIPQASQFLFMKNRVRMIYDCCVTPIKVIQDEEWGQPLCLVGSTLQSPHGCRASYMANMGSIASFVMAVIINGIDEEGISGRSSMKLWGLVVFHHISPCAVPFPLRYAC

SEQ ID NO: 12399 - protein, 112 aa, Billbergia nutans
HYPATDIPQASRFLFKQNRVRMIVDCNAKPVSVIQDETLMQPLCLVGSTLRAPHGCHAQYMANMGSIASLVMAVIINGSDEEGSRNPTKLWGLVVCHHTSPRCIPLPLRYAC

SEQ ID NO: 12400 - protein, 99 aa, Quercus turbinella
PATDIPQAARFLFKQNRVRMICDCHAKSVRIIQSEELKQPLCLVNSTLRSPHECHAQYMDNMGSIASLVMAIIINANDSSKLWGLVVCHHTSTRYVPYP

SEQ ID NO: 12401 - protein, 109 aa, Quercus turbinella
HYSATDIPQASRFLFKQNRVRMIVDCNAMPVGVIQDDRLMQPLCLVGSTLRAPHGCHAQYMANMGSIASLAMAVIINGNDEEGVGRRSAMRLWGLVVCHHTSARCIPFP

SEQ ID NO: 12402 - protein, 192 aa, Thuja plicata
DDHGEVISEIRKSNLEPYLGLHYPATDIPQASRFLFMKNRVRMICDCCAPPVSVVEDKRLPRDLNLCGSTLRAPHGCHVQYMVNMGSIASLVMAIIINEKEEEEGDSEGQQQQKGRRLWGLVVRHHTSPRFVPFPLRYACEFLMQVFGIQLNKEVELAAQLKEKHILRTQTLLCDMLLRDAPVGIMTQRPNI

SEQ ID NO: 12403 - protein, 191 aa, Thuja plicata
DDHGEVISEIRRSDLEPYLGLHYPATDIPQASRFLFMKNKIRMICDCYATPVKVVEDRRLPRELILCGSTLRAPHGCHADYMSSMGSIASLVIAVHHAKEEDGVFDGQQQQQKGRRLWGLVVCHHTSPRFVPFPLRYACEFLMQVFAIQLNKEVELADQLREKHILRTQTLLCDMLLRDAPMGIIREKPNI

SEQ ID NO: 12404 - protein, 181 aa, Thuja plicata
DDHGEVVAEMRRPDLEPYLGLHYPATDIPQASRFLFMKNRVRMICDYRATAVKVRQDKRLGQVLSLSRSTLRAPYGCHAQYMANMGSIASLVMAVTVDNSEVGGRRLWGLVVCHHTTPRFVPYPLRYACEFLTQVFGVQLNKEVELAARLRERHILRSQTVLCDMLLRDAPVGIVTKTPNI

SEQ ID NO: 12405 - protein, 368 aa, Pseudotsuga menziesii
IQPFGCMVAVNDKTFEVIAYSENAPDMLQVSAHAVPSVEDQQILCIGSDARTLFTPSSTMALQKAAKFGDLNLLNPILVHSKSSGKPFYAILHRIDVALVMDFEPIKPSDVSTSAMGALQSYKLAAKAISRLQSIPSGNIGLLCDMIAQEVHELMGYDRVMAYKFHDDDHGEVISEIRRSDLEPYLGLHYPATDIPQASRFLFMRNRVRMICDCCAPPVIVIQDKRLPRDLSFCGSTLRAPHGCHAQYMANMGSIASLVMAVVVTEKEEDADSEGQIQQKGRRLWGLVVCHHTSPRYVPFPLRYACEFLMQVFGIHLNKEVELAIQMKEKRILRTQTLLCDMLLRDAPLGIVSQKPNIMDLVKSDGAA

SEQ ID NO: 12406 - protein, 187 aa, Pseudotsuga menziesii
DEHGEVVAEIRRSDLEPYLGLHYPATDIPQASRFLFMQNRVRMICDCMATPVKLIQSEELMQPLCLVGSTLRAPHGCHAQYMANMGSVASLVMAVIINGNDDEGGGSGRNSMKLWGLVVCHHTSPRAVPFPLRYACEFLMQAFGLQLNMELQLAAQLTEKHILRTQTLLCDMLLREPQWNVTQSPSI

SEQ ID NO: 12407 - protein, 115 aa, Pseudotsuga menziesii
HYPATDIPQASRFLFMQNRVRMICDCMATPVKLIQSEELMQPLCLVGSTLRAPHGCHAQYMANMGSVASLVMAVIINGNDDEGGGSGRNSMKLWGLVVCHHTSPAAVPYPLRYAC

SEQ ID NO: 12408 - protein, 192 aa, Cryptomeria japonica
DDHGEVISELRRSDLEPYLGLHYPATDLPQASRFLFMKNKVRMICDCQATPVKVVEDKRLPRELVLCGSTLRAPHGCHAEYMSNMGSVASVVIAVTINAKEEDGDTDGQQRQQKGRRLWGLVVCHHTSPRFVPFPMRYACEFLMQVFAIQLNKEVELADQLREKHILRTQTLLCDMLLRDAPMGIIREKPNI

SEQ ID NO: 12409 - protein, 181 aa, Cryptomeria japonica
DDHGEVVAEMLRPDLEPYLGLHYPATDIPQASRFLFLKNRVRMICDCRAPAVKVRQDKRWCRSLSISGSTLRAPDGCHAQYMANMGSIASLVMAVTVSNSEEGGRRLWGLVVCHHATPRFVPYPLRYACEFLMQVFGVQLNKEVELAARLRERHILRTQTVLCDMLLRDAPVGIVTKTPNI

SEQ ID NO: 12410 - protein, 187 aa, Cryptomeria japonica
DEHGEVVAEIRRSDLEPYLGLHYPATDIPQASRFLFMQNRVRMICDCRANPVGVIQVEELKQPLCLVGSTLRAPHGCHAQYMANMGSIASLVMAVIVNGNGNDEEGSSGRVKLWGLVVCHHTSPRAVPFPLRSACEFLMQTFGLQINMEMQLAAQLTENNILRTQTLLCDMLLRDAPIGIVTQSPSI

SEQ ID NO: 12411 - protein, 192 aa, Metasequoia glyptostroboides
DDHGEVISEIRRSDLEPYLGLHYPATDLPQASRFLFMKNKVRMICDCYATPVKVVEDSRLPRELILCGSALRAPHGCHAEYMSNMGSIASLVIAVTINAKEEDGDTDGQQHQQKGRRLWGLVVCHHTSPRFVPFPMRYACEFLMQVFAIQLNKEVELADQLREKHILRTQTLLCDMLLRDAPMGIIGQKPNI

SEQ ID NO: 12412 - protein, 181 aa, Metasequoia glyptostroboides
DDHGEVVAEMRRPDLEPYLGLHYPATDIPQASRFLFLKNRVRMICDCRAPAVKVRHDKRVAQALSLSGSTLRAPYGCHAQYMANMGSIASLVMAVTVSNNEEGGRRLWGLVVCHHTVPRFVPYPLRYACEFLMQVFGVQLNKEVELAARLRERHILRTQTVLCDMLLRDAPVGIVTKTPNI

SEQ ID NO: 12413 - protein, 192 aa, Welwitschia mirabilis
DDHGEVISEIRRSDLEPYLGLHYPATDIPQASRFLFMKNRVRMICDCYATPVRVIQDKKLPKDLSFCGSTLRAPHGCHAQYMANMGSVACVVMAVMINEREEEEGDSGGQGHQKGRRLWGLIVCHHTSPRFVPFPLRYACEFTMQVFSIQLNKEVELALQLREKNILRTQMLLCDMLLRESPLAIVTQKPNI

SEQ ID NO: 12414 - protein, 189 aa, Welwitschia mirabilis
DEHGEVVSEIRRSDLEPYLGLHYPATDIPQASRFLFMQNRVRMIYDCRANPVKVVQSKELKQPLCLVGSTLRAPHGCRAQYMANMGSVASLAMAVIVNVSEEEAGGSSGRNTMRLWGLIVCHHTSPWAVPFPLRYACEFLMRAFGHQLNMELQLAAQLTEKNILKTQTLLCDMLLRDAPVGIVTQSPSI

SEQ ID NO: 12415 - protein, 192 aa, Gnetum gnemon
DDHGEVISEIRRSDLEPYLGLHYPATDIPQASRFLFLRNRVRMICDCYAQPVKVIQDKKLSKDLSFCGSTLRAPHGCHSQYMANMGSVASLVLAVIVNEREEEEGDSENQVEQKGRKLWGLVVCHHTSPRFVPFPMRYACEFMMQVFSIQLNKEVELAFQVREKHILRTQTLLCDMLLRDAPLGIVTQKPNI

SEQ ID NO: 12416 - protein, 187 aa, Cycas revoluta
DEHGEVVAEIRRSDLEPYLGLHYPATDIPQASRFLFMQNRVRMICDCRATPVKVIQAAELNLPLCLVGSTLRAAHGCHSQYMANMGSIASLVLAVIINANDEEGWSGRSSVKLWGLVVCHHTSARAIPFPVRYACEFLMQAFGLQLNMELQLAAQMTEKHILRTQTLLCDMLLRDAPIGIVTQSPSI

SEQ ID NO: 12417 - protein, 454 aa, Myxococcus xanthus
MPLRATLLPLLLPAVVVATLVALLDGPKEVFAAALVALAGSLMSLGVSRGTMQRQLDLLARHTRERAEGGASTAAPGVPERLDEVAGLEGAIDSLHAQLSARNAALTQEARTLTAVLDGMTEGVWVTDAEGTVVRHNDALRPLLASTNSPLTGQRPLALIRNEALHDAVMRACRESASSHLELTLDGHFPRTLSIRVTPLAKDLPGSAAVFHDVTELRRLEKVRKDFVANVSHELRTPITAIRGYAETLQGGALNDPVMAPKMVEIIHRQSERLSELVEDLLELSRLESREVSLKLARVTLADAAARAADTVRPKAGGKGQVVSLHVPQDLLAVGDPRAVEQVLLNLLDNAVKYTPAGGRVDVYGEYEQGRCVVRVKDTGVGIEAKHQSRIFERFYRVDKGRSRDMGGTGLGLAIVKHLLQAMDGEVKVESEPNGGSTFTIFLPLAASSSAATG

SEQ ID NO: 12418 - protein, 884 aa, Rhodospirillum centenum
MPDRTTDDFGPFTEQIRGTIDGMGTAEFDALPVGAIQVDGSGVIHRYNRTESRLSGRIPERVIGRNFFTEVAPCTNIPAFSGRFMDGVTSGTLDARFDFVFDFQMAPVRVQIRMQNAGVPDRYWIFVRKLEDLRPPGPAPEAPAAHTASVTGEVVDFSVCEQEDIRRVGAIQPWGAVLAVDPRDWTVCAASDNAQALLDCARPPLGRPLGEVLDAGPLAALRDWLPDRTSRSWRGEMARGRRIDIRAHRSGGCVVLDLEPLTARPGEAPVCSLLAAVEADVAVIRQASSLTGLAQACARSVRVLTGFERAIVYRFDADWHGEVIAEDKVEDWPQSFAGLHFPASDIPRQARELYSQSLSRHVPDRDYVPVPVHRIEGTEPLDLSFSRHRSLSPVHLQYLRNMGVTASMSFSILVEGRLWGMVAAHHRQPHHVAIPRRSAAMTVVEAVALSIAAVERAEAMRGRQVDHAVLTALMVQMASSDAVEPALTQQATRLTDLFGATGAALSIDGHLLTVGDWPPPAEVAALRAWLEPRWGSAGLFRTSSLSSVFPDATAYRQKASGCLALRLSGGDFVMWTRPEEPRQITWGGDPAKALGAAGQRPMPRISFDRWVEERRGHAAPWPTWADEIATSLRHAISDMMLRHLRHVKELSDQLAASNEAKSRFLANMSHELRTPLNAIIGFSDLMMSGMAGTLPPRIQDYVQSIHASGEHLLRMVVNDVLDLSRIEAGRMELSPESLDAGILAAECVGMLLPRAVRGEVLLEVQAESPLPLTADALRLRQILLNIIGNAVKFTPPGGRVDVRARALAGGGAVFTVRDTGPGMTPEEVLTAMEPFRQVAQTRAAVEGTGLGLPIAKSLVDLHAGNLAIETAPGLGTTVTIEIGA

SEQ ID NO: 12419 - protein, 391 aa, Magnolia x soulangeana
DFEPVKPYEVPMTAAGALQSYKLAAKAIARLQALSSGSMEKLVDTVVQEVFELTGYDRVMAYKFHEDDHGEVISEITKPGLEPYLGLHYPATDIPQAARFLFMKNKVRMICDCNAKPVKVYQDEKLTFDLTLCGSTLRAPHSCHSQYMENMSSIASLVMAVVINEGVDEEEGMEPAQQEQQQLKRKRLWGLVVCHNTTPRFVPFPLRYACEFLMQVFAIHVNKELELENQIQEKNILRTQTLLCDMLLRDALVGIRTQNPNIMDLVKCDGAALFYNNKIWRLGLTPTDSQMRDISVWLSEYHMDSTGLSTDSLYDAGYPGALALGDVVCGMAAVRINPKDMLFWFRSHTAAEVKWGGAKHDPSDKDDGRRMHPRSSFKAFLEVVKTKSLPW

SEQ ID NO: 12420 - protein, 358 aa, Magnolia x soulangeana
PFYAIVHRIDIGLVIDLEPVNPADVPVTAAGALRSYKLTAKAISRLQSLPSGNISLLCDVLVREVSELTGYDRVMAYKFHEDEHGEVIAECRGSDLEPYLGLHYPATDIPQASRFLFMENKVRMTCDCLAPPVKVIQDKKLAQPLILCGSTLRAPHGCHSQYMANMGSIASLVMSVTINEDDDDDTSVSNGRRRKLWGLVVCHHTSPSFVPFPLRYACEFLVQVFGIQLNKEVELPAQMREKHILRMQTVFCDMLLRDAPVGIITQSPNVMDLVKCDGAAFYYRNQFRLLGTTPTEAQIRDIAGWLLEYHDGTTGLSTDSLTEAGYPGAADLGDDVCGMAAIKITSKDYLFWFRSHTA

SEQ ID NO: 12421 - protein, 112 aa, Elodea sp.
YPATDIPQASRFLFMKNKVRMICNCHASPVHVIQDKRLGQPLSLCGSTLRAPHGCHAQYMANMGSIASLVMSVVINEDINDPDSPEPQRSRKLWGLVVCHHTSSRFVPFPLR

SEQ ID NO: 12422 - protein, 388 aa, Drimys winteri
PMTAAGALQSYKLAAKAIARLQSLPGGSLKRLIDTVVLEVFELTGYDRVMAYKFHEDDHGEVISEVTKPDLEPYLGLHYPATDIPQAARFLFMKNKVRMICDCNAKPVKVYQDEKLTFDLTLCGSTLRAPHSCHLQYMENMGSIASLVMAVVINEREEQDENSGSEQQREQPRRKRLWGLVVCHNTTPKFVPFPLRYACEFLAQVFAIHVNKELELENQIQENNILRTQTLLCDMLMRAALLGIVTQSPSILDLVKCDGASLLYQNKIWRLGVAPTESQILDIALWLSEYHMDSTGLSTDSLQDAGHPGALSLGDVVCGMAAVRINSKDTLFWFRSHTAAEIRWGGAKHDPNQKDDGRKMHPRSSFKAFLEVVKTRSSPWADYEMDAI

SEQ ID NO: 12423 - protein, 394 aa, Drimys winteri
DLEPVNPVDVPVTAAGALKSYKLAAKAISKLQYLPSGNISLLCDVLVREVSELTGYDRVMAYKFHGDEHGEVIAECRRSDIEPYLGLHYPATDIPQASRFLFMKNKVRMICDCTARPVKVIQDKKLAQPLSLCGSALRAPHGCHAQYMANMGSIASLVMSVTISEDDDEASTEEQRQKGRKLWGLVVCHHVTPRFVPFPLRYACEFLIQVFGIQLNKEVELEAQLREKNMLRTQTMLCDMLLRDAPVGIVTQSPNVMDLVKCDGAALYYRNQFWLLGITPTEAQIRDIAEWLLEYHNSTTGLSTDSLMEAAYPGASILGDAVCGMAAVKITCKDFLFWFRSHTAKEIKWGGAKHDPGDKDGDGRKMHPRSSFKAFLDVVKQRSLPWEDVEMDAI

SEQ ID NO: 12424 - protein, 111 aa, Muscari sp.
ARFLFMKSKVRMICDCRAKPVRIVQDEKLPFDITFCGSTLRAPHSCHLQYMENMNSIASLVMAVVVNEEAEEAERDPEAEQSQQPKRKRLWGVVCHHESPRFVPFPLRYAC

SEQ ID NO: 12425 - protein, 104 aa, Muscari sp.
HYPATDIPQASRFLFMKNKVRMICDCSAPPVKVIHDKKLPQSLSLCGSTLRAPHGCHAQYMANMGSVASLVMSVTINDDDKLWGLVVCHHTSSRFVPFPLRYAC

SEQ ID NO: 12426 - protein, 110 aa, Muscari sp.
YSATDIPQASRFLFKQNRVRMIADCHAVPVRVVQDESLAQPLCLVGSTLRAPHGCHAQYMANMGSVSSLAMSVLSTGARGRTRNTMKLWGLVVCHHTSQRCIPFPLRYAC

SEQ ID NO: 12427 - protein, 393 aa, Canella winterana
DLEPVNPTDVPVTAAGALKSYKLAAKSISRLQSLPSGNIQLLCDVLVREVSDLTGYDRVMAYKFHEDEHGEVIAECRRSDLEPYLGLHYPATDIPQASRFLFMKNKVRMICDCSAPPVKVIQDKRLAQSLSLCGSTLRAPHGCHAQYMANMGSIASLVVSVTVSEDDDETESEQQQKGRKLWGLVICHHTCPRFVPFPLRYACEFLIQVFGIQLNKEVDLASQIREKHMLRTQTMLCDMLLRDAPVGIVTQSPNVMDLVKCDGAALYYKNQFWLLGTTPTEAQIRDITNWLVEYHNSTTGLSTDSLAVAGYPGASVLGDAVCGMAAVKFTNKDLLFWFRSHTAKEIMWGGAKHDPVDKDDDGRKLHPRSSFKAFLEVVKRRSLPWEDVEMDAI

SEQ ID NO: 12428 - protein, 349 aa, Canella winterana
DFEPVKPYEAPMTAAGALQSYKLAAKAIARLQSLPSGSMKRLVDTVVQEVFDLTGYDRVMAYKFHEDDHGEVISEITKPDLEPYLGLHYPSTDIPQAARFLFMKNKVRMICDCHALPVKVYQDDKLTFDLTLCGSTLRAAHSCHSQYMANMGSIASLVMAVVVNEREEEDENSESSEQQQQQKKKRLWGLVVCHNTTPRFVPFPLRYACEFLMQVFAIHVNKELELENQIQEKNILRTQTLLCDMLMRSAPLAIVTQNPNIMDLVKCDGASLLYQSKIWRLGVAPTESQIRDIARWLSDCHMDSTGLSTDSLHDAGYPGALLLGDVVCGMAAVKINSKDMPFWFRSHTA

SEQ ID NO: 12429 - protein, 390 aa, Calycanthus floridus
PYEVPMTAAGALQSYKLAAKAITRLQSLPSGSMERVVDTVVQEVFELTGYDRVMAYKFHEDDHGEVISEITKPGLEPYLGLHYPATDIPQAARFLFMKNKVRMICDCHAKPVKVCQDEKLTFDLTLCGSTLRAPHSCHLQYMENMGSIASLVMAVVINEGEEDDEVGISQQQQQRRKRLWGLVVCHNTTPRFVPFPLRYACEFLMQVFAIHVSKEIELENQLREKNILRTQTLLCDMLLRDALLGIVTQSPNIMDLVKCDGASLLYGNKMWRLGLTPTESQIHDIAMWVSEYHMDSTGLSTDSLYDAGYPKALSIGDVVCGMAAVRITAKDMLFWFRSHAAAEVRWGGAKHDPSDKDDGRRMHPRSSFKAFLEVVKTRSSPWKDYEMDAI

SEQ ID NO: 12430 - protein, 393 aa, Calycanthus floridus
DLEPVNPDDVPVTAAGALKSYKLAAKAISKLQSLPSGNISLLCDVLVREVSELTGYDRVMAYKFHEDDHGEVIAECRRSDLEPYLGLHYPATDIPQASRFLFMKNKVRMICDCLAPPVKVIQDKRLAQPLSLCGSTLRAPHGCHAQYMANMNSIASLVMSVMVHENDDRQEMSSSRKGRKELWGLVVCHHTTPRLSFPLRYACEFLIQVFGIQLNKEIELAAQMREKHILRTQTVLCDMLQRDAPVGIIRQTPNVMDLVKCDGAALYYRNQFWLLGTTPTDAQIRDIAEWLLEYHSSSTGLSTDSLMEAGYPGASVLGDAVCGMAAIRITSKDFLFWFRSHTAKEIKWGGAKHDPVDQDDDDRKMHPRSSFKAFLEVVKCRSLPWEDIEMDAI

SEQ ID NO: 12431 - protein, 407 aa, Nymphaea alba
PFYGILHRIDVGLVIDLEPVNPTDVPVTAAGALKSYKLAAKAISRLQALPSGNIGLLCDVLVREVSELTGYDRVMAYKFHEDHHGEVIAECKKPDLEPYLGLHYPATDIPQASRFLFMKNKVRMICDCTAPSVKVIQDKQLEAAVELCGSTLRSPHGCHAQYMVNMGSIASLVMSVVIMNHDEEPANDNPQKGSKLWGLVVCHHTSPRFIPFPLRYACEFLIQVFAVQLNKEVELAAQLREKHILRTQTVLCDMLLRDAPVGIVTPSPNVMDLVKCDGAALYYGKQFWLLGTTPTETQVRDIAGWLYECHGGSTGLSTDSLMEAGYSGAVALGDAACGMAAVKITYRDFLFWFRSHTAKEIKWGGAKHDTVDKDAGKRMHPRSSFKTFLEVVKHRSHPWENAEMDAI

SEQ ID NO: 12432 - protein, 189 aa, Nymphaea alba
DQHGEVIAECKKPDLEPYLGLHYPATDIPQASRFLFMKNNLRMICDCTAPSVKVIQDKQLEQPLSLCGSTLRSPHGCHAQYMANMGSIASLVMSVVINDHDEEPAIDNSQKGTKLWPLVVCHHTRPRFIPFPLRYACEFLIQVFAVQLNKEVELAAQLREKHILRMQTVLCDMLLRDAPVGIVTRSPNV

SEQ ID NO: 12433 - protein, 111 aa, Aquilegia sp.
HYSATDIPQAARFLFMKNKIRMICDCRAKHVRVLQDEKLPFELTLCGSTLRAPHSCHLQYMENMDSIASLVMAVVINDGDEEEGTVEGASQSQKRKRLWGLVVCHNTTPRF

SEQ ID NO: 12434 - protein, 106 aa, Aquilegia sp.
HYPATDIPQAARFLFKQNRVPMICDCQASSVGIVQSGELKRPLCLVNSTLRAPHGCHTQYMANMGSIRSLVMAVVVNWRDQSSLWGLVVCHHTSPRYVPYPLRYAC

SEQ ID NO: 12435 - protein, 107 aa, Aquilegia sp.
PQASRFLFKQNRVRMIVDCHATPVHVIQDEALMQPLCLVGSTLRAPHGCHAQYMANMGSIASLALAVVINGNDEEGTSGRNPMKLWGLVVCHHTSARCIPFPLRYAC

SEQ ID NO: 12436 - protein, 192 aa, Araucaria heterophylla
DDHGEVISEVRKSDLEPYLGLHYPATDIPQASRFLFMKNRVRMICDCCAPPVRVIEDKRLPRELNLCGSTLRAPHGCHAQYMSNMGSISSLVMAVIVNEKEEEEGDSDGQQQQKGRRLWGLVVCHHTSPRFVPFPLRYACEFLMQVFGIQLNREIELAAQSREKHILRTQTLLCDMLLRDAPMGIVTQKPNI

SEQ ID NO: 12437 - protein, 195 aa, Araucaria heterophylla
DDDHGEVISEIRRSDLEPYLGLHYPATDIPQASRFLFMKNRIRMICDACAPPVRVVEDKRLPRELSLCGSTLRAPHGCHVQYMCNMGSIASLVMSVVVNEKEEKEGDSDGQQQQQKGRRLWGLVVCHHTSPRFVPFPLRYACEFLMQVFGIQLNKEVELGTQLREKQILRTQTLLCDMLFRGGAPMGIITRKPNV

SEQ ID NO: 12438 - protein, 193 aa, Araucaria heterophylla
DDHGEVIAEIRRVDLEPYLGLHYPATDIPQASRFLFMKNKVRMICDCRADPVKVIQDKRLAQPLSLSGSALRALHGCHVQYMANMGSIASLVMAMTINENENENDEETSGSGQKGGRRLWGILVCHHTSPRFVPFPLRYACEFLMQVFGIQLNKEVELAAQLREKHMLRTQTVLCDMLLRDAPVGIVTQTPNI

SEQ ID NO: 12439 - protein, 195 aa, Araucaria heterophylla
DEHGEVLAEIRRSDLEPYLGLHYPATDIPQASRFLFMQNRVRMICDCRAAPVEVIQAEELKQPLCLVGSTLRAPHGCHAQYMANMGSIASLVMAVVINGNEDEGGGGGGSGSGSGRGSMKLWGLVVCHHTSPRAVPFPLRYACEFLMQAFGLQLNMELQLAAQLTEKHILRTQTLLCDMLLRDAPIGIVTHSPSI

SEQ ID NO: 12440 - protein, 192 aa, Stangeria eriopus
DDHGEVVAEIRRSDLEPYLGLHHPATDIPQAARFLFMKNRVRMICDCCAAPVRVIQDKNLARDLTLCGSTLRAPHGCHSHYMSNMGSIASLVMAVIINEREDEEGDNLGQQQVKGRRLWGLVVCHHASPRFVPFPLRYACEFLMQVFGIQLNKEVELAAQLREKHILRTQTLLCDMLLRDAPIGIVIRSPSI

SEQ ID NO: 12441 - protein, 189 aa, Stangeria eriopus
DDHGEVLAEIRRSDLEPYLGLHYPATDIPQASRFLFMRNRVRMIYDCSSPPVKVIQDKRLPKPLSLCGSTLRAPHGWHAQYMANMGSIASLVMAVTINDSDDDIGSSGQQKGRRLWGLVVCHHTSPRFVPFPLRYACQFLMQVFGIQLNREVELAAQLREKHILRTQTMLCDMLLRDAPVGIVAQTPNI

SEQ ID NO: 12442 - protein, 188 aa, Stangeria eriopus
DEHGEVVAEIRRSDLEPYLGLHYPATDIPQASRFLFMQNRVRMICDCRAKPVRVIQAAKLRQPLCLVGSTLRAPHGCHAQYMVNMGSIASLVMAVVINVNDDAAGSGRGSSMKLWGLVVCHHTSPRAVPFPVRCACEFLMQAFGLQVNMELQLAAQLTEKHILKTQTLLCDMLLRDAPIGIVTQTPSV

SEQ ID NO: 12443 - protein, 192 aa, Ephedra major
DDHGEVISEIRRSDLEPYLGLHYPATDVPQASRFLFMKNRVRMICDCYSPPVRVIQDKRLKKELSFCGSTLRAPHGCHAQYMANMGSVASLVMAVIVNEKEDEEAENEGQSQQKGRKLWGLVVCHHTGPRFVPFPLRYACEFMMQVFSIQLNKEVELACQMREKQILRTQTLLCDMLLRDTPLGIISQKPSI

SEQ ID NO: 12444 - protein, 114 aa, Urtica dioica
HYPATDIPQAARFLFMKNKVRMIVDCNAKHVKVFQDEPLPLDLTLCGSTLRAPHSCHLQYMANMNSIASLVMAVVVNEGEEDGDNAQKRKRLWGLVVCHNTSPRFVPFPLRYAC

SEQ ID NO: 12445 - protein, 102 aa, Urtica dioica
HYSATDIPQAARFLFRQNRVRIICNCNAEPVRVVQSEDLKQPMCLVNSTLRAPHGCHVQYMSNMGSMASLALAVVINQTDSSRLWGLVVCHHSSPRYVPYPL

SEQ ID NO: 12446 - protein, 923 aa, Azotobacter vinelandii
MTRPGGGMGMVRIVWTLLLLLSCSASALAVQPAVLADREVRLSLGPYTLYVEDRDADLDAAQVLAMPESAFRPVEGDQANLGQSRSAWWFRVDLQNARDQSLGGFLEVNYPLLDDVRLTVLTPDGRQLQQESGDTRPPGMRPVPIRNLWFPLELPPGTSTLLVRVKSSSAITIPLYFGTSGASLAAHERQEGLNGVFYGVLLALFCCQLFLFLFLREPSQGWYLVYSLNSILLALGFDGYLFQWPPGLQHITVLLLIFSFWLTATQLTRHFLNIPQYFPLLDRILRLWMLGLGAVLLAAPLIGLSAWTTLAHFATLIGALLLPSCGAHVWRKNLRAGAYHLTAWALLLVSLGGQAFAELGLDLLGEHATMLAKIGIASNLLILAVGLADRFQQLRREGLYSHRAAEEALLQNQAKSRFLAKMSHEIRTPLNGVLGMLQLLKETRLDHSQRFYVDTIASSGSTLMAVINDILDYARIESGKLSLEHIEFDLEEMLSDTLNLFTAQAMEKRLRLHMSLDEGVPRHIQGDPTRLKQVLTNLLSNALKFTSEGQVRLDVSRRRKSDGSEHLYFGVSDSGIGIRQEAQARLFESFSQGDSSTTRRYGGSGLGLAISKELVEMMGGHIEVQSTPGLGSRFTFNLPLQRGGEMRDELFQLLAGRTALLASLDGFALDAIGRLLGRWGMNTERCRIPEKLPEQLASFDEPPLLLLIAPWPGSVEYWLDALYPHLAPGQRLLLICPPEQCRQLPASRSSLHMLGLPQPVGVAALRKKLVELHMEPSHALVPIEDHAGESHIPCILIAEDNPVNQLVVQELLKKRGYNVRLAGNGAEAVAEYHRAPSSIQMILMDCEMPEMDGFEATLQIRLLERLRKWPAVPIIALTAHTLDEHREYGLEVGMNDFLGKPVDKQLLHATVERYLSTRTLVDN

SEQ ID NO: 12447 - protein, 117 aa, Spinacia oleracea
HYSATDIPQAARFLFMKNKVRLICDCRARYVQVIQDEKLPFDLTLCGSTLRAPHGCHAQYMENMNSIGSLVMAVVVNDEDDDNNDGGSAPPQTQKRKRLWGLVVCHHTSPRFVPLPL

SEQ ID NO: 12448 - protein, 117 aa, Spinacia oleracea
ASRFLYKQNRVRMIVDCHVNPVSVIQDERLQQPLCLVGSTLRAPHGCHSQYMANMGSIASLVMAVIINGSDDEAAPGGRNAMRLWGLVVCHHTSPRSIPFPLRYACEFLMQAFGLQL

SEQ ID NO: 12449 - protein, 112 aa, Dianthus caryophyllus
PQASRFLFMKNKVRMICDCRAKFVRVIQDEKLSVDLSLCGSTLRAPHGCHAQYMENMNSIGSLVLAIVVNDEDEEEGGSAPAQPHKRKRLWGLVVCHHTSPRFVPFPLRYAC

SEQ ID NO: 12450 - protein, 113 aa, Dianthus caryophyllus
YPQAARFLFMKNKVRMICDCRAKFVRVFQDEKLSSDWTLCGSTLRAPHGCHAQYMENMNSIGSLVMAVVVNDEDEADNGSGPSQPQKRKRLWGLVVCHHTSPRFVPLPLRYAC

SEQ ID NO: 12451 - protein, 112 aa, Dianthus caryophyllus
TDIPQASRFLFLKNKVRMICDCLSSPVKVVQGEDLSQPLSLGGSTLRAPHGCHAQYMANMGSIASLVMAVTINDEEVEVTDQRKTRKLWGLVVCHHTSSRFIPYPLRYACEF

SEQ ID NO: 12452 - protein, 111 aa, Dianthus caryophyllus
TDIPQASRFLFKQNRVRVIVDCHAKPVCVVQDERLQQPLCLVGSTLRAPHGCHSQYMANMGSIASLVMAVIINGNDDESGGRNAMALWGLVVCHHTSPRSIPFPLRYACEF

SEQ ID NO: 12453 - protein, 1115 aa, Ipomoea nil
MENYGKAVTFSSSATSNLNTGKAIAQYNADAKLMAEFEQSRESGKSFDYSRSVIHAPQNVTEEEMTAYLSRIQRGGLIQPFGCMLAIEEPSFKIVGFSENCFDLLGLKSGVEPPERMSLIGIDARTLFTLSSRASLAKAVASREISLLNPIWVHSKINQKPFYAVLHRIDVGIVIDLEPANSADPALLLAGAVQSQKLAVRAISRLQSLPGGDIGTLCDTVVEDVQKLTGYDRVMVYKFHDDSHGEVVSEIRRSDLEPYLGLHYPATDIPQAARFLFKQNRVRMICDCNAQPVKVLQCEELKQPLCLVNSTLRSPHGCHTKYMANMGSIASLVMAVVINSSESMKLWGLVVCHHTSPRYVPFPLRYACEFLMQAFSLQLYMELQLASQLAEKKILQTQTLLCDMLLRDAPFGIVTQTPSIMDLVRCDGAALYYNGKCWLLGVTPTETQVKDIAEWLLHNHGDSTGLSTDCLSDAGYPGAPLLGDAVSGMATARITSKDFLFWFRSHTAKEVKWGGAKHHPEDKDDGGRMHPRSSFIAFLEVVKSRSLPWEDSEINAIHSLQLIMRDSLQGIGENYMKSVSSPQQNDSDGVRFYELSSMALELVRLVETATVPIFGVDSSGLINGWNAKIAELTGLQANVAIGKYLIDDVTHEDSHETFKALMCRALQGEEDRNVEVKLLKFGNHPTKEVVYLVVNACTSRDYKNDIIGVCFVGQDITPEKAVMDKFVRLQGDYEAIIQSLNPLIPPIFASDENACCSEWNAAMERLTGLVKCEVIGKRLPGEIFGGLCRLKGQDALTKFMILLYQGISGHDTEKLSFGFFDRKGNFIDVFITANKRTDERGNIIGCFCFLQTMAVDHPQISARDIEDDRECLSTLKEFAYIQQQMKNPLNGIRFTHKLLEGTVTSDHQKQFLETSEACEKQILSIIENMDSGGIVDGNRVELKTEEFVIGNVIDAVVSQVMIPLKEKNLQLLHDIPDQIKSLPIYGDQIKLQLVLSDFLLSIVRHAPSPDGWVEIRVSPGLKLIQDGNVFIHIQFRMTHPGQGLPSALIEDMVRGGTRWTTQEGVVLHLSQKLVRMMNGHVHYVREQQKCYFLIDLDFKTQKPRSRESSMDTKAD

SEQ ID NO: 12454 - protein, 1124 aa, Cucurbita pepo
MSTSRPSQSSSNSGRSRHSTRIIAQTSVDANVQADFEESGNSFDYSSSVRVTSDVSGDQQPRSDKVTTAYLHHIQKGKLIQPFGCLLALDDKTFKVIAYSENAPEMLTMVSHAVPSMGDYPVLGIGTDVRTIFTAPSASALLKALGFGEVTLLNPILVHCKTSGKPFYAIVHRVTGSLIIDFEPVKPYEGPVTAAGALQSYKLAAKAITRLQSLPSGSMARLCDTMVQEVFELTGYDRVMAYKFHDDDHGEVISEVAKPGLQPYLGLHYPATDIPQAARFLFMKNKVRMIVDCRAKHLKVLQDEKLQFDLTLCGSTLRAPHSCHLQYMENMNSIASLVMAVVVNEGDEENEGPALQQQKRKRLWGLVVCHNSSPRFVPFPLRYACEFLAQVFAIHVNKELELENQIIEKNILRTQTLLCDMLMRDAPLGIVSRSPNIMDLVKSDGAALLYKKKIWRLGLTPNDFQLLDIASWLSEYHMDSTGLSTDSLYDAGYPGAIALGDEVCGMAAVRITNNDMIFWFRSHTASEIRWGGAKHEHGQKDDARKMHPRSSFKAFLEVVKTRSLPWKDYEMDAIHSLQLILRNTFKDTDATEINRKSIQTTLGDLKIEGRQELESVTSEMVRLIETATVPILAVDLDGLINGWNTKIAELTGLPVDKAIGKHLLTLVEDSSVEVVRKMLFLALQGQEEQNVQFEIKTHGSHIEVGSISLVVNACASRDLRENVVGVFFVAQDITGQKMVMDKFTRLEGDYKAIVQNPNPLIPPIFGSDEFGWCSEWNPAMAKLTGWSREEVIDKMLLGEVFGVHKSCCRLKNQEAFVNLGIVLNNAMCGQDPEKASFGFLARNGMYVECLLCVNKILDKDGAVTGFFCFLQLPSHELQQALNIQRLCEQTALKRLRALGYIKRQIQNPLSGIIFSRRLLERTELGVEQKELLRTSGLCQKQISKVLDESDIDKIIDGFIDLEMDEFTLHEVLMVSISQVMLKIKGKGIQIVNETPEEAMSETLYGDSLRLQQVLADFLLISVSYAPSGGQLTISTDVTKNQLGKSVHLVHLEFRITYAGGGIPESLLNEMFGSEEDASEEGFSLLISRKLVKLMNGDVRYMREAGKSSFIITVELAAAHKSRTT

SEQ ID NO: 12455 - protein, 1125 aa, Populus tremuloides
MSSSRPSHSSSNSARSRHSARIIAQTTVDAKLHADFEESGSSFDYSSSVRVTDSVGGDQPPRSDKVTTAYLHHIQKGKLIQPFGCLLALDEKTFRVVAYSENAPELLTMVSHAVPSVGEHPVLGIGTDIRTIFTAPSASALQKAMGFGDVSLLNPILVHCKTSGKPFYAIVHRVTGSLIIDFEPVKPYEVPMTAAGALQSYKLAAKAITRLQSLPSGSMERLCDTMVQEVFELTGYDRAMAYKFHDDDHGEVVSEVTKPGMEPYLGLHYPATDIPQASRFLFMKNKVRMIVDCHAKHVKVLQDEKLPFDLTLCGSTLRAPHSCHLQYMENMNSIASLVMAVVVNDGDEDGDTPDSANPQKRKRLWGLVVCHNTSPRFVPFPLRYACEFLAQVFAIHVNKELELENQIVEKNILRTQTLLCDMLMRDAPLGIVTQSPNIMDLVKCDGAVLFYRNKIWRLGITPSDLQLQDIAFWLSEYHMDSTGLSTDSLYDAGYPGALALGDVVCGMAAVRITSKDMLFWFRSQTAAEIRWGGAKHEPGEKDDGRRMHPRSSFKAFLEVVKTRSLPWKDYEMDAIHSLQLILRNTFKDIETMDVDTKTIHARLSDLKIEGMQELEAVTSEMVRLIETATVPILAVDVDGLVNGWNTKISELTGLLVDKAIGKHLLTLVEDSSVDIVKRMLFLALQGKEEQNIQFEIKTHGSKSECGPICLVVNACASRDLHENVVGVCFVGQDITGQKMVMDKFTRIEGDYKAIVQNRNPLIPPIFGTDEFGWCSEWNPAMTNLTGWKREEVLDKMLLGEVFGLNMACCRLKNQEAFVNLGVVLNTAMTGQESEKVSFGFFARTGKYVECLLCVSKKLDREGAVTGVFCFLQLASQELQQALHVQRLSEQTALKRLKALAYLKKQIWNPLSGIIFSGKMMEGTELGAEQKELLHTSAQCQCQLSKILDDSDLDSIIEGYLDLEMVEFTLREYYGCYQSSHDEKHEKGIPIINDALKMAETLYGDSIRLQQVLADFCRCQLILTPSGGLLTVSASFFQRPVGAILFILVHSGKLRIRHLGAGIPEALVDQMYGEDTGASVEGISLVISRKLVKLMNGDVRYMREAGKSSFIISVELAGGHKSQKRA

SEQ ID NO: 12456 - protein, 1122 aa, Arabidopsis thaliana
MSGSRPTQSSEGSRRSRHSARIIAQTTVDAKLHADFEESGSSFDYSTSVRVTGPVVENQPPRSDKVTTTYLHHIQKGKLIQPFGCLLALDEKTFKVIAYSENASELLTMASHAVPSVGEHPVLGIGTDIRSLFTAPSASALQKALGFGDVSLLNPILVHCRTSAKPFYAIIHRVTGSIIIDFEPVKPYEVPMTAAGALQSYKLAAKAITRLQSLPSGSMERLCDTMVQEVFELTGYDRVMAYKFHEDDHGEVVSEVTKPGLEPYLGLHYPATDIPQAARFLFMKNKVRMIVDCNAKHARVLQDEKLSFDLTLCGSTLRAPHSCHLQYMANMDSIASLVMAVVVNEEDGEGDAPDATTQPQKRKRLWGLVVCHNTTPRFVPFPLRYACEFLAQVFAIHVNKEVELDNQMVEKNILRTQTLLCDMLMRDAPLGIVSQSPNIMDLVKCDGAALLYKDKIWKLGTTPSEFHLQEIASWLCEYHMDSTGLSTDSLHDAGFPRALSLGDSVCGMAAVRISSKDMIFWFRSHTAGEVRWGGAKHDPDDRDDARRMHPRSSFKAFLEVVKTRSLPWKDYEMDAIHSLQLILRNAFKDSETTDVNTKVIYSKLNDLKIDGIQELEAVTSEMVRLIETATVPILAVDSDGLVNGWNTKIAELTGLSVDEAIGKHFLTLVEDSSVEIVKRMLENALEGTEEQNVQFEIKTHLSRADAGPISLVVNACASRDLHENVVGVCFVAHDLTGQKTVMDKFTRIEGDYKAIIQNPNPLIPPIFGTDEFGWCTEWNPAMSKLTGLKREEVIDKMLLGEVFGTQKSCCRLKNQEAFVNLGIVLNNAVTSQDPEKVSFAFFTRGGKYVECLLCVSKKLDREGVVTGVFCFLQLASHELQQALHVQRLAERTAVKRLKALAYIKRQIRNPLSGIMFTRKMIEGTELGPEQRRILQTSALCQKQLSKILDDSDLESIIEGCLDLEMKEFTLNEVLTASTSQVMMKSNGKSVRITNETGEEVMSDTLYGDSIRLQQVLADFMLMAVNFTPSGGQLTVSASLRKDQLGRSVHLANLEIRLTHTGAGIPEFLLNQMFGTEEDVSEEGLSLMVSRKLVKLMNGDVQYLRQAGKSSFIITAELAAANK

SEQ ID NO: 12457 - protein, 1122 aa, Arabidopsis thaliana
MSGSRPTQSSEGSRRSRHSARIIAQTTVDAKLHADFEESGSSFDYSTSVRVTGPVVENQPPRSDKVTTTYLHHIQKGKLIQPFGCLLALDEKTFKVIAYSENASELLTMASHAVPSVGEHPVLGIGTDIRSLFTAPSASALQKALGFGDVSLLNPILVHCRTSAKPFYAIIHRVTGSIIIDFEPVKPYEVPMTAAGALQSYKLAAKAITRLQSLPSGSMERLCDTMVQEVFELTGYDRVMAYKFHEDDHGEVVSEVTKPGLEPYLGLHYPATDIPQAARFLFMKNKVRMIVDCNAKHARVLQDEKLSFDLTLCGSTLRAPHSCHLQYMANMDSIASLVMAVVVNEEDGEGDAPDATTQPQKRKRLWGLVVCHNTTPRFVPFPLRYACEFLAQVFAIHVNKEVELDNQMVEKNILRTQTLLCDMLMRDAPLGIVSQSPNIMDLVKCDGAALLYKDKIWKLGTTPSEFHLQEIASWLCEYHMDSTGLSTDSLHDAGFPRALSLGDSVCGMAAVRISSKDMIFWFRSHTAGEVRWGGAKHDPDDRDDARRMHPRSSFKAFLEVVKTRSLPWKDYEMDAIHSLQLILRNAFKDSETTDVNTKVIYSKLNDLKIDGIQELEAVTSEMVRLIETATVPILAVDSDGLVNGWNTKIAELTGLSVDEAIGKHFLTLVEDSSVEIVKRMLENALEGTEEQNVQFEIKTHLSRADAGPISLVVNACASRDLHENVVGVCFVAHDLTGQKTVMDKFTRIEGDYKAIIQNPNPLIPPIFGTDEFGWCTEWNPAMSKLTGLKREEVIDKMLLGEVFGTQKSCCRLKNQEAFVNLGIVLNNAVTSQDPDKVSFAFFTRGGKYVECLLCVSKKLDRKGVVTGVFCFLQLASHELQQALHVQRLAERTAVKRLKALAYIKRQIRNPLSGIMFTRKMIEGTELGPEQRRILQTSALCQKQLSKILDDSDLESIIEGCLDLEMKEFTLNEVLTASTSQVMMKSNGKSVRITNETGEEVMSDTLYGDSIRLQQVLADFMLMAVNFTPSGGQLTVSASLRKDQLGRSVHLANLEIRLTHTGAGIPEFLLNQMFGTEEDVSEEGLSLMVSRKLVKLMNGDVQYLRQAGKSSFIITAELAAANK

SEQ ID NO: 12458 - protein, 1122 aa, Armoracia rusticana
MSGSRPSQSSEGSRRSRHSARIIAQTTVDAKLHADFEESGSSFDYSTSVRVTGPVVENQPPRSDKVTTTYLHHIQKGKLIQPFGCLLALDEKTFKVIAYSENAPELLTMASHAVPSVGEHPVLGIGTDIRSLFTAPSASALQKALGFGDVSLLNPILVHCKTSAKPFYAIVHRVTGSIIVDFEPVKPYEVPMTAAGALQSYKLAAKAITRLQSLPSGSMERLCDTMVQEVFELTGYDRVMAYKFHEDDHGEVVSEVTKPGMEPYLGLHYPATDIPQAARFLFMKNKVRMIVDCNAKHARVLQDEKLSFDLTLCGSTLRAPHSCHLQYMANMDSIASLVMAVVVNEEDGEGDAPDSTTQPQKRKRLWGLVVCHNTTPRFVPFPLRYACEFLAQVFAIHVNKEVELENQIVEKNILRTQTLLCDMLMRDAPLGIVSQSPNIMDLVKCDGAALLYKDKIWKLGTTPSEFHLQEIASWLYEYHTDSTGLSTDSLYDAGFPKALSLGDAVCGMAAVRISSKDMIFWFRSHTAGEVRWGGAKHDPDDRDDARRMHPRSSFKAFLEVVKTRSLPWKDYEMDAIHSLQLILRNAFKDGESTDVNTKFIHSKLNDLKIDGIQELEAVTSEMVRLIETATVPILAVDSDGLVNGWNTKIAELTGLPVDEAIGKHLLTLVEDSSVEIVKRMLENALEGTEEQNVQFEIKTHLSRADAGPISLVVNACASRDLHENVVGVCFVAHDLTGQKTVMDKFTRIEGDYKAIIQNPNPLIPPIFGTDEFGWCTEWNPAMSKLTGLKREEVIDKMLLGEVFGTQTACCRLKNQEAFVNLGIVLNSAVTSQESEKVSFAFFTRGGKYIECLLCVSKKLDREGVVTGVFCFLQLASHELQQALHVQRLAERTALKRLKTLAYIKRQIRNPLSGIMFTRKMMEGTELGPEQRQILQTSSLCQKQLSKVLDDSDLERIIEGCLDLEMKEFSLNEVLTASTSQVMMKSNGKSVRITNETGEEVMSDTLYGDSIRLQQVLADFMLMSVNFTPSGGQLTVTASLRKDQLGRSVHLAYLEIRLTHTGAGIPELLLNQMFGTEKDVSEEGLSLMVSRKLVKLMNGDVQYLRQAGKSSFIISAELAAANK

SEQ ID NO: 12459 - protein, 1122 aa, Armoracia rusticana
MSGSRPSQSSEGSRRSRHSARIIAQTTVDAKLHADFEESGSSFDYSTSVRVTGPVVENQPPRSDKVTTTYLHHIQKGKLIQPFGCLLALDEKTFKVIAYSENAPELLTMASHAVPSVGEHPVLGIGTDIRSLFTAPSASALQKALGFGDVSLLNPILVHCKTSAKPFYAIVHRVTGSIIVDFEPVKPYEVPMTAAGALQSYKLAAKAITRLQSLPSGSMERLCDTMVQEVFELTGYDRVMAYKFHEDDHGEVVSEVTKPGLEPYLGLHYPATDIPQAARFLFMKNKVRMIVDCNAKHARVLQDEKLSFDLTLCGSTLRAPHSCHLQYMANMDSIASLVMAVVVNEEDGEGDAPDSTTQPQKRKRLWGLVVCHNTTPRFVPFPLRYACEFLAQVFAIHVNKEVELENQIVEKNILRTQTLLCDMLMRDAPLGIVSQSPNIMDLVKCDGAALLYKDKIWKLGTTPSELHLQEIASWLYEYHTDSTGLSTDSLHDAGFPKALSLGDAVCGMAAVRISLKDMIFWFRSHTAGEVRWGGAKHNPDDRDDARRMHPRSSFKAFLEVVKTRSLPWKDYEMDAIHSLQLILRNAFKDGESTDVNTNIIHSKLNDLKIDGIQELEAVTSEMVRLIETATVPILAVDSDGLVNGWNTKIAELTGLPVDEAIGKHLLTLVEDSSVEIVKRMLENALEGTEEQNVQFEIKTHQSRADAGTISLAVNACASRDLHENVVGVCFVAHDLTGQKTVMDKFTRIEGDYKAIIQNPNPLIPPIFGTDEFGWCTEWNPAMSKLTGLKREEVIDKMLLGEVFGTQKSCCRLKNQEAFVNLGIVLNGAVTSQESEKVSFAFFTRGGKYIECLLCVSKKLDREGVVTGVFCFLQLASHELQQALHVQRLAERTALKRLKAIAYIKRQIRNPLSGVMFTREMIEGTELGPEQRQILHTSALCQEQLSKVLDDSDLESIIEGCLDLEMKEFSLNEVLTASTSQVMMKSNGKSVRITNETGEEVMSDTLYGDSIRLQQVLADFMLMSVNFTPSGGQLTVTASLRKDQPGRSVHLAYLEIRLTHTGAGIPEFLLNQMFGTEEDVSEEGLSLMVSRKLVKLMNGDVQYLRQAGKSSFIISAELAAANK

SEQ ID NO: 12460 - protein, 1122 aa, Armoracia rusticana
MSGSRPSQSSEGSRRSRHSARIIAQTTVDAKLHADFEESGSSFDYSTSVRVTGPVVENQPPRSDKVTTTYLHHIQKGKLIQPFGCLLALDEKTFKVIAYSENSPELLTMASHAVPSVGEHPVLGIGTDIRSLFTAPSASALQKALGFGDVSLLNPILVHCKTSAKPFYAIVHRVTGSIIVDFEPVKPYEVPMTAAGALQSYKLAAKAITRLQSLPSGSMERLCDTMVQEVFELTGYDRVMAYKFHEDDHGEVVSEVTKPGLEPYLGLHYPATDIPQAARFLFMKNKVRMIVDCNAKHARVLQDEKLSFDLTLCGSTLRAPHSCHLQYMANMDSIASHVMAVVVNEEDGEGDATDSTTQPQKRKRLWGLVVCHNTTPRFVPFPLRYACEFLAQVFAIHVNKEVELENQIVEKNILRTQTLLCDMLMRDAPLGIVSQSPNIMDLVKCDGAALLYKDKIWKLGTTPSELHLQEIASWLYEYHTDSTGLSTDSLHDAGFPKALSLGDAVCGMAAVRISLKDMIFWFRSHTAGEVRWGGAKHNPDDRDDARRMHPRSSFKAFLEVVKTRSLPWKDYEMDAIHSLQLILRNAFKDGESTDVNTNIIHSKLNDLKIDGIQELEAVTSEMVRLIETATVPILAVDSDGLVNGWNTKIAELTGLPVDEAIGKHLLTLVEDSSVEIVKRMLENALEGTEEQNVQFEIKTHQSRADAGTISLAVNACASRDLHENVVGVCFVAHDLTGQKTVMDKFTRIEGDYKAIIQNPNPLIPPIFGTDEFGWCTEWNPAMSKLTGLKREEVIDKMLLGEVFGTQKSCCRLKNQEAFVNLGIVLNGAVTSQESEKVSFAFFTRGGKYIECLLCVSKKLDREGVVTGVFCFLQLASHELQQALHVQRLAERTALKRLKAIAYIKRQIRNPLSGVMFTRKMMEGTELGPEQRQILHTSALCQEQLSKVLDDSDLESIIEGCLDLEMKEFSLNEVLTASTSQVMMKSNGKSVRITNETGEEVMSDTLYGDSIRLQQVLADFMLMSVNFTPSGGQLTVTASLRKDQLGRSVHLAYLEIRLTHTGAGIPEFLLNQMFGTEEDVSEEGLSLMVSRKLVKLMNGDVQYLRQAGKSSFIISAELAAANK

SEQ ID NO: 12461 - protein, 190 aa, Botrychium lunaria
DEHGEVVSEIRQPDLEPYLGVHYPATDIPQASRFLFMKNKVRMICDCRAPPVRVIQDKESRRPISLAGSTIRAPHDCHAQYMENMGSIASLVMAVVVNENDEQPSNQSYRRKNRKLWGLIVCHHTTSRAVPFSLRSACEFLMQVFGLQLNIEVELAGQMREKHILRTQTLLCDMLLRDAPLGIVTQIPNI

SEQ ID NO: 12462 - protein, 214 aa, Prunus dulcis
TGVRPYEVPMTAAGALQSYKLAVKAIARLQSLPSGSMERLCDTMVQEVFELTGYDRVMAYKFHDDDHGEVVSEITKPGLEPYLGLHYPSTDIPQASRFLFMKNKVRMIVDCCAKQVKVLQDEKLPFDLTLCGSTLRAPHSYHLQYMKNMESIASLVMAVVVNEGDDEVASPDSVQPQKRKRLWGLVVCHNTSPRFVPFPLRYACEFLAQVFPYT

SEQ ID NO: 12463 - protein, 214 aa, Prunus persica
IDFEPVKPYEVPMTAAGALQSYKLAAKAIARLQSLPSGSMERLCDTMVQEVFELTGYDRVMAYKFHDDDHGEVVSEITKPGLEPYLGLHYPSTDIPQASRFLFMKNKVRMIVDCCAKQVKVLQDEKLPFDLTLCGSTLRSPHSCHLQYMKNMESIASLVMAVVVNEGDDEVASPDSVQPQKRKRLWGLVVCHNTSPRFVPFPLRYACEFLAQSS

SEQ ID NO: 12464 - protein, 149 aa, Prunus persica
VMVYKFHDDEHGEVVAESKRPDLEPYLGLHYPATDIPQASRFLFKQNRVRMIVDCHATPVHVIQDEGLMQPLCLVGSTLRAPHGCHSQYMANMGSIASLALAVIINGNDEEAVGGRNSMRLWGLVVCHHTSARCVPFPLRYACEFFTQA

SEQ ID NO: 12465 - protein, 933 aa, Ectocarpus siliculosus virus
MNMAGRTSNCDLLDLAKIAEIQSEGFLVCTHFKRDSMRLQIRNVSSNIGDAPFSLPAVRKDPHLFIGKCVPDCFSDSFADRISALFQRYLGNRSTRCSYTCDSSHKRYLVTVARTRDGLVFEVLPDDESPLEPFEMGHGGDLCALTVHTDQSALFKAACAAVTDFVDYDRSMVYQFQDDLSGKVVYEAIKPSLAETLEPYLNTFFPESDIPLPARQMFLIRPVRVMFDNDLSPVEIIGGDIDTSKCLLCSSHPVHKSYMRNMGVRSSLSIGIVVNSELWGLMCFHSYGDSVVHPTGREVSHFENLSTQVSVCLSNIQSATSFGRQTALSAIVDKGLSTDDIPAFFAENAPDLLRLMKTDCVFIRLGHQIKHWGDADLVLAGTDLDRVSRNASGKGWCLEEFDRPSRGVLGIIHGNLSIVFVRRSITSDKAWAGDPTHVKIMRPDGVPGPRGSFERYIQSGADKLNKWNAQDREMATHLSSRIEILVSTAKFFADKTKALVRGSPDNAGEADGYVRYDTEKTPVPLGAALISHFSHELKTPLHGVSSVLTLLYEEQSIGNANMQKQLGYGLECLETISKVVESVLVAASGRAHRKIESVCLERFVNSLAEKYAENNTLTVTITVPENYTRVMVDADLLRKTICGIIDNSMSAKSTVKPTHLSLSCCSTHREATMAWKSRTKGYAHRNIRNSEDASSISDSDWWYTFSVQDPGCGIHSDMIDNVLAFNDSSRMTTTITNSHQGVGVGVYECIANVFELNGSIGIASTVSKGTIVSVMLPAKVVVTDKSTVQVVPEAEDVFFVVDDNTVNRRLTSRLVKVAFRKTTGVAPLVGDFANGHLCIEEIKRARKSGKNILGILMDHHMPVMSGKEATQFIRDTEAHEGLAKIPIFGFTADCTDSTRDELLMSGMDDVLPKPMSMKVLEQTCIKMMSRKES

SEQ ID NO: 12466 - protein, 394 aa, Nassella viridula
EPARTEIPALSIAGAVQSQKLAVRAISRLQALPGGDVKLLCDTVVEHVRELTGYDRVMVYKFHDDEHGEVLAESRRADLEPYLGLHYPATDIPQASRFLFRQNRVRMIADCHAAPVRVIQDPAMQQPLCLVGSTLRSPHGCHAQYMANMGSIASLVMAVIISSGGDDEHNMGRGTIPSAMKLWGLVVCHHTSPRCIPFPLRYACEFLMQAFGLQLNMELQLAHQLSEKHILRTQTLLCDMLLRDSPTGIVMQSPSIMDLVKCDGAALYYHGKYYPLGVTPIEAQIKDIIEWLTVCHGDSTGLSTDSLADAGYSGATALGDAVCGMAVAYITPSDYLFWFRSHTAKEIKWGGAKHHPEDKDDGQRMHPRSSFKAFLEVVKSRSLPWENAEMDAIH

SEQ ID NO: 12467 - protein, 395 aa, Peridictyon sanctum
EPARTEDPALSIAGAVQSQKLAVRAISRLQALPGGDVKLLCDTVVEHVRELTGYDRVMVYKFHDDEHGEVLAESRRVDLEPYLGLHYPATDIPQASRFLFRQNRVRMIADCHAAPVRVIQDPAMPQPLCLVGSTLRSPHGCHAQYMANMGSIASLVMAVIISSGGEDEHNMTRGVIPSAMKLWGLVVCHHTSPRCIPFPLRYACEFLMQAFGLQLSMELQLAHQLSEKHILRTQTLLCDMLLRDSPTGIVTQSPSIMDLVKCDGAALFYHGKYYPLGVVTPTEAQIKDIIEWLTVCHGDSTGLSTDSLADAGYPGATALGDAVCGMAVAYITPSDYLFWFRSHTAKEIKWGGAKHHPEDKDDGQRMHPRSSFKAFLEVVKSRSLPWENAEMDAIE

SEQ ID NO: 12468 - protein, 190 aa, Tmesipteris tannensis
DQHGEVVAEIRRSDLDPYLGLHYPATDIPQASRFLFMKNRVRMICDCCAPAVRIIQDKELKQPLSLAGSTLRAPHGCHAYYMRNMGSIGSLVMAVIVNDNDAEASSSGHQPKNRKLWGMVVCHHTTPRAVPFSLRSACEFLMQVFGLQLNMEIELGAQMREKHILCTQTPLCDMLLRDAPIGIVSQSPNI

SEQ ID NO: 12469 - protein, 855 aa, Rhizobium leguminosarum
MSGTHEPVDLTNCDREPIHQLGSVQPFGFLLAVSSDWIVIRASANLAEFLGVTEANALGRPVISLISPEALHAIRNKLTTLRGSDVVERIFGIALTPDQNSFDLAVHLNEGQVIIEGERCQEDRHDAASLSMRSMMSRLDHTETLEAFFREGARQARALTGFDRVMVYRFDESGSGEVVAEAARAGIGSFLGLHYPASDIPVQARALYLRNLFRIIADVDAVPVPILPPLDEHGQPLDLSMSVLRSVSPIHIEYLKNMGVGASLSISIVVDGKLWGLFACHHYGPRLPSAQSRSTAELFGQMFASRLESRERRLALDYETKARRIADRLLTSVADNASLLDDPAWLIEALADAIPADGIGVWINGRLALAGIGPDERSFAALVRHLNRNAAGRIYAVDRLAETYPDLEVDDAVAGMLAIPISRSPRDYVVLFRQELVRTVRWGGDPHKPVEYGPNGPRLTPRKSFEAWSELVRGRSLPFTEAERRVAETIRVTLIEVVLRLTDEVSMARQTANERQELLIAELNHRVRNILSLITGIIRQSQATSVSLGDYIRQLEGRIQSLARAHDQITRDHWAPASLRQLLLAETAAYLGKNAQRIQMGGEDVLLEPQAFSTAALVFHELMTNSAKYGSLSGTGSGTVQLRWHRDDEGNLRIGWREKDGPPVVEPKRHGFGSTIIRRSIPYDLGGKAEVRYVEDGLEADFSIPARHVVGPTSERSNPLPVGATGRKTIPDDQPLSGLNVLLVENNLIIAMDGEDILRRLGADVATAPSVTEAMEILAGQSFDLALLDVNLGDETSFGIADRLAADGVPFVFATGYGEGIAQANSHSDAPVLQKPYTMEGVTDILARVPLPRRE

SEQ ID NO: 12470 - protein, 1137 aa, Glycine max
  unsure (1)..(1137): unsure at all Xaa locations
MSTSRPSQSSSNSGRSRRSARAMALATVDAKLHATFEESGSSFDYSSSVRISGTADGVNQPRVRKVTTAYLHHMQKGKMIQPFGCLLALDEKTRMHTAXVIAYSENAPEMLTMVSHAVPSVGDHPALGIGTDIKTLFTAPSASALQKALGCADVSLLNPVLVHCKTSGKPFYAIVHRVTGSVMVDFEPVRPYEVPMTAAGALQSYKLAAKAITRLQSLPSGNMERLCDTMVQEVFELTGYDRVMAYKFHEDDHGEVIREITKPCLEPYLGLHYPATDIPQASRFLFRKNKVRMIVDCHAKHVRVLQDEKLPFDLTLCGSTLRAPHSCHAQYMANMDSIASLVMAVVVNDNEEDGDTDAIQPQKRKRLWGLVVCHNTTPRFVPFPLRYACEFLAQVFAIHVNKEIELEYQIIEKNILXHPDTLVCLVMRDAPLGIVSESPNIMDLVKCDGAALIYRNKVWRLGVTPSEPQIREIALWLSEYHMDSTGFSTDSLFDAGFPSALSLGDVVCGMASVRVTAKDMVFWFRSHTAAEIRWGGAKHEAGEKDDSRRMHPRSSFKAFLEVVKARSLPWKEYEMDAIHSLQIILRNAFKEDTESLDLNAKAINTRLSDLKIEGINDLKIERMQELEAVTSEIVRLIDTATVPILAVDVDGLVNGWNIKIAELTGLPIGEATGKHLLTLVEDSSTDRVKKMLNLALLGEEEKNVQFEIKTHGSKMDSGPISLVVNACASRDLRDNVVGVCFVAHDITAQKNVMDKFIRIEGDYKAIVQNRNPLIPPIFGTDEFGWCCEWNPAMMKLTGWKREEVMDKMLLGEIFGTQMAPCWFRNREGFIKYDAQLNKXAMTGSETEKVPFGFFARNGKYVECLLSVSKKLDVEGLVTGVFCFLQLASPELQQALHIQRLSEQTASKRLNALSYMKRQIRNPLCGIVFSRKMLEGTDLGTEQKQLLRTSAQCQQQLSKILDDSDLDTIIDGYLDLEMAEFTLHEVLVTSLSQVMTKSNGKSIRIVNDVAEQIVMETLYGDSLRLQQVLADFLLISINFTPNGGQVVVAGTLTKEQLGKSVHLVKLELSITHGGSGVPEVLLNQMFGNNGLESEEGISLLISRKLLKLMNGDVRYLREAGKSAFILSAELAAAHNLKA

SEQ ID NO: 12471 - protein, 1131 aa, Glycine max
MSTSRPSQSSSNSRRSRHSARMAQATVDAKIHATFEESGSSFDYSSSVRVSGTADGVNQPRSDKVTTAYLRGKMIQPFGCLLAIDEKNHMQTCKVIAYSENEPEMLTMVSHAVPSVGDHPALGIGTDIKTLFTAPSVSGLQKALGCADVSLLNPILVHCKTSGKPFYAIVHRVTGSLIVDFEPVKPYEVPMTAAGALQSYKLAAKAITRLQSLPSGNMERLCDTMVQEVFELTGYDRVMAYKFHEDDHGEVIREITKPCLEPYLGLHYPATDIPQASRFLFRKNKVRMIVDCHAKHVRVLQDEKLQFDLILCGSTLRAPHSCHAQYMANMDSIASLVLAVVVNDNEEDGDTDAVQPQKTERLWGLVVCHNTTPRFVPFPLRYAREFLPQVFADHVHKEIELEYQIIEKNILHHPGHLLCMLMRDAPLGIASESPNIMDLVKCDGAALIYRNKVWRLGVTPSEPQIREIALWLSEYHMDSTSFSTDSLFDAGFPSALSLGDVVCGMASVRVTAKDMVFWFRSHTAAEIRWGGAKHEAGEKDDSRRMHPRSSFKAFLEVVKARSLPWKEYEMDAIHSLQIILRNAFKEDTESLDLNAKAINTRLRDLKIEGINDLKIERMQELEAVTSEIVRLDYTATVPILAVDVDGLVNGWNIKIAELTGLPIGEATGKHLLTLVEDSSTDRVKKMLNLALLGEEEKNVQFEIKTLGSKMDSGPISLVVNRCASRDLRDNVVGVCFVAHDITAQKNVMDKFIRIEGDYKAIVQNRNPLIPPIFGTDEFGWCCEWNPAMMKLTGWKREEVMDKMLLGEIFGTQMAACRLKNQEAFVNLGVVLNKAMTGSETEKVPFGFFARNGKYVECLLSVSKKLDVEGLVTGVFCFLQLASPELQQALHIQRLSEQTASKRLNALSYMKRQIRNPLCGIVFSRKMLEGTDLGTEQKQLLRTSAQCQQQLSKILDDSDLDTIIDGYLDLEMAEFTLHEVLVTSLSQVMEKSNGKSIRIVNDVAGHIMMETLYGDSLRLQQVLADFLLISINFTPNGGQVVVAGSLTKEQLGKSVHLVKLELSITHGGSGVPEVLLNQMFGNNGLESEEGISLLIRAKLLKLMNGDVRYLREAGKSAFILSAELAAAHNLKA

SEQ ID NO: 12472 - protein, 1131 aa, Glycine max; identical to SEQ ID NO: 12471

SEQ ID NO: 12473 - protein, 191 aa, Vittaria lineata
DEHGEVVAEIRKSDLEPYLGLHYPATDIPQASRFLFMKNRVRMICDCRADAVKVTQDREVRQPLSLAASTLRAPHGCHSQYMANMGSAASLVMAVAVNSNEEDTSSSKPHQLKPRKLWGLVVCHHTSPRAVAFPLRSACEFLVQVFGLQLNMEVELAVQMREKHILRTQTLLCDMLLRDAPIGVVSESPNI

SEQ ID NO: 12474 - protein, 103 aa, Lathyrus odoratus
QAARFLFMKNKVRMIVDCHAKHVKVLQDEKLPFDLTLCGSTLRAPHSCHLQYMANMDSIASLVMAVVVNDSDEDGDSRDAVLPQKKKRLWGLVVCHNTTPRFV

SEQ ID NO: 12475 - protein, 1124 aa, Lathyrus sativus
MSTTRPSQSSNNSGRSRNSARIIAQTTVDAKLHATFEESGSSFDYSSWVRVSGSVDGDQQPRSNKVTTAYLNHIQRGKQIQPFGCLLALDEKTCKVVAYSENAPEMLTMVSHAVPSVGDHPALGIGTDIRTVFTAPSASALQKALGFAEVSLLNPILVHCKTSGKPFYAIIHRVTGSLIIDFEPVKPYEVPMTAAGALQSYKLAAKAITRLQSLASGSMERLCDTMVQEVFELTGYDRVMAYKFHEDDHGEVIAEIAKPGLEPYLGLHYPATDIPQAARFLFMKNKVRMIVDCNAKHVKVLQDEKLPFDLTLCGSTLRAPHSCHLQYMANMDSIASLVMAVVVNDSDEDGDSADAVLPQKKKRLWGLVVCHNTTPRFVPFPLRYACEFLAQVFAIHVNKEIELEYQILEKNILRTQTLLCDMLMRDAPLGIVSQSPNIMDLVKCDGAALFYRNKLWLLGATPTEYQIREIALWMSEYHTDSTGLSTDSLLDAGFPGALSLSDTVCGMAAVRITSKDIVFWFRSHTAAEIRWGGAKHEPGEQDDGRKMHPRSSFKAFLEVVKARSVPWKDFEMDAIHSLQLILRNASKDTDIIDLNTKAINTRLNDLKIEGMQELEAVTSEMVRLIETATVPILAVDVDGTVNGWNIKIAELTGLPVGEAIGKHLLTLVEDSSTDIVKKMLNLALQGEEEKNVQFEIKTHGDQVEFGPISLIVNACASRDLRENVVGVCFVAQDITAQKTVMDKFTRIEGDYKAIVQNPNQLIPPIFGTDEFGWCCEWNAAMIKLTGWKREEVMDKMLLGEVFGTQMSCCRLKNQEAFVNFGIVLNKAMTGLETEKVAFGFFSRKGKYVECLLSVSKKIDAEGLVTGVFCFLQLASPELQQALHIQRLSEQTALKRLKVLTYMKRQIRNPLAGIVFSSKMLEGTDLETEQKQIVNTSSQCQRQLSKILDDSDLDGIIDGYLDLEMAEFTLHEVLVTSLSQVMNRSNTKGIRIANDVAEHIAKESLYGDSLRLQQVLADFLLISINSTPNGGQVVIASSLTKEQLGKSVHLVNLELSITHGGSGVPEAALNQMFGNNVLESEEGISLHISRKLLKLMNGDVRYLKEAGKSSFILSVELAAAHKLKG

SEQ ID NO: 12476 - protein, 394 aa, Anomochloa marantoidea
EPARTEDPALSIAGAVQSQKLAVRAISRLQALPGGDVKLLCDTVVEHVRELTGYDRVMVYKFHDDEHGEVVAESRRADLEPYLGLHYPATDIPQASRFLFRQNRVRMIADCHAAPVRVIQNPSLTQPLCLVGSTLRAPHECHAQYMANMGSIASLAMAVIISSSGDDENNVGRCGISSTMKLWGLVVCHHTSPRCIPFPLRYACEFLMQAFGLQLNMELQLAHQLSEKHILRTQTLLCDMLLRDSPTGIATQSPSIMDLVKCDGAALYYHGKYYPLGVTPTESQIKDIIEWLGMCHGDSTGLSTDSLADAGYPGAASLGDAVSGMAVAYITPNDYLFWFRSHTAKEIKWGGAKHHPDDKDDGQRMHPRSSFKAFLEVVKSRSLPWENAEMDAIH

SEQ ID NO: 12477 - protein, 394 aa, Pharus lappulaceus
EPARTEDPALSIAGAVQSQKLAVRAISRLQALPGGDVKLLCDTAVEHVRELTGYDRVMVYRFHDDKHGEVVAESRRDDLEPYLGLHYPETDIPQASRFLFRQNRVRMIADCHAAPVRVIQDPALPQPLCLVGSTLRAPHGCHAQYMANMGSIASLVMAVIISSGGDDEHNVARGAISSAMKLWGLVVCHHTSPRCIPFPLRYACEFLMQAFGLQLNMELQLAHQLSEKHILRTQTLLCDMLLRDSPTGIVTQSPSIMDLVKCDGAALYYHGKYYPLGVTPTEAQIKDIIEWLTLCHGDSTGLSTDSLADAGYPGAAALGDAVCGMAVAYITPSDYLFWFRSHTAKEIKWGGAKHHPEDKDDGQRMHPRSSFKAFLEVVKSRSLPWENAEMDAIH

SEQ ID NO: 12478 - protein, 388 aa, Molinia caerulea
EDPALSIAGAVQSQKLAVRAISRLQALPGGDVKLLCDTVVENVRELTGYDRVMVYRFHEDEHGEVVAESRRADLEPYLGLHYPATDIPQASRFLFRQNRVRMIADCHATPVRVIQDPGLSQPLCLVGSTLRAPHGCHAQYMANMGSIASLVMAVIIIIGGDDEQTARGSISSAMKLWGLVVCHHTSPRFIHFPLRYACEFLMQAFGLQLNMELQLAHQLSEKHILRTQTLLCDMLLRDSPSGIVMQSPSIMDLVKCDGAALYYHGKYYPLGVTPTESQIMDIIEWLTMCHGGSTGLSTDSLADAGYLGAAALGDAVCGMAVAYITSSDYLFWFRSHTAKEIKWGGAKHHPEDKDDGQRMHPRSSFKAFLEVIKSRSLPWENAEMDAIH

SEQ ID NO: 12479 - protein, 394 aa, Diarrhena obovata
EPARTEDPALSIAGAVQSQKLAVRAISRLQALPGGDVKLLCDTVVEHVRELTGYDRVMVYKFHDDEHGEVLAESRRADLEPYLGLHYPATDIPQASRFLFWQNRVRVIADCHAAPVRVIQDPAMPQPLCLVGSTLRSPHGCHAQYMANMGSIASLVMAVIISSGGEDEHNMARGAIPSAMKLWGLVVCHHTSPRCIPFPLRYACEFLMQAFGLQLNMELQLAHQLSEKHILRTQTLLCDMLLRDSPAGIVMQSPSIMDLVKCDGAALYYHGKYYPLGVTPTEAQIKDIIEWLTVCHGDSTGLSTDSLADAGYSGATALGDEVCGMAVAYITPSDYLFWFRSHTAKEIKWGGAKHHPEDKDDGQRMHPRSSFKAFLEVVKSRSLPWENAEMDAIH

SEQ ID NO: 12480 - protein, 397 aa, Streptogyna americana
TGYDRVMVYRFHDDEHGEVVAESRRADLEPYLGLHYPATDIPQASRFLFRQNRVRMIADCHAAPVKVIQDPALPQPLCLVGSTLRAPHGCHAQYMANMGSIASLVMAVIISSGGDDEHNMMRGGIPSAMKLWGLVVCHHTSPRCIPFPLRYACEFLMQAFGLQLNMELQLAHQLSEKHILRTQTLLCDMLLRDSPTGIVTQSPSIMDLVKCDGAALYYHGKYYPLGVTPTEAQIKDIIEWLTLCHGDSTGLSTDSLADAGYPSAAALGDAVCGMAVAYITPSDYLFWFRSHTAKEIKWGGAKHHPEDKDDGQRMHPRSSFKAFLEVVKSRSLPWENAEMDAIHSLQLILRDSFRDAAEGTSNSKAIVNGQVQLGELELRGIDELSSVAREMVRLIET

SEQ ID NO: 12481 - protein, 304 aa, Aristida longiseta
QYMANMGSIASLVMAVIISSGGDDEQLGRGGISSAMKLWGLVVCHHTSPRFIPFPLRYACEFLMQAFGLQLNMELQLAHQLSEKHILRTQTLLCDMLLRDSPTGIVAQSPSIMDLVKCDGAALYYHGKYYPLGVTPTESQIKDIIEWLMLCHGDSTGLSTDSLADAGYHGAAALGDAVCGMAVAYITPSDYLFWFRSHTAKEIKWGGAKHHPEDKDDGQRMHPRSSFKAFLEVVKSRSLPWENAEMDAIHSLQLILRDSFRDAAEGTSNSKAMVNGQVQLGELELRGINELSSVAREMVRLIET

SEQ ID NO: 12482 - protein, 106 aa, Aristida longiseta
QAARFLFMKNKVRMICDCRARSVKIIEDEALSIDISLCGSTLRAPHSCHLQYMENMKSIASLVMAVVVNENEEGDEAEPGQPPQQQQKKKLWGLLVCHHESPRYVP

SEQ ID NO: 12483 - protein, 104 aa, Aristida longiseta
QASRFLFMKNKVRMICDCSATPVKIIQDDGLAQPLSLCGSTLRAPHGCHAQYMANMGSVASLVMSVTVNEDDEEDGDTGSDQQPKGRKLWGLVVCHHTSPRFVP

SEQ ID NO: 12484 - protein, 394 aa, Olyra latifolia
EPARTEDPALSIAGAVQSQKLAVRAISRLQALPGGDVKLLCDTVVEHVRELTGYDRVMVYRFHEDEHGEVVAESRRADLEPYLGLHYPATDIPQASRFLFRQNRVRMIADCHAAPVKVIQDSALQQPLCLVGSMLRAPHGCHAQYMANMGSIASLVMAVIISSGGDDEHNITRGGIPSAMKLWGLVVCHHTSPRCIPFPLRYACEFLMQAFGLRLNMELQLAHQLSEKHILRTQTLLCDMLLRDSPTGIVTQSPSIMDLVKCDGDALYYHGKYYPLGVTPTEVQIKDIIEWLTVCHGDSTGLSTDSLADAGYPGAAALGDAVCGMAVAYITPSDYMFWFRSHTAKEIKWGGAKHHPEDKDDGQRMHPRSSFKAFLEVVKSRSLPWENAEMDAIH

SEQ ID NO: 12485 - protein, 102 aa, Joinvillea ascendens
QASRFLFMKNKVRMICECSAPPVKVVQDDRLAQPLSLCGSTLRAPHGCHAQYMANMGSIASLVMSVTINEDDDDDTGSDQQQKGRKLWGLVVCHHTCPRFVP

SEQ ID NO: 12486 - protein, 103 aa, Joinvillea ascendens
  unsure (1)..(103): unsure at all Xaa locations
QASRFLFRQNRVRMIADCHAAXVRVIQDPALPQPLCLVGSTXRAPHGCHAQYMANMGSIASLVMAVIISHGADDDNVPRTGTSSAMKLWGLVVCHHTSPRCIP

SEQ ID NO: 12487 - protein, 396 aa, Thysanolaena maxima
  unsure (1)..(396): unsure at all Xaa locations
TGYDRVMVYRFHEDEHGEVVAESRRDGLEPYLGLHYPATDIPQASRFLFRQNRVRMIVDCHATAVRVIQDPGLSQPLCLVGSTLRAPHGCHAQYMANMGSIASLVMAVIISSGGDDEQTMRGGISSAMKLWGLVVCHHTSPRFIPFPLRYACEFLMQAFGLQLNMELQLAHQLSEKHILRTQTLLCDMLLRDSPTGIVTQSPSIMDLVKCDGAALYYHGRYYPLGVTPTEFQIKDIIEWLTACHGDSTGLSTDSLADAGYHGAAALGDAVCGMAVAYITPSDYLFWFRSHTAKEIKWGGAKHHPEDKDDGQRMNPRSSFKAFLEVVKSRSLPWENAEMDAIHSLQLILRDSFRDSAEGTSNSKAIVNGQVQLGELELRGINELSSVAREMVRXIET

SEQ ID NO: 12488 - protein, 394 aa, Streptochaeta angustifolia
EPASTEDPALSIAGAVQSQKLAVRAISRLQALPGGDVKLLCDTVVEHVRELSGYDRVMVYRFHDDEHGEVVAENRRADLEPYLGLHYPAMDIPQASRFLFRQNRVRMIADCHAAPVRVIQDPSLKQPLCLVGSTLRAPHECHAQYMANMGSIASLVMAVIISSGGDDENSVGRSGISSATKLWGLVVCHHTSPRCIPFPLRYACEFLMQAFGLQLNMELQLAHQLSEKHILRTQTLLCDMLLRDSPTGIVMQSPSIMDLVKCDGAALYYHRKYYPLGITPTEAQIKDIIDWLAMCHGDSTGLSTDSLADAGYPGAAALGDAVCGMAVAYITPNDYLFWFRSHTAKEIKWGGAKHHPEDKDDGQRMHPRSSFKAFLEVVKSRSLPWENAEMDAIH

SEQ ID NO: 12489 - protein, 386 aa, Chasmanthium latifolium
PALSIAGAVQSQKLAVRAISRLQALPGGDVKLLCDTVVEHVRELTGYDRVMVYRFHEEEHGEVVAESRRDGLEPYLGLHYPATDIPQASRFLFRQNRVRMIADCHATAVRVIQDPGLSQPLCLVGSTLRAPHGCHAQYMANMGSIASLVMAVIISSGGDDEQTSRGGMSSAMKLWGLVVCHHTSPRFIPFPLRYACEFLMQAFGLQLNMELQLAHQLSEKHILRTQTLLCDMLLRDSPTGIVTQSPSIMDLVKCEGAALYYHGKYYPLGVTPTESQIKDIIEWLMLCHRDSTGLSTDSLADAGYVSAAALGDAVCGMAVAYITPSDYLFWFRSHTAKEIKWGGAKHHPEDKDDGQRMHPRSSFKASLEVVKSRSLPWENAEMDAIH

SEQ ID NO: 12490 - protein, 392 aa, Lithachne pauciflora
EPARTEDPALSIAGAVHSQKLAVRAISRLQALPGGDVKLLCDTVVEHVRELTGYDRVMVYRFHEDEHGEVVAESRRADLEPYLGLHYPATDIPQASRFLFRQNRVRMIADCHAAPVRVIQDPALQQPLCLVGSTLRAPHGCHAQYMANMGSIASLVMAVIISSGGDDEHNITRGGIPSAMKLWGLVVCHHTSPRCIPFPLRYACEFLMQAFGLQLSMELQLAHQLSEKHILRTQTLLCDMLLRDSPTGIVTQSPSIMDLVKCDGAALYYHGKYYPLGVTPTEAQIKDIIEWLTLCHGDSTGLSTDNFADAGYPGAAALGDAVCGMAVAYITPSDYLFWFRSHTAKEIKWGGAKHHPEDKDDGQRMHPRSSFKAFLEVVKSRSLPWENAEMDA

SEQ ID NO: 12491 - protein, 465 aa, Coptis trifolia
SGKPFYAIAHRVTGSLIIDFEPVKPYEVPMTAAGALQSYKLAAKAITRLQSLPGGSMERLCDAVVQEVYELTGYDRVMAYKFHEDDHGEVVSEVTKEGLEPYLGLHYPATDIPQAARFLFMKNKIRMICDCRAKHVRVLQDEKLSFDLTLCGSTLRAPHSCHLQYMENMDSIASLVMAVVVNDDDEDDEGTRPSQPQKRKRLWGHAVCHNTTPRFVPFPLRYACEFLIQVFAIHVSKEFELENQILEKNILRTQTLLCDMLMRNVPLGIVSQSPNIMDLVKCDGAALLYKNKIWRLGSSPNEIQIRDIASWLSDYHMDSTGLSSDSLYDAGFPGALSIADTVCGMAAVRINSKDMLFWFRSHTAAEVRWGGAKHDPGEKDDGRKMHPRSSFKAFLEVVKTRSAPWKDYEMDAIHSLQLILRSAFKDIETTDGNTKAFHSQLDNLKINGMEELEAVTNEMVRLIET

SEQ ID NO: 12492 - protein, 391 aa, Coptis trifolia
DLEPVNPADVPVTAAGAMKSYKLAAKAISRLQSLPSGNIAVLCDVLVQEVSDLTGYDRVMVYKFHEDDHGEVIAECRVPELEPYLGLHYPATDIPQASRFLFMRNKVRMICDCSAAPVKVIQDNKLEQPLSLGGSALRAPHGCHAQYMANMGSVASLVMSVTINENDDQMETDQQKGRKLWGLLVCHHTSPRFVPYPLRYACEFLIQVFGMQINKEVELATQVRERHILQTQTVLCDMLLRDAPIGIVTQSPNIMDLVKCNGAALYYRSRFWLLGVTPTEAQIRDIAEWLLQYHNASTGLSTDSLMEAGFPGASVLGTAVCGMAAIKITLKDFLFWFRSHTAKEIKWGGAKHNPTEKDDGWKMHPRSSFKAFLEVVKHRSLPWEDVEMDAI

SEQ ID NO: 12493 - protein, 179 aa, Phaseolus vulgaris
GLHYPATDIPQASRFLFMKNKVRMIVDCYAKHVKVLQDEKLPFDLTLCGSTLRAPHSCHAQYMANMDSIASLVMAVVVNDNEEDGDTDAVQPQKRKRLWGLVVCHNTTPRFVPFPLRYACEFLAQVFAIHVNKEIELEYQIIEKNILRTQTLLCDMLMRDAPLGIVSQSPNIMDLVKCD

SEQ ID NO: 12494 - protein, 1124 aa, Pisum sativum
MSTTRPSQSSNNSGRSRNSARIIAQTTVDAKLHATFEESGSSFDYSSSVRVSGSVDGDQQPRSNKVTTAYLNHIQRGKQIQPFGCLLALDEKTCKVVAYSENAPEMLTMVSHAVPSVGDHPALGIGTDIRTVFTAPSASALQKALGFAEVSLLNPILVHCKTSGKPFYAIIHRVTGSLIIDFEPVKPYEVPMTAAGALQSYKLAAKAITRLQSLASGSMERLCDTMVQEVFELTGYDRVMAYKFHEDDHGEVIAEIAKPGLEPYLGLHYPATDIPQAARFLFMKNKVRMIVDCNAKHVKVLQDEKLPFDLTLCGSTLRAPHSCHLQYMANMDSIASLVMAVVVNDSDEDGDSADAVLPQKKKRLWGLVVCHNTTPRFVPFPLRYACEFLAQVFAIHVNKEIELEYQILEKNILRTQTLLCDMLMRDAPLGIVSQSPNIMDLVKCDGAALFYRNKLWLLGATPTESQLREIALWMSEYHTDSTGLSTDSLSDAGFPGALSLSDTVCGMAAVRITSKDIVFWFRSHTAAEIRWGGAKHEPGDQDDGRKMHPRSSFKAFLEVVKARSVPWKDFEMDAIHSLQLILRNASKDTDIIDLNTKAINTRLNDLKIEGMQELEAVTSEMVRLIETATVPILAVDVDGTVNGWNIKIAELTGLPVGEAIGKHLLTLVEDSSTDIVKKMLNLALQGEEEKNVQFEIKTHGDQVESGPISLIVNACASKDLRENVVGVCFVAQDITAQKTVMDKFTRIEGDYKAIVQNPNQLIPPIFGTDEFGWCCEWNAAMIKLTGWKREEVMDKMLLGEVFGTQMSCCRLKNQEAFVNFGIVLNKAMTGLETEKVPFGFFSRKGKYVECLLSVSKKIDAEGLVTGVFCFLQLASPELQQALHIQRLSEQTALKRLKVLTYMKRQIRNPLAGIVFSSKMLEGTDLETEQKRIVNTSSQCQRQLSKILDDSDLDGIIDGYLDLEMAEFTLHEVLVTSLSQVMNRSNTKGIRIANDVAEHIARETLYGDSLRLQQVLADFLLISINSTPNGGQVVIAASLTKEQLGKSVHLVNLELSITHGGSGVPEAALNQMFGNNVLESEEGISLHISRKLLKLMNGDVRYLKEAGKSSFILSVELAAAHKLKG

SEQ ID NO: 12495 - protein, 415 aa, Hypecoum imberbe
SGKPFYAIVHRVTGSLIVDFEPVKPYEVPMTAAGALQSYKLAAKAIAKLQSLPSGSMERLCNTVVQEVFELTGYDRVMAYYFHEDDHGEVIAEVTKPGLEPYLGLHYPATYIPQAARFLFMKNRIRMICDCRAKHVKVLQDEKLPADLTLCGSTLRAPHTCHLQYMENMGSIASLVMAVVVNESNDEEESSEPPSQAPKKKKLWGLVVCHNTSPRFVPFPLRYACEFLIQVFAVHVNKEFELDNQIHEKRILRTQTLLCDMLMRDAPFGIISQSPNVMDLVKCDGAALLYKNKIYRLGLTPSEFQINDIASWLTEYHMDSTGLSTDSLYDAGFPGALSLGDAVCGMAAVRITCKDMLFWFRSHTAAEVRWGGAKHDPDERDDGRKMHPRSSFKAFLEVVKTRSLPWKDYEMDAIH

SEQ ID NO: 12496 - protein, 392 aa, Hypecoum imberbe
DLEPVNPSDVPITAAGALKSYKLAAKAISRLQSLPSGNIPLLCDVLAREVRELTGYDRVMVYKFHEDEHGEVIAECRELDLEPYLGLHYPATDIPQASRFLFLKNKVRMICDCSAQPVKVIQDEKLAQPLSLCGSTLRAPHGCHSQYMTNMGSVASLVMSLTINEDDDEMETSTQKGRKLWGLVVCHHTSPRFVPYPLRYACEFLIQVFGIQLNKEVELASQLMEKHILKMQTVLCDMLLRDAPVGIVAQSHNVMDLVKCDGAALYYRNKLWLLGVTPTEAQVRDIARWLLECHYGTTGLSTDSLMEAGYPGASGLGDAVCGTAAISITSKDFLFWFRSQTAKEIKWGGAKHDPMDKDGLRKMHPRSSFKAFLEVVKCRSVPWEDIEMDAIQ

SEQ ID NO: 12497 - protein, 103 aa, Wisteria floribunda
QATRFLFMRNKVRMIVDCRAKHVKVLQDKKIPFDLTFCGSTLRAPHSCHLQYMENMNASASLVLAVVVNDNDEDEDSSNDVQPQKRKRLWGLVVCHHITPRFV

SEQ ID NO: 12498 - protein, 103 aa, Wisteria floribunda
QAARFLFMKEQGAYIVDCHAKHVKVLQDEKLPFDLTLCGSTLRAPHSCHLQYMANMDSIASLVMAVVVNDSDEDGDSPDAVHPQKRKRLWGLVVCHNTTPRFV

SEQ ID NO: 12499 - protein, 90 aa, Wisteria floribunda
QASRFLFKQNRVRMICDCHAKPVKVIQSEELRQPLCLVNSTLRSPHDCHTHYMANMGSIASLVMAVIVNANDAPRLWGLLVCHHTSPRYV

SEQ ID NO: 12500 - protein, 245 aa, Goupia glabra
ALSIAGAVQSQKLAVRAISQLQSLPGGDIKVLCDTVVESVRELTGYDRVMVYKFHEDEHGEVVAENKRPDLEPYIGLHYPSTDIPQASRFLFKQNRVRMIVDCHATPVRVIQDKGLMQPLCLVGSTLRAPHGCHAQYMANMGSTASLAMAVIITGNDEEAIGGRNSMRLWGLVVCHHTSARCIPFPLRYACEFLMQAFGLQLNMELQLASQLSEKRVLRTQTLLCDMLLRDSPTGIVTQSPSIMD

SEQ ID NO: 12501 - protein, 245 aa, Goupia glabra
ALSIAGAVQSQKLAVRAISQLQSLPGGDIKVLCDTVVESVRELTGYDRVMVYKFHEDEHGEVVAENKRPDLEPYIGLHYPSTDIPQASRFLFKQNRVRMIVDCHATPVRVIQDKGLMQPLCLVGSTLRAPHGCHAQYMANMGPTASLAMAVIITGNDEEAIGGRNSMRLWGLVVCHHTSARCIPFPLRYACEFLMQAFGLQLNMELQLASQLSEKRVLRTQTLLCGMLLRDSPTGIVTQSPSIMD

SEQ ID NO: 12502 - protein, 441 aa, Pteridophyllum racemosum
  unsure (1)..(441): unsure at all Xaa locations
PYEVPMTAAGALQSYKLAAKAIAKLQPLHSGNMERLCDTVVQEVFDLTGYDRTMAYKFHDDDHGEVISEVTKPGLEPYLGLHYPATDIPQAARFLFMKNKIRMICDCNAKQVKVLQDEKIPFDLTLCGSTLRAPHTCHLLYMKNMGSAASLVMAIVXNEGDEEEEASGPSQPQKKKRLWGLVVCHNTTPRFVPFPLRYACEFLLQVFAIHVNKEFELENQILEKNILRTQTLLCDMLMRDAPLGILSQSPNIMDLVRCNGAALLYKNKIHRLGLTPSDFQIHDIASWLSEHHMDSTGLSTDSLYDAGFPGALSLGDQVCGMAAVRITSKDMLFWFRSHTAAEVRWGGAKHNPSEEDDGRKMHPRSSFKAFLEVVKTRSSPWRDYEMDAIHSLQLILRNAFKDAETADLNATVIHSGLNNLKIEGMEELEAVTNEMVRLIET

SEQ ID NO: 12503 - protein, 461 aa, Pteridophyllum racemosum
SGKPFYAILHRIDVGFVIDLEPVNPLDVPVTAAGALKPYKLAAKAISRLQSLPSGNISLLCDVLAREVSELTGYDRVMVYKFHEDEHGEVVSECRKIDLESYRGLHYPATDIPQASRFLFMKNRARIICDCSATPVKVIQDEKLAQPLSLCGSTLRAPHGCHAQYMANMGSIASLVMFVTINDDDDDIKIETHKGRKLWGLVVCHHTSSRFVPYPLRYACEFLIQVFGIQLNKEVELAVQSREKRILRTQTLLCDMLLRDSPVGIVTQSPNVMDLVRCDGAALYFRNKFWLLGVPPTEKQIRDIVGWLMEHYVGTTGLSTDSLMEAGYPDSSVLGDAVCGMAAINFTSKDFLFWFRSQTAKELKWGGAKHDPVDMDDVRKMNPRSSFNAFLEVVKWRSLPWEDVEMDAIHSLQLILRESMKNEIVNDVKTIVNTTPVIDARLRGMDQLCVVTGEMVSLMET

SEQ ID NO: 12504 - protein, 245 aa, Siphonodon australis
ALSIAGAVQSQKLAVRAISQLQSLAGGDIKLLCDTVVESVRDLIGYDRVMVYKFHEDEHGEVLAESKRPDLEPYIGLHYPATDIPQASRFLFKQNRVRMIVDCHASPVRVIQDDGLMQPLCLVGSTLRAPHGCHAQYMENMGSTASLVMAAMINGNDEKATGGRNTTKLWGLVVCHHTSARCIPFPLRYACEFLMQAFGLQLNMELQLAAQLSEKHVLKTQTLLCDMLLRDSPTGIVTQSPSIMD

SEQ ID NO: 12505 - protein, 364 aa, Brexia madagascariensis
VQSQKLAVRAISRLQSLPGGDIKLLCDTVVESVRDLTGYDRVMVYKFHEDEHGEVVAESQRPDLEPYIGLHYPATDIPQASRFLFKQNRVRIIVDCHASSVRVIQDDGLMQPLCLVGSTLRAPHGCHAQYMENMGSIASLAMAVIINGNDEEVIGGRNPTRLWGLVVCHHTSARCILFPLRYACEFLMQAFGLQLNMELQLAAQLLEKHVLKTQTLLCDMLLRESPTGIVTQSPSIMDLVKCDGAALYYQGNFYPLGVTPTEAQIKDIVEWLLAFHGDSTGLSTDSFADAGYPGAALLGDAVCGMAVAYITNRDFLFWFRSHTAKEIKWGGAKHHPEDKDDGQRMHPRSSFKAFLEVVKRRSLP

SEQ ID NO: 12506 - protein, 361 aa, Brexia madagascariensis
QSQKLAVRAISRLQSLPGGDIKLLCDTVVESVRDLTGYDRVMVYKFHEDEHGEVVAESQRPDLEPYIGLHYPATDIPQASRFLFKQNRVRIIVDCHASSVRVIQDDGLMQPLCLVGSTLRAPHGCHAQYMENMGSIASLAMAVIINGNDEEVIGGRNPTRLWGLVVCHHTSARCILFPLRYACEFLMQAFGLQLNMELQLAAQLLEKHVLKTQTLLCDMLLRESPTGIVTQSPSIMDLVKCDGAALYYQGNFYPLGVTPTEAQIKDIVEWLLAFHGDSTGLSTDSFADAGYPGAALLGDAVCGMAVAYITNRDFLFWFRSHTAKEIKWGGAKHHPEDKDDGQRMHPRSSFKAFLEVVKRRS

SEQ ID NO: 12507 - protein, 374 aa, Loeseneriella africana
ALSIAGAVQSQKLAVRAISQLQSLPGGDIKLLCDTAVENVRNLTGYDRVMVYKFHEDEHGEVVAESRRPDLEPYIGLHYPATDIPQASRFLFKQNRVRIIVDCHASPVSVIQDDGLMQPLCLVGSTLRAPHGCHAQYMENMGSIASLAMAVIINGNDEDGMGGRNPTRLWGLVVCHHTSARCIPFPLRYACEFLMQAFGLQLNMELQLAAQLLDKHVLKTQTLLCDMLLRESPTGIVTQSPSIMDLVKCDGAALYYQANYYPLGVTPTEAQIKDIVEWLLAFHGDSTGLSTDSLADAGYPGATSLGDAVCGMAVAYITNKDFLFWFRSHTAKEIKWGGAKHHPEDKDDGQRMHPRSSFKAFLEVVKSRSLPWEN

SEQ ID NO: 12508 - protein, 365 aa, Loeseneriella africana
AVQSQKLAVRAISQLQSLPGGDIKLLCDTAVENVRNLTGYDRVMVYKFHEDEHGEVVAESRRPDLEPYIGLHYPATDIPQASRFLFKQNRVRIIVDCHASPVSVIQDDGLMQPLCLVGSTLRAPHGCHAQYMENMGSIASLAMAVIINGNDEDGMGGRNPTRLWGLVVCHHTSARCIPFPLRYACEFLMQAFGLQLNMELQLAAQLLEKHVLKTQTLLCGMLLRESPTGIVTQSPSIMDLVKCDGAALYYQANYYPLGVTPTEAQIKDIVEWLLAFHGDSTGLSTDSLADAGYPGATSLGDAVCGMAVAYITNKDFLFWFRSHTAKEIKWGGAKHHPEDKDDGQRMHPRSSFKAFLEVVKSRSLP

SEQ ID NO: 12509 - protein, 363 aa, Loeseneriella africana
QSQKLAVRAISQLQSLPGGDIKLLCDTAVENVRNLTGYDRVMVYKFHEDEHGEVVAESRRPDLEPYIGLHYPATDIPQASRFLFKQNRVRIIVDCHASPVIVIQDDGLMQPLCLVGSTLRAPHGCHAQYMENMGSIASLAMAVIINGNDEDGMGGRNPTRLWGLVVCHHTSARCIPFPLRYACEFLMQAFGLQLNMELQLAAQLLEKHVLKTQTLLCDMLLRESPTGIVTQSPSIMDLVKCDGAALYYQANYYPLGVTPTEAQIKDIVEWLLAFHGDSTGLSTDSLADAGYPGATSLGDAVCGMAVAYITNKDFLFWFRSHTAKEIKWGGAKHHPEDKDDGQRMHPRSSFKAFLEVVKSRSLP

SEQ ID NO: 12510 - protein, 1128 aa, Oryza sativa (japonica cultivar-group); identical to SEQ ID NO: 362

SEQ ID NO: 12511 - protein, 113 aa, Daucus carota
HYPATDIPQAARFLFPEDKVRIICDCRAKNVKVLQDDKLPFELTLCGSTLRAPYSCHLQYMENMNSIASLVMAVVINDSDEVGDSSDPNSVKNKKLWGLVVCHNTSPRFVPYP

SEQ ID NO: 12512 - protein, 114 aa, Daucus carota
HYPATDIPQASRFLFQQNRVRMIVDCHATSVPVIQDDSLMQPLCLVGSTLRAPHGCHAQYMANMGSIASLAMAVIVNATGEEGTRGRNSTRLWGLVVCHHTSARSIPYPLRYAC

SEQ ID NO: 12513 - protein, 114 aa, Daucus carota
HYPATDIPQASRFLFQQKWVRMIVDCHAISVPVIQDDLLMHPLCLVGSTLRAPHGCHAQYMANMGSVASLVVAVMSMRLVRKVRGGRHSTRLWGLVVCHHMSARSIPYPLRYAC

SEQ ID NO: 12514 - protein, 110 aa, Daucus carota
HYSATDIPQAVRFLFQKNKSRMIVDCHATFVPVIQDESLDKPLCLGGSTLRAPHGCHAQYMANMGSIGTLVMAVIVHANDKVTGSHQKHEEKLWGLVACHHKSARSLPFP

SEQ ID NO: 12515 - protein, 1129 aa, Petroselinum crispum
MSSSRPANSSSNPGRANQNARVVLTTLDAKIHADFEESGNSFDYSSSVRVTSAVGENSSIQSNKLTTAYLHHIQKGKLIQPVGCLLAVDEKSFKIMAYSENAPEMLTMVSHAVPSVGEHPVLGIGTDVRTIFTAPSAAALQKAVGFTDINLLNPILVHCKTSGKPFYAIAHRVTGSLIIDFEPVKPYEVPMTAAGALQSYKLASKAVNRLQALPGGSMERLCDTMVQEVFELTGYDRVMAYKFHDDDHGEVTAEVTKPGLEPYFGLHYPATDVPQAARFLFLKNKVRMICDCRANSAPVLQDEKLPFELTLCGSTLRAPHSCHLQYMENMNSIASLVMAVVINDSDEVVESSDRNSVKSKKLWGLVVCHNTSPRFVPFPLRYACEFLAQVFAIHVSKELELENQIVEKNILRTQTLLCDLLMRDAPLGIVSQSPNMMDLVKCDGAALLYKNKVYRLGATPSDYQLRDIVSWLTEYHTDSTGLSTDSLYDAGYPGALALGDVVCGMAVVKITSHDMLFWFRSHAAGHIRWGGAKAEPDENHDGRKMHPRSSFKAFLEVVKTRSTTWKEFEMDAIHSLQLILRKALSVEKAVAAQGDEIRSNTDVIHTKLNDLKIEGIQELEAVTSEMVRLIETATVPIFAVDADEIVNGWNTKIAELTGLPVDQAMGKHLLTLVEDSSVGTVVFLLALALQGKEEQGIPFEFKTYGSREDSVPITVVVNACATRGLHDNVVGVCFVAQDVTSQKTIMDKFTRIQGDYKAIVQNPNPLIPPIFGTDEFGWCSEWNQAMTELSGWRREDVMNKMLLGEIFGIQTSCCHLKSKEAFVNLGVVLNNALTGQISEKICFSFFATDGKYVECLLCASKKLHGEGTVTGIFCFLQLASQELQQALHIQRLTEQTAMKRLKTLSYLRRQAKNPLCGINFVREKLEEIGMGEEQTKLFRTSVHCQRHVNKILDDTDLDSIIDGYLDLEMSEFRLHDVYVASRSQVSMRSNGKAIQVVDNFSEEMMSETLYGDSLRLQKVLADFMSVCVNLTPVGGHLGISVTLTEDNLGQSVQLVHLEFRITHTGAGVPEEAVSQMFGSDSETSEEGISLLISRKLVKLMNGDVHYLREAGKSTFIITVELAAASKRES

SEQ ID NO: 12516 - protein, 1123 aa, Lycopersicon esculentum
MSSSRPSQSSTTSSRSKHSARIVAQTSIDAKLHADFEESGDSFDYSSSVRVTSVAGDEEKPKSDKVTTAYLHQIQKGKFIQPFGCLLALDEKTLKVIAFSENAPEMLTMVSHAVPSVGEHPVLGIGTDIRTIFTGPSGAALQKALGFGEVSLLNPVLVHCKNSGKPFYAIVHRVTGSLILDFEPVKPYEVPMTAAGALQSYKLAAKAITRLQSLPSGSMERLCDTMVQEVFELTGYDRVMGYKFHEDDHGEVVSEITKPGLEPYLGLHYPATDIPQAARFLFMKNKVRMICDCRAKHVKVVQDEKLPFDLTLCGSTLRAPHYCHLQYMENMNSIASLVMAVVVNDGDEEGESSDSSQSQKRKRLWGLVVCHNTTPRFVPFPLRYACEFLAQVFAIHVNKELELENQFLEKNILRTQTLLCDMLMRDAPLGIVSQSPNIMDLVKCDGAALLYKNKIHRLGMNPSDFQLQDIVSWLCEYHTDSTGLSTDSLYDAGFPGALALGDAVCGMAAVRISDKDWLFWFRSHTAAEVRWGGAKHEPGEKDDGRKMHPRSSFKAFLEVVKTRSIPWKDYEMDAIHSLQLILRNAFKDAEVVNSNTNSIYKKLNDLKIDGMQELESVTAEMVRLIETALVPILAVDVDGQVNGWNTKIAELTGLPVDEAIGKHLLTLVEDSSVDTVNKMLELALQGKEEKNVEFEIKTHGPSRDSSPISLIVNACASKDVRDNVVGVCFMAHDITGQKSIMDKFTRIEGDYRAIIQNPHPLIPPIFGTDQFGWCSEWNTAMTKLTGWRRDDVMDKMLLGEVFGTQAACCRLKNQEAFVNFGVVLNNAITGQESEKIPFGFFARYGKYVECLLCVSKRLDKEGAVTGLFCFLQLASHELQQALYVQRLSEQTALKRLKVLAYIRRQIRNPLSGIIFSRKMLEGTSLGEEQKNILHTSAQCQRQLNKILDDTDLDSIIDGYLDLEMLEFKLHEVLVASISQVMMKSNGKNIMISNDMVEDLLNETLYGDSPRLQQVLANFLLVSVNATPSGGQLSISGRLTKDRIGESVQLALLEFRIRHTGGGVPEELLGQMFGSEADASEEGISLLVSRKLVKLMNGEVQYLREAGQSTFIISVELAVATNSS

SEQ ID NO: 12517 - protein, 1124 aa, Nicotiana tabacum
MSSSRPSQSSTTSARSKHSARIIAQTTIDAKLHADFEESGDSFDYSSSVRVTSVAGDERKPKSDRVTTAYLNQIQKGKFIQPFGCLLALDEKTFKVIAFSENAPEMLTMVSHAVPSVGELPALGIGTDIRTIFTGPSAAALQKALGFGEVSLLNPVLVHCKTSGKPYYAIVHRVTGSLIIDFEPVKPYEVPMTAAGALQSYKLAAKAITRLQALPSGSMERLCDTMVQEVFELTGYDRVMTYKFHDDDHGEVVAEITKPGLDPYLGLHYPATDIPQAARFLFMKNKVRMICDCRAKHVKVVQDEKLPFDLTLCGSTLRAPHYCHLQYMENMSSIASLVMAVVVNDGDEEGESSDSTQSQKRKRLWGLVVCHNTTPRFVPFPLRYACEFLAQVFAIHVNKELELESQILEKNILRTQTLLCDMLMRVAPLGIVSQSPNIMDLVKCDGAALLYKNKIHRLGMTPSDFQLHDIVSWLSEYHTDSTGLSTDSLYDAGFPGALALGDVVCGMAAVRISDKGWLFWYRSHTAAEVRWGGAKHEPGEKDDGRKMHPRSSFKAFLEVVKTRSVPWKDYEMDAIHSLQLILRNASKDADAMDSNTNIIHTKLNDLKIDGLQELEAVTAEMVRLIETASVPIFAVDVDGQLNGWNTKIAELTGLPVDEAIGNHLLTLVEDSSVDTVSKMLELALQGKEERNVEFEIKTHGPSGDSSPISLIVNACASRDVGDSVVGVCFIAQDITGQKNIMDKFTRIEGDYRAIIQNPHPLIPPIFGTDQFGWCSEWNSAMTKLTGWRRDDVIDKMLLGEVFGTQAACCRLKNQEAFVNFGVVLNNAMTGQECAKISFGFFARNGKYVECLLCVSKRLDREGAVTGLFCFLQLASHELQQALHIQRLSEQTALKRLKVLAYIRRQIRNPLSGIIFSRKMLEGTNLGEEQKNILRTSSQCQRQLNKILDDTDLDSIIDGYLDLEMLEFKLHEVLVASISQIMMKSNGKNIMIVNDMVEDLLNETLYGDSPRLQQVLANFLLVCVNSTPSGGQLSISGTLTKDRIGESVQLALLEVRISHTGGGVPEELLSQMFGTEAEASEEGISLLISRKLVKLMNGEVQYLREAGRSTFIISVELAVATKSSC

SEQ ID NO: 12518 - protein, 1123 aa, Solanum tuberosum
MSSSRPSQSSTTSSRSKHSARIIAQTSIDAKLHADFEESGDSFDYSSSVRVTNVAEGEQRPKSDKVTTAYLHQIQKGKFIQPFGCLLALDEKTLKVIAFSENAPEMLTMVSHAVPSVGEHPVLGIGIDIRTIFTGPSGAALQKALGFGEVSLLNPVLVHCKNSGKPFYAIVHRVTGSLIIDFEPVKPYEVPMTAAGALQSYKLAAKAITRLQSLPSGSMERLCDTMVQEVFELTGYDRVMGYKFHDDDHGEVVSEITKPGLEPYLGLHYPATDIPQAARFLFMKNKVRMICDCRAKHVKVVQDEKLPFDLTLCGSTLRAPHYCHLQYMENMNSIASLVMAVVVNDGDEEGESSDSSQSQKRKRLWGLVVSHNTTPRFAPFPLRYACEFLAQVFAILVNKELELENQFLEKNILRTQTLLCDMLMRDAPLGIVSQSPNIMDLIKCDGAALLYKNKIHRLGMNPSDFQLHDIVSWLCEYHTDSTGLSTDSLYDAGFPGALALGDAVCGMAAVRISDKDWLFWYRSHTAAEVRWGGAKHEPGEKDDGRKMHPRSSFKGFLEVVKTRSIPWKDYEMDRIHSLQLILRNAFKDADAVNSNTISIHTKLNDLKIDGMQELEAVTAEMVRLIETASVPIFAVDVDGQVNGWNTKVAELTGLPVDEAIGKHLLTLVEDSSVDTVNKMLELALQGQEERNVEFEIKTHGPSRDSSPISLIVNACASKDVRDSVVGVCFIAQDITGQKSIMDKFTRIEGDYRAIIQNPHPLIPPIFGTDQFGWCSEWNSAMTMLTGWRRDDVMDKMLLGEVFGTQAACCRLKNQEAFVNFGVILNNAITGQESEKIPFGFFARYGKYVECLLCVSKRLDKEGAVTGLFCFLQLASHELQQALHVQRLSEQTALKRLKVLAYIRRQIRNPLSGIIFSRKMLEGTSLGEEQKNILHTSAQCQRQLDKILDDTDLDSIIEGYLDLEMLEFKLHEVLVASISQVMMKSNGKNIMISNDMVEDLLNETLYGDSPRLQQVLANFLLVSVNSTPSGGKLSISGKLTKDRIGESVQLALLEFRIRHTGGGVPEELLSQMFGSEADASEEGISLLVSRKLVKLMNGEVQYLREAGRSTFIISVELAVATKSS

SEQ ID NO: 12519 - protein, 1123 aa, Solanum tuberosum
MSSSRPSQSSTTSSRSKHSARIIAQTSIDAKLHADFEESGDSFDYSSSVRVTNVAEGEQRPKSDKVTTAYLHQIQKGKFIQPFGCLLALDEKTLKVIAFSENAPEMLTMVSHAVPSVGEHPVLGIGIDIRTIFTGPSGAALQKALGFGEVSLLNPVLVHCKNSGKPFYAIVHRVTGSLIIDFEPVKPYEVPMTAAGALQSYKLAAKAITRLQSLPSGSMERLCDTMVQEVFELTGYDRVMGYKFHDDDHGEVVSEITKPGLEPYLGLHYPATDIPQAARFLFMKNKVRMICDCRAKHVKVVQDEKLPFDLTLCGSTLRAPHYCHLQYMENMNSIASLVMAVVVNDGDEEGESSDSSQSQKRKRLWGLVVSHNTTPRFAPFPLRYACEFLAQVFAILVNKELELENQFLEKNILRTQTLLCDMLMRDAPLGIVSQSPNIMDLIKCDGAALLYKNKIHRLGMNPSDFQLHDIVSWLCEYHTDSTGLSTDSLYDAQFPGALALGDAVCGMAAVRISDKDWLFWYRSHTAAEVRWGGAKHEPGEKDDGRKMHPRSSFKQFLEVVKTRSIPWKDYEMDRIHSLQLILRNAFKDADAVNSNTISIHTKLNDLKIDGMQELEAVTAEMVRLIETASVPIFAVDVDQGVNGWNTKVAELTGLPVDEAIGKHLLTLVEDSSVDTVNKMLELALQGQEERNVEFEIKTHGPSRDSSPISLIVNACASKDVRDSVVGVCFIAQDITGQKSIMDKFTRIEGDYRAIIQNPHPLIPPIFGTDQFGWCSEWNSAMTMLTGWRRDDVMDKMLLGEVFGTQAACCRLKNQEAFVNFGVILNNAITGQESEKIPFGFFARYGKYVECLLCVSKRLDKEGAVTGLFCFLQLASHELQQALHVQRLSEQTALKRLKVLAYIRRQIRNPLSGIIFSRKMLEGTSLGEEQKNILHTSAQCQRQLDKILDDTDLDSIIEGYLDLEMLEFKLHEVLVASISQVMMKSNGKNIMISNDMVEDLLNETLYGDSPRLQQVLANFLLVSVNSTPSGGKLSISQKLTKDRIGESVQLALLEFRIRHTGGGVPEELLSQMFGSEADASEEGISLLVSRKLVKLMNGEVQYLREAGRSTFIISVELAVATKSS

SEQ ID NO: 12520 - protein, 113 aa, Antirrhinum majus
HYPATDIPQAARFLFMKNKVRMICDCRAKHVKVIQDEKLSVDLTLCGSTLRAPHTCHLQYMENMDSIASLVMAVVVNEGDEEETDTVQPQKRKRLWGLVVCHNTTPRFVPYPL

SEQ ID NO: 12521 - protein, 105 aa, Antirrhinum majus
HYSATDIPQAARFLFKQNRVRMICDCNAQPVKIVQTEELKQPLCLVNSTLRAPHGCHMQYMVNMGSIASLAMAVLSNNGDSMKLWGLVVCHHTSPRYVPYPLRYA

SEQ ID NO: 12522 - protein, 107 aa, Antirrhinum majus
PQASRFLFKQNRVRMIVDCHATPVRVFQDEALMQPLCLVGSTLRAPHGCHAQYMENMGSIASLTLAVIINGNDEDGVGGRNSMRLWGLVVGHHTSARCIPLPLRYAC

SEQ ID NO: 12523 - protein, 464 aa, Lardizabala biternata
SGKPFYAIIHRVTGSLIIDFEPVKPYEVPMNAAGALQSYKLAAKAIARLQSLPNASMDRLCDTVVQEVFELTGYDRVMAYKFHDDDHGEVVSEITKPGLELYLGLHYPATDIPQAARFLFMKNKIRMICGCNATHVKVFQDEKLPLDLTLCGSTLRAPHSCHLQYMDNMGSIASLVMAVVVNEGDEENDGSGPAQPQKRKRLWGLVVCHNTTPRFVPFPLRYACEFLIQVFAIHINKELELENQVLEKTFYVPQTLLCDMLMRNAPLGIVSQSPNIMDLVKCDGAALLYKNKIWRLGLSPSEFHIRDIASWLYEYHMDSTGLSTDSLHDAGFPGALSLGDGVCGMAAVRITSKDMIFWFRSHIATEVRWGGAKHDPSEKDDGRKMHPRSSFKAFLEVAKTRSLAWKDYEMDAIHSLQLILRNAFKDGDTADLNSSVIHSRLDNLKIDGMEELEAVTNEMVRLME

SEQ ID NO: 12524 - protein, 394 aa, Lardizabala biternata
DLEPVNRADVPVTAAGALKSYKLAAKAISKLQSLPSGNISLLCDVLVHEVSDMTGYDRVMVYKFHEDEHGEVVSECLRSDLEPYLGLHYPATDIPQASRFLFLKNKVRMICDCSARSVEIIQDKRLTQPLSLGGSTLRAHHGCHTQYMSNMGSVASLVMSITINDDDDDDETETTKRKGRKLWGLVVCHHTSPRFVPFPLRYACEFLIQVFGIQLTKEVELATQLREKHILQIQTVLCDLLLRNAPVGIFTQSPNVMDLVKCDGAALYYKNKFWLLGVTPTEAQIREIAAWILEYHDGSTGLSTDSLMEAGYPGASVLGNAVCGMAAINITSKDFIFWFRSHTAKEIKWGGAKHDPVDKDDGRKMHPRSSFRAFLEVVQWRSLLWEDIEMDAIQ

SEQ ID NO: 12525 - protein, 396 aa, Danthonia spicata
  unsure (1)..(396): unsure at all Xaa locations
TGYDRVMVYKFHEDEHGEVVAESRRPDLEPYLGLHYPATDIPQASRFLFQQNRVRMIHDCHATAVRVIQDPGLQQALCLVGSTLRAPHGCHAQYMANMGSIASLVMAVIISSGSDDEQMARGGXSSAMKLWGLVVCHHTSPRFIPFPLRYACEFLMQAFGLQLNMELQLAHQMSEKHILRXQTLLCDMLLRDSPTGIVTQSPSIMDLVKCDGAALYYHGKYYPLGVTPTESQIKDIIEWLTVCHGDSTGLSTDSLADAGYLGAAALGDAVCGMAVAYITPSDYLFWFRSHTAKEIKWGGAKHHPDDKDDGLRMHPRSSFKAFLEVVKSRSLPWENAEMDAIHSLQLILRDSFRXAAEGTSNSKAIVBGQVQLGELELRGINELSSVAREMVRLIET

SEQ ID NO: 12526 - protein, 376 aa, Hyparrhenia hirta
ALSIAGAVQSQKLAVRAISRLQALPGGDVKLLCGTVVEHVRELTGYDRVMVYKFHEDEHGEVVAESKRDNLEPYLGLHYPATDIPQASRFLFRQNRVRMIADCHATPVRVIQDPGLSQPLCLVGSTLRAPHGCHAQYMANMGSIASLVMAVIISSGGDDEQTGRGGISSAMKLWGLVVCHHSSPRCIPFPLRYACEFLMQAFGLQLNMELQLAHQLSEKHILRTQTLLCDMLLRDSPTGIVTQSPSIMDLVKCDGAALYYHGKYYPLGVTPTESQIKDIIEWLTVCHGDSTGLSTDNLADAGYLGAAVLGDAVCGMAVAYITPSDYLFWFRSHTAKEIKWGGAKHHPEDKDDGQRMHPRSSFKAFLEVVKSRSLPW

SEQ ID NO: 12527 - protein, 191 aa, Salvinia natans
DEHGEVVAEIRRSDLEPYLGLHYPATDIPQASRFLFMKNRVRMICDCRAPSVRIIQDKELPQPLSLVGSTLRAPHGCHAQYMANMGTIASLVMAVVVNDNDEETRCKTPHYSKARRLWGLVVCHHTTPRVVPFALRSACEFLVQVFGLQLNMELELAAQMREKHILRTQTLLCDMLLRDAPIGIVSESPNI

SEQ ID NO: 12528 - protein, 190 aa, Salvinia natans
DEHGEVVAEIRRSDLEPYLGLHYPATDIPQASRFLFMKNRVRMICDCRALNVRIIQDRELKQPISLAGSTLRAPHGCHSQYMGNMGSIASLVMAVIVNDNDEEGSSHAHQPKLRKLWGLVVCHHTSPRAVPFPLRSACEFLMQVFGLQLNMEVELAAQMREKHILHTQSLLCDMLLRDAPIGIVSESPNI

SEQ ID NO: 12529 - protein, 392 aa, Byrsonima crassifolia
DLEPVNPADVPVTAAGALKSYKLAARAISRLQSLPSGNISLLCDVLVKEVRDLTGYDRVMVYKFHEDEHGEVISECRRPDLEAYLGLHYPATDIPQASRFLFMKNKVRMICDCLAPPVKVIQDERLLQPLSLCGSTLRSPHGCHAQYMANMGTIASLVMSVTINEDDDMMDMDQQHMAGKLWGLVVCHHTSPRFVPFPLRYACEFLIQVFGVQINKEVELAAQVREKHILRTQTLLCDMLLRDAPVAIITQSPNVMDLVKCNGAALYYRKKFWLLGVTPTEAQIRDIAEWLLEYHSGNTGLSTDSLMEAGYPGASDLGHAVCGMAAVKITSRDFLFWFRSHTAKEIKWGGAKHDPDDKDDGRKMHPRSSFKAFLEVVKWRSLPWEDMEMDAI

SEQ ID NO: 12530 - protein, 191 aa, Araucaria araucana
DDHGEVISEVRKSDLEPYLGLHYPATDIPQASRFLFMKNRARMICDCCASPVRVVEDKRLPRELNLCGSTLRAPHGCHAQYMSNMGSISPLVMAVIVHEKEEERSRCGPQQQKGRRLWGLVVCHHTSPRFVPFPLRYACEFLMRVFGIQLNREIELAAQSREKHILRTQTLLCDMLLRDAPMGIVTQKPNI

SEQ ID NO: 12531 - protein, 191 aa, Araucaria araucana
DDHREVVAEIRRANLEPYLGLHYPATDIPQASRFLFMKNKVRMIYDCRADGVKVIQDKRLAKPLSLSSSALRALHGCHAQYMANMGSVASFVMAVTINENETDEETSGSGQKGGRRLWGLVVCHHTSPRFVPFPLRYACEFLMQVFGIQLNKEVELAAQLRVKHMLRTQTVLCDMLLRDAPVGIVTQTPNI

SEQ ID NO: 12532 - protein, 192 aa, Araucaria araucana
DEHGEVVAEIRRSDLEPYLGLHYPATDIPQASRFLFMQNRVRMICDCRAVPVKVVQAGQLQQPLCLVGSTLRAPHGCHAQYMANMGSIASLVMAVVIIGNEDEEEGRWKRKRRGSMKLWGLVVCHHTSPRAVPFPLRYACEFLMQAFGLQLNMELQLAAQLTEKHILRTQTLLCDMLLRDAPIGIVLILPSI

SEQ ID NO: 12533 - protein, 374 aa, Euonymus alatus
ALSIAGAVQSQKLAVRAISQLQSLPGGDIKLLCDTVVETVRDLTGYDRVMVYKFHDDEHGEVVAENKKPDLEPYIGLHYPATDIPQASRFLFKQNRVRMIVDCHASTVRVIQDDRLVQPLCLVGSTLRAPHGCHAQYMENMGSQASLALAVISNGNDEEVIGGRNATRLWGLVVCHHTSARCIPFLFRYACEFLMQAFGLQLNMELQLAAQVSEKHVLKTQTLLCDMFLRDSPTGIVTKSPSIMDLVKCDGAAFYYQGKYYPLGVTPAEAQIKDIVEWLLAFHGDSTGLSTDSLADAGYPAAASLGDSVCGMAVAYITNRDFLFWFRSHTTEEIKWGGAKHHHEDKDDGQRMHPRSSFKAFLEVVKSRSFPWEN

SEQ ID NO: 12534 - protein, 245 aa, Corynocarpus laevigatus
ALSIAGAVQSQKLAVCAISQLQSLPGGDIKLLCDTVVESVRELTGYDRVMVYKFHEDEHGEVVAESKRADLDPYIGLHYPATDIPQASRFLFKQNRVRMIVNCHASSVRVIQDEELRQPLCLVGSTLRAPHGCHAQYMANMGSIASLAMAVVINGTDEEGTGGRNSMRLWGLVACHHTSARCIPFPLHYACEFLMQAFGLQLNVELQLALQLSEKHVLRTQTLLCDMLLRDSPTGIVTQSPSIMD

SEQ ID NO: 12535 - protein, 245 aa, Corynocarpus laevigatus
ALSIAGAVQSQKLAVCAISQLQSLPGGDIKLLCDTVVESVRELTGYDRVMVYKFHEDEHGEVVAESKRADLDLYIGLHYPATDIPQASRFLFKQNRVRMIVNCHASSVRVIQDEELRQPLCLVGSTLRAPHGCHAQYMANMGSIASLAMAVVINGTDEEGTGGRNSMRLWGLVACHHTSARCIPFPLRYACEFLMQAFGLQLNMELQLALQLSEKHVLRTQTLLCDMLLRDSPTGIVTQSPSIMD

SEQ ID NO: 12536 - protein, 401 aa, Trochodendron aralioides
GKPFYAIVHRVTGSLIIDFEPVKPYEVPMTAAGALQSYKLAAKAIARLQSLPSGSIERLCDTLVQELFELTGYDRAMVYKFHEDDHGEVVSEITKPGLEPYLGLHYPATDIPQAARFLFMKNKVRMICDCRAKNVKVLQDEKLPFDLTLCGSTLRAPHSCHLQYMENMNSIASLVMAVVVQEGDEQARALVPHSLRRRKRLWGLLVCHHSTPRFVPFPLRYACEFLAQVFAIHVNKELELENQILEKNILRTQTLLCDMLMRDAPLGIVSQSPNIMDLVKCDGAVLLYKNRTWRFGSTPSELQIHDIALWLSEYHMDSTGLSTDSLYDAGFPGALTLGDGVCGMAAVRITSKDMLFWFRSHTAAEVRWGGAKHEPGEKDDGRRMHPRSSFKAFLEVVKSRS

SEQ ID NO: 12537 - protein, 390 aa, Trochodendron aralioides
DLEPVNPADVPVTAAGALKSYTLAAKAISRLQSLPSGNLSLLCDVLVREVSELTGYDRVMVYKFHEHKHGEVVAECRISDLEPYLGLHYPATDIPQASRFLFMKNKIRTICDCLAPPVKVIQDKRLVQPLSLCGSTLRAPHGCHAQYMENMGSIASLVMSVMNHEDEDEIESDRKGRKLWGLVVCHHTSPRFVPFLLRYACEFLIQVFGIQLNKEVELAAQLREKHILRTQTVLCDMLLRDAPVGIVTQSPNVMDLVKCDGAALYYRNTIWLLGVTPTEAQIRDIAGWLLEYHNGSTGLSTDSLMEAGYSDALLLGDAVCGMAAVKITSKDFLFWFRSHTAKEIKWGGVKHDPVDKDDGRKMHPRSSFKAFLEVVKRRSLPWEDVEMDAI

SEQ ID NO: 12538 - protein, 415 aa, Nymphaea odorata
GKPFYAIVHRVVSGLVMDFEPVKPSELPITAAGALQSYKLAGKAISRLQSLPGGSITRLCDTVVEEVHQLTGYDRVMTYKFHDDDHGEVVSEIRKPDLEPYLGLHYPATDIPQAARFLFMKNKVRMICDCRAKPVKVYQDENLKTDLTLCGSTLRAPHSCHLQYMENMSSIASLVMAVVINEGEDEGEDETDPNQRSQKRKRLWGLVVCHNTSPRFVPFPLRYACEFLAQVFAIHVNKEVELENQNALKKNILRTETLLCDMLLRGSPLGIVSQTPNIMDLVKCDGAAFLYGSKLYLLGRTPAESQIRDIAIWLSEYHKDSTGLSTDSLCEAGYPGALAIGSPVCGMAAVRITANDMLFWFRSHTASEIRWGGAKHDPEEKDDGRRMHPRCSFKAFLEVVKTRSLPWKDFEMDAI

SEQ ID NO: 12539 - protein, 396 aa, Brasenia schreberi
PYEVPMTAAGALQSYKLAAKAIARLQSLPSGSVGRLIDTVVEEVHQLTGYDRVMTYKFHEDDHGEVVSEIRKPDLEPYLGLHYPATDIPQAARFLFMKNKVRMICDCRAKPVKVYQDENLKTDLTLCGSTLRAPHSCHLQYMDNMGSIASLVMAVVINEGEDEGDDEPEQNQGQQQQQQQKKKRLWGLVVCHNTTPRFVPFPLRYACEFLMQVFAIHVNKEVELENQMREKNILRTQTLLCDMLLRDAPLGIVTQSPNVMNLVKCDGAALLYGNKLWLLGQTPSESQMRDLAVWLSEYHRDSTGLSTDSLYEAGYPGALAIGDVVCGMAAVRITNSDMLFWFRSPTASEIRWGGAKHDPEEKDDGRRMHPRSSFKAFLEVVKTRSLPWKGFEMDAI

SEQ ID NO: 12540 - protein, 463 aa, Ceratophyllum demersum
GKPFYAVVHRVTGSLVIDFEPVRPYEVPTTAAGALQSYKLAAKAITKLQSLPSGSMQRLCDTIVKEVYELTGYDRVMVYKFHEDDHGEVVAEVTKPNMEPYLGLHYPATDIPQASRFLFMKNKVRMICDCHAKAIKVYQDGNLPMDLTLCGSTLRAPHSCHVQYMHNMGSVASLVMAVVVNEGEDDQGESTESGQQRKKKLWGLVVCHNTSPRFVPFPLRYACEFLMQVFAIHVGKQIELENQLQEKNILRIQTLLCDMLMRDSPLGIVSKSPSIMDLVKCDGAALLYKNKVWLLGLTPSELQIHDIASWLSTHHMDSTGLSADSLYDAGYPGALSLGNAVCGMASVRITSKDMIFWFRMHTASEVRWGGAKHYPDDKDDGQKMHPRSSFKAFLEVVKTRSLPWKDYEMDAIHSLQLILQGTFKEIENGGIKNTIDSQFDGLKIDQMEELQVVANEMVRLMET

SEQ ID NO: 12541 - protein, 356 aa, Ceratophyllum demersum
ILHRIDAGIVIDLEPVNPSDVPVTAAGALKSYKLAAKSISRLQSIPSGNISLLCDVLVREVSELTGYDRVMAYKFHEDEHGEVIAECKRSDLEPYLGLHYPATDIPQASRFLFMKNRVRMICDCMVKPVKVIQDKRLNQSLSLCGSTLRAPHGCHAQYMANMGSIASLVMSVTINDDEEEEAPGEVQNQKTRKLWGLVVCHHTSPRFVPFPLRYACEFLIQVFGIQLNKEVELAVQLREKHILRTQTMLCDMILRDTPIGIVTRSPNVMDLVKCDGAALYYQNQFWLLGITPTEVQIRDILLWLLEYHKGTTGLSTDSLMEAGYPGALVLGDAVCGMAAIEITPKDYLFWFRSHTA

SEQ ID NO: 12542 - protein, 119 aa, Ceratophyllum demersum
HYSATDIPQASRFLFMKNKVRMICDCHAKPIKVYQDENLPIDLTLCGSILRAPHSCHVQYMLNMGSVASLVMAVVVNEGEDDQGESTESGQQRKKKLWGLVVCHNTSPRFVPFPLRYAC

SEQ ID NO: 12543 - protein, 104 aa, Ceratophyllum demersum
MKNKVRMICDCHAKPVKVLQDEKLSFDLTLCGSTLRAPHSCHLQYMENMNSIASLVMAVVINEGEENVDNSETLEQSKRKRLWGLVVCHNTSPRFVPFPLRYAC

SEQ ID NO: 12544 - protein, 108 aa, Ceratophyllum demersum
YSATDIPQAPRFLFKQNRVRVIVDCNAKPIEIIQDSRLNQPLCLVNSTLRSPHGCHMQYMANMGSIASLVMAIIINGNDSSKLWGLVVCHHTSARYLLFPLRYACEFL

SEQ ID NO: 12545 - protein, 389 aa, Nelumbo nucifera
PYEVPMTAAGALQSYKLAAKAIARLQALPSGCMDRLCDTVVQEVFELTGYDRVMAYKFHEDDHGEVVSEITKPGLEPYLGLHYPATDIPQAARFLFMKNKVRMICDCRAKHVKVLQDEKLPFDLTLCGSTLRAPHSCHLQYMENMDSIASLVMAVVVNEGDEEGEASGSSQQQKRKKLWGLVVCHNTTPRFVPFPLRYACEFLIQVFAIHVNKEIELENQILEKNILRTQTLLCDMLMRDALLGIISQSPNVMDLVKCDGAALLYKNKIWQLGTTPTEFQIHDIASWLSEYHMDSTGLSTDSFYDAGFPGALSLGDAVCGMAAVRITSKDMLFWFRSHTAAEVRWGGAKHDPDEKDDGRRMHPRSSFKAFLEVVKTRSLPWKDYEMDAI

SEQ ID NO: 12546 - protein, 391 aa, Nelumbo nucifera
DLEPVNPADVPVTAAGALKSYKLAAKSISRLQSLPSGNISLLCDVLVREVSDLTGYDRIMVYKFHEDEHGGVVAECRRPDLESYLGLHYPATDIPQASRFLFMKNKVRMICDCLAPPVKVIHDKKLAQPLSLCASTLRVPHGCHAQYMANMGSIASLVMSVTINDDDNEMESDQPKGRKLWGLVVCHHTSPRFVPFPLRYACEFLVQVFGIQLDKEVELAAQLREKHILKTQTLLCDMLLRNAPVGIFTESPNVMDLVKCDGASLYYKNKFWLLGITPTEAQIRDIAGWLLEHHDGSTGLSTDSLMEAGYPGASVLGDAVCGMAAIKITSKDFLFWFRSHTAKKIKWGGAKHDPVVKDGGRKVHPRSSFKAFLEVVKRRSLPWEDVEMDAI

SEQ ID NO: 12547 - protein, 2062 aa, Dictyostelium discoideum
MDLELDGLLTQCIHCCPHCKNKISISQLSACNLIKNRFYELNNKYNNFKNNNIYDIDCNNNSNLNNTNNNNNNNNNNDNNNSNNSFRNILNKDKDITNNNSHFNISDSFINFNNKIKNKSNKIKNGGNNNNNNNNNNNNNNNNNNNNNNNNNNNNNNNNNNNGESYNLFLDSLLKSLETVKGGDFKSRVKSNEQLFTEKENKIISTYNEILNFQDSTVTEFKRIEKQVGKEGNVMSRAFLPNAVGSWEFCIEFVNNLIGDMIQPTEEVIKVITSVARGDLSQTINLELGQGRKLTGEFLRIAKVVNTMVSQLNSFSSEVTRVAREVGTDGKLGGQAVVTGVDGIWKDLTDNVNTMAANLTGQVREIALVTTAVATGDLSKKITLDVKGEIQELKLTINTMVDQLKSFSSEVTRVSREVGTEGILGGQAQVKGVDGVWKDLTDNVNTMAANLTGQVRSIAEVTTAVAEGDLSKNITIDAQGEILQLKNTINTMVQQLKGFSSEVTRVAREVGTKGILGGQAEVTGVGGVWKGLTDNVNTMAANLTGQVRSIAEVTTAVAKGDLSKNITIDAQGEILQLKNTINTMVDQLKSFSSEVTRVSREVGTEGILGGQAEVTGVDGVWKGLTDNVNTMAANLTGQVRSIAEVTTAVAKGDLSKNITIDAQGEILQLKNTINTMVQQLKSFSSEVTRVSREVGTEGILGGQAQVEGVGGVWKDLTDNVNTMAANLTGQVRSIAEVTTAVACGDLSKNITIDAEGEILQLKNTINTMVDQLKSFSSEVTRVAREVGTEGILGGQAQVEGLGVGGVWKDLTDNVNTMAANLTGQVRSIAEVTTAVAEGDLSKQVSINAQGEILQLKNTINTMVDQLKSFSSEVTRVSREVGTEGILGGQAQVKGVGGVWKDLTENVNTMAANLTGQVRSIAEVTTAVACGDLSKNITIDAKGEILQLKNTINTMVQQLKGFSSEVTRVSREVGTEGILGGQAQVEGVGGVWKDLTDNVNTMAANLTGQVRSIAEVTTAVACGDLSKKISIDAQGEICELKNTINTMVDQLKSFSSEVTRVAREVGTEGILGGQAEVKDVGGVWKGLTDNVNTMAANLTGQVRSIAEVTTAVACGDLSKKISIDVRGEFLELKITINTMVDLLNSFSSEVTRVALEVGTEGILGGQAQVEGVDGVWKYLTQNVNTMAAKFTSQVREIANVTTAVANGDLSKKVNLDVRGEILQLKITINTMVDQLNSFSSEVTRVAREVGTEGMLGGQAQVEGVGGVWKDLTDNVNTMAANLTTQVRSIAEIAKAVTKGDFTRVISVDAKGEVNLLKLIINEMIHNLKETPLKNTLAKETAEAASRAKSDFMANMSHEIRTPMNGIIGMTDLTLDTELTAEQREYLSMVQSSAGSLLTIINDILDFSKIEAGRLELDQAEFSLRAHLYDALKTLSWRAHQKCIELVCDIASDVPDSLIGDPGRLRQIVNNLVGNAIKFTSQGEVDLVVKVEKSLSCGEVVLKFSVIDTGIGIPKDKLHLIFEAFSQADGSITRRYGGTGLGLTISTRLVELMKGKLSVVSKSGKGSTFEFTAQFPTSPNQLPLTEKLNDVHTLIVDDNKSTLKVLKQILSEFGITSEVSNNTQDAFNMIVKATKTTKPFEFIFVDAQLGTSLIDMMVEKNMNHCKTKIIMLISGGGQRGYPDSSSNFITGYLSKPVSPSEIFDILTRQGITRQIPKQLCKKIQLTSEIFGDILLAEDNAVNQRLAIRLLEKFGHRVQLAENGLQAVASSQLRKFDLILMDVQMPHCGGFEATAQIRKREHEQGIHTPIIAMTAHALARDRVKCLEAGMDDYISKPINPDQLKAMIEKYLFISKSCNSYEQFQQLQAQKSANYINSTSYYGQLTPTTTTTTTTTTALPSPQKILSIEDDKNLNSNDNNEKDNNNQNNNNNQNDNNKNDNNQNDFDQIKTISNNKESGVGENKKTTRNTSDNERIPKKSDMFDGDFVVQPQLVNRSSSNNKKSNDINGKPQQSQQQPHQQEQQQDIYFSKHQQQSNSPPLANTKRKENDLSNSSIPASKKNNTKQ

SEQ ID NO: 12548 - protein, 393 aa, Lemna gibba
DLEPVNPSDVPVTAAGALKSYKLAAKAISRLQSLPSGNISLLCDVLVREVKDLTGYDRVMAYKFHEDEHGEVVSECRGSDLEPYLGLHYPATDIPQASRFLFLKNKVRMICDCSAQPVRIIQDKRLSQPLSLCGSTLRAPHGCHAQYMKNMGSIASLVMSVTINDEGVDHGGEEQQKSRKLWGLVVCHHSSPRFIPFPLRYACEFLMQVFAIQVNKEVEIAAQKREKHILKTQTFFCDMLLREAPVGIFTQSPNVMDLVKCDGAALYYRNQFRLLGVTPTEAQIKDLCDWLMDWHNNTTGLSTDSLSEAGFPGASSLGDAVCGMAAIKITGKDFVFWFRSHVAKEIKWGGAKDESVGRSEEGRKLYPRSSFQAFLEIVKRRSLPWEDVEMDAI

SEQ ID NO: 12549 - protein, 104 aa, Lemna gibba
PQASRFLFLKNKVRMICDCKAKPVRVAGEVSLCGSTLRAPHGCHAQYMENMGSVASLVMAVVVNDGEEEGEEQQQQRSRLWGLVVCHHGSPRFVPFPLRYACEF

SEQ ID NO: 12550 - protein, 108 aa, Lemna gibba
PQASRFLFLKNKVRMICDCSAQPVRIIQDKRLSQPLSLCGSTLRAPHGCHAQYMKNMGSIASLVMSVTINDEGVDHGGEEQQKSRKLWGLVVCHHSSPRFIPSPRYAC

SEQ ID NO: 12551 - protein, 1129 aa, Avena sativa
MSSSRPASSSSSRNRQSSQARVLAQTTLDAELNAEYEESGDSFDYSKLVEAQRDGPPVQQGRSEKVIAYLQHIQKGKLIQTFGCLLALDEKSFNVIAFSENAPEMLTTVSHAVPSVDDPPRLGIGTNVRSLFSDQGATALHKALGFADVSLLNPILVQCKTSGKPFYAIVHRATGCLVVDFEPVKPTEFPATAAGALQSYKLAAKAISKIQSLPGGSMEVLCNTVVKEVFDLTGYDRVMAYKFHEDDHGEVFSEITKPGLEPYLGLHYPATDIPQAARFLFMKNKVRMICDCRARSIKVIEAEALPFDISLCGSALRAPHSCHLQYMENMNSIASLVMAVVVNENEEDDEAESEQPAQQQKKKKLWGLLVCHHESPRYVPFPLRYACEFLAQVFAVHVNREFELEKQLREKNILKMQTMLSDMLFREASPLTIVSGTPNIMDLVKCDGAALLYGGKVWRLRNAPTESQIHDIAFWLSDVHRDSTGLSTDSLHDAGYPGAAALGDMICGMAVAKINSKDILFWFRSHTAAEIRWGGAKNDPSDMDDSRRMHPRLSFKAFLEVVKMKSLPWSDYEMDAIHSLQLILRGTLNDASKPKREASLDNQIGDLKLDGLAELQAVTSEMVRLMETATVPILAVDGNGLVNGWNQKAAELTGLRVDDAIGRHILTLVEDSSVPVVQRMLYLALQGKEEKEVRFEVKTHGPKRDDGPVILVVNACASRDLHDHVVGVCFVAQDMTVHKLVMDKFTRVEGDYKAIIHNPNPLIPPIFGADEFGWCSEWNAAMTKLTGWNRDEVLDKMLLGEVFDSSNASCPLKNRDAFVSLCVLINSALAGEETEKAPFGFFDRSGKYIECLLSANRKENEGGLITGVFCFIHVASHELQHALQVQQASEQTSLKRLKAFSYMRHAINNPLSGMLYSRKALKNTDLNEEQMKQIHVGDNCHHQINKILADLDQDSITEKSSCLDLEMAEFLLQDVVVAAVSQVLITCQGKGIRISCNLPERFMKQSVYGDGVRLQQILSDFLFISVKFSPVGGSVEISSKLTKNSIGENLHLIDLELRIKHQGLGVPAELMAQMFEEDNKEQSEEGLSLLVSRNLLRLMNGDVRHLREAGVSTFIITAELASAPTAMGQ

SEQ ID NO: 12552 - protein, 1129 aa, Avena sativa
MSSSRPASSSSSRNRQSSQARVLAQTTLDAELNAEYEESGDSFDYSKLVEAQRDGPPVQQGRSEKVIAYLQHIQKGKLIQTFGCLLALDEKSFNVIAFSENAPEMLTTVSHAVPSVDDPPRLGIGTNVRSLFSDQGATALHKALGFADVSLLNPILVQCKTSGKPFYAIVHRATGCLVVDFEPVKPTEFPATAAGALQSYKLAAKAISKIQSLPGGSMEVLCNTVVKEVFDLTGYDRVMAYKFHEDDHGEVFSEITKPGLEPYLGLHYPATDIPQAARLLFMKNKVRMICDCRARSIKVIEAEALPFDISLCGSALRAPHSCHLQYMENMNSIASLVMAVVVNENEEDDEAESEQPAQQQKKKKLWGLLVCHHESPRYVPFPLRYACEFLAQVFAVHVNREFELEKQLREKNILKMQTMLSDMLFREASPLTIVSGTPNIMDLVKCDGAALLYGGKVWRLRNAPTESQIHDIAFWLSDVHRDSTGLSTDSLHDAGYPGAAALGDMICGMAVAKINSKDILFWFRSHTAAEIRWGGAKNDPSDMDDSRRMHPRLSFKAFLEVVKMKSLPWSDYEMDAIHSLQLILRGTLNDASKPKREASLDNQIGDLKLDGLAELQAVTSEMVRLMETATVPILAVDGNGLVNGWNQKAAELTGLRVDDAIGRHILTLVEDSSVPVVQRMLYLALQGKEEKEVRFEVKTHGPKRDDGPVILVVNACASRDLHDHVVGVCFVAQDMTVHKLVMDKFTRVEGDYKAIIHNPNPLIPPIFGADEFGWCSEWNAAMTKLTGWNRDEVLDKMLLGEVFDSSNASCPLKNRDAFVSLCVLINSALAGEETEKAPFGFFDRSGKYIECLLSANRKENEGGLITGVFCFIHVASHELQHALQVQQASEQTSLKRLKAFSYMRHAINNPLSGMLYSRKALKNTDLNEEQMKQIHVGDNCHHQINKILADLDQDSITEKSSCLDLEMAEFLLQDVVVAAVSQVLITCQGKGIRISCNLPERFMKQSVYGDGVRLQQILSDFLFISVKFSPVGGSVEISSKLTKNSIGENLHLIDLELRIKHQGLGVPAELMAQMFEEDNKEQSEEGLSLLVSRNLLRLMNGDVRHLREAGVSTFIITAELASAPTAMGQ

SEQ ID NO: 12553 - protein, 1129 aa, Avena sativa
MSSSRPASSSSSRNRQSSRARVLAQTTLDAELNAEYEESGDSFDYSKLVEAQRDGPPVQQGRSEKVIAYLQHIQKGKLIQTFGCMLALDEKSFNVIAFSENAPEMLTTVSHAVPSVDDPPRLGIGTNVRSLFSDQGATALHKALGFADVSLLNPILVQCKTSGKPFYAIVHRATGCLVVDFEPVKPTEFPATAAGALQSYKLAAKAISKIQSLPGGSMEVLCNTVVKEVFDLTGYDRVMAYKFHEDDHGEVFAEITKPGLEPYLGLHYPATDIPQAARFLFMKNKVRMICDCRARSIKVIEAEALPFDISLCGSALRAPHSCHLQYMENMNSIASLVMAVVVNENEEDDEAESEQPAQQQQKKKLWGLLVCHHESPRYVPFPLRYACEFLAQVFAVHVNREFELEKQLREKSILKMQTMLSDMLFREASPLTIVSGAPNIMDLVKCDGAALLYGGKVWRLRNAPTESQIHDIAFWLSDVHRDSTGLSTDSLHDAGYPGASALGDMICGMAVAKINSKDIIFWFRSHTAAEIRWGGAKHDSSDMDDSRRMHPRLSFKAFLEVVKMKSLPWTDYEMDAIHSLQLILRGTLNDASKPKREASLDNQIGDLKLDGLAELQAVTSEMVRLMETATVPILAVDGNGLVNGWNQKAAELTGLRVDDAIGRHILTLVEESSVPVVQRMLYLALQGKEEKEVRFEVKTHGPRRDDGPVILVVNACASRDLHDHVVGVCFVAQDMTVHKLVMDKFTRVEGDYKAIIHNPNPLIPPIFGADEFGWCSEWNAAMTKLTGWNRDEVLDKMLLGEVFDSSNASCPLKNKNAFVSLCVLINSALAGEETEKAPFGFFDRSGKYIECLLSANRKENEGGLITGVFCFIHVASHELQHALQVQQASEQTSLKRLKAFSYMRHAINNPLSGMLYSRKALKNTDLNEEQMKQIHVGDNCHHQINKILADLDQDSISEKSSCLDLEMAEFVFQDVVVAAVSQVLITCQGKGIRISCNLPERFMKQSVYGDGVRLQQILSDFLFISVKFSPVGGSVEISSKLTKNSIGENLHLIDLELRIKHQGLGVPAELMEQMFEEDNKEQSDEGLGLLVSRKLLRLMNGDVRHLREAGVSTFILTAELASAPTAIGQ

SEQ ID NO: 12554 - protein, 495 aa, Avena sativa
MSSSRPASSSSSRNRQSSQARVLAQTTLDAELNAEYEESGDSFDYSKLVEAQRDGPPVQQGRSEKVIAYLQHIQKGKLIQTFGCLLALDEKSFNVIAFSENAPEMLTTVSHAVPSVDDPPRLGIGTNVRSLFSDQGATALHKALGFADVSLLNPILVQCKTSGKPFYAIVHRATGCLVVDFEPVKPTEFPATAAGALQSYKLAAKAISKIQSLPGGSMEMLCNTVVKEVFDLTGYDRVMAYKFHEDDHGEVFSEITKPGLEPYLGLHYPATDIPQAARFLFMKNKVRMICDCRARSIKVIEAEALPFDISLCGSALRAPHSCHLQYMENMNSIASLVMAVVVNENEEDDEAESEQPAQQQKKKKLWGLLVCHHESPRYVPFPLRYACEFLAQVFAVHVNREFELEKQLREKNILKMQTMLSDMLFREASPLTIVSGNPNIMDLVKCDGAALLYGGKVWRLRNAPTESQIHDIAFWLSDVHRDSTGLSTDSLHDAG

SEQ ID NO: 12555 - protein, 830 aa, Hordeum vulgare
RAPHGCHAQYMANMGSIASLVMSVTVNEDDDEDGDTGSDQQPKGRKLWGLVVCHHTSPRFVPFPLRYACEFLLQVFGIQLNKEVELASQAKERHILRTQTLLCDMLLGDAPVGIFTQSPNVMDLVKCDGAALCYQNQIMVLGSAPSEGEIKKIAAWLLECHDGSTGLSTDSLLEAGYPGASALGEVVCGMAAIKISSKGFIFWFRSHTAKEIKWSGAKHEPGDADDNGRRMHPRSSFRAFLEVVKWRSVPWEDVEMDAIHSLQLILRGSLQDEDANDNNVGSIVEAPSDDVRKIQGLLELRVVTNEMVRLIETATAPILAVDIVGSINGWNGKVAEITGLPTTEAIGMLLVDLVEGDSVEVIKQMLNSAMQGTEEQNFEIKLKTFHQQEGNGPVVLMVNACCSRDLSDKVVGVCFVAQDLTGHKMVMDKYTQIQGDYVAIVKNPNELIPPIFMINDLGSCLEWNEAMQKITGIKREDAIDKLLIGEVFTLHDYGCRVKDQATITKLSILMNTVISGQEPEKLAFGFFSTDGKYMESLLTANKRTDAEGKITGALCFLHVPSPELQHALQVQKMSEQAAARSFKELTYIRQELKNPLNGMQFTRKLLEPSDLTEEQRQLFASNVLCQEQLKKILHDNDLEGIEQCYMEMNTVEFNLEEALNTVLMQGMSLSKEKQISLDRDWPVEVSSMYLYGDDLRLQQVLADYLACTLQFTRPAEGPIVLQVIPKKEHIGSGMQIAHLEFRVVHPAPGVPEALIQEMFRHGPGVSREGLGLHISQKLVKTMSGTVQYLREAESSSFIVLVEFPVAQLNSKRSKPSTSKWSKPSTSKSNF

SEQ ID NO: 12556 - protein, 112 aa, Hordeum vulgare
DIPQAATFLFMKNKVRMICDVRARTLKVIADEALPFDISLCGSSLRAAHSCHLQYMENMNSIASLVMAVVVNESEEDDEAESEQPAQQQKKKILWGLVVCHHESPRYVPYPF

SEQ ID NO: 12557 - protein, 111 aa, Hordeum vulgare
ATDIPQASRFLFMKNKVRMICDCAASPVKLIQDGNLSQPISLCGSTMRAPHGCHAQYMANMGSIASLVMSVTVNEDDDEDGDTGSDQQPKGRKLWGLVVCHHTSPRFVLPL

SEQ ID NO: 12558 - protein, 104 aa, Hordeum vulgare
QASRFLFRQNRVRMIADCHAAAVRVIQDPAMPQALCLVGSTLRSPHGCHAQYMANMGSIASLVMAVIISSGGEDEHNMTRGVIPSAMKLWGLVVCHHTSPRCIP

SEQ ID NO: 12559 - protein, 392 aa, Lolium perenne
TGYDRVMVYKFHDDEHGEVLAESRRADLEPYLGLHYPATDIPQASRFLFRQNRVRMIADCHAAPVRVIQDPAMPQPLCLVGSTLRSPHGCHAQYMANMGSIASLVMAVIISSGGEDEHNMGRGAVPSAMKLWGLVVCHHTSPRCIPFPLRYACEFLMQAFGLQLNMELQLAHQMSEKHILRTQTLLCDMLLRDSPTGIVTQSPSTMDLVKCDGAALYYHGKYYPLGITPTEAQIKDIIKWLTVCHGDSTGLSTDSLADAGYPGATELGDAVCGMAVAYITPSDYLFWFRSHTAKEIKWGGAKHHPEDKDDGQRMHPRSSFKAFLEVVKSRSLPWENAEMDAIHSLQLILRDSFRDAGEGTSNSKAIVNGHVQLGELELRGIDELSSVAREMV

SEQ ID NO: 12560 - protein, 169 aa, Oryza longistaminata
KEEKEVKFEVKTHGSKRDDGPVILVVNACASRDLHDHVVGVYFVAQDMTVHKLVMDKFTRVEGDYKASSCLDLEMAEFVLQDVFVAAVSQVLITCQGKGIRVSCNLIKHQGKGVPADLLSQMYEDDNKEQSDEGMSLAVSRNLLRLMNGDVRHMREAGMSTFILSVELA

SEQ ID NO: 12561 - protein, 170 aa, Oryza rufipogon
KEEKEVKFEVKTHGSKRDDGPVILVVNACASRDLHDHVVGVCFVAQDMTVHKLVMDKFTRVEGDYKAIISSCLDLEMVEFVLQDVFVAAVSQVLITCQGKGIRVSCNIKHQGKGVPADLLSQMYEDDNKEQSDEGMSLAVSRNLLRLMNGDVRHMREAGMSTFILSVELA

SEQ ID NO: 12562 - protein, 171 aa, Oryza rufipogon
KEEKEVKFEVKTHGSKRDDGPVILVVNACASRDLHDHVVGVCFVAQDMTVHKLVMDKFTRVEGDYKAIISSCLDLEMVEFVLQDVFVAAVSQVLITCQGKGIRVSCNLIKHQGKGVPADLLSQMYEDDNKEQSDEGMSLAVSRNLLRLMNGDVRHMREAGMSTFILSVELA

SEQ ID NO: 12563 - protein, 176 aa, Oryza rufipogon
KEEKEVKFEVKTHGSKRDDGPVILVVNACASRDLHDHVVGVCFVAQDMTVHKLVMDKFTRVEGDYKAIISSCLDLEMVEFVLQDVFVAAVSQVLITCQGKGIRVSCNLSMFFRIKHQGKGVPADLLSQMYEDDNKEQSDEGMSLAVSRNLLRLMNGDVRHMREAGMSTFILSVELA

SEQ ID NO: 12564 - protein, 172 aa, Oryza rufipogon
KEEKEVKFEVKTHGSKRDDGPVILVVNACASRDLHDHVVGVCFVAQDMTVHKLVMDKFTRVEGDYKAIISSCLDLEMVEFVLQDVFVAAVSQVLITCQGKGIRVSCNLPIKHQGKGVPADLLSQMYEDDNKEQSDEGMSLAVSRNLLRLMNGDVRHMREAGMSTFILSVELA

SEQ ID NO: 12565 - protein, 171 aa, Oryza rufipogon
GKEEKEVKFEVKTHGSKRDDGPVILVVNACASRDLHDHVVGVCFVAQDMTVHKLVMDKFTRVEGDYKASSCLDLEMVEFVLQDVFVAAVSQVLITCQGKGIRVSCNLPIKHQGKGVPADLLSQMYEDDNKEQSDEGMSLAVSRNLLRLMNGDVRHMREAGMSTFILSVELA

SEQ ID NO: 12566 - protein, 162 aa, Oryza rufipogon
KEEKEVKFEVKTHGSKRDDGPVILVVNACASRDLHDHVVGVCFVAQDMTVHKLVMDKFTRVSSCLDLEMVEFVLQDVFVAAVSQVLITCQGKGIRVSCNIKHQGKGVPADLLSQMYEDDNKEQSDEGMSLAVSRNLLRLMNGDVRHMREAGMSTFILSVELA

SEQ ID NO: 12567 - protein, 166 aa, Oryza rufipogon
KEEKEVKFEVKTHGSKRDDGPVILVVNACASRDLHDHVVGVCFVAQDMTVHKLVMDKFTRVEGSSCLDLEMVEFVLQDVFVAAVSQVLITCQGKGIRVSCNLPIKHQGKGVPADLLSQMYEDDNKEQSDEGMSLAVSRNLLRLMNGDVRHMREAGMSTFILSVELA

SEQ ID NO: 12568 - protein, 1128 aa, Oryza sativa
MSSSRPTQCSSSSSRTRQSSRARILAQTTLDAELNAEYEEYGDSFDYSKLVEAQRTTGPEQQARSEKVIAYLHHIQRAKLIQPFGCLLALDEKTFNVIALSENAPEMLTTVSHAVPSVDDPPKLRIGTNVRSLFTDPGTTALQKALGFADVSLLNPILVQCKTSGKPFYAIVHRATGCLVVDFEPVKPTEFPATAAGALQSYKLAAKAISKIQSLPGGSMEVLCNTVVKELFDLTGYDRVMAYKFHEDDHGEVFAEITKPGLEPYLGLHYPATDIPQAARFLFMKNKVRMICDCRARSIKIIEDESLHLDISLCGSTLRAPHSCHLQYMENMNSIASLVMAVVVNENEDDDEVGADQPAQQQKRKKLWGLLVCHHESPRYVPFPLRYACEFLAQVFAVHVNKEFELERQVREKSILRMQTMLSDMLLRESSPLSIVSGTPNIMDLVKCDGAALLYGGKVWRLQNAPTESQIRDIAFWLSDVHRDSTGLSTDSLHDAGYPGAAALGDMICGMAVAKINSKDILFWFRSHTAAEIRWGGAKHDPSDKDDSRRMHPRLSFKAFLEVVKMKSLPWNDYEMDAIHSLQLILRGTLNDDIKPTRAASLDNQVGDLKLDGLAELQAVTSEMVRLMETATVPILAVDSNGLVNGWNQKVAELTGLRVDEAIGRHILTVVEESSVPVVQRMLYLALQGKEEKEVKFEVKTHGSKRDDGPVILVVNACASRDLHDHVVGVCFVAQDMTVHKLVMDKFTRVEGDYKAIIHNPSPLIPPIFGADEFGWCSEWNAAMTKLTGWHRDEVINKMLLGEVFDSTNASCLVKNKDAFVSLCILINSALAGDETEKAPFSFFDRNGKYIECLLSVNRKVNADGVITGVFCFIQVPSHELQHALHVQQASQQNALTKLKAYSYMRHAINNPLSGMLYSRKALKNTGLNEEQMKEVNVADSCHRQLNKILSDLDQDSVMNKSSCLDLEMVEFVLQDVFVAAVSQVLITCQGKGIRVSCNLPERYMKQTVYGDGVRLQQILSDFLFVSVKFSPVGGSVEISCSLTKNSIGENLHLIDLELRIKHQGKGVPADLLSQMYEDDNKEQSDEGMSLAVSRNLLRLMNGDVRHMREAGMSTFILSVELASAPAK

SEQ ID NO: 12569 - protein, 1128 aa, Oryza sativa; identical to SEQ ID NO: 12568

SEQ ID NO: 12570 - protein, 1128 aa, Oryza sativa; identical to SEQ ID NO: 12568

SEQ ID NO: 12571 - protein, 106 aa, Poa pratensis
QAARFLFMKNKVRMICDCRARSIKVIEAEALPFEISLCGSALRAPHNCHLQYMENMNSIASLVMAVVVNENDEDDEVESDQPTEQQKKKKLWGLLVCHHESPRYVP

SEQ ID NO: 12572 - protein, 104 aa, Poa pratensis
QASRFLFMKNKVRMICDCAATPVKLIQDDNLSQPISLCGSTMRAPHGCHAQYMANMGSIASLVMSITINEDGEEDGETGSDQQPKSRKLWGLVVCHHTSPRFVP

SEQ ID NO: 12573 - protein, 104 aa, Poa pratensis
QASRFLFRQNRVRMIADCHAAPVRVIQDPAMPQPLCLVGSTLRSPHGCHAQYMANMGSIASLVMAVIISSGGEDEHSMGRGAVPSAMKLWGLVVCHHTSPRCIP

SEQ ID NO: 12574 - protein, 376 aa, Saccharum officinarum
  unsure (1)..(376): unsure at all Xaa locations
ALSIAGAVQSQKLAVRAISRLQALPGGDVKLLCDTVVEHVRELTGYDRVMVYRFHEDEHGEVVAESRRDNLEPYLGLHYPATDIPQASRFLFRQNRVRMIANCHATPVRVIQDPGLLQPLCLVGSTLRAPXXXXXXXXXXXXXXXXXVMAVIISSGGDDEQTGRGGISSAMKLWGLVVCHHTSPRCIPLPLRYACEFLMQAFGLQLNMELQLAHQLSEKHILRTQTLLCDMLLRDSPTGIVTQSPSIMDLVKCDGAALYYHGKYYPLGVTPTESQIKDIIEWLTVCHGDSTGLSTDSLADASYLGAAALGDAVCGMAVAYITPSDYLFWFRSHTAKEIKWGGAKHHPEDKDDGQRMHPRSSFKAFLEVVKSRSLPW

SEQ ID NO: 12575 - protein, 382 aa, Sorghum halepense
EPARTEDPALSIAGAVQSQKLAVRAISRLQALPGGDIKLLCDTVVEHVRELTGYDRVMVYRFHEDEHGEVVAESRRDNLEPYLGLHYPATDIPQASRFLFRQNRVRMIADCHATPVRVIQDPGMSQPLCLVGSTLRAPHGCHAQYMANMGSIASLVMAVIISSGGDDEQTGRGGISSAMKLWGLVVCHHTSPRCIPFPLRYACEFLMQAFGLQLNMELQLAHQLSEKHILRTQTLLCDMLLRDSPTGIVTQSPSIMDLVKCDGAALYYHGKYYPLGVTPTESQIKDIIEWLTVCHGDSTGLSTDSLADAGYLGAAALGDAVCGMAVAYITPSDYLFWFRSHTAKEIKWGGAKHHPEDKDDGQRMHPRSSFKAFLEVVKSRSL

SEQ ID NO: 12576 - protein, 376 aa, Tripsacum dactyloides
ALSIAGAVQSQKLAVRAISRLQALPGGDVKLLCDTVVEHVRELTGYDRVMVYRFHEDEHGEVVAESRRDNLEPYLGLHYPATDIPQASRFLFRQNRVRMIADCHATPVRVIQDPGLSQPLCLVGSTLRAPHGCHAQYMANMGSIASLVMAVIISSGGDDEQTGRGGISSAMKLWGLVVCHHTSPRCIPFPLRYACEFLMQAFGLQLNMELQLAHQLSEKHILRTQTLLCDMLLRDSPTGIVTQSPSIMDLVKCDGAALYYHGKYYPLGVTPTESQIKDIIEWLTVCHGDSTGLSTDSLADAGYLGAAALGDAVCGMAVAYITPSDYLFWFRSHTAKEIKWGGAKHHPEDKDDGQRMHPRSSFKAFLEVVKSRSLPW

SEQ ID NO: 12577 - protein, 1131 aa, Zea mays
MSSSRPAHSSSSSSRTRQSSRARILAQTTLDAELNAEYEESGDSFDYSKLVEAQRSTPPEQQGRSGKVIAYLQHIQRGKLIQPFGCLLALDEKSFRVIAFSENAPEMLTTVSHAVPNVDDPPKLGIGTNVRSLFTDPGATALQKALGFADVSLLNPILVQCKTSGKPFYAIVHRATGCLVVDFEPVKPTEFPATAAGALQSYKLAAKAISKIQSLPGGSMEALCNTVVKEVFDLTGYDRVMAYKFHEDEHGEVFAEITKPGIEPYIGLHYPATDIPQAARFLFMKNKVRMICDCRARSVKIIEDEALSIDISLCGSTLRAPHSCHLKYMENMNSIASLVMAVVVNENEEDDEPEPEQPPQQQKKKRLWGLIVCHHESPRYVPFPLRYACEFLAQVFAVHVNKEFELEKQIREKNILRMQTMLSDMLFKESSPLSIVSGSPNIMDLVKCDGAALLYGDKVWRLQTAPTESQIRDIAFWLSEVHGDSTGLSTDSLQDAGYPGAASLGDMICGMAVAKITSKDILFWFRSHTAAEIKWGGAKHDPSDKDDNRRMHPRLSFKAFLEVVKTKSLPWSDYEMDAIHSLQLILRGTLNDASKPAQASGLDNQIGDLKLDGLAELQAVTSEMVRLMETATVPILAVDGNGLVNGWNQKVAELSGLRVDEAIGRHILTLVEDSSVSLVQRMLYLALQGREEKEVRFELKTHGSKRDDGPVILVVNACASRDLHDHVVGVCFVAQDMTVHKLVMDKFTRVEGDYKAIIHNPNPLIPPIFGADQFGWCSEWNAAMTKLTGWHRDEVVDKMLLGEVFNSSNASCLLKSKDAFVRLCIVINSALAGEEAEKASFGFFDRNEKYVECLLSVNRKVNADGVVTGVFCFIHVPSDDLQHALHVQQASEQTAQRKLKAFSYMRHAINKPLSGMLYSRETLKSTGLNEEQMRQVRVGDNCHRQLNKILADLDQDNITDKSSCLDLDMAEFVLQDVVVSAVSQVLIGCQAKGIRVACNLPERSMKQKVYGDGIRLQQIVSDFLFVSVKFSPAGGSVDISSKLTKNSIGENLHLIDFELRIKHRGAGVPAEILSQMYEEDNKEQSEEGFSLAVSRNLLRLMNGDIRHLREAGMSTFILTAELAAAPSAVGR

SEQ ID NO: 12578 - protein, 901 aa, Zea mays
  unsure (1)..(901): unsure at all Xaa locations
XIRHEGYDRVMAYKFHEDEHGEVFAEITKPGIEPYIGLHYPATDIPQAARFLFMKNKVRMICDCRARSVKIIEDEALSIDISLCGSTLRAPHSCHLKYMENMNSIASLVMAVVVNENEEDDEPEPEQPPQQQKKKRLWGLIVCHHESPRYVPFPLRYACEFLAQVFAVHVNKEFELEKQIREKSILRMQTMLSDMLFKESSPLSIVSGSPNIMDLVKCDGAALLYGDKVWRLQTAPTESQIRDIAFWLSEVHGDSTGLSTDSLQDAGYPGAASLGDMICGMAVAKITSKDILFWFRSHTAAEIKWGGAKHDPSDEDDSRRMHPRLSFKAFLEVVKMKSLPWSDYEMDAIHSLQLILRGTLNDALKPAQSSGLDNQIGDLKLDGLAELQAVTSEMVRLMETATVPILAVDGNGLVNGWNQKVADLSGLRVDEAIGRHILTLVEDSSVPIVQRMLYLALQGREEKEVRFELKTHGSKRDDGPVILVVNACASRDMHDHVVGVCFVAQDMTVHKLVMDKFTRVEGDYRAIIHNPNPLIPPIFGADQFGWCSEWNAAMTKLTGWHRDEVIDRMLLGEVFDSSNASCLLKSKDAFVRLCIIINSALAGEEAEKAPIGFFDRDGKYIECLLSVNRKVNADGVVTGVFCFIHVPSDDLQHALHVQQASEQTALRRLKAFSYMRHAIDKPLSGMLYSRETLKGTGLDEEQMRQVRVADNCHRQLNKILADLDQDNITDKSSCLDLDMAEFVLQDVVVSAVSQVLIGCQGKGIRVACNLPERSMKQKVYGDGIRLQQILSDFLFVSVKFSPAGGSVDISSKLTKNSIGENLHLIDFELRIKHQGAGVPAEILSQMYGEDNREQSEEGLSLLVSRNLLRLMNGDIRHLREAGMSTFILTAELAAAPSAAGH

SEQ ID NO: 12579 - protein, 669 aa, Zea mays
  unsure (1)..(669): unsure at all Xaa locations
MSSSRPAHSSSSSSRTRQSSRARILAQTTLDAELNAEYEESGDSFDYSKLVEAQRSTPPEQQGRSGKVIAYLQHIQRGKLIQPFGCLLALDEKSFRVIAFSENAPEMLTTVSHAVPNVXDDPPKLGXIGTNVRSLFTDPGATALQKALGFADVSLLNPILVQCKTSGKPFYAIVHRATGCLVVDFEPVKPTEFPATAAGALQSYKLAAKAISKIQSLPGGSMQALCNTVVKEVFDLTGYDRVMAYKFHEDEHGEVFAEITKPGIEPYIGLHYPATDIPQAARFLFMKNKVRMICDCRARSVKIIEDEALSIDISLCGSTLRAPHSCHLKYMENMNSIASLVMAVVVNENEEDDEPEPEQPPQQQKKKRLWGLIVCHHESPRYVPFPLRYACEFLAQVFAVHVNKEFELEKQIREKSILRMQTMLSDMLFKESSPLSIVSGSPNIMDLVKCDGAALLYGDKVWRLQTAPTESQIRDIAFWLSEVHGDSTGLSTDSLQDAGYPGAASLGDMICGMAVAKITSNDILFWFRSHTAAGIKWGGAKHDPSDKDDNRRMHPRLSFKAFXLEVVKTKSLPWXSDYEMDAIHSLQLIXLEGTLEXMASKPAQASGLDNRIGXDLKLXMGLAEXLQAVAKXEMVRMENSKLXPNLGADGNGSMGWXNQKVAELSGLRV

SEQ ID NO: 12580 - protein, 466 aa, Lilium superbum
SGKPFYAIVHRVTNCLIIDFEPVNHTESPTTAAGALQSYKLAAKAIAKLQSLPGGSVRRLCETVVQEVFELTGYDRVMAYRFHEDDHGEVFTEVTKPGLEPYVGLHYPATDIPQAARFLFMKNKVRMICDCRARPVKIHQDDKLPAEITFCGSTLRAPHSCHLQYMENMNSIASLVMAVVVNDDDEVLDEQGAPSRQQSGRKKLWGLVVCHHLSPRFVPFPLRYACEFLMQVFAIHVNKEFELENQIREKNILKTQTLLCDMLLRDGDPIGIVSQSPNIMDLVKCDGAALLYNNRIWQLGMAPTGSQIHDIAFWLAESHMDSTGLSTDSLLDAGYPGALALGDTVCGMAAARITTKDIVFWFRSHTASEIKWGGEKHDPEEEDDGRRMHPRSSFNAFLQVVKNRSLPWNDYEMDAIHSSQLILRGTLDDNGKSKKGSLDSGMGDMRLDGMVELQAVTNEMVRLIIT

SEQ ID NO: 12581 - protein, 394 aa, Lilium superbum
DLEPVNPDDIPVATAGALKSYKLAAKAISRLQSLPSGNISLLCDAMVREVSELTGYARVMAYKFHEDEHGEVIAECKRPDLEPYIGLHYPATDIPQASRFLFMKDKVRMICDCTAPSVRVIRDRQLLQPPSLCGSTLRAPHGCHAQYMANMGSIASLVMAVTVNEDDDETDSNNQPKARKLWGLVVCHHTSPRFVPYPLRYACEFLLQVFGIQINKEVELAAQAKEKHIFRIQTVLCDMLLRDAPIGIFKKSPNVMDLVKCDGAALYYKNQFWRLGTTPTEAQIKDIVNWLLECHDGTTGLSTDSLTEAGYPDASSLGDEVCGMATISITLKDFIFWFRSHTAKEIKWGGAKHEPTDKDDDGRKMHPRSSFKAFLEIVKLRSLPWEDMEMDAIQ

SEQ ID NO: 12582 - protein, 394 aa, Pariana radiciflora
EPARTEDPAISIAGSVQSQKLAVRAISRLQALPGGDVKLLCDTVVEDIRELTGYDRVMVYRFHEDEHGEVVAESRRADLEPYLGLHYPATDIPQASRFLFRQNRVRMIADCHTAPVRVIQDPALPQPLCLVGSTLRAPHGCHAQYMANMGSIASLVMAVIISSGGDDSHNSSRGGIPSAMKLWGLVVCHHTSPRCIPFPLRYACEFLMQAFGLQLNMELQLAHQLSEKHILRTQTLLCDMLLRDSPTGIVTQSPSIMDLVKCDGAALYYHGKYYPLGVTPTEAQIKDIIEWLTLCHGDSTGLSTDSLADAGYPGAAALGDAVCGMAVAYITPSDYLFWFRSHTGKEIKWGGAKHHPEDKDDGQRMHPRSSFKAFLEVVKSRSLPWENAEMDAIH

SEQ ID NO: 12583 - protein, 394 aa, Pseudosasa japonica
EPARTEDPALSIAGAVQSQKLAVRAISRLQALPGGDVKLLCDTVVEHVRELTGYDRVMVYRFHDDEHGEVVAESRRADLEPYLGLHYPATDIPQASRFLFGQNRVRMIADCRAAPVGVIQDPVLPQPLCLVGSTLRAPHGCHAQYMANMGSIASLVMAVIISSGGDDENNITRGGIPSAMKLWGLVVCHHTSPRCIPFPLRYACEFLMQAFGLQLNMELQLAHQLSEKHILRTQTLLCDMLLRDSPTGMVTQSPSIMDLVKCDGAALYYHGKYFLLDVTPTEAQIKDIIEWLTMCHGDSTGLSTDSLADAGYPGAAALGDAVYGMAVAYITPTDYLFWFRSHTAKEIKWGGAKHHPDDKDDGQRMHPRSSFKAFLEVVKSRSLPWENAEMDAIH

SEQ ID NO: 12584 - protein, 210 aa, Sophora affinis
YDRVMAYKFHEDDHGEVIAEITKPGLEPYLGLHYPATDIPQAARFLFMKNKVRMIVDCHAKHVKVLQDEKLPFDLTLCGSTLRAPHSCHLQYMANMDSIASLVMAVVVNDSDEDGDSSDAVQPQKRKRLWGLVVCHNTTPRFVPFPLRYACEFLAQVFAIHVNKEIELEYQLIEKNILRTQTLLCDMLMRDAPLGIVSQSPNIMDLVKCD

SEQ ID NO: 12585 - protein, 170 aa, Sophora affinis
YDRVMAYKFHEDDHGEVISEVTKPGLEPYLGLHYPATDIPQASRFLFMKNKVRMIVDCRAKHVKVLQDKKIPFDLTLCGSTLRAPHSCHLQYMENMNSIASLVMAVVINDNDEDGDSSDAVQPQKRKRLWGLVVCHNTTPRFVPFPLRYACEFLAQVFAIHVNKELELEY

SEQ ID NO: 12586 - protein, 198 aa, Sophora affinis
YDRVMAYSFHEDDHGEVVSEIRRSDLEPLLPVLHYPATDIPQAARFLFQQNRVRMICDCHAKPVNVIQSEELRQPLCLVNSTLRSPLGCHTQYMANMGSIASLVMAVIVNGNDTTRLWGLLVCHHTSPRYVPFPVRYACEFLMQAFGLQLYMEIQLASQMAEKRLLKTQTLLCDMLLRDAPFGIVTQSPNIMDLVKCD

SEQ ID NO: 12587 - protein, 106 aa, Bouteloua gracilis
QAARFLFMKNKVRMICDCRARSVKIIEDEAASIDISLCGSTLRAPHSCHLQYMENMNSIASLVMAVVVNEDEEDDEVEPEQPSQQQKKKKLWGLVVCHHESPRYVP

SEQ ID NO: 12588 - protein, 102 aa, Bouteloua gracilis
SRFLFMKNKVRMICDCSAKPVKIIQDDSLAQLSSLCGSTLRAPHGCHAQYMANMGSVASLVMSVTVNEDEEDEADNGSDQQPRGRKLWGLVVCHHTSPRFVP

SEQ ID NO: 12589 - protein, 103 aa, Bouteloua gracilis
QASRFLFRQNRVRMIADCHATPVRVIQDPGLSQSLCLVGSTLRAPHECHAQYMANMGSIASLVMAVIISSGGDDEQTSRSGISSAMKLWGLVVCHHTSPRFIP

SEQ ID NO: 12590 - protein, 106 aa, Danthonia unispicata
QAARFLFMKNKVRMICDCRARSVKIIEDEAISTDISLCGSTLRAPHSCHLQYMENMNSIASLVMAVVVNENEEDDEAEPEQPPQQQKKKRLWGLIVCHHESPRYVP

SEQ ID NO: 12591 - protein, 104 aa, Danthonia unispicata
  unsure (1)..(104): unsure at all Xaa locations
QASRFLFMKNKVRMICDCSATPVKIIQDDSLAQPLSLCGSTLRAPHGCHAQYMANMGSIASLVMSVTINEDEEENGDTGSDQQPKGXKLWGLVVCHHTSSRFVP

SEQ ID NO: 12592 - protein, 103 aa, Danthonia unispicata
QASRFLFRQNRVRMIADCHATAVSVIQDPGLQQALCLVGSTLRAPHGCHAQYMANMGSIASLVMAVIISSGSDDEQMAQGGISSAMKLWGLVVCHHTSPRFIP

SEQ ID NO: 12593 - protein, 106 aa, Eragrostis cilianensis
QAARFLFMKNKVRMICDCRARSVKVIKDEAASIDVSLCGSTLRAPHSCHLQYMENMNSIASLVMAVVVNENEEGDEPEPEQPPQQQKKKKLWGLIVCHHESPRYVP

SEQ ID NO: 12594 - protein, 102 aa, Eragrostis cilianensis
SRFLFMKNKVRMICDCSVKPVKIIQDDSLAQPLSLCGSTLRAPHGCHAQYMANMGSVASLVMSVTVNEDEDDDGDTGSDQQPKGRKLWGLVVCHHTSPRFVP

SEQ ID NO: 12595 - protein, 103 aa, Eragrostis cilianensis
QASRFLFRQNRVRMIADCHATPVRVIQDPGLSQPLCLVGSTLRAPHGCHAQYMANMGSIASLVMAVIISSGGDDEQTSRSGISSAMKLWGLVVCHHTSPRFIP

SEQ ID NO: 12596 - protein, 106 aa, Pennisetum setaceum
QAARFLFMKNKVRMICDCRARSVKIIEDEALSIDISLCGSTLRAPHSCHLQYMENMNSIASLVMAVVVNENEEDDEPEPEQPPQQQKKKRLWGLIVCHHESPRYVP

SEQ ID NO: 12597 - protein, 104 aa, Pennisetum setaceum
QASRFLFMKNKVRMICDCSAVPVQIIQDDTLAQPLSLCGSTLRAPHGCHAQYMANMGSVAPLVMSVTINEDDEEDGDTGSDQQPKGRKLWGLVVCHHTSPRFVP

SEQ ID NO: 12598 - protein, 106 aa, Stipa viridula
QAARFLFMKNKVRMICDCRARSIKIIEDETLPFDISLCGSALRAPHSCHLQYMENMNSIASLVMAVVVNENEEDDEVEAEQPAQQQKRKRLWGLLVCHHESPRYVP

SEQ ID NO: 12599 - protein, 104 aa, Stipa viridula
QASRFLFMKNKVRMICDCAATPVKLIQDDNLSQPISLSGSTMRAPHGCHAQYMANMGSVASLVMSITINEDEEEDGDTGSDQQPKGRKLWGLVVCHHTSPRFVP

SEQ ID NO: 12600 - protein, 104 aa, Stipa viridula
QASRFLFRQNRVRMIADCHAAPVRVIQDPAMQQPLCLVGSTLRSPHGCHAQYMANMGSIASLVMAVIISGGGDDEHNMGRGAIPSAMKLWGLVVCHHTSPRCIP

SEQ ID NO: 12601 - protein, 102 aa, Thamnochortus argenteus
QASRFLFMKNKVRMICDCAAPPVKVVQGERLAQPLSLCGSTLRAPHGCHAQYMANMGSIASLVMSVTVNEDDGDDTGNDQQQKGQKLWGLVVCHHTSPRFVP

SEQ ID NO: 12602 - protein, 104 aa, Bambusa sp. Kellogg V6
QASRFLFMKNKVRMICDSSATPVKLIQDDNLAQPVSLCGSTLRAPHGCHAQYMANMGSVASLVMSITINEDEEEDGNTLCDQQPKGRKLWGLVVCHHTSPRFVP

SEQ ID NO: 12603 - protein, 104 aa, Bambusa sp. Kellogg V6
QASRFLFRQNRVRMIADCHAAPVRVIQDPTLPQPLCLVGSTLRAPHGCHAQYMANMGSIASLVMAVIISSGGDDEHNMTRGGVPSAMKLWGLVVCHHTSPRCIP

SEQ ID NO: 12604 - protein, 42 aa, Bambusa sp. Kellogg V6
VVVDNENEEDDEVEAEQPAQQQKRKKLWGLIVCHHESPRYVP

SEQ ID NO: 12605 - protein, 393 aa, Chusquea oxylepis
EPARTEDPALPIAGAVQSQKLAVRAISRLQALPGGDVKLLCDTVVEHVRELTGYDRVMVYRFHDDEHGEVVAESRRADLEPYLGLHYPATDIPQAPRFLFKQNRVRMIADCHAASVRVIQGPALPQPLCLVGSTLRAPHGCHAQYMANMGSIASLVMAVIISSGGDDEHNMTRGGIPSAMKLWGLVVRHHTSARCIPFPLRYACEFLMQAFGLQLNMELQLAHQLSEKHILRTQTLLCDMLLRDSPAGIITQSPSIMDLVKCDGAALYYHGKYYPLGVTPTEAQIKDIIEWLTLCHGDSTGLSTDSLADAGYPGAALGDAVCGMAVAYITPSDYLFWFRSHTAKEIKWGGAKHHPEDKDDGQRMHPRSSFKAFLEVAKSRSLPWENAEMDAIH

SEQ ID NO: 12606 - protein, 198 aa, Selaginella serpens
DEHGEVVAEIRRSDLEPYLGLHYPATDIPQAPRFLFMKNRVRMIADCSATAVRIVQDKDLRQPISLAGSTLRAPHGCHGHYMGNMGSIASLVMAVIINDSTMISSGTAAGRASSSAAPSTWRKLWGLVVCHHTSPRTVPFPLRSACEFLMQVFGLQLNTEVELASQLREKHILRTQTLLCDMLLRDAPIGIVSQSPNI

SEQ ID NO: 12607 - protein, 896 aa, Desulfitobacterium hafniense
MDSRLHLVDNLPALLWSSDRAGNYDYVNQAWLEFTGLTFVEVRGEGWLSCVHPEDSPGVMNVLEHSRRHKAPFEAEYRLRRYDGEYRHCLSRGQPYDDPKGELAGYTGVIIDITERKAAEIMTRENAEKFREIFNRITDCVFIHEVKDDGQIGKIQEVNDMACELIGLTRAEIIDLSREVIKVKSPLTLANEFTQKLLSKNYLVFEGMLLTHQGKEIPVEVKAHYHVLNGRRMLLSIARDISNQKRIHKILLASHNKYRQLFDNITDAVFVYELQKDGYPGLLIEINEKARRLMGYHEETFMFSAGPCIRPSSPQLTLDDVWQSLERTHSASFEGICTNLEGEDIPVEVNCHTFPLNGSKVMLTLLRDITERKQIEQERKRTEAEFQQAKEKAEAANRAKSEFLANMSHEIRTPINGIIGMIDLTLLTSLEKTQRENLKIAKNCAYSLFKIINDILDFSKIEAGKLTVEEIEFNLKEVIEQIIKTHSPEAERKGLDLAYTLSANLPDYYKGDPERIKQVLNNLLSNALKFTERGEVSLAVKRLQGDEDVSDLKFTVMDTGIGIAEEDQLHLFEEFNQVDGSITRKYGGTGLGLAISRKLVEMMGGRIWVESEKGKGSSFGVVLRLKHGDKDTLRFKSTQNNDQSREGSTARSYRILLAEDHIVNSIVITEMLKIQGHRVDIAMDGEEALALYHQNPYDVILMDIQLPRLDGIEVTKRIRASEGAQSRTPIIALTAYALQGDREGFLQAGMDEYIPKPVMMEELIMVLDRVVTKFASGEGQAQQEEVVITDEGVYLKDISSFPESVNKDLELSEMAYDFKKLRIALNNGDSVALEHIAHRIKERCSVIGAHKLKALAFKIELAARRGNPGEAKDYLHDLDSEYNQLSGGMLNENTRS

SEQ ID NO: 12608 - protein, 295 aa, Digitalis lanata
GEVFTEITKPGLEPYVGLHYPATDIPQAARFLFMKNKVRMICDCRAKHVKVVQDEKLPLDLTLCGSTLRAPHTCHLQYMENMDSIASLVMSIVINEGDEEGSEPVQVQNRKRLWGLVVCHNTTPRFVPFPLRYACEFLAQVFSIHVNKELELENQMFEKNILRTQTLLCDMLLRDAPLGIVSQSPNVMDLVKCDGAALLYKDKKYKLGLTPTDFQIRDIVSWLDEYHRDSTGLSTDSLYDAGFPGALSLGGSISGMAAVKISEKDWLFWFRSHTAAEVRWGGAKHEPGEKDDGSR

SEQ ID NO: 12609 - protein, 190 aa, Pilularia globulifera
DEHGEVVAEIRKSDLEPYLGLHYPATDIPQASRFLFMKNRVRMICDCRAIPVKVIQDRELRQPLSLAGSTLRAPHGCHSQYMANMGSIASLVMAVIVNDNEEETSSRSQQPKMRKLWGLVVCHHTTPRAVPFPLRSACEFLMQVFGLQLNMELELSAQMREKHILRTQTLLCDMLLRDAPIGIVSESPNI

SEQ ID NO: 12610 - protein, 392 aa, Eupomatia laurina
PYEVPMTAAGALQSYKLAAKAIARLQALPSGSLEKLIDTVVQEVFELTGYDRAMAYKFHDDDHGEVISEITKPGLEPYLGLHYPATDIPQAARFLFMKNKVRMICDCYAKPVNVYQDEKLAFDLTLCGSTLRAPHSCHLQYMENMGSIASLVMAVVINDGEDEDESTGSGLQPPLLKKKRLWGLVVCHNTTPRFVPFPLRYACEFLMQVFAIHVNKELELENQICEKNILRTQTLLCDMLLRDAPLGIVTQNPNIMDLVKCDGVALLYDNKFWRLGLTPTESQMRDISAWLSEYHMDSTGLSTDSLYDAGYPGALALGDVVCGMAAVRITSKDMLFWFRSHTAAEVRWGGAKHDPNDKDDGRRMHPRSSFKAFLEAVKTRSLPWKDYEMDAI

SEQ ID NO: 12611 - protein, 393 aa, Eupomatia laurina
DLEPVNPADVPVTAAGALKSYKLAAKAISRLQSLPSGNISLLCDVLVRELSELTGYDRVMAYKFHEDEHGEVIAECRRLDLEPYLGLHYPATDIPQASRFLFMKNKVRMICDCSAPPVKVIQDKRLEQPLSLCGSTLRAPHGCHAQYMANMGTIASLVISVTINEDDDETPGEQQQKGRKLWGLVVCHHMSPRFVPFPLRYACEFLIQVFGIQLNKEVELAAQTREKHILRMQTMLCDMLLRDTPIGIVTQSPNVMDLVKCDGAALYYQNQFWLLRTTPTETQIRDIIGWLLEYHGDTTGLSTDSLTEAGYPGAADLGDDVCGMAAVKISSKDFLFWFRSHTAKEIMWGGAKHGPVDKDDDGRKMHPRSSFKAFLEVVKRQSLPWEDMEMDAI

SEQ ID NO: 12612 - protein, 194 aa, Phyllocladus trichomanoides
DDHGEVISEIRRNDLEPYLGLHYPATDIPQASRFLFMKNKIRMICDACASPVRVIEDKRLPRELSMVKSTLRAPHACHAEYMYNMGSIASLVMAVVVNEREEDDDGQQQIQSVQARRRLWGLVVCHHSSPRFVPFHLRYACEFLMQVFGIQLNKEVELTALGMEKQILRTQTLLCDMLLRGDKPMGIVTRRPNI

SEQ ID NO: 12613 - protein, 193 aa, Torreya nucifera
DDHGEVISEIRRSDLEPYLGLHYPATDIPQAARYLFMKNRVRMICDCVAPPVKVVEDKRLPRELSLCGSTLRAPHGCHTDYMSNMGSIASLVMAVVINGKEEEEGDTDRQNQQKKGRRLWGLVVCHHTEPRFVPFPLRYACEFLMQVFGIQLNKEVELAAQLREKQILRTQTMLCDMLLRDAPLGIIRQEPNI

SEQ ID NO: 12614 - protein, 192 aa, Torreya nucifera
DDHGEVISEIRKSELEPYLGLHYPATDIPQASRFLFMKNRVRMICNCCSPPVRVVENKRLPRELNMCGSTLRAPHACHAQYMSNMGSIASLVMAVIINEKEEEQGESDGQQQQKGRRLRGLIVCHHTSPRFVPFPLRYACEFLMQVFGIQLNKEVESAAQLREKHILRTQTLLCDMLLRDAPMGIVTQKPNI

SEQ ID NO: 12615 - protein, 195 aa, Torreya nucifera
DEHGEVVAEIRRSDLEPYLGLHYPATDIPQASRFLFMQNRVRMICDCRATPVKVKQAEELKQPLCLVGSTLRAPHGCHAQYMANMGSIASLVMAVIINGNGIDEDGVSGSGSGSGRSSLKLWGLVVCHHTSPRAVPFPLRSACEFLMQTFGLQINMELQLAAQLIENSILRTQTLLCDMLLRDAPIGIVTQSPSI

SEQ ID NO: 12616 - protein, 185 aa, Brassica rapa subsp. pekinensis
FGFQLNMELQLALQMSEKRVLRTQTLLCDMLLRDSPAGIVTQSPSIMDLVKCDGAAFLYHGNYYPLGVAPTEAQIKDVVEWLLANHADSTGLSTDSLGDAGYPGAAALGDAVCGMAVAYITKRDFLFWFRSHTAKEIKWGGAEHHPEDKDDGQRMHPRSSFKAFLEVVKSRSQPWETAEMDAIHS

SEQ ID NO: 12617 - protein, 1536 aa, Neurospora crassa
METGMDHTQDTTPTAEGHGQLGNSYQTPDQLAANNIKVQDYIDNTALATDLHANDASNSSATADGGSSAITSPTNLSSWSASSDRQLGHGSVQDPEDRVFPIRSVISVDLAATPPVNDDIRARRRISLSEGYATSAGAGNTATPTRPHASTVPTAKSGAIDVESRPTVSQSQSSVSQPDGSSVFSSSSAGTMRHKRRMNAMTGSLSSVQADADRYGKGRPIELVLGDSSEEESDGGADGSGDGGDLGTIGASSSSGRESLDALPETHFAPRFKHIVTNEGHAVITGRDGQLQRCEDEPIHTPGAVQGFGLMVVIQEERDGRFIVRFVSENSKRIIGYTPQELFRMNNFLDIFTDEQSENLLDHIDFIRDEDSDPAINGPEVFSLSIRLPKAKTSVRLWCAIHVHPSRPELTICEFELDDDHDYPLRPPEEDLPDIPEDTLQSNPTTEELTESTAISSKPLRVLRSARRRRGEAGAMQVFDIMSQVQEQLANAPNLEKFLKILVGIVKELTGFHRVMIYQFDSSFNGKVVTELVDPMQTRDLYKGLHFPATDIPSQARELYKLNKVRLLYDRDVESARIVCRTPEDLETPLDMTHSYLRAMSPIHLKYLANMAVRSSMSISINAFGDLWGLVSCHSYGPKGMRVSFPIRKMCRLIGDTASRNIERLSYASRLQARKLINTVPTDKNPSGYIIASSDDLLKLFNADFGMLSIREETKILGKIEQSQEALAMLEYLRLRKFSSVVTSQDIKIDFPDLRYPPGFQVIAGLLYVPLSVGGNDFIVLFRKGQVREVKWAGNPHEKTIQAGSAAYLEPRKSFKVWYETVIGKSREWSEEEVETAAVLCLVYGKFIEVWRQKEAALRSSRLTRLLLANSAHEVRTPLNAIINYLEIALEGSLDQETRDNLARSHSASKSLIYVINDLLDLTKTEEGKDLVKDEVFDLLACIREATEPFRHDAKRKGITYEVIEHPGLPRFVHGDQRRVRQAVANVTANAVKHTSEGSVRVELYVAEVQDNRARIDIVVQDSGQGMSNAQLDALFRELEQVDTDIGSESSDDDNSQSGKALGLGLAVVARILRNMDGQLRLKSEVGKGSRFVIQLPFDLPEEETSRDTVGASSGNTAQLSLGSGTASASAASVTQMQDGEVMLVDRNNGSSWSVNNATGSLASKKSYDDNLSITSKGSGRSALSDADRLIDAIQNPLTLGEPEPESVARQRRNSRGPYYNPSSSLLGSSKGRSVSPGSRKRPDVPTRSVSSPNTKKDLPFEKPTTEVAPGPSEPAPAAQGVQYVTDSRVPIKPVKLPDEMFDKPVVPPQSTSKVLFEIKDAVADKAKAASSAVKEQQSVSSQQPAPPPAPAKEASTTNNKLQVLVAEDDPINVKVLRKRLEKAGYKVTHALNGEDCAAVYEDKPVVFDVVLMDMQMPIVDGLTSTKMIRAFEKTNRDGSGQQLSDIASDHGRVPIFAVSASLVEQEKDTYVDAGFDGWILKPIDFKRLETLLQGITDDKARNDALYVQGQWERGGWFEKKGVGNMGQEQEENHEQ

SEQ ID NO: 12618 - protein, 1022 aa, Neurospora crassa
MSQPIERVFPIRLSILESSAFLRNVSDADDLLSVVPVTQQLSNQHLSPPSSDGSRCEPLPSATDRQANPQDSSSAASSYNYTYPSSFNKGNGGDDSLLSETFEYALLADGSHGVIQKARRAFTTCDEEPIHIPGAIQSYGMLVALKLVDERVAGPSRYLPRICSENSAFVCHYQPSELLSLDSFYQVMPNFQRHLFDVQLRHIRQGYDSTKKEQEPVVFAFSFSDPDGRLIPCWCAAHYLGGDTDLFICEFELQDYSMHPLATPAMSDPGNPIDTLGSDHLDFATACSIQSKVQPAFPNPELISKGFDPSTSSVEVIGMATKIQTQFSEAATVPDLLETIVSIVKEVTRFHRVMVYQFDRDYNGTVVAELMDPKASNDVYRGLHFPASDIPPQARKLYMINKVRVLFDRSQRTSRLIGRDVSDMDVPLDLTHAYLRAMSPVHLKYLSNMGVRSSMSMSLESDGKLWGLIVCHSYGPAATRVPFSIRELSFFVGLAASTCLQKLLNSERLQAHRIIETLRGRGRPDESPQMTVWYFTARTRSEKYIGQGGLRWRVWREKETAINDTRLKRLLLHDASHQALEKHLDDGTKQVLTTSYTASKSLIYVIDDLLSLTGSITGSVPLLDEPFHLPNCLEEVLCPLRRLGQEKGIQLIMIPSTGPTQYVRGDPTSLQRSLSILVANAIQHTTSGQVVVKWYETAMNPENTVIHISITDTGPGFSERELDDMFQEFEQVPDEDFDEATSKPHAVRDNVLRVGVGLAFVARFVKQRNGQLKVKSTKGRGSTFTLEIPFAVSSHCSSIASRRRDASPLPVLTMPGPLTFGAGSSVPSDRSTFGTSRDSKPSPPIIRPGSSTADTSPRDFQTPSPHHYTVIVADDNMINVQILERRLTKLGHRVLVSRDGQECFNLFASNRSTVDFVLMDLNMPVVDGFASIRMIRDQEYSHPTPSRVVQCCGRTPIFAVSGMLRRGQEQQCKEAGFDGWMPKPVDMKRLVRCLAGGLDPNARRMCVYDEKRFELGGWFDAE

SEQ ID NO: 12619 - protein, 190 aa, Conocephalum supradecompositum
DEHGEVVAEIRRSDLEPYLGLHYPATDIPQASRFLFMKNRVRMICDCCAQPVQVVQDKELRQPLSLAGSTLRAPHGCHAQYMGNMGSIASLVMAVIINDNDEEYSSRGYQHKGRKLWGLVVCHHTTPRSVPFPLRSACELLMQVFGLQLNMEVELAAQLREKRILRTQTLLCDMLLRDAPIGIVSQSPNI

SEQ ID NO: 12620 - protein, 171 aa, Callerya australis
PQATRFLFMRNKVRIIVDCRAKHVKVLQDKKIPFDLTFCGSTLRAPHSCHLQYMENMDASASLVLAVVDNDNDEYEDSSDDVQPQKRKRLWGLVVCHHISPRFVPFPLRYACEFLAQVFAIHVSKEIELDYQIIEKNILRTQTLLCDMLMRDAPLGIVSQSPNIMDLVKCD

SEQ ID NO: 12621 - protein, 161 aa, Callerya australis
NKVRMIVDCRAKHVKVLQEQKIPFDLTFCGSTLRAPHSCHLQYMENMNASASLVLAVVDNDNDEYEDSSDDVAGEKRKRLWGLVVCHHISPRFVPFPLRYACEFLAQVFAIHVNKEIELEYQILEKNILRTQTLLCDMLLRDAPLGIVSQSPNIMDLVKCD

SEQ ID NO: 12622 - protein, 170 aa, Callerya megasperma
QATRFLFMKNKVRMIVDCRAKHVKVLQDKKFPFDLTFCGTTLRAPHSCHLQYMENMNAIASLVLAVVVNDNDGYEDSSDDVQPQKRKRLWGLVVCHHITPRFVPFPLRYACEFLAQVFAIHVSKEIELEYQIIEKNILRTQTLLCDMLMRDAPLGIVSQSPNIMDLVKCD

SEQ ID NO: 12623 - protein, 153 aa, Callerya megasperma
CHAKHVKVLQDEKLPFDLTLCGSTLRAPHSCHSQYMANMDSIASLVMAVVVNDSDEDGDSSDAVHPQKRKRLWGLVVCHNTTPRFVPFPLRYACEFLAQVFAIHVNKEIELEYQILEKNILRTQTLLCDMLLRDAPLGIVSQSPNIMDLVKCD

SEQ ID NO: 12624 - protein, 160 aa, Millettia thonningii
KVRMIVDCHAKHVKVLQDEKLPFDLTLCGSTLRAPHSCHLQYMANMDSIASLVMAVVVNDNEEDGESSDAVQPQKRKRLWGLVVCHNTTPRFVPFPLRYACEFLAQVFAIHVNKEIELEFQIIEKNILRTQTLLCDMLMRDAPLGIVSQSPNIMDLVKCD

SEQ ID NO: 12625 - protein, 154 aa, Millettia thonningii
IVDCRAKHVKVLQAKRSIDLTLCGSTLRAPHSCHLQYMENMNCSASLVMAVVVNDNDEDGDNDAVQPQKRKRLWGLVVCHNTTPRFVPFPLRYACEFLAQVFAIHVNKELELEYQIVEKNILRTQTLLCDMLMRDAPLGIVSQRPNIMDLVKCD

SEQ ID NO: 12626 - protein, 151 aa, Millettia thonningii
CRAKHVKVLQDKRSIDLTLCGSTLRAPHSCHLQYMENMNCSASLVMAVVVNDNDEDGDNDAVQPQKRKTLWGLVVCHNTTPRFVPFPLRYACEFLAQVFAIHVNKELELEYQIVEKNILRTQTLLCDMLMRDAPLGIVSQRPNIMDLVKCD

SEQ ID NO: 12627 - protein, 209 aa, Austrosteenisia blackii
DRVMAYKFHEDDHGEVIAEITKPGLEPYLGLHYPATDIPQAARFLFMKNKVRMIVDCHAKHVKVLQDEKLPFDLTLCGSTLRAPHSCHLQYMANMNSIASLVLAVVVNDNEEDGDSSDAVQPQKRKRLWGLVVCHNTTPRFVPFPLRYACEFLAQVFAIHVNKEIELEYQIIEKNILRTQTLLCDMLMRDAPLGIISQSPNIMDLVKCD

SEQ ID NO: 12628 - protein, 205 aa, Austrosteenisia blackii
RTSSMRMIMGKVIAEIKKPGLEPYLGLHYPATDIPQATRFLFMKNKVRQIVDCRAKHVKVLQDKNIPFDLTLCGSTLRAPHSCHLQYMKNMNSSASLVMAVVVNDNNEDGDSSDAFQPQKRKRLWGLVVCHHTTPRFVPFPLRYACEFLAQVFAYLVNKELEIAYQIVEKNILRTQTLLCDMLMRDAPLGIVSQSPNIMDLVKCD

SEQ ID NO: 12629 - protein, 193 aa, Austrosteenisia blackii
MAYKFHEDDHGEVVSEIRRSDLEPYLGLHYPATDIPQASRFLFKQNRVRMICDCHAKPVKVIQSEELRQPLCLVNSTLRSPHGCHTQYMANMGSIASLVMAVTVNGNDTRRLWGLLVCHHTSPRYVPFPVRYACEFLMQAFGLQLYMEIQLASQMAEKRILKTQTLLCDMLLRDAPFGIVSQSPNIMDLVKCD

SEQ ID NO: 12630 - protein, 156 aa, Bolusanthus speciosus
IVDCDAKHVKVLQDEKLPVDLTLCGSTLRAPHSCHLQYMANMDSIASLVMAVVVNDSDEDGDSSDAVQPQKRKRLWGLVVCHNTTPRFVPFPLRYACEFLARVFAIHVNKEIELEYQIIEKNILRTQTLLCDMLMRDAPLGIVSQSPNIMDLVKCD

SEQ ID NO: 12631 - protein, 151 aa, Bolusanthus speciosus
AKHVKVLQDQKNSIDLTLCGSTLRAPHSCHLQYMLNMNSIASLVMAVVVNDSDEDGDSSDAGQPQKRKRLWGLVVCHNTTPRFVPFPLRYACEFLAQVFAIHLNKELELEYQIIEKNILRTQTLLCDMLMRDAPLGIVSQSPNIMDLVKCD

SEQ ID NO: 12632 - protein, 186 aa, Gymnocladus dioica
MAYKFHEDDHGEVIAEITKPGLEPYLGLHYPATDIPQAARFLFMKNKVRMIVDCHARHVKVLQDEKLPFELTLCGSTLRAPHTCHLQYMENMNSIASLVMAVVVNDNDEDVDSSDSIQPQKRKRLWGLVVCHNTTPRFVPFPLRYACEFLAQVFAIHVNKELELENQIVEKKILRTQTLLCDMLMR

SEQ ID NO: 12633 - protein, 184 aa, Gymnocladus dioica
HGEVVSEIRRSDLEPFLGLHYPATDIPQAARFLFKQNRVRMICDCHANPVKVIQSEESRQPLCLVNSTLRSPHQCHAQYMENMGSIASLVMAVIVNGNDTTKLWGLLVCHHTSPRHVPFPLRYACEFLMQAFGLQLYMEMQLASQMAEKRTLKTQTLLCDMLLRDALFSIVTQSPNIMDLVKCD

SEQ ID NO: 12634 - protein, 210 aa, Myrospermum sousanum
YDRVMAYKFHEDDHGEVVAEITKSGLEPYLGLHYPATDIPQAARFLFMKNKVRMIVDCHAKHVKVLQDEKLPFDLTLCGSTLRAPHSCHLQYMANMDSIASLVLAVVVNDSDEDGDSSDAVQPQKRKRLWGLVVCHNTTPRFVPFPLRYACEFLAQVFAIHVNKEFELEYQIIEKNILRTQTLLCDMLMRDAPLGIVSQSPNIMDLVKCD

SEQ ID NO: 12635 - protein, 200 aa, Myrospermum sousanum
RVMAYKFHEDEHGEVVAESKRPDLEPYIGLHYPATDIPQASRFLFKQNRVRMIVDCHASPVGVIQDEGLMQPLCLVGSTLRAPHGCHAQYMANMGSIASLVMAVIINGNDEDTVCSRSSMRLWGLVVCHHTSARCIPFPLRYACEFLMQAFGLQLNMELQLASQSLEKRVLKTQTLLCDMLLRDSPIGIVTQSPNIMDLV

SEQ ID NO: 12636 - protein, 90 aa, Myrospermum sousanum
QAARFLFKQNRVRMICDCYAKPVKVIQSEELRRPLCLVNSTLRSPHGCHTQYMANMGSIASLVMAVTVNGNDTTRLWGLLVCHHTSPRYV

SEQ ID NO: 12637 - protein, 200 aa, Dalbergiella nyasae
EDDHGEVIAEITKPGLEPYLGLHYPATDIPQAARFLFMKNKVRMIVDCHAKHVKVLQDEKLPLDLTLCGSTLRAPHSCHLQYMANMDSIASLVMAVVVNDNEEDGDSSDAVQPQKRKRLWGLVVCHNTTPRFVPFPLRYACEFLAQVFAIHVNKEIELEYQIIEKNILRTQTLLCDMLMRDAPLGIVSQSPNIMDLVKCD

SEQ ID NO: 12638 - protein, 196 aa, Dalbergiella nyasae
DHGEVVAEVKKPGLEPYLGLHYPATDIPQATRFSFMKNKVRMIVDCHAKHVKVLQDKKIPFDLTLCGSTLRAPHSCHLQYMENMNSSASLVMAVVVNDNDEDGDSSDAIQPQKRKRLWGLVVCHHTTPRFVPFPLRYACEFLAQVFAIHVNKELELEYQIVEKNILRTQTLLCDMLMRDAPLGIVSQSPNIMDLVK

SEQ ID NO: 12639 - protein, 187 aa, Dalbergiella nyasae
EDEHGEVVSEIRRSDLEPYLGLHYPATDIPQASRLLFKQNRVRMICDCDAKPVKVIQSEELRQPLCLVNSTLRSPHGCHTQYMANMGSIASLVMAVIINGNDTTRLWGLLVCHHTSPRYVPFPVCYACEFLMQAFGLQLYMEIQLASQMAEKRILKTQTLLCDMLLRDAPFGIVNQSPNIMDLVKCD

SEQ ID NO: 12640 - protein, 176 aa, Dalbergiella nyasae
IGLHYPATDIPQAFRFLFKQNRVRMIVDCHASPVRVVQDEALVQPLCLVGSTLRAPHGCHAQYMANMGSIASLVMAVIINGNDEEGVGGRSSMRLWGLVVCHHTSARCIPFPLRYACEFLMQAFGLQLNMELQLAAQTLEKRVLRTQTLLCDMLLRDSPTGIVTQSPNIMDLVKCD

SEQ ID NO: 12641 - protein, 206 aa, Mundulea sericea
MAYKFHEDDHGEVIAEITKPGLEPYLGLHYPATDIPQASRFLFMKNKVRMIVDCHAKHVKVLQDEKLPFDLTLCGSTLRAPHSCHLQYMANMDSIASLVMAVVVNDNEEDGDSSDAVQPQKRKRLWGLVVCHNTSPRFVPFPLRYACEFLAQVFAIHVNKEIELENQIIEKNILRTQTLLCDMLMRDAPLGIVSQSPNIMDLVKCD

SEQ ID NO: 12642 - protein, 190 aa, Mundulea sericea
  unsure (1)..(190): unsure at all Xaa locations
EVVAESKRPDLEPYIGLHYPATDIPQASRFLFKQNRVRMIVDCHASPVRVVQDEALVQPLCLVGSTLXAPHGCHAQYMANMGSIASLVMAVIINGNDEEGVGGRSSMRLWGLVVCHHTSARCIPFPLRYACEFLMQAFGLQLNMELQLAAQALEKRVLRTQTLLCDMLLRDSPTGIVTQSPNIMDLVKCD

SEQ ID NO: 12643 - protein, 141 aa, Mundulea sericea
MAYKFHEDDHGEVIAEITKPGLEPYLGLHYPATDVPQATRFLFMKNKVRMIVDCRAKHVKVLQDRKVPFDLTLCGSTLRAPHGCHVQYMANMNCSASLVMAVVLNDNDEDGGDSDAVQPQKRRRLWGLVVCHNTTPRFVPF

SEQ ID NO: 12644 - protein, 151 aa, Mundulea sericea
MAYKFHEDDHGEVVSEIRRSDLEPYLGLHYPATDIPQASRFLSKQNRVRMICDCHAKPVKVIQSEELRQPLCLVNSTLRSPHVCHTQYMANMDSIASLVMAIIVNGNDTTRLWGLLVCHHTSPRYVPFPVRYACEFLMQAFGLQLYMEIQL

SEQ ID NO: 12645 - protein, 103 aa, Clianthus formosus
TRSRFLFMKNKVRMIVDCHAKHVKVLQDEKLPFDLTLCGSTLRAPHSCHLQYMANMNSIASLVMAVVVNDSDEDGDSSDAVQPQKKKRLWGLVVCHNTSPRFV

SEQ ID NO: 12646 - protein, 154 aa, Coursetia madrensis
RVMAYKFHEDDHGEVIAEITKPGLEPYLGLHYPATDIPQAARFLFLKNKVRMIVDCHAKHVKVLQDEKLPIDLSLCGSTLRAPHSCHLQYMANMDSIASLVMAVVVNDSDEDGDSSDAVQPQKRKRLWGLVVCHNTTPRFVPFPLRYACEFLAQ

SEQ ID NO: 12647 - protein, 90 aa, Hebestigma cubense
QAARFLFKQNRVRMITDCHAKPVKVIQSEELRQPLCLVNSTLRSPHECHTQYMANMGSIASLVMAVIVNRNDTTRLWGLLVCHHTSPRYV

SEQ ID NO: 12648 - protein, 103 aa, Hybosema robustum
QATRFLFMKNKVRMIVDCHAKHVKVLQDEKLPFDLTLCGSTLRAPHSCHLQYMANMDSIASLVMAVVVNDSDEDGDSSDAVQPQKRKRLWGLVVCHNTTPRFV

SEQ ID NO: 12649 - protein, 103 aa, Hybosema robustum
QATRFLFMKNKVRMIVDCSANHVKVPQDKNIPFDLTFCGSTLRAPHSCHLQYMKNMNASASLVMAIVVNDSDEDGDSSDAVQLQNRRRLWGLVVCHHISPRFV

SEQ ID NO: 12650 - protein, 103 aa, Lennea melanocarpa
QAARFLFMKNKVRMIVDCHAKHVKVLQDEKLPFDLTLCGSTLRAPHSCHLQYMANMDSIASLVMAVVVNDSDEDGDSSDAVQPQKRKRLWGLVVCHNTTPRFV

SEQ ID NO: 12651 - protein, 90 aa, Lennea melanocarpa
QAARFLFKQNRVRMITDCNAKPVKVIQSEELKQPLCLVNSTLRSPHECHTQYMANMGSIASLVMAVIVNENDTTRLWGLLVCHHTSPRYV

SEQ ID NO: 12652 - protein, 103 aa, Poitea carinalis
QAARFLFMKNKVRMIVDCHAKHVKVLQDEKLAFDLTLCGSTLRAPHSCHLQYMANMDSIASLVMAVVVNDSDEDGDSSDAIQPQKRKRLWGLVVCHNTTPRFV

SEQ ID NO: 12653 - protein, 103 aa, Sesbania emerus
QATRFLFMKNKVRIIVDCSAKHVKVIQDKNIPFDLTLCGSTLRAPHSCHLQYMENMKASASLVMAVVVNDSNEDGDSSDAVQPQKRKRLWGLVVCHNTTPRFV

SEQ ID NO: 12654 - protein, 103 aa, Sesbania vesicaria
QATRFLFMKNKVRMIVECCAKHVKVIQDKKNPFDLTLCGSTLRAPHSCHLQYMENMKASASLVMAVVINDSNEDGDSSDAVQPQKRKRLWGLVVCHHITPKFV

SEQ ID NO: 12655 - protein, 190 aa, Gleditsia triacanthos
KFHEDDHGEVVSEIRRSDLEPYLGLHYPATDIPQASRFLFKQNRVRLICDCHANPVRVIQSEELRQPLCLVISTLRSPHGCHTQYMANMGSIASLVMAVIVNGTDTTKLWGLLVCHHTSPRHVPFPLRYACEFLMQAFGLQLYSDMQLASQMAEKRILRTQTLLCDMLLRDSPFGIVTQSPNIMDLVKCD

SEQ ID NO: 12656 - protein, 210 aa, Brownea sp. 'Lavin 6225'
YDRVMAYKFHEDDHGEVIAEITKPDMEPYLGLHYPATDIPQAARFLFMKNKVRIIVDCRAKHVKVLQDEKLPFDLTLCGSTLRDPHSCHLQYMENMNSVASLVMAVVVNDNDEDGDSSDSVQPQKRKRLWGLVVCHNTTPRFVPFPLRYACEFLVQVFAIHVNKELELEYQIVEKNILRTQTLLCDMLMRDAPLGIVSQGPNIMDLVKCD

SEQ ID NO: 12657 - protein, 114 aa, Brownea sp. 'Lavin 6225'
RVMAYKFHEDEHGEVVAESKRPDLEPYYGLHYPSTDIPQASRFLFKQNRVRMIVDCHATPVRVIQDEGLMQPLCLVGSTLRAPHECHAQYMSNMGSVASLAMAVIINGNDEEAV

SEQ ID NO: 12658 - protein, 210 aa, Enterolobium cyclocarpum
YDRVMAYKFHEDDHGEVIAEITKPGLEPYLGLHYPATDIPQAARFLFMKNKVRMIVDCHARHVKVLQDEKLPFELTLCGSTLRAPHTCHLQYMENMNSIASLVMAVVVNDNDEDVDSSDSIQPQKRKRLWGLVVCHNTTPRFVPFPLRYACEFLAQVFAIHVNKELELENQIVEKKILRTQTLLCDMLMRDAPLGIISQSPNIMDLVKCD

SEQ ID NO: 12659 - protein, 208 aa, Enterolobium cyclocarpum
RVMAYKFHEDEHGEVVSEVKKPGLESYMGLHYPATDVPQATRFLFMKNKVRMIVDCRAKHVKVLQDENLPYDLTFCGSTLRAPHSCHVQYMQNMDLVASLVMAVVINDRDEDGDSSDSVQPQKRKRLWGLVVCHNYTPRFVPFPLRYACEFLAQVFAIHVNKEIELEYQIIEKNIMRTQSLLCDMLMRDEPLGIISQSPNIMDLVKCD

SEQ ID NO: 12660 - protein, 193 aa, Enterolobium cyclocarpum
YDRVMAYKFHEDDHGEVVSEIRRSDLEPFFGLHYPATDIPQAARFLFKQNRVRMICDCHANPVKVIQSEESRQPLCLVNSTLRSPHQCHAQYMENMGSIASLVMAVIVNGNDTTKLWGLLVCHHTSPRHVPFPLRYACEFLMQAFGLQLYMEMQLASQMAEKRTLKTQTLLCDMLLRDALFSIVTQSPNIMDL

SEQ ID NO: 12661 - protein, 176 aa, Callerya atropurpurea
YDRVMAYKFHEDDQGEVIAEVTKPGLEPYLGLHYPATDIPQATRFLFMRNKVRMIVDCSAKHVKVHQDKNIPFEGTLCGSTLRAPHSCHLQYMENMNASASLVMAVVVNDDEEDEDSAGDVEPQKRKRLWGLVVCHHITPRFVPFPLRYACEFLAQVFAIHVNKEIELEYQIIEKE

SEQ ID NO: 12662 - protein, 177 aa, Callerya atropurpurea
YPATDIPQAARFLFMKNKVRMIVDCHAKHVKVLQDEKLPFDLTLCGSTLRAPHSCHLQYMANMDSIASLVMAVVVNDSEEDGDSSEAVQPQKRKRLWGLVVCHNTTPRFVPFPLRYACEFLAQVFAIHVNKEIELEYQILEKNILRTQTLLCDMLMRDAPLGIVSQSPNIMDLVKCD

SEQ ID NO: 12663 - protein, 160 aa, Callerya reticulata
KVRMIVDCHAKHVKVLQDEKLPFDLTLCGSTLRAPHSCHLQYMANMDSIASLVMAVVVNDSDEDGDSSDAVHPQKRKRLWGLVVCHNTTPRFVPFPLRYACEFLAQVFAIHVNKEIELEYQILEKNILRTQTLLCDMLMRDAPLGIVSQSPSIMDLVKCD

SEQ ID NO: 12664 - protein, 210 aa, Carmichaelia sp. 'Lavin 6201'
YDRVMAYKFHEDDHGEVIAEVKKPGLEPYLGLHYPATDVPQAARFLFMKNKVRIIVDCSAKRVKVIQDKNIPFDLTLCGSTLRAPHNCHLQYMDNMKASASLVMAVVVNDSNEDGDSSDAVQPQKRKRLWGLVVCHHITPKFVPFPLRYACEFLAQVFAIHVNKEIELEYQVIERNILRTQTLLCDMLMRDAPLGIISQSPNIMDLVKCD

SEQ ID NO: 12665 - protein, 188 aa, Carmichaelia sp. 'Lavin 6201'
YDRVMAYKFHEDDHGEVVSEIRRSDLEPYLGLHYPSTDIPQAARFLFKQNRVRMICDCHAKPVKVIQSEELRQPLCLVNSTLRSPHDCHTQYMANMGSIASLVMAVIVNGNDSTRLWGLLVCHHSSPRYVPFPVRYACEFLMQAFGLQLYMEIQLASQMAEKRILKTQTLLCDMLLRDAPFGIVTQSQ

SEQ ID NO: 12666 - protein, 207 aa, Cyclolobium nutans
VMAYKFHEDDHGEVIAEITKPGLEPYLGLHYPATDIPQAARFLFMKNKVRMIVDCHAKHVKVLQDEKLPFDLTLCGSTLRAPHSCHLQYMANMDSIASLVMAVVVNDSDEDGNSSDAVQPQKRKRLWGLVVCHNTTPRFVPFPLRYACEFLAQVFAIHVNKEIELEYQIIEKNILRTQTLLCDMLMRNAPLGIVSQSPNIMDLVKCD

SEQ ID NO: 12667 - protein, 206 aa, Cyclolobium nutans
MAYKFHEDDHGEVIAEVTKPGLEPYLGLHYPATDIPQATRFLLMKNKVRLIVDCCAKHVKVLQDKKIPFELTLCGSTLRAPHSCHIQYMLNMNSIASLVMAVVVNDSDEDGDSSDAVQPQKRKRLWGLVVCHNTTPRFVPFPLRYACEFLAQVFAIHVNKEIELEYQIIEKNILRTQTLLCDMLMRNAPLGIVSQSPNIMDLVKCD

SEQ ID NO: 12668 - protein, 103 aa, Dalbergia sp. 'Lavin 7141'
QASRFLFMKNKVRMIVDCHAKHVKVLQDEKLPFDLTLCGSTLRAPHSCHSQYMANMDSIASLVMAVIVNDNDEDGDSSDAVQPQKRKRLWGLVVCHNTTPRFV

SEQ ID NO: 12669 - protein, 103 aa, Dalbergia sp. 'Lavin 7141'
QATRFLFMKNRVRMIVDCRAKHVKVLQDLKIPFDLTLCGSTLRAAHSCHLQYMENMNSIASLVMAVVVNDDDDDGDGSDVVQPQKRKRLWGLVVCHNTTPRFV

SEQ ID NO: 12670 - protein, 90 aa, Dalbergia sp. 'Lavin 7141'
QASRFLFRQNRVRMICDCHAKPVKVFQSEELRQPLCLVNSTLRSPHGCHTQYMANMGSIASLVMAIIVNGKHTTRLWGLLVCHHTSPRYV

SEQ ID NO: 12671 - protein, 144 aa, Fordia splendidissima
QDEKLPFDLTLCGSTLRAPHSCHLQYMANMDSIASLVMAVVVNDNEEDGDSSDAVQPQKRKRLWGLVVCHNTTPRFVPFPLRYACEFLAQVFAIHVNKEIELEYQIIEKNILRTQTLLCDMLMRDAPLGIVSQSPNIMDLVKCD

SEQ ID NO: 12672 - protein, 137 aa, Platycyamus regnellii
RVMAYKFHEDDHGEVIAEVKKPGLEPYMGLHYPATDIPQATRFLFMKNKVRMIVDCRAKHVKVLQDKKIGFDLTLCGSTLRAPHSCHLQYMENMNSSASLVMAVVVNDNDEDGDSSDAVQPQKRKRLWGLVVCHHTT

SEQ ID NO: 12673 - protein, 132 aa, Platycyamus regnellii
RVMAYKFHEDDHGEVIAEITKPGLEPYMGLHYPATDIPQAARFLFMKNKVRMIVDCHAKHVKVLQDEKLPFDLTLCGSTLRAPHSCHLQYMANMDSIASLVMAVIVNDNEEDGDSSEAVHPQKRKRLWGLVV

SEQ ID NO: 12674 - protein, 135 aa, Platycyamus regnellii
VKVIQSEELRQPLYLVNSTLRSPHGCHTQYMANMGSIASLVMAVIVNGNDTTRLWGLLVCHHTSPRYVPFPVRYACEFLMQAFGLQLYMEIQLASQMAEKRILKTQTLLCDMLLRDAPCGIVTQSPNIMDLVKCD

SEQ ID NO: 12675 - protein, 195 aa, Poecilanthe falcata
RVMAYKFHEDDHGEVVSEIRRSDLEPYLGLHYPAKDIPQAARFLFKQNRVRMIFDCHAKPVNVIQSEELRQPLCLVNSTLRSPHGCHTQYMANMGSVASLVMAVIVNGNDTTRLWGLLVCHHTSPRYVPFPVRYACEFLMQAFGLQLYMEIQLATQLAEKRILKTQTLLCDMLLRDAPFGIVNQSPNIMDLVKCD

SEQ ID NO: 12676 - protein, 140 aa, Poecilanthe falcata
YRVMAYKFHEDDHGEVIAEITKPGLEPYLGLHYPATDIPQAARFLFMKNKVRMIVDCHAKHVKVVQDEKLPFDLTLCGSTFRAPHSCHLQYMANMDSIASLVMAVIVNDNEEDGDSSEAVQPQKRKRLWGLVVCHNTTPG

SEQ ID NO: 12677 - protein, 103 aa, Tipuana tipu
QASRFLFMKNKVRMIVDCHAKHVKILQNEKLPFDLTLCGSTFRAPHSCHLQYMANMDSIASLVMAVVVNDSEDGDRISDAVQPQKRKRLWGLVVCHNTTPRFV

SEQ ID NO: 12678 - protein, 908 aa, Pantoea agglomerans
MTKYSLRARMMILILAPTLLIGLLLSTFFVVHRYNELQEQLVDAGASIIEPLAVASEYGMTFRSRESVRQLVSLLHRRHSDIVRSITVFDAQNNLFVTSNYHHNFAQLQLPKGVPMPTDLMLTRRGNSLILRTPILSESQYPDQNATDPVPQDNNLGYVAIELDLQSVRLRQYKEVFISTLLLLLCMCIAILFAYRLMRDVTGPIRNMVNTVDRIRRGQLDSRVEGFMLGELHMLKNGINSMAMSLTAYLEEMQQNIDQATSDLRETLEQMEIQNVELDLAKKRAQEAARIKSEFLASMSHELRTPLNGVIGFTRQMLKTEMSVTQTDYLQTIERSANNLLTIINDVLDFSKLEAGKLVLEHIPFSLRETLDEVIVLLAPSAHEKGLELTLDVHNDVPEQVIGDSLRLQQIITNLLGNAIKFTETGNIDIRVELRGQQDHQVELEVQIHDTGIGISERQQSQLFQAFRQADASISRRHGGTGLGLVITQKLVKEMGGDICFHSQLNRGSTFWFHITLELHEGMLSLPSSLPDLRGKTLGYIEANPMAAEATLNMLSVTSLVITHSPTLAQLPKKNYDFLLVGVPIPFRDNLAQHESKLKAALNIAGRVILALPCQSQINAEQLKQQGAIGCLIKPITSNRLFPLLRMEPPQRLLAAPERKRLPLTVMAVDDNPANLKLIGTLLAEQVEKTLLCESGEEALALARDNVLDLILMDIQMPNIDGIRTGELIRQLPHHNSTPIVAVTAHAVSGEREHLLQAGMDDYLAKPIDEAMLTRVLARYYSGEPAAEPLLSLDWPLALRQAANKEDLARDLLQMLLDFLPQVSERVQAVLDGTPDDSILDLIHKLHGSCSYSGVPRLKQLCFYLEQQLRKGVGNEELEPEWLELLDEIELVSQAARSHLESDRPTTS

SEQ ID NO: 12679 - protein, 391 aa, Acorus gramineus
PYEVPMTAAGALQSYKLAAKAIARLQSLPGGSMERLCDTMVREVFELTGYDRVMAYKFHEDDHGEVVAEITKQGLEPYLGLHYPATDIPQAARFLFMKNKVRMICDCRAKPVKVFQDEKLTIDLAFCGSTLRAPHSCHLQYMENMDSIASLVMAVVINDGDDDDDHVGDNNNDNSKKKRLWGLVVCHNTSPRFVPFPLRYACEFLTQVFAIHVHKELELENQMPEKNILRTQTLLCDMILRDAPLGIVSQTPNIMDLVKCDGAALLYKDKIWQLGTTPTERQIRDIAIWLTDYHMDSTGLSTDSLHDAGYPDALALGDVVCGMAAARITSKDILFWFRSPTTSEIQWGGAKHERSDQDDGRRMHPRSSFKAFLEVVKTRSLPWKDYEMDAI

SEQ ID NO: 12680 - protein, 407 aa, Acorus gramineus
ILHRIDVGLVIDLEPVNPSDVPVTAAGALKSYKLAAKAISRLQSLPSGNISLLCDVLVREVSDLTGYDRVMVYKFHEDEHGEVIAEQRKTDLEPYLGLHYPATDIPQASRFLFMKNKVRIICDCFTPPVKVVQDKKLGQPLSLCGSTLRAPHGCHAQYMANMGSIASLVMAVTINDDDDDDGNGNEQQQKGRKLWGLVVCHHTSPRFIPFPLRYACEFLIQVFSIQLNKEVELAAQMREKHILRTQTVLCDMLLRDAPVGIFTQSPNVMDLVMCDGAALYYKNQFWLLGTTPSEVQIKDLVDWLHECHNGSTGLSTDSLMEASYPGASALGNAACGMAAIKIGGTRDYMFWFRSQTAKEIKWGGAKHDPVDNDEEGQKMHPRSSFKAFLEVVKWRSLPWENAEMDAI

SEQ ID NO: 12681 - protein, 160 aa, Butea monosperma
NKVRMIVDCHAKHVKVLQDEKLTFDLTLCGSTLRAPHSCHLQYMSNMDSIASLVMAVVVNDNEEDGDPDAVQPQKRKRLWGLVVCHNTTPRFVPFPLRYACEFLAQVFAIHVNKEIELEYQIIEKNILRTQTLLCDMLMRDAPLGIVSQSPNIMDLVKCD

SEQ ID NO: 12682 - protein, 165 aa, Butea monosperma
LFMKTKVRMIVDCRAKHVKVLQDKKIPFDLTLCGSTLRAAHSCHLQYMENMNSSASLVMAVVVNDNDEHGDSSDAVPPQKRKRLWGLVVCRHTTPRFIPFPLRYACEFLAQVFAIHVNKELELEYQIVEKNILQTQTLLCDMLMRDAPLGIVSQSPNIMDLVKCD

SEQ ID NO: 12683 - protein, 146 aa, Butea monosperma
SRFLFKQNRVRMICDCHAKPVKVIQSEELRQSLCLVNSTLRLPHGCHTQYMANMGSIASLVMAIIVNGNDTTRLWGLLVCHHTSPRYVSFPVRYACEFLMQAFGLQLYMEIQLASQMEEKRILKTQTLLCDMLLRDAPFGIVTQSP

SEQ ID NO: 12684 - protein, 198 aa, Craibia brevicaudata
EDDHGEVIAEITKPGLEQYLGLHYPATDIPQAARFLFMNNKVRMIVDCHAKHVKVLQDEKLLFDLTLCGSTLRAPHSCHLQYMANMDSIASLVMAVVVNDNEEDGDSSDAVQPQKRKRLWGLVVCHNTTPRFVPFPLRYACEFLAQVFAIHVNKEIELEYQIIENNILRTQTLLCDMLMRDAPLGIVSQSPNIMDLVK

SEQ ID NO: 12685 - protein, 170 aa, Craibia brevicaudata
PQATRFLFMKNKVRMIVDSRAKHVKVLQDQKIPFDLTLCGSTLRAPHSCHLQYMENMNSSASLVMAVVVNDNDEDGDSSDAVQPQKRKRLWGLVVCHHTTPRFVPFPLRYACEFLAQVFAIHVNKELELEYQIVEKNILRTQTLLCDMLMRDAPLGIVSQSPNIMDLVKC

SEQ ID NO: 12686 - protein, 204 aa, Derris elliptica
YKFHEDDHGEVIAEITKPGLEPYLGLHYPATDIPQAARFLFMKNKVRMIVDCHAKHMKVLQDEKIPFDLTLCGSTLRAPHSCHLQYMANMDSIASLVMAVVVNDNEEDGDSSDAVQPQKRKRLWGLVVCHNTTPRFVPFPLRYACEFLAQVFAIHVNKEIELEYQIIEKNILRTQTLLCDMLMRDAPLGIVSQSPNIMDLVKCD

SEQ ID NO: 12687 - protein, 145 aa, Derris elliptica
EDDHGEVIAEVKRPGLEPYLGLHYPATDIPQATRFLFMKNKVRMIVDCRAKHVKVLQDKKVPFDLTLCGSTLRAPHSCHLQYMENMNCSASLVMAVVVNDNDEDGDSDAVQPQKRKRLWGLVVCHNTTPRFVPFPLRYACEFLAQ

SEQ ID NO: 12688 - protein, 164 aa, Derris elliptica
  unsure (1)..(164): unsure at all Xaa locations
AYKFHEDDHGEIVSEIRRSDLEPYLGLHYPATDIPQASRFLFKQNRVRMICDCHAKPVKVIQSEELRQPLCLVNSTLRSPHVCHTQYMANMGSIASLVMAIIVNGNDTTRLWGLLVCHHTSRXYVPFPVRYACEFLMQAFGVQLYMEIQMASQMAEKRMLKTQT

SEQ ID NO: 12689 - protein, 210 aa, Pongamia pinnata
YDRVMAYKFHEDDHGEVIAEITKPGLEPYMGLHYPATDIPQAALFLFMKNKYRMIVDCHAKHVKVLQDEKLPFDLTLCGSTLRAPHSCHLQYMANMDSIASLVMAVVVNDNEEDGSSSDAVQPQKRKRLWGLVVCHNTTPRFVPFPLRYACEFLSQVFAIHVNKEIELEYQIIEKNILRTQTLLCDMLMRDAPLGIVSQSPNIMDLVKCD

SEQ ID NO: 12690 - protein, 158 aa, Pongamia pinnata
RVRMIVDCRAKHLKVLQDKKVPFDLTLCGSTLRAPHSCHLQYMENMNCSASLVMAVVVNDNDEDGDSDAVEPQKRKRLWGLVVCHNTTPRFVPFPLRYACEFLAQVFAIHANRELELEYQIVEKNILRTQTLLCDMLMRDAPLGIVTQRPNIMDLVKC

SEQ ID NO: 12691 - protein, 141 aa, Lonchocarpus spectabilis
KIPFDLTLCGSTLRAPHSCHLQYMANMDSIASLVMAVVVNDNEEDGDSSDAVQPQKRKRLWGLVVCHNTTPRFVPFPLRYACEFLAQVFAIHVNKEIELEYQIIEKNILRTQTLLCDMLMRDAPLGIVSQSPNIMDLVKCD

SEQ ID NO: 12692 - protein, 137 aa, Lonchocarpus spectabilis
FDLTLCGSTLRAPHSCHLQYMENMNCSASLVMAVVVNDIDEDGDSVAVQPQKRKRLWGLVVCHNTIPRFVPFPLRYACEFLAQVFAIHVNKELELEYQIVEKNILRTQTLLCDMLMRDAPLGIVTQRPNIMDLVKCD

SEQ ID NO: 12693 - protein, 384 aa, Bunchosia armeniaca
DVPVTAAGALKSYKLAAKAISRLQSLPSGNISLQCDVLVKEVRDLIGYDRVMVYKFHDDEHGEVVSECCRSDLESYLGLHYPATDIPQASRFLFMKNKVRMICDCLAPPVKVIQDERLPQPLSLCGSTLRSPHGCHAQYMENMGTIASLVMSVTINEDDDMMDGDQQQMARTLWGLVVCHHTSPRFVPFPLRYACEFLIQVFGVQINKEVELAAQVREKQILRIQTMLCDMLLRDAPVAIITQSPNVMDLVKCDGAALYYKNKFWLLGVTPTEAQIRDIAEWLLEYHSGNTGLSTDSLMEAGYPGASVLGDAVCGMAAVSITSRDFLFWFRSHTAKEIKWGGAKHDPDDKDDGRKMHPRSSFKAFLEVVKWRSLPWEDIEMDAI

SEQ ID NO: 12694 - protein, 192 aa, Dacrydium cupressinum
DEHGEVISEIRKSDLEPYLGLHYPATDIPQASRFLFMKNRVRMICDCHAPPVRVVEDKRLPRELNLCGSTLRALMGCHAQYMSNMGSIASLVIAVIVNEKDEEEGDSEDNIQQKGRKLWGLVVCHHTSPRFVPFPLRYACEFLVQVFGIQLNKEVELAAQVREKHILRTQTLLCDMLLRDAPTGIVTQKPNI

SEQ ID NO: 12695 - protein, 195 aa, Saxegothaea conspicua
DDHGEVISEIRRNDLEPYLGLHYPATDIPQASRFLFMKNKIRMICDACASPVRVIEDNRLSKDLSLVGSTLRAPHDCHAQYMYNMNSVASLVMAVVVNEREEEERDSDGRLQPQEAIRRLWGLVVCHHSSPRFVPFHLRYACEFLMQVFGIQLNKEVELAAQVREKRILRTQTMLCDMLLRGDVPKGIVTTKPNI

SEQ ID NO: 12696 - protein, 192 aa, Saxegothaea conspicua
DEHGEVISEIRKSDLEPYLGLHYPATDIPQASKFLFMKNRVRMICDYHAPPVGVVEDNRLPRELNLCGSTLSAPHGCHEQYMSNMGSIASFVIIDIVNEKDEEEGDSEGQHQQKGRRLWGLVVCHHSSPRFVPFPLRYACEFLMQVFGIQLNKEVELAAQVREKHILCTQTLLCDMLLRDAPTGIVTQKPNI

SEQ ID NO: 12697 - protein, 181 aa, Chamaecyparis lawsoniana
DDHGEVVAEMRRPDLEPYLGLHYPAADIPQASRFLFLKNRVRMICDCRAPAVKVRHDESLGQVLSLQGSTLRAPFGCHAQYMANMGSIASLVMAVTVSDSEEGGRRLWGLVVCHHTTPRFVPYPLRYACEFLMQVFGIQLNKELELASRLRERHIFRTQTLLCDMLLRDTPVGIVTTTPNI

SEQ ID NO: 12698 - protein, 188 aa, Chamaecyparis lawsoniana
DEHGEVVAEIRRSDLEPYLGLHYPATDIPQASRFLFMQNKVRMISDCRADPVRIIQAEELPQLLCLVGSTLRAPHGCHAQYMANMGSIASLAMAVIVNNGNDEVGSSGRNTGKLWGLVVCHHTSPRAVPFPLRSACEFLMQAFSLQINMEMRLAAQLTENNILRTQTLLCDMLLRDAPYGIVTQSPSI

SEQ ID NO: 12699 - protein, 190 aa, Polypodium vulgare
DEHGEVLAEIRRSDLEPYLGLHYPATDIPQASRFLFMKNRVRMICDCRALPVRVIQDKELRQPLGLAGSTLRAPHGCHSQYMENMGSIASLVMAVVVNDNDEDVSNRSHHPKMRRLWGLVVCHHTTPRAVPFALRSACEFLVQVFGLQLNMELELAAQMREKRILRTQTLLCDMLLRDAPIGIVSESPNI

SEQ ID NO: 12700 - protein, 188 aa, Polypodium vulgare
DEHGEVVAEIRRADLEPYMGLHYPATDIPQAARFLFMKNRVRMICDCTLPPVKIIQDKNLAQPLSLTGSTLRAPHGCHAQYMSNMNSIASLVMAVIVNDSDIDSAGHASQGMKLWGLVVCHHTSPRYVPFPVRSACEFLMQVFSLQLNMEVGMAAQVREKHILRTQTLLCDMLLRDAPIGIVSQSPNI

SEQ ID NO: 12701 - protein, 190 aa, Polypodium vulgare
DEHGEVVAEIRKSDLEPYLGLHYPATDIPQASRFLFMKNRVRMISDCRAIPVKVIQDRGLRQPLGLAGSTLRAPHGCHSQYMANMGSAASLGMAVTVNDNEGESSSRDHQPKQRKLWGLVVCHHTTPRAVSFPLRSACEFLMQVFGLQLNMEVELAAQMREKHILRTQTLLCDMLLRDAPIGIVSESPNI

SEQ ID NO: 12702 - protein, 394 aa, Anisopogon avenaceus
EPARTEDPALSIAGAVQSQKLAVRAISRLQALPGGDVKLLCDTVVEHVRELTGYDRVMVYKFHDDEHGEVLAESRRADLEPYLGLHYPATDIPRASRFLFRQNRVRMIADCHAAPVRVIQDPAMPQPLCLVGSTLRSPHGCHAQYMTNMGSIASLVMAVIISSGGDQDHNIARGAIPSAMKLWGLVVCHHTAPRCIPFPLRYACEFLMQAFGLQLNMELQLAQHLSQNLILTTQTLLCDMLLRDSPTGIVPQSRSIMDLVKCDGAALYYHGKYYPLGVTPTEAQILDIIEWLTVCHGDSTGLSTDSLADAGYPGAASLGDAVCGMAVAYITPSDHLFWFQSHTAKEIKWGGAKHHPEDKDDGQRMHPRSSFKAFLEVVKSRSLPWENAEMDAIH

SEQ ID NO: 12703 - protein, 507 aa, Proteus mirabilis
NSRYQNEDVAICVLVDISARVKMERSLQNMATAAEQANQAKSMFLATVSHELRTPLYGIIGNLELLQSLTQNEETARLLKTMDNSSSLLLKIISDILDFSKIESKQLKIDVKPFNCRQVVSFVISNYLPLIAKKDLAIYCFIEPDVPKIVNNDPVRVQQVISNLLNNSIKFTTTGCITLHLYRDEYYLYFDIHDTGRGINEKMLHQLFEPFFQVSQNTESASEGTGLGLAICEKLINLMDGDISVVSQENVGSRFTVRIPLYGALNSSDGQTKYNLYKESTIRCFISIKNLYLESFVERYLSYVGLHCQLFTEVTQVSENDFIITDHDECLDNSCQFIRIYEHYFEPAKKISENNWLCSTYKLNELIKIILQLPQTKLESDDSENNALMTDHDLQLLTVLIVDDHPINRLLLTDQLKKIGFNTATAEDGCDALAFMQENHVDIILTDVNMPNMNGYQLATTVRELSSTIPIIGVTANAIAEEKQRCIDAGMNDCVSKPVSLTVLKDV

SEQ ID NO: 12704 - protein, 192 aa, Agathis dammara
DDHGEVISEVRKSDLGPYLGLHYPATDIPQASRFLFMKNRVRMICDCCAPPVRVIEDKRLPRELNLCGSTLRAPHGCHAQYMSNMGSISSLVVAVIVNEKEEEEGDSDAQQQQKGRRLWGLVVCHHTSPRFVPFPLRYACEFLMQVFGIQLNKEVELAAQLREKHILRTQTLLCDMLLRDAPMGIITQKPNI

SEQ ID NO: 12705 - protein, 191 aa, Agathis dammara
DDHGEVVAEIRRADLEPYLGLHYPATDIPQASRFLFMKNKVRMICDCRADPVKVIQDKRLAHPLSLSGSTLRAPHSCHAQYMANMGSIASLVMAVTINENENEEEASGSGQKGGRRLWGLVVCHHTSPQFVTFPLRYACEFLMQVFGIQLNKEVELAAQLREKHMLRTQTVLCDMLLRDAPVGIVTQTPNI

SEQ ID NO: 12706 - protein, 190 aa, Agathis dammara
DEHGEVVAEIRRSDLEPYLGLHYPATDIPQASRFLFMQNRVRMICDCRAAPVKVIQAEELKQPLCLVGSTLRAPHGCHAQYMANMGSIASLVMAVVINGNEDEGGGSGSGRGSMKLWGLVVCHHTSPRAVPFPLRYACEFLMQAFGLQLNMELQVAAQLTEKHILRTQTLLCDMLLRDAPIGIVTHSPSI

SEQ ID NO: 12707 - protein, 190 aa, Isoetes velata
DEHGEVVAEIRRSDLEPYLGLHYPATDIPQASRFLFMKNRVRMIYDCSAPPVKIIQDKDLRQPISLAGSTLRAPHGCHSHYMGIMGSIASLVMAVITNDNDEEYGGRGYQQKGRKLWGLVVCHHTSSRAVPFPLRSACEFLMQVFGLQLNMEVELAAQLREKHILRTQTLLCDMLLRDAPIGIVSQSPNI

SEQ ID NO: 12708 - protein, 195 aa, Podocarpus neriifolius
DDHGEVISEIRRNDLEPYLGLHYPATDIPQASRFLFMKNKIRMICDACASPVRVIEDKSLPRELSLVGSTLRAPHECHTQYMYNMNSIASLVMAVVISEREEEERDTDGQQQPQEAVRRLWGLVVCHHTRPRFVSFHLRYACEFLMQVFSIQLNKEVELAAQVREKQILRTQTLLCDMLLRGVAPLGIVTRRPNI

SEQ ID NO: 12709 - protein, 188 aa, Podocarpus neriifolius
DEHGEVVAEIRRADLEPYLGLHYPSTDIPQASRFLFMQNRVRMICDCSATPVKVIQSEELRQPLCLVGSTLRAPHGCHAQYMANMGSIASLVMAVVINGNDEEGEEQVPKSMKLWGLVVCHHTSSRAVSFPLRYACEFLMQAFGLQLNMELQLAAQLTEKHILRTQTLLCDMLLRDAPIGIVTQSPSI

SEQ ID NO: 12710 - protein, 192 aa, Juniperus phoenicea
DDHGEVISEIRRADLEPYLGLHYPATDVPQASRFLFMKNKVRMICDCYANPVEVVEDKRLLRELILCGSSLRRPHGCHAEYMSNMGSIASLVIAVTINAKEEDVDTDAQQQQQKGRRLWGLVVCHHTSPRFVPFPLRYACEFLMQVFAIQLNKEDDLADQLREKHILRTQTLLCDMLLRDAPMGIIREKPNI

SEQ ID NO: 12711 - protein, 188 aa, Juniperus phoenicea
DEHGEVVAEIRRSDLEPYLGLHYPATGIPQASRFLFMQNKVRMISDCRADPVRIIQAEELPQLLCLVGSTLRAPHGCHAQYMDNMGSIASLAMAVIVNNGNDEVGSSGRNTGKLWGLVVCHHTSPRAVPFPLRSACEFLMQTFSLQINMEMQLATQLTENNILRTQTLLCDMLLRDAPIGIVTQSPSI

SEQ ID NO: 12712 - protein, 190 aa, Platycerium angolense
DEHGEVLAEIRRSDLEPYLGLHYPATDIPQASRFLFMKNRVRMICDCRALPVRAIQDKELRQPLSLAGSTLRAAHGCHSQYMANNGIVASLVMAVVVNDNDEDMSNRPQHPKMRRLWGLAVCHHTTPRCSPFALRSACESLMQVFGLQLNMELELAAQMREKHILRTQTLLCVMLLRDAPIGIVSESPNI

SEQ ID NO: 12713 - protein, 149 aa, Chadsia versicolor
HVKVLQDEKLPLDLTLCGSTLRAPHSCHLQYMANMDSIASLVMAVVVNDNEEDGDSSDAVQPQKRKRLWGLVVCHNTSPRFVPFPLRYACEFLAQVFAIHVNKEIELESQIIEKNILRTQTLLCDMLMRDAPLGIVSQSPNIMDLVKCD

SEQ ID NO: 12714 - protein, 158 aa, Chadsia versicolor
VRMIVDCHAKHVNVLQDKKVPFDLTLCGSTLISPHGCHVQYMQNMNCSASLVMAVVLNDNDEDGGDSDAVQPQKRRRLWGLVVCHNTTPRFVPFPLRYACEFLAQVFAIHVNKELEIEYQTVEKNILRTQTLLCDMLMRDAPLGIVTQRPNIMDIVKC

SEQ ID NO: 12715 - protein, 207 aa, Dahlstedtia pinnata
VMAYKFHEDDHGEVIAEITKPGLEPYLGLHYPATDIPQAARFLFMKNKVRMIVDCHAKHVKVLQDEKTPFDLTLCGSTLRAPHSCHLQYMANMDSIASLVMAVVVNDNEEDGDSSDAVQPQKRKRLWGLVVCHNTTPRFVPFPLRYACEFLAQVFAIHVNKEIELEYQIIEKNILRTQTLLCDMLMRDAPLGIVSQSPNIMDLVKCD

SEQ ID NO: 12716 - protein, 133 aa, Dahlstedtia pinnata
LCGSTLRAPHSCHLQYMENMNCSASLVMAVVVNDNDEDGDSDAVQPQKRKRLWGLVVCHNTTPRFVPFPLRYACEFLAQVFAIHVNKELELEYQIVEKNIMRTQTLLCDMLMRDAPLGIVTQRPNIMDLVKCD

SEQ ID NO: 12717 - protein, 102 aa, Lonchocarpus eriocarinalis
QATRFLFMKNKVRMIVDCRAKHVKVLQDKKVPFDLTLCGSTLRAPHSCHLQYMENMNCSASLVMAVVVNDNDEDGDSDAVQPQKRKRLWGLVVCHNTIPRFV

SEQ ID NO: 12718 - protein, 103 aa, Lonchocarpus eriocarinalis
QAARFLFMKNKVRMIVDCHAKHVKVLQDEKIPFDLTLCGSTLRAPHSCHLQYMANMDSIASLVMAVVVNDNKMGIGSSDAVQPQKRKRLWGLVVCHNTTPRFV

SEQ ID NO: 12719 - protein, 90 aa, Lonchocarpus eriocarinalis
HASRFLFKQNRVRMICDCDAKPVKVIQSEELRQPLCLVNSTLRSPHVCHTQYMANMGSTASLVLAIIVNGNDTTRLWGLLVCHHTSPRYV

SEQ ID NO: 12720 - protein, 206 aa, Lonchocarpus phaseolifolius
RVMAYKFHEDDHGRVIAEVKKPGLEPYLGLHYPATDIPQATRFLFMKNKVRMIVDCRAKHVKVLQDKKVPFDLTLCGSTLRAPHSCHLQYMENMNCSASLVMAVVVNDNEEDGDSDAVQPQKRKRLWGLVVCHNSIPRFVPFPLRYACEFLAQVFAIHVNKELELEYQIVEKNILRTQTLLCDMLMRDAPLGIVTQRPNIMDLVKC

SEQ ID NO: 12721 - protein, 207 aa, Millettia dura
VMAYKFHEDDHGEVIAEITKPGLEPYLGLHYPATDIPQAARFLFMKNKVRMIVDCHAKHVKVLQDEKIPFDLTLCGSTLRAPHSCHLQYMANMDSIASLVMAVVVNDNEEDGDSSDAVQPQKRKRLWGLVVCHNTTPRFVPFPLRYACEFLAQVFAIHVNKEIELEYQIIEKNILRTQTLLCDMLMRDAPLGIVSQSPNIMDLVKCD

SEQ ID NO: 12722 - protein, 193 aa, Millettia dura
MAYKFHEDDHGEVVSEIRRSDLEPYLGLHYPATDIPQASRFLFKQNRVRMICDCGAKPVKVIQSEELRQPLCLVNSTLRSPHVCHTQYMANMGSTASLVLAIIVNGNDTTRLWGLLVCHHTSPRYVPFPVRYACEFLMQAFGLQLYMEIQLASQKAEKRMLKTQTLLCDMLLRDAPLGIVTQSPNIMDLVKCD

SEQ ID NO: 12723 - protein, 99 aa, Millettia dura
RFLFMKNKVRMIVDCRAKHVKVLQDKKVPFDLTLCGSTLRAPHSCHLQYMENMNCSASLVMAVVVNDNDEDGDSDAVQPQKRKRLWGLVVCHNNTPRFV

SEQ ID NO: 12724 - protein, 205 aa, Millettia grandis
AYKFHEDDHGEVIAEVKRPGLEPYLGLHYPATDIPQAARFLFMKNKVRMIVDCHAKHVKVFQDEKLPIDLTLCGSTLRAPHSCHLQYMANMDSIASLVMAVVVNDNEEDGDSSDAVQPQKRKRLWGLVVCHNTTPRFVPFPLRYACEFLAQVFAIHVNKEIELEYQIIEKNILRTQTLLCDMLMRDAPLGIVSQSPNIMDLVKCD

SEQ ID NO: 12725 - protein, 203 aa, Millettia grandis
MAYKFHEDDHGEVIAELKKPGLEPYLGLHYPATDIPQATRFLFMKNKVRMIVDCRAKHVKVLQDKKIPFDLTLCGSTLRAPHSCHLQYMENMNSSASLVMAVVVNDNDEDGDSSDAVQPQKRKRLWGLVVCHHTTPRFVPFPLRYACEFLAQVFAIHVNKELELEYQIVEKNILRTQTLLCDMLMRDAPLGIVSQRANIMDLV

SEQ ID NO: 12726 - protein, 186 aa, Millettia grandis
EDDGEVVSEIRRSDLEQCLGLHYPATDIPQASRFLFKQNRVRMICDCHAKPVKVIQSEELRQPLCLVNSTLRSPHVCHTQYMANMGSIASLVMAIIVNGNDTTRLWGLLVCHHTSPRYVPFPVRYACEFLMQAFGLQLYMEIQLASQMAEKKTLKTQTLLCDMLLRDAPFGIVTQSPNIMDLVKCD

SEQ ID NO: 12727 - protein, 201 aa, Millettia richardiana
FPEDDHGEVIAEITKPGLEPYLGLHYPATDIPQAARFLFMKNKVRMIVDCRAKHVNVLQDKKVPFDLTLCGSTLRAPHSCHLQYMENMNCSASLVMAVVVNDNDEDGDSDAVQPQKRKRLWGLVVCHNTTPRFVPFPLRYACEFLAQVFAIHVNKELELEYQIVEKNILRTQTLLCDMLMRDAPLGIVTQRPNIMDLVKCD

SEQ ID NO: 12728 - protein, 191 aa, Millettia richardiana
YKFHEDDHGEVVSEIRRSDLEPYLGLHYPATDIPQASRFLFKQNRVRMICDCHAKPVKVIQSEELRQPLCLVNSTLRSPHVCHTQYMANMGSIASLVMAIIVNGNDKTRLWGLLVCHHTSPRYVPFPVRYACEFLMQAFGLQLYMEIQLASQMAEKRMLKTQTLLCDMLLRDAPLGIVTQSPNIMDLVKCD

SEQ ID NO: 12729 - protein, 139 aa, Millettia richardiana
MAYKFHEDDHGEVIAEITKPGLEPYLGLHYPATDIPQAARFLFMKNKVRMIVDCHAKHVKVLQDEKLPFDLTLCGSTLRAPHSCHLQYMANMDSIASLVMAVVVNDNEEDGDSSDAVQPQKRKRLWGLVVCHNTTPRFV

SEQ ID NO: 12730 - protein, 200 aa, Xeroderris stuhlmannii
HEDDHGEVIAEVKKPGLEPYLGLHYPATDIPQATRFLFMKNKVRMIVDCRAKHVNVLQDKKVPFDLTLCGSTLRAPHSCHLQYMENMNCSASLVMAVVVNDNDEDGDSDAVQPQKRKRLWGLVVCHNTTPRFVPFPLRYACEFLAQVFAIHVNKELELEYQIVEKNILRTQTLLCDMLMRDAPLGIVTQRPNIMDLVKCD

SEQ ID NO: 12731 - protein, 142 aa, Xeroderris stuhlmannii
CDCHAKPVKVIQSEELRQPLCLVNSTLRSPHVCHTQYMANMGSIASLVMAIIVNGNDTTRLWGLLVCHHTSPRYAPFPVRYACEFLMQAFGLQLYMEIQLASQMAEKRMLKTQTLLCDMLLRDAPLGIVTQSPNIMDLVKCD

SEQ ID NO: 12732 - protein, 103 aa, Xeroderris stuhlmannii
QAARFLFMKNKVRIIVDCHAKHVKVLQDEKLPLDLTLCGSTLRAPHSCHLQYMANMDSIASLFMAVVVNDNEEDGDSSDAVQPQKRKRLWGLVVCHNTTPRFV

SEQ ID NO: 12733 - protein, 178 aa, Piscidia piscipula
LHYPATDIPQATRFLFMKNKVRYIVDCRAKHVKVLQDKKVPFDITLCGSTLRAPHSCHLQYMENMNCSASLVMAVVVNDNDEDGDSDAVQPQKRKRLWGLVVCHNTTPTFVPFPLRYACEFLAQVFAIHVNKELELEYQIVEKNILRTQTLLCDMLMRDAPLGIVTQRPNIMDLVKCD

SEQ ID NO: 12734 - protein, 192 aa, Piscidia piscipula
AYKFHEDDHGEVVSEIRRSDLEPYLGLHYPATDIPQASRFLFRQNRVRMICDCHAKPVKVIQSEELRQPLCLVNSTLRSPHVCHTQYMSNMGSIASLVMAIIVNGNDKRRLWGLLVCHHTSLRYVPFPVRYACEFLMQAFGLQLYMEIQLASQMAEKRMLKTQTLLCDMLLRDAPLGIVTQSPNIMDLVKCD

SEQ ID NO: 12735 - protein, 152 aa, Piscidia piscipula
AYKFHEDDHGEVIAEITKPGLEPCLGLHYPATDIPQAARFLFMKNKVRMIVDCHAKHVKVLQDEKLPFDLTLCGSTLRAPHSCHLQYMANMDSIASLVMAVVVNDNEENGDGSDAVQPQKRKRLWGLVVCHNTTPRFVPFPLRYACEFLAQV

SEQ ID NO: 12736 - protein, 207 aa, Pongamiopsis amygdalina
RVMAYKFHEDDHGEVIAEVKKPGLEPYLGLHYPATDIPQATRFLFMKNKVRMIVDCRAKHVNVLQDKKVPFDLTLCGSTLRAPHSCHLQYMENMNCSASLVMAVVVNDNDEDGDSDAVQPQKRKRLWGLVVCHNTTPRFVPFPLRYACEFLAQVFAIHVNKEIELEYQIIEKNILRTQTLLCDMLMRDAPLGIVSQSPNIMDLVKCD

SEQ ID NO: 12737 - protein, 151 aa, Pongamiopsis amygdalina
RVMAYKFHEDDHGEVIAEVKKPGLEPYLGLHYPATDIPQAARFLFMKNKVRMIVDCRAKHVNVLQDKKVPFDLTLCGSTLRAPHSCHLQYMANMDSIASLVMAVVVNDNEEDGDSSDAVQPQKRKRLWGLVVCHNTTPRFVPFPLRYACEF

SEQ ID NO: 12738 - protein, 145 aa, Pongamiopsis amygdalina
VMAYKFHEDDHGEVIAEITKPGLEPYLGLHYPATDIPQAARFLFMKNKVRMIVDCHAKHVKVLQDEKLPFDLTLCGSTLRAPHSCHLQYMANMDSIASLVMAVVVNDNEEDGDSCDAVQPQKRKRLWGLVVCHNTTPRFVPFPLR

SEQ ID NO: 12739 - protein, 124 aa, Pongamiopsis amygdalina
MAYKFHEDDHGEVIAEITKPGLEPYLGLHYPATDIPQAARFLFMKNKVRMIVDCHAKHVKVLQDEKLPLDLTLCGSTLRAPHSCHLQYMANMDSIASLVMAVVVNDNEEDGDSSDAVQPQKRKR

SEQ ID NO: 12740 - protein, 180 aa, Tephrosia villosa
GLHYPATDIPQAARFLFMKNKVQMIVDCHAKHVKVLQDEKLPLDLTLCGSTLRAPHSCHLQYMANMDSIASLVMAIVVNDNEEDGDSSDAVQPQKRKRLWGLVVCHNTSPRFVPFPLRYACEFLAQVFAIHVNKEIELEYQIIEKNILRTQTLLCDMLLRDAPLGIVSQSPNIMDLVKCD

SEQ ID NO: 12741 - protein, 196 aa, Tephrosia villosa
DRVMAYKFHEDDHGEVIAEIRRSDLEPYLGLHYPATDIPQASRFLFKQNRVRMICDCHAKPVKVIQSEELRQSLCLVNSTLRSPHVCHTQYMANMGSIASLVMAIIVNGNDTTRLWGLLVCHHTSPRYVPFPVRYACEFLMQAFGLQLYMEIQLASQMAEKRILKTQTLLCDMLLRDAPLGIVTQSPNIMDLVKCD

SEQ ID NO: 12742 - protein, 393 aa, Miscanthus sinensis
EPARTEDPALSMAGAVQSQKLAVRAISCLQALPGGDVKLLCDTVVEHVRELTGYDRVMVYRFHEDEHGEVVAESRRDNLEPYLGLHYPATDIPQASRFLFRQNRVRMIADCHATPVRVIQDPGLSQPLCLVGSTLRASHGCHAQYMANMGSIASLVMAVIISSGGDDEQTGRGGISSAMKLWGLVVCHHTSPRCIPLPLRYACEFLMQAFGLQLNMELQLAHQVSEKHILRTQTLLCDMLLRDSPTGIVTQSPSIMDLVKCDGAALYYHGKYYPLGVTPTESQIKDIIEWLTVCHGDSTGLSTDSLADAGYLGAAALWDAVCGMAVAYITPSDYLFWFRSHTAKEIKWGGAKHHPKDKDDGQRMHPRSSFKAFLEVVKSRSLPWENAEMDAIH

SEQ ID NO: 12743 - protein, 800 aa, Nostoc punctiforme
MLSVKLFVLHSSLFSYSRYSSFDAPGQQRRIFMEMNLQFPGINLISLKEAPIHISSQIQPHGVLLVLEEPELKILQVSTNTLKVFGIAPENMLHKKLEDLLDPFQIERIKTGLSGENLDFINPTKVWVRKKGDEYVVFDAIFHRNIEGFLILELEPAITQENIPFLSFYHLARASINQLEKTANLRDFCQVIVQEVRKITEFDRVMLYKFDDDGHGSVIAEEKLESLEPYLGLHYPESDIPKPARKLFAANSIRIIPDAYSQPVKLFPVNNPISDRPINLTNSILRSAASCHTEYLHNMGVGASLTISLIKDQKLWGLIACHHQSPKYVSYELRKACEFLGRVIFAEISAREETEDYYHRINLTHLQSILIEYMSQEENFIDGLVKNPQHLLDLASAQGAAVCFAGNCTVVGETPREEDLNFLVQWLKNNVEEEVFYTDSLPQIYPDAESFKNVASGLLAIPIAKRTYVLWFRPEVIQTVNWGGDPNKAFEVSQSEGNVRLCPRKSFELWKETVRLTSLPWKDVEVKAALELRKAIVNIVLRQADELAQLAQDLERSNAELKKFAYVASHDLQEPLNQVVNYVQLLEMRYSEELDEDAQEFISYAVQGVSLMQTLIDDVLAYSKVDMQAIAFQMNDVETALMRGLGNLRQRINETGATITHDPLPTVMADSTQLMQLFQNLIGNAIKFHSDQPPQIHVGAERIEDAWLFSVRDNGIGIDPKFSDRIFVIFQRLHTRDEYTGTGMGLAICKKIVECHRGRIWVESELGQGATFYFTIPVGGRELERRNGRKTQNHLFGRGQ

SEQ ID NO: 12744 - protein, 775 aa, Nostoc punctiforme
MSQPENTTTQATALTNHDRKPIHIPGSIQPHGILLALSTQLEIVQVSNNTQVYLCKAPEDLLGRPLSYLLEPQPVEIVKQCLVKKVGSANAFKVLINTLYGEIYFDAIAHRTEEAVILELEPTDSEFEVSFLNFHSFASEAIAKMQRTSNLGEFLHLVAQEVQKIISFDRVMVYQFDESEAGSVVAEVKREDLSPYLGLHYPATDIPAQARELYTRCFLRFLPDLTAEPVKLVPTENPTTHQHLDLSYCLLRSFDWCCAEYHQNMGVKALLVISLIQEQKLWGLISCHHQTPKYISYEVRKMCEFLGQIVSSELAHKISSSEWDYKVKLKSLQSEFLESISQADNFIDALIKPEIRLLDFVSASGAAVCLDNEINLVGTTPNIDEVRALIEWADTQVTDNLFSTDSLPKLYPEALIFKDTASGLLLLRISKVRRYYILWFRPEVIQTVHWAGNPQESIKAEGDGSYTLSPRKSFEQWQETVRLTSLPWKGCELESAIALSNAIVGIVLSKADELAKINLELERSNQELASFAYAASHDLKEPLRGIYNFSTVLLEDYAQVLDDDGIECLQTVVSLSVRMETLINALLRLSQLGQAHLREQATDLNELLNQVIDVFRASRQDSGLVDIRIPRPLPTIQCDRVLVNEVFSNLLGNAFKYNDKAEQWVEIGYLSQEEGQGVGSRGQGAGGAGEAIIHQSPIPNAPCPIFYIRDNGIGIPQHHLETIFRLFKRLHSQEKYGGGAGAGLAIVKKIVELHNGQIWVESTLGVGSIFYFTLE

SEQ ID NO: 12745 - protein, 139 aa, Nostoc punctiforme
VYQFDESEAGSVVAEVKREDLSPYLGLHYPATDIPAQARELYTRCFLRFLPDLTAEPVKLVPTENPTTHQHLDLSYCLPRSFDWCCAEYHQNMGVKALLVISLIEEQKLWGLISCHHQTPKYISYEVRKMCEFLGQIVS

SEQ ID NO: 12746 - protein, 1204 aa, Nostoc punctiforme
MEFLTNQVSQTQEILLHRIASRIRQSLELQEILSATVAEVRSFLGTDRIKIYQFQADGHGLVIAESIQEDRLPPLLGLNFPADDIPPYARELFVRARQRCIVDLTTQEIGISPLDCPETGKPLEQQDIRYRPVDPCHLEYLTAMGVKSSVVVPIVLKNQETGKDSSPNVMESSQLWGLLVSHHSQARVVTQQELLLIQSVVDQVAIAISQSILLTQVREQARQEAIINKVTEQLHSTPVAQLQTALEETVAAFNGSGGRLYLLPDDEQTAKLYTFGLQPNQLDIGQEQTPSPLTQELSLVDRAWVSPMERNNEVLLLANLREGSDVLRKGRPIEEHRLWQKYLFASICPPENLENPSHKSWSVNWMRAIYALTPPVNELSYDSNLWAIADLYKEPLLRSVAPCFQTTQVRGLLIVPLQHGSTIVGCLTIFRDEVDIETIWAGCVDTDSRQLMPRQSFAAWRELRTGQAQQWSESEIKLAQALGERFATAVKQHRLYEQVQALNANLEQQVRDRTLELQQTNTDLQHSTIELQRSVERQQALARIIANMRQSLDVTTIFRTTTQEVCQLLECDRLSVYRFNADWGGEFVGDYETANPRWGRSIKLGVGMVWDDTYLQETQGGRYRNNETFVVDDIHSQGFTQCHIEILEQFHVQAFMIAPIFVGQELWGLLGAYQHSSTRHWQASEIEFFTQIATQLGVALQQAEYLEQVRAQTRKLALVAEQQQTLASVITKIRESLDLNAIFETTTQELRRVLNCDRVVIFRFYSESNYDGGEVIAEDVAERFLSTLTAKVYDRCLGQEHIEKFCQGYVHAVTDIYNSELNECYVSMLSRFQVRANLVIPMLKQGQLWGLLGIHQCQKSREWQDSEIEFVRQIAAQLGVALQHVVLLNQTQQQAIQLAQALEHLQQTQAHLLHSEKMSSLGLLVAGVAHEINNPVNFISGNLSHLHEYTQSLIKMLNIYQQIYPQPHPEIEKQAILSDLEFIAEDLPKLFSSLKIGAERIGEIVLSLRNFSRLDQAQVKPVDIHEGLDSTLLILQHRLKANSLHLGIEIVKQYASLPLIECFAGQLNQVFMNLLANAIDAVEEPCRQPAKSDKDKHYPRITIKTQLIANDWVQIYIKDNGVGMTKAVQAKLFDPFFTTKPVGQGTGLGLSISYQIVEKHGGKLQCLSQPGEGAQFVIEIPIKQSERELANVLIDKKESDTDNS

SEQ ID NO: 12747 - protein, 910 aa, Nostoc punctiforme
MTSTDKPNGLQQSLEQESLLHRMIKQIRRSLDLQEILTTTVTEVRSFLRADRVKVYRFDTSGSGEVIAESIHNERLPSLLGLRFPVHDIPEAAREMFLLAGQRSIVDVANHKIGLSPLQSTETGKHLQTNIYYRKVDPCHIQYLKAMGVQSSLVVPILDSDPQQSAKPKLWGLLVSHQSKPRKILKREIKVLQQVADQVAIAIAQSNLLTAALTQQKQEATINRVTTLLHKLPTIQLQGAIEEVITAFSGVGGRLYIEQSRELYTWGDQPTLPYELDSSIIEQHPTWQNWMTECQPGNIWATSDLYKEPHLRVLALAFRSTQIRGLMVIPLHYREQFIGVLSIFRAEFETEILWAGRCEQNRRQLLPQLSFEIWREQKKGLAPEWKPEDMTLAQALYDHFSMAIQQQQIYKEVQALNANLELRVQEQTAELEKSLLLTKVIKQITEQIRRTLDLQTTLQTIVSEVRSLLNSDRVVIFQLNSKSVIVEEMNGNWQSVLGVNAPPECFPNEHRDLYSQGRVRAINNVSTDSLSDCHREFLQSLQIQANLTVPINIGIELWGLLIAHECNTPRNWQDVEIDLLQQLGDQAAIAIQQAQLYEQTCKAETEARNKAGELGQTLHKLQETQTRLIQTEKMSGLGQLVAGIAHEINNPVNFIYGNLCHASDYIEQLLEILRLYQLHYPDPHSEISAAIEAVDFEFLVEDLPRIITSMQVGSDRIRSIVLSLRNFSRLDEAENKRVDLHEGIDNTLLILQHQLKGNGKFPGIQVIKDYGNIPKVECYAGQMNQVFMNIFSNAIDALEMGTAEEDKENKPSPVPTIRISTKISADNSRLLIRISDNGPGMIPEIKKRIFDPFYTTKPVGRGTGLGLAISYQIIVEKHGGIMECISEPGIGTEFWIEIPVKPPAKIVYSR

SEQ ID NO: 12748 - protein, 681 aa, Nostoc punctiforme
  unsure (1)..(681): unsure at all Xaa locations
MANRIRQSLNLQEILDATVVELRAFLQTDRTKVYRFDRDGHGHVVAEASAPNRLPSLLGLHYPADDIPPQARALFVKARTRSIVNVSEQRIILNSLPTPTTTAIGDLTVEEVQEQPLEDILSRPVDPCHVDYLTQMGVQSSLVVPIIYQQELWGLLISHHAEPREITSEDLLVVQLLADQVSLAITQASLLSQVQEQQQRDAIVNQIATMLHAPLTPEEILHNVLEQAVKASGSSGGRLYLTSPDEALPAHLYTYGNQPAPSEQEQPHLLENHPLWQEVRKIPAPIGTTLTQKDKPALRVVINLQQEPRLHQLIESFQTTPIRGLIVQPLYYSKEFLGYLTFFRDQISTKNLWPGYEEADERQQRPRQSMAQWQALKEDKAHPWSIEEMELIQSLNIHLSLAVLQNRLYHRERQQRLIVEMHNEALSHARAAAEEVSRLKSNFLASTSHELRTPLASTLNYLKLLKERLYEDEDELREYIDGAYQSTQNLVTIINDVLDIAKIEDGRIALDLETVYLQQLLQEQCFLSGAESRYKAIPLTLDCEIETVFADKIKVRQVMTNLLDNAFKFTDEGQIDVRAVVDSTGTMAQISVHDTGIGIEMENSEQLFSPFVQADGSAQRSYGGTGLGLTICKRLVELMGGKIWLESPGLGQGNTVTFTLPLNEQSQVAGQGSLFEGQAXX

SEQ ID NO: 12749 - protein, 1102 aa, Nostoc punctiforme
MTSNPEQNFLYSQEESLLRRITNRIRRSLELEEIITVTTAEVRSLLKTDRVMIYKFHADGNGQVIAESIYNNRLPSLLGLNFPADDIPLSARELFLKLRVRSVVNVDTQEIGQIHLRDLDNGETISEEIRYRSVDSCHIEYLTAMGVKSSVVAPILYQDQLWGLLVSHNSEARLISEYELEAVQMVVEQLSVAIAQSSLLTQVRKTAERETIINRIATLLHSLPTIVLQPALEAAIAAFNGVGGRLCIRNEAFDYYNGNLTSLTECLIPGNTCIKLFICGQQPVMPEQTIYPLIEQYSIWQEHYKSGKYDVWAISDLYNSPDLRSLQVAFQPTKIRGILTIPLQYRQQLLGYLSIFRNEVDTETLWAGQYDSDQRQLYPRRSFEVWRESKKAQAQKWTVEEIELARDIGKHFASAIQQYELQQQVQVFNENLEKQVKRRTVELQRTAEQEQAVFKVIAEIRESLDTDTIFQTTTKEVCQLIKADRVSVYRFDSNWGGEFVGDFEAASPYWSNESEIGINTVWNDTYLQDTEGGRYRNNETFAVDDIYKMGFAKCHIDNLEQFQIHAFVLAPIFVGQKLWGLLATYQHTGPRQWKASEVNFLSQIAAQMGVALQQAELLTQTRQQTLNLQQAAEQQRVLFEVVAKVRKSLDLDAIFQTTTQEICKSLQADRVAVFQFQADWSGEYIAEFVGDGWVKLVGSNTKTVWQDSYLQETQGGRYRHNETFAVDDIYQVGHSQCHVAVLEQIQARAYAIAPIFIGQQLWGLLAAYQNSAPRHWEASEIKFITQIANQLGVALQQAQLHNQTKEQTEKLTQALHDLKQTQTQLIQTEKMSSLGQLVAGVAHEINNPVNFIYGNINHVNNYAQDLLGILDLYLQNTPNPSPEIRDRTFEIDLEFLIEDLPKTLSSMKIGVDRIRQIVLGLRNFSRLDEAEMKPVDIHEGIDSTLLILQHRLKAKPESPAIKLVKEYSELPLVECYAGPLNQVFMNVLSNAIDALEDYRESPSKPHSSQITICTAIGELEGNIKSVVIRIADNGSGIPEALKARICDPFFTTKPVGKGTGLGLSISYQIVVDKHGGVFKCDSQPGLGTEFWIEIPVSQITKF

SEQ ID NO: 12750 - protein, 996 aa, Nostoc punctiforme
MAVSAWYGGMEAGLLATALSTLTVSYFFLEPVFSLSVASLDNIRRLGLFVLVTTFITLLNSELRTAKQHLQMSLQKLKVSEAKFRRLVESNIIGIIVANMDGAIAEANDAFLRMVGYSQEDLLAGRVRWRDMIPPKYIEANNSAIAELKAKGVCQPFENEYIRKDQNCVPILLGSALLENNSNDIISFVLDLSERKQVELALCQSEERYRAFLEQSSEGIWCIELEVPISPDCPEDEQIQHFYQYVYLAECNNVMAQMYGCSRAEEIINARLGDFLIPSDPHNIAYLRNFIRSNYRLIDAESHEIDKQGNSKYFLNNLVGIVENGLLVRAWGTQRDITERKQAEAALNQQEEQLRLITNAVPVQISYVDIQQLYRFNNKGYEDWFGLPASEIYGKHIREIMGESVYQSILPYVEAVLSGEEVTYETQLPHKDGTHHYINVSYVPQFSEQGKVEGFVALITDITLHKLAEAALKQSEKRLKTLTEKVRIIPWEVNATTGNFTYVGPQTVEILGYPLSDWYIDDFWQKHMHPEDREWAIQYCQESSLSLNNYEFEYRMLAADGRVVWLYDIINVVRDENGPQLLHGFMLDITDRKQAEQEREQLLEREKAARADAESANRMKDEFLATLSHELRTPLNAILGWTQLLRNRKFDEATTARALETIERNTKSLAQLIEDVLDVSRIIRGTLHLSIHRIKLVPLVEAAIDTVRPAAEAKEINIKCKFDPEVGIVVGDTNRLQQVVWNLLSNAVKFTSKGGSVDVQLERIESSVQIRVSDTGVGIAAEFLPHVFERFRQADSSSTRSHGGLGLGLAIVRHLVELHGGTVSVESLGVGQGATFIVNLPMKAVYVEANTAEQPSSLVDVPEANNYLPRLDDLRVLIVDDEADARHLLTTILGQYGAQVIAAASACEALLALQQFRPHILVSDIGMPQQDGYALIRQVRALPTDQGGRIPAVALTAYARAEDRTQALLAGFQLHVPKPVNPSELAVVVANLTGRT

SEQ ID NO: 12751 - protein, 1105 aa, Nostoc punctiforme
MPDAEKSQNQLANEKLLHRQVSKKANYSLLASGEEGMVLQLADGTIQACNATCDRILGLTTEQLVGQNLLDSKWQFLHEDGSPLPNETHPAIAAQKTGKPCLNVVCGFYKPNGQLVWLLLSSQPLFQGGVDTPFAIVTTFLDITEFKQAQLEEKGNCTEDTQQVEEESWLQPEAKSIVPLASVIDVNGSQQLWDSQRLFQQIAGTLPGILYIYDLIEQRNSYVNDEIAQGWGYTPAEIQAMGKDLFTQLLHPEDLARLPTYFERFNSAHPGEVLSFEYRIRHVNGEWRWFCSYDTVHSRTVEGFPKYLLGIAFDITERRHIEISLRQSNERFELAAAAVNCLIYDWEIHRSSVERTQGLTQVLGYTQQEAEPTFEWWQQLIHPDDQQRVNNQFMASMANGNRYSIEYRIRHKDGRYVWVQDQGFAVRDTNGQVVRVVGASADITEQQAILREQQAALRDRQQIETNLRESEERIRLATSAAELGMWFWNITTNELVWTEKCKELFGLGPEVEMSYELFLNCIHPEDRQRLNEAIARCFQEKVEYDIEYRSLWSDGSIHWIAAKGRVFYEADDQPGRMMGTAQDITGRKQIENDLRQRETQLRRLVDSNIIGIMFATPDHITEANEAFLEMVGYTREELLAGKVRRKQMTPPEYHALDEQGIEQLLTVGVCNPFEKEYIRKDGSRIPILIGGALVEKDPPSWICFILDLTPRKQLEQTLRQQTEELKQANQNKDEFLAILSHELRSPLNPILGWSSLLKSRKFDEATTNRALETIERNTQLQIKLIDELLDVSRIIRGKLNLTFATVNLASVIDAALETVRLIAESKSIQIKIQLDPNVGKVSGDYYRLQQVVGNLLSNAVKFTPPNGSVEVSLSSSGELASHSALIQVKDTGQGISPEFLPHVFEYFRQADSSRTRKFGGLGLGLAIVRNLVELHGGTVTAASPGEGQGAIFTVRLPVMKESRGDEETGEGREKLNSLAIAGLRILIVDDDADTREFLHFFLQQNGALTTVAASVTEALAVIVKTIPDVLISDLGMPEMDGYSLIKLLRAMPKEEGGEIPAIALTAYAGESDRNRVLAAGFQKHLAKPVKPTELIISIADLVSQR

SEQ ID NO: 12752 - protein, 192 aa, Cephalotaxus fortunei
DDHGEVISEIRKSDLEPYLGLHYPATDIPQASRFLFMKNRVRMICDCYAPPAKVVEDKRLPRELNLCGSTLRAPHGCHAQYMANMSSIASLVMAVIINEKEEEQGESDGQQQQKGRRLWGLVVRHHTSPRFVPFPLRYACEFLMQVFGIQLNKEVELAAQLKEKHILRTQTLLCDMLLRDAPVGIVTQKPNI

SEQ ID NO: 12753 - protein, 193 aa, Cephalotaxus fortunei
DDHGEVISEIVRSDLEPYLGLHYPATDIPQAARFLFMKNRVRMICDCGAPPVRVVEDKRLPREVSLCGSPLRAPHGCHTGYMTNMGSIASLVMAVVIDEKEEGGGDTNGQHEQKKGRRLWGLVVCHHTTPRFVQFPLRYACEFLMQVFGIQLNKEVDLAVQLREKHILRTQTMLCDMLLRDAPLGIIRQKPNI

SEQ ID NO: 12754 - protein, 1268 aa, Vibrio cholerae
MKSLISVPKFSLRSWLMSLWLPLGLLVIGYFVATSKVDQQQQTQAKRISDAVTVRLNLIAAGVQEKVTLYQYGLRGIRTAVMLLSPEHFDYNDMQAYTQARDYKREFPGARGFGLIIKVEPNQTAAFLDRMAAERPSYNFQIRQLTPHQDSLFVITYIEPEQNNREAVGVDIGSEAMRRKAALDAAFNNDVRLTAPITLVQANERAQQGFLILMPVYKTTTVPQDSRQRLEHLFGWSYATILINDVLNSVAGLENDVFLQISDITEQTPIEFFSQEVKDTYDAALQQKLNLSVFGRQWQLSLTPTNRFINELQLRSGTSLFFEVMAVSTILAFGVYLLQLMLMRRSQLIRHKQELASIAEQTLLKANAELEQQVALRTAEISRVNILQRSILSSAGYAIIATDEEGIITAFNPAAEKLLGYRAEEVLFQQTPSIFHLPAEVEHHAAKLTTELGSNIAVGFETLVAKARLGQTDNARWTYLTKTGEQVQVKLNVSALKDEQGQLAGFLSIAFDLTKQLKYEAELAQAKEQAESANKAKSEFLANMSHEIRTPMNGVLGLLQLVANSTLDQRQADYIEKAYSAAKSLLTLLNDILDFSKIEAGKLELDPHPFSLTDLMQDIGLVFSSSAEQKGLEVLYDVTADVPEHLLGDSFRIKQVLINLVGNAIKFTDKGEILISIRSQSLPEGEINLSFSIKDTGIGITLEQQNALFSGFQQADSSISRRYGGTGLGLAISKRLVNLMGGEIGVESEFGCGSTFSFNVVVRNAEKRAIQNSQTFTRSNEKLSVLIVDDNDSSRIILQGIAVSLGWQAKIASDAQEASLLVKQAHRDSTRYDVVFVDWRMPGKDGLTFARELRELHSSVVSLIVMITAHGKELLDEQNNDYERYLDGFLIKPVTKNMMLQAVKSVVFGDLDLSLPTSPLPHELPLQGISLLLVEDNLTNQLVASELLQQLGATIKIASSGEEALEMLESTAEHFDMVLMDIQMPGMDGYQTTREIRKLPRHQLLPIIAITAHAMSDDIAACLAAGMQDHIAKPFDLNELTTKILSHHKAEKAPHVKQVNKSNLNFDQAALAFCQQHHIELEAAVQRLGYSLTIYVNVLKQFEQDLRQALQQLEDKTLTRRNARLLFHSLKGAAGTLGFSNLAKLTARLEDELREHSDDGYQVDNNVLDILKLTLNTATDLVKLLQVEQQIATAQAPVSRTEQAAQLMTLKQHLNLANMAALPLYQQLAPSLQAQTPELNKELEEALVNLTFEQAVVIVDKMLSQFKE

SEQ ID NO: 12755 - protein, 857 aa, Vibrio cholerae
MNIRPSQIKHKQRIASFITHAVVVVMGVLIVSVLFQSYQISSRLMAQEGQRTSVQTSSLIQSLFDFRLAALRIHQDSTAKNASLINALVSRDSSRLDEFFSSVDELELSNAPDLRFISSHDNILWDDGNASFYGIAQQELNKLIRRVAISGNWHLVQTPSEGKSVHILMRRSSLIEAGTGQVVGYLYVGIVLNDNFALLENIRSGSNSENLVLAVDTTPLVSTLKGNEPYSLDYVVHSAKDAMRDSFIVGQTFLEVESVPTYLCVYSIQTNQNVLTLRDNFYFWMAFALISMIGVSIASRWWLQKRIQREIETLMNYTHKLMDLDTKSEFIGSKIYEFDYFGRTLEQSFRRLANKEKQFEDLFNFALSPTMLWNTSGRLIRMNPSAQIQFLREDAQNHFLFEILERQLLPTITNAAQGNNPSDVTTEVDGRVYRWNLSPIMVEGQIISIITQGQDITTIAEAEKQSQAARREAEESARVRAEFLAKMSHELRTPLNGVLGVSQLLKRTPLNDEQREHVAVLCSSGEHLLAVLNDILDFSRLEQGKFRIQKNEFRLKELVCAIDRIYRPLCNEKGLELVVNSNITTAAIVRSDQIRINQILFNLLNNAIKFTHQGSIRVELQLIEGDPLAQLVIQVVDTGIGIREQDLTVIFEPFMQAESTTTREYGGSGLGLTIVHSLVEMLSGQLHVSSEYGIGTRFEIQLPIELVEKPDAPQQLLPAPDPQPLFDKTLRVLLVEDNHTNAFIAQAFCRKYGLDVSWVTDGLQAIEELKIHDYDLVLMDNQLPYLDGVETTRTIKKVLHLPVVVYACTADGLEETRQAFFHAGAEYVLVKPLKEQTLHKALEHFKHHHGQKNAGLN

SEQ ID NO: 12756 - protein, 859 aa, Vibrio harveyi
MTTTRSNIKKRRSLATLITKIIILVLAPIILGIFIQSYYFSKQIIWQEVDRTKQQTSALIHNIFDSHFAAIQIHHDSNSKSEVIRDFYTDRDTDVLNFFFLSIDQSDPSHTPEFRFLTDHKGIIWDDGNAHFYGVNDLILDSLANRVSFSNNWYYINVMTSIGSRHMLVRRVPILDPSTGEVLGFSFNAVVLDNNFALMEKLKSESNVDNVVLVANSVPLANSLIGDEPYNVADVLQRKSSDKRLDKLLVIETPIVVNAVTTELCLLTVQDNQSVVTLQIQHILAMLASIIGMIMIALMSREWIESKVSAQLESLMSYTRSAREEKGFERFGGSDIEEFDHIGSTLESTFEELEAQKKSFRDLFNFALSPIMVWSEESVLIQMNPAARKELVIEDDHEIMHPVFQGFKEKLTPHLKMAAQGATLTGVNVPIGNKIYRWNLSPIRVDGDISGIIVQGQDITTLIEAEKQSNIARREAEKSAQARADFLAKMSHEIRTPINGILGVAQLLKDSVDTQEQKNQIDVLCHSGEHLLAVLNDILDFSKIEQGKFNIQKHPFSFTDTMRTLENIYRPICTNKGVELVIENELDPNVEIFTDQVRLNQILFNLVSNAVKFTPIGSIRLHAELEQFYGAENSVLVVELTDTGIGIESDKLDQMFEPFVQEESTTTREYGGSGLGLTIVKNLVDMLEGDVQVRSSKGGGTTFVITLPVKDRERVLRPLEVSQRIKPEALFDESLKVLLVEDNHTNAFILQAFCKKYKMQVDWAKDGLDAMELLSDTTYDLILMDNQLPHLGGIETTHEIRQNLRLGTPIYACTADTAKETSDAFMAAGANYVMLKPIKENALHEAFVDFKQRFLVERT

SEQ ID NO: 12757 - protein, 190 aa, Huperzia selago
DEHGEVVAEIRRSDLEPYLGLHYPATDIPQASRFLFMKNRVRMIVDCTAAPVKVIQDKELRQPLSLAGSTLRAPHGCHSQYMSNMGSTASLAMAVIINDNDEERSSAVSVQKGRKLWGLVVCHHSTPRAVPFPLRSACEFLMQAFGLQLNMEVELSAQVKEKHILRTQTPLCDMLLRDAPIGIVSQSPNI

SEQ ID NO: 12758 - protein, 190 aa, Huperzia selago
DEHGEVVAEIRRSDLEPYLGLHYPATDIPQASRFLFMKNRVRMICDFSDPPVNVVQDKDLRQPISLAGSTLRAPHGCHSKYMRNMGSIASLVMAVVINDSEETQNERTQKPKGRKLWGLVVCHHTLPRAVPFPLRSACEFLMQVFGLQINMELELAAQFKEKHILRTQTLLCDMLLQDAPIGIVSQSPNI

SEQ ID NO: 12759 - protein, 192 aa, Larix decidua
DEHREVVAEMRRPDLEPYLGLHYPATDIPQASRFLFMKNRVRMICDCCAPPVKVIQDKRLRQPLSLCGSTLRAPHGCRGQYMVNMGSIASLVMSVTTNENGDDSEDIGQRQPQKGRRLWGLVVCHHTSPRVIPFPLRYACEFLMQVFGIHLNKEVELAAQLREKHILRVQTVLCDMLLRDAPVGIVSQTPNI

SEQ ID NO: 12760 - protein, 191 aa, Larix decidua
DDHGEVISEIRRSDLEPYLGLHYPATGIPQASRFLFMRNGVRMICDCCAPPITVIQDKRLPRDLSFCGSTLRAPHGCHAQYMANMGSIASLVMAVVISEKEEDADSDGQIQQKGRRLWGLVVCHHTSPRYVPFPLRYACEFLMQVFGIHLNKEVELAVQMSEKRILRTQTLLCDMLLRDAPLGIVSQKPNI

SEQ ID NO: 12761 - protein, 423 aa, Smilax rotundifolia
SGKPFYAIVHRVTGCLIIDFEPVTPTEVPMPAAGALQSYKLAAKAIAKLQSLPGGSMEGLCSTVVQEVFELTGYDRVMAYKFHEDDHGEVFAEITKPGLEPYRGLHYPATDIPQAARFLFMKNKVRMISDCRAKPVKVYQDEKLPFDITFCGSTLRAPHSCHLQYMENMNSIASLVMVVVINEGEEDEEQGQQQHNRKRLWGLVVCHHESPRFVPFPLRYACEFLMQVFAIHVNKEFELENQIREKNILRTQTLLCDMLLRDSDPLGIVTQSPNIMDLVKCDGAALLYENEIWQIGLTPTESQIREIAFWFAEFHADSTGLSTDSLYDAGYPGAVALGDTVSGMAAARITSTDILFWFRAHTAAEIRWGGAKHDPSDKDDGKRMHPRSSFNAFLEVVKGRSLPWNNYEIDAIHSLQLILRGTL

SEQ ID NO: 12762 - protein, 394 aa, Smilax rotundifolia
DLEPVNPADVPVTAAGALKSYKLAAKAISRLQSLPSRNISLLCDVLVREVSELTGYDRVMAYKFHEDEHGEVISECRRSDLEPYLGLHYPATDIPQASRFLFMKNKVRMICDCSAASVKVIQDKKLAQPLSLGGSTLRAPHGCHAQYMANMGSIASLVMSVTINEDDEEMDGDQQQKGRKLWGLVVCHHTSPRFVPFPPRYACEFLLQVFGIQLNKEVELAAQAKGKHIFWMQTLLCDMLLRDAPIGIFTQSPNVMDLVKCDGAALYYRKQFWLLGITPTEAQIKDIVAWLLECHDGTTGLSTDSLTEAGYPGSSALGNAICGMAAIKITSKDFIFWFRSHTSKDIRWGGAKHEPADRDDESQKMHPRSSFKAFLEVVKLRSLPWEDMEMDAIQ

SEQ ID NO: 12763 - protein, 396 aa, Hedycarya angustifolia
DLEPVNPADVPVTAAGALKSYKLAAKAISKLQSLPSGNISVLCDVLVREVSELTGYDRVMAYKFHDDEHGEVIAECRRSNLEPYLGLHYPATDIPQASRFLFMKNKVRMICDCSAPPVKVIQDKSLAQPLSLGGSTLRAPHGCHAQYMANMGSIASLVMSVTINEDDDETSSGSEQQQQKGRKLWGLVVCHHTSPRFVPFPLRYACEFLIQVFGIQLNKEVELAAQMREKHILRTQTVLCDMLLLDAPVGIITKTPNVMDLVKCDGAALYYLNQFWLLGTTPTEAQIRDIVSWLQEYHNGSTGLSTDSLMEANYPGAFVLGDAVCGMAAVRITSKDFLFWFRSHTAKEIKWGGAKHNIVDKDDDGRKMHPRSSFKAFLEVVKRRSLPWEDIEMDAI

SEQ ID NO: 12764 - protein, 106 aa, Hedycarya angustifolia
QAARFLFMKNKVRMICDCHAKPVKVYQDEKLPFDLTFCGSTLRAPHSCHLQYMENMSSIASLVMAVVINEGEEEEESPEPTQQQPLQKKKKLWGLVVCHNTTPRFV

SEQ ID NO: 12765 - protein, 394 aa, Zizania aquatica
EPARTEDPALSIAGAVQSQKLAVRAISRLQALPGGDVKLLCETVVEHVRELTGYDRVMVYRFHEDEHGEVVAESRRNDLEPYLGLHYPSTDIPQASRFLFRQNRVRMIADCHSAPVRVIQDPALPQPLCLVGSTLRAPHGCHAQYMANMGSIASLVMAVIISSAGDDEHNMARGGIPSAMKLWGLVVCHHTSPRCIPFPLRYACEFLMQAFGLQLNMELQLAHQLSEKHILRTQTLLCDMLLRDSPTGIVTQSPSIMDLVKCDGAALFYHGKYCRLGVTPTEAQIKDIIEWLTVCHGDSTGLSTDSLADAGYPGAATLGDAVSGMAVAYITPSDYLFWFRSHTAKEIKWGGAKHHPEDKDDGQRMHPRSSFQAFLEVVKSKSLPWENAEMDAIH

SEQ ID NO: 12766 - protein, 554 aa, Asparagus falcatus
PYEVPMTAAGALQSYKLAAKAISRLESLPGGSMEKLCNAVVEEVFELTGYDRAMAYRFHEDDHGEVFSEVTKPGLEPYLGLHYPATDIPQAARFLFMKSKVRMICDCRAKPVRVLQDEKLPFDITFCGSTLRAPHSCHLQYMENMNSIASLVMAVVVNEGGEDEGEGEAGQASSPAQQQQGLRRKRLWGLVVCHNESPRFVPFPLRYACQFLMQVFAIHVNKEFELEHQIREKNILRTQTLLCDILLREAGPLGIVTARSPNVTDLVRCDGAALLYEDKIWRLGRTPTDSEIRDIAYWLVEYHADSTGLSTDSLLEAGYPGAFALGDLVCGLAAARINSRDILFWFRSHTAAEVRWGGAKHDPSDEDDGRRMHPRSSFKAFLEVVKTRSLPWSDYEMDAIHSLQLILRGSFNDVKKSEGLDSRMRSLRVEGMEELQAVTNEMVRLIETATVPILAVDVDGVINGWNLKIAELTGLPVDEAIGKHLLALVEDSSVAQVRRMLLLALQGTEEQNVEFQMKTCGDRGDDGPVILVVNACASRDLNEKVVGVCFVAIT

SEQ ID NO: 12767 - protein, 444 aa, Asparagus falcatus
  unsure (1)..(444): unsure at all Xaa locations
DLEPVNPADVPVTAAGALKSYKLAAKAISRLQSLPSGNISLLCDVLVREISDLTGYDRXMAYKFHDDEHGEVIAECRRSDLEPYIGLHYPATDIPQASRFLFMKSKVRMICDCSAHPVKIIQDKKLAQPLSLCGSTLRAPHGCHAQYMSNMGSVASLVMSVTINEDDDESGSDQKGRKLWGLVVCHHTNPRFVPLPLRYACEFLLQVFGIQLNKEVELAAQAREKHILRTQTVLCDMLLRDAPIGIFTQTPNVMDIVKCDGAALYYKNQIWVLGTTPAEPQIRDISAWLLECHDGSTGLSTDSLMEAGYPGALALGDAVCGMAAIKITDKDFIFWFRSHTAKEIKWGGAKHEPANRDDEGRKLQPRSSFKAFLEVVKWRSLPWEDIEMDSVHSLQLILRESLHNEIAVGESKTLVNSTLDDMKRIQGMDELRAVTNEMVRLIET

SEQ ID NO: 12768 - protein, 465 aa, Spathiphyllum clevelandii
SGKPFYAIMHRIDMGLIIDLEPVNPADVPVTAAGALKSYKLAAKAISRLQSLPSGNISLLCDVLVREVRELTGYGRVMAYKFHEDEHGEVVSECRRPDLEPYLGLHYPATDIPQASRFLFMKNKVRMICDCSAQPIKVIQDKRLAQPLSLCGSTLRAPHGCHAQYMANMGSIGSLVMSVTINEDEDDDSSGEQQQKGRKLWGLVVCHHTSPRFVPFPLRYACEFLMQVFAIQLNKEVELAAQTREKHILRTQTLLCDMLLRDTPVGIFTQSPNVMDLVKCDGAALYYQNQFWLLRVTPTEAQIRDIAAWLIDCHNSTTGLSTDSLSEAGYPSASTLGDAVCGMAAIKITSRDLIFWFRSHTAKEIKWGGAKHDPVDRDDDGRKMHPRSSFKAFLEVVKRRSLPWEDVEMDAIHSLQLILRSSLQDENVRDNSKGIVNVISDDAKKIQGVDELRTVANEMVRLMET

SEQ ID NO: 12769 - protein, 392 aa, Spathiphyllum clevelandii
PYEVPMTAAGALQSYKLAAKAISRLQSLPGGSMQKLTDTVVQEVFELTGYDRVMAYKFHEDDHGEVVSEITKPGLEPYLGLHYPATDIPQAARFLFMKNKVRMICDCHAKPVKVYQDEKLTFDLTFCGSTLRAPHSCHLLYMKNMNSIASLVMAVVVNEGDEEDEPLEHGQQLQQKRKRLWGLVVCHNTTPRFVPFLLRYACEFLMQVFAIHVNKEFELENQIREKNILRTQTLLCDMLLRDAPLGIISRSPNIKDLVKCDGAALLYQNKIWRLGSTPTESHIRDIASWLSEYHMDSTGLSTDSLYDAGYPGALTLGDAVCGMAAARITSKDILFWFRSHTAAEIRWGGAKHDPADEDDGRRMHPRSSFKAFLEVVKTRCLPWKDYEMEAIH

SEQ ID NO: 12770 - protein, 393 aa, Arundinella hirta
EPARTEDPALSIAGAVQSQKLAVRAISRLQALPGGDVKLLCDTVVEHVRELTGYDRVMVYRFHEDEHGEVVAENRRDNLEPYLGLHYPATDIPQASRFLFRQNRVRMIADCHATPVRVIQDPGLSQQLCLVGSTLRAPHGCHAQYMANMGSIASLVMAVIISSGGDDEQTGRGGISSAMKLWGLVVCHHTSPRCIPFPLRYACEFLMQAFGLQLNMELQLAHQLSEKHILRTQTLLCDMLLRDSPTGIVTQSPSIMDLVKCDGAALYYHGKYYPLGVTPTESQIKDIIEWLTVCHGDSTGLSTDSLADAGYLGAVALGDAVCGMTVAYITPSDYLFWFRSHTAKEIKWGGAKHHPEDKDDGQRMHPRSSFKAFLEVVKSRSLPWENAEMDAIH

SEQ ID NO: 12771 - protein, 393 aa, Capillipedium parviflorum
EPARTEDPALSIAGAVQSQKLAVRAISRLQALPGGDVKLLCDTVVEHVRELTGYDRVMVYRFHEGEHGEVVAESRRDNLEPYLGLHYPATDIPQASRFLFRQNRVRMIADCHATPVRVIQDPGLSQPLCLVGSTLRAPHGCHAQYMANMGSIASLVMAVIISSGGDDEQTGRGGISSAMKLWGLVVCHHTSPRCIPFPLRYACEFLMQAFGLQLNMELQLAHQLSEKHILRTQTLLCDMLLRDSPTGIVTQSPSIMDLVKCDGAALYYHGKYYPLGVTPTESQIKDIIEWLTVCHGDSTGLSTDSLADAGYLGAAALGDAVCGMAVAYITPSDYLFWFRSHTAKEIKWGGAKHHPEDKDDGQRMHPRSSFKAFLEVVKSRSLPWENAEMDAIH

SEQ ID NO: 12772 - protein, 376 aa, Chrysopogon fulvus
ALSMAGAVQSQKLAVRAISRLQALPGGDVKLLCDTVVEHVRELTGYDRVMVYRFHEDEHGEVVAESRRDNLEPYLGLHYPSTDIPQASRFLFRQNRVRMIADCHATPVRVIQDPGLSQPLCLVGSTLRAPHGCHAQYMANMGSIASLVMAVIISSGGDDEQTGRGGISSAMKLWGLVVCHHTSPRCIPFPLRYACEFLMQAFGLQLNMELQLAHQLSEKHILRTQTLLCDMLLRDSPTGIVTQSPSIMDLVKCDGAALYYHGKYYPLGVTPTESQIKDIIEWLTVCHGDSTGLSTDSLADAGYLGAAALGDAVCGMAVAYITPSDYLFWFRSHTAKEIKWGGAKHHPEDKDDGQRMHPRSSFKAFLEVVKSRSLPW

SEQ ID NO: 12773 - protein, 376 aa, Chrysopogon gryllus
  unsure (1)..(376): unsure at all Xaa locations
ALSIAGAVQSQKLAVRSISRLQALPGGDVKLLCDTVVEHVRELTGYDRVMVYRFHEDEHGEVVAESRRDNLEPYLGLHYPATDIPQASRFLFRQNRVRMIADCHATPVRVIQDPGLSQPLCLVGSTLRAPHGCHAQYMANMGSIASLVMAVVISSGGDDEQTGRGGISSAMKLWGLVVCHHTSPRCIPFPLRYACEFLTQAFGLHLNMELQLAHQLSEKHILRTQTLVCDMLLRDSPSGXVTQSPSIMDLVKCDGAALYYHGKYYPLGVTPTESQIKDIIEWLTVCHGDSTGLSTDSLADAGYLGAAALGDAVCGMAVAYITPSDYLFWFRSHTAKEIKWGGAKHHPEDKDDGQRMHPRSSFKAFLEVVKSRSLPW

SEQ ID NO: 12774 - protein, 376 aa, Coix aquatica
ALSIAGAVQSQKLAVRAISRLQALPGGDVKLLCDTVVEHVRELTGYDRVMVYRFHEDEHGEVVAESRRDNLEPYLGLHYPATDIPQASRFLFRQNRVRMIADCHATPVRVIQDPGLSQPLCLVGSTLRSPHGCHAQYMANMGSIASLVMAVIISSGGDDEQTSRGGISSAMKLWGLVVCHHTSPRCIPFPLRYACEFLMQAFGLQLNMELQLAHQLSEKHILRTQTLLCDMLLRDSPTGIVTQSPSIMDLVKCDGAALYYHGKYYPLGVTPTESQIKDIIEWLTVCHGDSTGLSTDSLADAGYLGAAALGDAVCGMAVAYITPNDYLFWFRSHTAKEIKWGGAKHHPEDKDDGQRMHPRSSFKAFLEVVKSRSLPW

SEQ ID NO: 12775 - protein, 376 aa, Cymbopogon flexuosus
ALSIAGAVQSQKLAVRAISRLQALPGGDVKLLCDTVVEHVRELTGYDRVMVYRFHEDEHGEVVAESRRDNLEPYLGSHYPATDIPQASRFLFRQNRVRMIADCHATPVRVIQDPGLSQPLCLVGSTLRAPHGCHAQYMANMGSIASLVMAVIISSGGDDEQTGRGGISSAMKLWGLVVCHHTSPRCIPFPLRYACEFLMQAFGLQLNMELQLAHQLSEKHILRTQTLLCDMLLRDSPTGIVTQSPSIMDLVKCDGAALYYHGKYYPLGVTPTESQIKDIIEWLTVCHGDSTGLSTDSLADAGYLGAAALGDAVCGMAVAYITPSDYLFWFRSHTAKEIKWGGAKHHPEDKDDGRRMHPRSSFKAFLEVVKSRSLPW

SEQ ID NO: 12776 - protein, 393 aa, Danthoniopsis dinteri
EPASTEDPALSIAGAVQSQKLAVRAISRLQALPGGDVKLLCDTVVEHVRELTGYDRVMVYRFHEDEHGEVVAESRRDDLEPYIGLHYPATDIPQASRFLFRQNRVRMIADCHATPVKVIQDTGLSQPLCLVGSTLRAPHGCHAQYMANMGSIASLVMAVIISSGGDDEQTARGGISSAMKLLGLVVCHHTSPRFIPFPLRYACEFLMQAFGLQLNMELQLAHQLSEKHILRTQTLLCDMLLRDSPTGIVTQSPSIMDLVKCDGAALYYHGKYYPLGVTPTESQIKDIIEWLTLCHGDSTGLSTDSLADAGYLGAAALGDAVCGMAVAYITPSDYLFWFRSHTAKEIKWGGAKHHPEDKDDGQRMHPRSSFKAFLEVVKSRSLPWENAEMDAIH

SEQ ID NO: 12777 - protein, 333 aa, Dichanthium aristatum
TGYDRVMVYRFHEDEHGEVVAESRRDNLEPYLGLHYPATDIPQASRFLFRQNRVRMIADCHATPVRVIQDPGLSQPLCSVGSTLRAPHGCHAQYMANMGSIASLVMAVIISSGGDDEQTGRGGISSSMKLWGLVVCHHTSPRCIPFPLRYACEFLMQAFGLQLNMELQLAHQLSEKHILRTQTLLCDMLLRDSPTGIVTQSPSIMDLVKCDGAALYYHGKYYPLGVTPTESQIKDIIEWLTVCHGDSTGLSTDSLADAGYLGAAALGDAVCGMAVAYITPSDYLFWFRSHTAKEIKWGGAKHHPEDKDDGQRMHPRSSFKAFLEVVKSRSLPW

SEQ ID NO: 12778 - protein, 394 aa, Eremitis sp. nov. Doell
EPARTEDPALSIAGSVQSQKLAVRAISRLQALPGGDVKLLCDTVVENIRELTGYDRVMGYRFHDDEHGEVVAESRRADLEPYLGLHYPATDIPQASRFLFRQNRVRMIADCHTAPVRVIQDPVLPQPLCLVGSTLRAPHGCHAQYMANMGSIASLVMAVIISSGGDDSHNSSRGGIPSAMKLWGLVVCHHTSPRCIPFPLRYACEFLMQAFGLQLNMELQLAHQLSEKHILRTQTLLCDMLLRDSPTGIVTQSPSIMDLVKCDGAALYYHGKYYPLGVTPTEAQIKDIIEWLTLCHGDSTGLSTDSLADAGYPGAAALGDAVCGMAVAYITPSDYLFWFRSHTAKEIKWGGAKHHPEDKDDGQRMHPRSSFKAFLEVVKSRSLPWESAEMDAIH

SEQ ID NO: 12779 - protein, 394 aa, Glyceria grandis
EPARTEDPALSIAGAVQSQKLAVRAISRLQALPGGDVKLLCETVVEHVRELTGYDRVMVYKFHDDEHGEVLAESRRPDLEPYLGLHYPATDIPQASRFLFRQNRVRMIADCHAAPVRVIQDPAMPQPLCLVGSTLRSPHGCHAQYMANMGSIASLVMAVIISSGGDDEHHMARGNIPSAMKLWGLVVCHHTSPRCIPFPLRYACEFLMQAFGLQLNMELQLAHQLSEKHILRTQTLLCDMLLRDSPTGIVTQSPSIMDLVKCDGAALYYHGKYYPLGVTPTEAQIKDIIEWLTACHGDSTGLSTDSLADAGYSGATVLGDAVCGMAVACITPSDYLFWFRSHTAKEIKWGGAKHHPEDKDDGQRMHPRSSFKAFLEVVKSRSLPWENAEMDAIH

SEQ ID NO: 12780 - protein, 376 aa, Heteropogon contortus
ALSIAGAVQSQKLAVRAISRLQALPGGDVKLLCDTVVEHVRELTGYDRVMVYRFHEDEHGEVVAESRRDNLEPYLGLHYPATDIPQASRFLFRQNRVRMIADCHATPVRVIQDPGLSQPLCLVGSTLRAPHGCHAQYMANMGSIASLVMAVIISSGGEGEQTARGGISSAMKLWGLVVCHHTSPRCIPFPLRYACEFLMQAFGLQLNMELQLAHQLSEKHILRTQTLLCDMLLRDSPTGIVTQSPSIMDLVKCDGAALYYHGKYYPLGVTPTEAQIKDIIEWLTVCHGDSTGLSTDSLADAGYLGAVALGDAVCGMAVAYITPSDYLFWFRSHTAKEIKWGGAKHHPEDKDDGQRMHPRSSFKAFLEVVKSRSLPW

SEQ ID NO: 12781 - protein, 394 aa, Melica cupanii
EPARTEDPALSIAGAVQSQKLAVRAISRLQALPGGDVKLLCDTVVEHVRELTGYDRVMVYKFHDDEHGEVLAESRRADLEPYLGLHYPATDIPQASRFLFRQNRVRMIADCGAAPVTVIQDPAMPQPLCLVGSTLRSPHGCHAQYMANMGSIASLVMAVIISSGGDDDHNMVRGSIPSAMKLWGLVVCHHTSPRCIPFPLRYACEFLMQAFGLELNMELQLAHQMSEKHILRTQTLLCDMLLRDSPTGIVTQSPSIMDLVKCDGAALFYHGKYYPLGVTPTEAQIKDIIEWLTVCHGDSTGLSTDSLADAGYSGATALGDAVCGMAVAYITPSDYLFWFRSHTAKEIKWGGAKHHPEDKDDGQRMHPRPSFKAFLEVVKSRSIPWENAEMDAIH

SEQ ID NO: 12782 - protein, 353 aa, Pennisetum alopecuroides
TGYDRVMVYRFHEDQHGEVVAECRRDNLEPYLGLHYPATDIPQASRFLFRQNRVRMIADCHATPVRVIQYPGLSQPLCLVGSTLRAPHECHAQYMANMGSIASLVMAVIISSGGDDEQTTRGGISSAMKLWGLVVCHHTSPRFIPFPLRYACEFLMQAFGLQLNMELQLAHQLSEKHILRTQTLLCDMLLRDSPTGIVTQSPSIMDLVKCDGAALYYHGKYYPLGVTPTESQIKDIIEWLTVCHGDSTGLSTDSLADAGYHGAAALGDAVCGMAVAYITPSDCLFWFRSHTAKEIKWGGAKHHPEDKDDGQRMHPRSSFKAFLEVVKSRSLPWENAEMDAIHSLQLILRDSFR

SEQ ID NO: 12783 - protein, 332 aa, Schizachyrium scoparium
GYDRVMVYRFHEDEHGEVVAESKRDNLDPYLGLHYPATDIPQASRFLFRQNRVRMIADCHATPVRVIQDPGLSQPLCLVGSTLRAPHGCHAQYMANMGSIASLVMAVIISSGGDDEQTGRGGISSAMKLWGLVVCHHTSPRCIPFPLRYACEFLMQAFGLQLNMELQLAHQLSEKHILRTQTLLCDMLLRDSPTGIVTQSPSIMDLVKCDGAALYYHGKYYPLGITPTESQIKDIIEWLTVCHGDSTGLSTDSLADAGYLGAAALGDAVCGMAVAYITPSDYLFWFRSHTAKEIKWGGAKHHPEDKDDGQRMHPRSSFKAFLEVVKSRSLPW

SEQ ID NO: 12784 - protein, 194 aa, Azolla filiculoides
DEHGEVLAEIRRSDLEPYLGLHYPATDIPQASRFLFMKNRVRLIYDCRAQPVRIIQDKELRQPLSLAGSTLRAPHSCHGQYMANMGTIASLVMAVVVNDNDEETGNRTQRLNPSPKMRRLWGLVVCHHTTPRVVPFALRSACEFLMQVFGLQLNMELELAAQMREKHILRTQTLLCDMLLRDAPIGIVSESPSI

SEQ ID NO: 12785 - protein, 195 aa, Azolla filiculoides
DEHGEVVAEIRKPDMAPYLGLHYPATDIPQASRFLFMKNRLRMVCDSRAVAVRVIQDTQLRQPLSLAGSTLRAPHGCHSQYMENMGSIASLVMAVIVNDKGECGSSNGSNPQPRPRMRKLWGLVVCHHTTMRAVPFPLRSACELLVQVFGLQLNMEAELAAQMRDKHILRTQMLLCDMLLRDAPIGIVSKSDPNI

SEQ ID NO: 12786 - protein, 374 aa, Celastrus orbiculatus
ALSIAGAVQSQKLAVRAISRLQSLPGGDIKLLCDTVVESVRDLTSYDRVMVYKFHEDEHGEVVAESKRPDLEPYFGLHYPSTDIPQASRFLFKQNRVRMIADCRASPVGVIQDDGLMQPLCLVGSTLRAPHGCHAQYMENMGSRSSLAMAVIIHGNDEEVIGGRNATRLWGLVVCHHTSVRCIPFLLRYACEFLMQAFGLQLNMELQLAAQLSEKHVLKTQTLLCDMFLRDSPTGIVTQSLSIMDLVKCDGAALYYQGKYYPIGVTPAEAQIKDIVEWLLTFHGDSTGLSTDSLADAGYPGAALLGDAVCGMAVAYITKRDFLFWFRSHTTKEIKWGGAKHHPEDKDDGQRMHPRSSFKAFLEVVKSRSLPWEN
